United States Patent Application Publication US 2026/0240958 A1 - sequence listing, part 8

SEQ ID NO: 9009 - RNA, 8787 nt, synthetic construct
  source 1..8787: mol_type = other RNA
aggaaataagagagaaaagaagagtaagaagaaatataagagccaccatggcccctaagaagaagcgtaaagtgagccggatgaaccacgaccaggagttcgacccccctaaggtgtaccctcccgtccccgccgagaagagaaagcccatccgggtcctgagcctgttcgatggcatcgccaccggtctgctggtgctgaaggacctgggcatccaggtggataggtacattgcctccgaggtgtgcgaggactccatcaccgtgggaatggtgcgtcatcagggcaagatcatgtacgtgggcgacgtgcggagcgtgacacagaagcatatccaggagtggggccctttcgacctggtgatcggcggcagcccttgcaatgacctgagcatcgtgaacccagcccggaagggcctgtacgagggaaccggcagactgttcttcgagttttacagactgctgcacgacgcccggcctaaggaaggcgacgaccggcccttcttttggctgttcgagaatgtggtggccatgggagtcagcgacaagcgggatattagccggttcctggagagcaaccccgtgatgatcgatgccaaggaagtgagcgccgcccaccgggccagatacttctggggcaatctgcctggcatgaacagacccctggccagcaccgtgaacgacaagctggagctgcaggagtgcctggagcacggccggatcgccaagttcagcaaggtgagaaccatcaccacccgaagcaacagcatcaaacaaggcaaggaccagcactttcctgtgttcatgaacgagaaggaggacatcctgtggtgtaccgagatggagagagtgttcgggttcccagtccactacacagatgtcagcaacatgtctagactggccagacagagactgctgggaagaagctggtccgtccctgtgatcagacacctgttcgcccctctgaaggagtacttcgcctgcgtgagcagcggcaacagcaacgccaacagccggggccccagcttctctagcggcctggtgccactgtccctgagagggagccacatgggccccatggagatctacaaaaccgtgagcgcctggaagcggcagcctgtgcgcgtgctgagcctgtttcggaatatcgataaagtcctgaaaagcctgggattcctggagagcggctctggctccggcggtggcaccctgaagtacgtggaggatgtgacaaacgtggtcagacgggatgtggagaagtggggccccttcgatctggtgtacggcagcacccaacccctgggcagctcttgtgaccggtgccctggctggtacatgtttcagttccaccggatcctgcagtacgccctgccgagacaggagtcccagcggccattcttttggattttcatggacaacttgctgctgaccgaggatgaccaggaaactaccactcggttcctgcagaccgaagccgtgaccctgcaggacgtgagaggccgggactaccagaacgccatgcgggtgtggtccaacatccctggactgaaaagcaagcacgcacctctgacccctaaagaagaggagtacctgcaggcccaggtgcggagcagaagcaagctggacgcccctaaggtggatctgctggtgaagaattgcctcctgcccctgagagagtacttcaagtatttcagccagaatagtctgcccctgggaggcagcggcggcggcagccaggagagcgtgaccttcagggacgtggccatcgacttcagccaggaggagtgggagtggctgcagcccgcccagagggacctgtacaggcacgtgatgctggagaactacagccacctggtgagcctgggcctgaacatcagcaagccctacgtggtgagcctgctggagcagggcaagggcccctggctggagaagggcgacgtgaggagggacctgttcagcgagagccacggcgagggcggcccaagcagcggcgcccctcctcccagcggcggcaggcggcccaagcagcggcgcccctcctcccagcggcggcagcccagccggctccccaacctctaccgaggagggcacctctgagtccgccacccccgagagcggccctggcacctccaccgagcccagcgagggcagcgcacccggcagccctgccggcagccccacctccacagaggagggaaccagcaccgagcccagcgaaggcagcgccccaggcaccagcaccgagcctagtgagcaggagattaaacggatcaacaagatcagaagaagacttgtgaaagacagcaacaccaagaaggccggcaagacaggccccatgaaaaccctgctggttagagtgatgacacccgatctgagagagcggctggaaaacctgagaaagaagcctgaaaatatcccccagcccatcagcaatacatctagagccaacctgaataagctgctgaccgattacaccgaaatgaagaaggcgatcctgcatgtgtactgggaagagttccagaaggaccctgtgggcctgatgagccgggtggcccagcctgccagcaagaagatcgatcagaacaagctgaaacctgagatggacgagaagggcaacctgaccaccgccggctttgcctgctctcagtgtggccagcccctgttcgtgtacaagctggagcaggtgtctgagaagggcaaggcttacaccaactacttcggacggtgcaatgtggccgagcacgaaaagctgatcctgctggcccagctgaagcccgagaaggatagcgacgaagccgtgacatatagcctgggaaagtttgggcagagggccctggatttctacagcattcatgtgaccaaggagtccacccaccccgtgaagcccctggcccagatcgccggaaacagatacgcctccggacctgtgggaaaggccctgagcgacgcatgtatgggcacaatcgcctccttcctgtctaagtaccaggacatcatcatcgaacaccagaaggtggtgaagggcaaccagaagagactggagagcctgcgggagctggccggcaaggaaaacctggaataccctagcgtgaccctgccacctcagcctcacaccaaggagggcgttgatgcctacaacgaagtgatcgcccgggtgcgaatgtgggtgaacctgaacctgtggcagaagctgaagctaagcagagatgatgccaagcctctgctgagactgaagggattcccttcctttcctctggtcgagagacaggccaacgaagtggactggtgggacatggtgtgtaacgtgaagaagctgatcaacgagaaaaaggaggatggcaaggtgttttggcagaatctggctggctacaagagacaggaagccctgagaccatacctgagcagcgaggaagatcggaagaagggaaagaaattcgctcggtaccagctgggcgacctgctgctgcacctggaaaagaagcacggcgaggactggggaaaggtgtacgacgaggcctgggagcggattgacaagaaagtggaaggcctgagcaagcacatcaagctggaagaggaacggagaagcgaggacgcccagagcaaggccgccctgaccgactggctgcgggctaaggccagcttcgtgatcgagggcctgaaggaggccgacaaggacgagttctgcagatgcgagctgaagctgcagaagtggtacggggacctgcggggaaagcccttcgccatcgaagccgagaacagcatcctggacatcagcggcttcagcaagcagtacaactgtgccttcatctggcagaaggacggcgtgaagaagctgaacctgtacctgatcatcaactacttcaagggcggcaagctgcggttcaagaagatcaaacctgaagccttcgaagccaacagattctacaccgtgatcaacaaaaagagcggcgagatcgtgcccatggaggtgaacttcaacttcgacgaccccaacctgatcatcctgcctctggcctttggcaagagacagggcagagaattcatctggaacgacctgctgtccctggaaaccggcagcctgaagctggccaacggaagagtgatcgagaagacactgtacaacagaagaacccggcaggatgagcctgccctgttcgtggccctgaccttcgagcggcgggaggtcctggactcctccaatatcaaaccaatgaacctgatcggcgtggcaagaggcgaaaacatccccgccgtgatcgccctgaccgaccccgagggctgcccactgagccggtttaaggatagcctgggaaacccaacccacatcctgagaatcggcgagagctataaggagaagcagcggaccatccaggccaagaaggaggtggagcagcggagagccggcggctacagccggaagtacgccagcaaagccaagaatctggcagacgatatggtgagaaacaccgctagagatctgctgtactacgccgtgacccaggatgccatgctgatcttcgccaacctgagccggggcttcggccggcagggcaagcggaccttcatggccgagagacagtacacacggatggaggactggctgaccgccaagctggcctacgagggcctgagcaagacctacctgtccaagacactggcccagtacacctccaagacatgcagcaactgtgggtttaccatcaccagcgccgactacgacagggtgctggagaagctgaagaagacagcaacaggctggatgaccacaattaacggcaaggagctgaaggtggagggccagattacctactacaacagatacaagagacagaacgtagtcaaggacctgtccgtcgagctggatagactgagcgaagaatctgtgaacaacgacatctcctcctggacaaagggcagaagcggagaagctctgagcctcctgaagaaaagattctcccatagacccgtgcaggagaagttcgtgtgcctgaactgcggcttcgagacacacgcagccgagcaagccgccctgaacatcgccagatcctggctgttcctgcggagccaggagtacaagaaataccagacaaacaagacaaccggcaacaccgataagagagccttcgtcgagacctggcagtccttttaccggaagaagcttaaggaggtgtggaaacctgccgtgcggtctggcggatctggcggaggctccaccagccccaagaaaaagagaaaagtctaagctgccttctgcggggcttgccttctggccatgcccttcttctctcccttgcacctgtacctcttggtctttgaataaagcctgagtaggaaggctagcaaaaaaaaaaaaaaaaaaaaaaaaaaaaaaaaaaaaaaaaaaaaaaaaaaaaaaaaaaaaaaaaaaaaaaaaaaaaaaaagcccagccggctccccaacctctaccgaggagggcacctctgagtccgccacccccgagagcggccctggcacctccaccgagcccagcgagggcagcgcacccggcagccctgccggcagccccacctccacagaggagggaaccagcaccgagcccagcgaaggcagcgccccaggcaccagcaccgagcctagtgagcaggagattaaacggatcaacaagatcagaagaagacttgtgaaagacagcaacaccaagaaggccggcaagacaggccccatgaaaaccctgctggttagagtgatgacacccgatctgagagagcggctggaaaacctgagaaagaagcctgaaaatatcccccagcccatcagcaatacatctagagccaacctgaataagctgctgaccgattacaccgaaatgaagaaggcgatcctgcatgtgtactgggaagagttccagaaggaccctgtgggcctgatgagccgggtggcccagcctgccagcaagaagatcgatcagaacaagctgaaacctgagatggacgagaagggcaacctgaccaccgccggctttgcctgctctcagtgtggccagcccctgttcgtgtacaagctggagcaggtgtctgagaagggcaaggcttacaccaactacttcggacggtgcaatgtggccgagcacgaaaagctgatcctgctggcccagctgaagcccgagaaggatagcgacgaagccgtgacatatagcctgggaaagtttgggcagagggccctggatttctacagcattcatgtgaccaaggagtccacccaccccgtgaagcccctggcccagatcgccggaaacagatacgcctccggacctgtgggaaaggccctgagcgacgcatgtatgggcacaatcgcctccttcctgtctaagtaccaggacatcatcatcgaacaccagaaggtggtgaagggcaaccagaagagactggagagcctgcgggagctggccggcaaggaaaacctggaataccctagcgtgaccctgccacctcagcctcacaccaaggagggcgttgatgcctacaacgaagtgatcgcccgggtgcgaatgtgggtgaacctgaacctgtggcagaagctgaagctaagcagagatgatgccaagcctctgctgagactgaagggattcccttcctttcctctggtcgagagacaggccaacgaagtggactggtgggacatggtgtgtaacgtgaagaagctgatcaacgagaaaaaggaggatggcaaggtgttttggcagaatctggctggctacaagagacaggaagccctgagaccatacctgagcagcgaggaagatcggaagaagggaaagaaattcgctcggtaccagctgggcgacctgctgctgcacctggaaaagaagcacggcgaggactggggaaaggtgtacgacgaggcctgggagcggattgacaagaaagtggaaggcctgagcaagcacatcaagctggaagaggaacggagaagcgaggacgcccagagcaaggccgccctgaccgactggctgcgggctaaggccagcttcgtgatcgagggcctgaaggaggccgacaaggacgagttctgcagatgcgagctgaagctgcagaagtggtacggggacctgcggggaaagcccttcgccatcgaagccgagaacagcatcctggacatcagcggcttcagcaagcagtacaactgtgccttcatctggcagaaggacggcgtgaagaagctgaacctgtacctgatcatcaactacttcaagggcggcaagctgcggttcaagaagatcaaacctgaagccttcgaagccaacagattctacaccgtgatcaacaaaaagagcggcgagatcgtgcccatggaggtgaacttcaacttcgacgaccccaacctgatcatcctgcctctggcctttggcaagagacagggcagagaattcatctggaacgacctgctgtccctggaaaccggcagcctgaagctggccaacggaagagtgatcgagaagacactgtacaacagaagaacccggcaggatgagcctgccctgttcgtggccctgaccttcgagcggcgggaggtcctggactcctccaatatcaaaccaatgaacctgatcggcgtggcaagaggcgaaaacatccccgccgtgatcgccctgaccgaccccgagggctgcccactgagccggtttaaggatagcctgggaaacccaacccacatcctgagaatcggcgagagctataaggagaagcagcggaccatccaggccaagaaggaggtggagcagcggagagccggcggctacagccggaagtacgccagcaaagccaagaatctggcagacgatatggtgagaaacaccgctagagatctgctgtactacgccgtgacccaggatgccatgctgatcttcgccaacctgagccggggcttcggccggcagggcaagcggaccttcatggccgagagacagtacacacggatggaggactggctgaccgccaagctggcctacgagggcctgagcaagacctacctgtccaagacactggcccagtacacctccaagacatgcagcaactgtgggtttaccatcaccagcgccgactacgacagggtgctggagaagctgaagaagacagcaacaggctggatgaccacaattaacggcaaggagctgaaggtggagggccagattacctactacaacagatacaagagacagaacgtagtcaaggacctgtccgtcgagctggatagactgagcgaagaatctgtgaacaacgacatctcctcctggacaaagggcagaagcggagaagctctgagcctcctgaagaaaagattctcccatagacccgtgcaggagaagttcgtgtgcctgaactgcggcttcgagacacacgcagccgagcaagccgccctgaacatcgccagatcctggctgttcctgcggagccaggagtacaagaaataccagacaaacaagacaaccggcaacaccgataagagagccttcgtcgagacctggcagtccttttaccggaagaagcttaaggaggtgtggaaacctgccgtgcggtctggcggatctggcggaggctccaccagccccaagaaaaagagaaaagtctaagctgccttctgcggggcttgccttctggccatgcccttcttctctcccttgcacctgtacctcttggtctttgaataaagcctgagtaggaaggctagcaaaaaaaaaaaaaaaaaaaaaaaaaaaaaaaaaaaaaaaaaaaaaaaaaaaaaaaaaaaaaaaaaaaaaaaaaaaaaaaa

SEQ ID NO: 9010 - RNA, 8787 nt, synthetic construct
  source 1..8787: mol_type = other RNA
aggaaataagagagaaaagaagagtaagaagaaatataagagccaccatggcccctaagaagaagcgtaaagtgagccggatgaaccacgaccaggagttcgacccccctaaggtgtaccctcccgtccccgccgagaagagaaagcccatccgggtcctgagcctgttcgatggcatcgccaccggtctgctggtgctgaaggacctgggcatccaggtggataggtacattgcctccgaggtgtgcgaggactccatcaccgtgggaatggtgcgtcatcagggcaagatcatgtacgtgggcgacgtgcggagcgtgacacagaagcatatccaggagtggggccctttcgacctggtgatcggcggcagcccttgcaatgacctgagcatcgtgaacccagcccggaagggcctgtacgagggaaccggcagactgttcttcgagttttacagactgctgcacgacgcccggcctaaggaaggcgacgaccggcccttcttttggctgttcgagaatgtggtggccatgggagtcagcgacaagcgggatattagccggttcctggagagcaaccccgtgatgatcgatgccaaggaagtgagcgccgcccaccgggccagatacttctggggcaatctgcctggcatgaacagacccctggccagcaccgtgaacgacaagctggagctgcaggagtgcctggagcacggccggatcgccaagttcagcaaggtgagaaccatcaccacccgaagcaacagcatcaaacaaggcaaggaccagcactttcctgtgttcatgaacgagaaggaggacatcctgtggtgtaccgagatggagagagtgttcgggttcccagtccactacacagatgtcagcaacatgtctagactggccagacagagactgctgggaagaagctggtccgtccctgtgatcagacacctgttcgcccctctgaaggagtacttcgcctgcgtgagcagcggcaacagcaacgccaacagccggggccccagcttctctagcggcctggtgccactgtccctgagagggagccacatgggccccatggagatctacaaaaccgtgagcgcctggaagcggcagcctgtgcgcgtgctgagcctgtttcggaatatcgataaagtcctgaaaagcctgggattcctggagagcggctctggctccggcggtggcaccctgaagtacgtggaggatgtgacaaacgtggtcagacgggatgtggagaagtggggccccttcgatctggtgtacggcagcacccaacccctgggcagctcttgtgaccggtgccctggctggtacatgtttcagttccaccggatcctgcagtacgccctgccgagacaggagtcccagcggccattcttttggattttcatggacaacttgctgctgaccgaggatgaccaggaaactaccactcggttcctgcagaccgaagccgtgaccctgcaggacgtgagaggccgggactaccagaacgccatgcgggtgtggtccaacatccctggactgaaaagcaagcacgcacctctgacccctaaagaagaggagtacctgcaggcccaggtgcggagcagaagcaagctggacgcccctaaggtggatctgctggtgaagaattgcctcctgcccctgagagagtacttcaagtatttcagccagaatagtctgcccctgggaggcagcggcggcggcgaggagctgcccgtggtgttcgaggacgtggccgtgtacttcaccagggaggagtggggcgccctggacaagtggcagaaggagctgtacagggacgtgatgcagatgaactacgagctgctggccagcctgggccccgccgccgccaagcccgacctgatcagcaagctggagaggagggccgccccctggatcagggacccccacggccccaagctgggcaagggcaggcccccccccggcggcggcccaagcagcggcgcccctcctcccagcggcggcaggcggcccaagcagcggcgcccctcctcccagcggcggcagcccagccggctccccaacctctaccgaggagggcacctctgagtccgccacccccgagagcggccctggcacctccaccgagcccagcgagggcagcgcacccggcagccctgccggcagccccacctccacagaggagggaaccagcaccgagcccagcgaaggcagcgccccaggcaccagcaccgagcctagtgagcaggagattaaacggatcaacaagatcagaagaagacttgtgaaagacagcaacaccaagaaggccggcaagacaggccccatgaaaaccctgctggttagagtgatgacacccgatctgagagagcggctggaaaacctgagaaagaagcctgaaaatatcccccagcccatcagcaatacatctagagccaacctgaataagctgctgaccgattacaccgaaatgaagaaggcgatcctgcatgtgtactgggaagagttccagaaggaccctgtgggcctgatgagccgggtggcccagcctgccagcaagaagatcgatcagaacaagctgaaacctgagatggacgagaagggcaacctgaccaccgccggctttgcctgctctcagtgtggccagcccctgttcgtgtacaagctggagcaggtgtctgagaagggcaaggcttacaccaactacttcggacggtgcaatgtggccgagcacgaaaagctgatcctgctggcccagctgaagcccgagaaggatagcgacgaagccgtgacatatagcctgggaaagtttgggcagagggccctggatttctacagcattcatgtgaccaaggagtccacccaccccgtgaagcccctggcccagatcgccggaaacagatacgcctccggacctgtgggaaaggccctgagcgacgcatgtatgggcacaatcgcctccttcctgtctaagtaccaggacatcatcatcgaacaccagaaggtggtgaagggcaaccagaagagactggagagcctgcgggagctggccggcaaggaaaacctggaataccctagcgtgaccctgccacctcagcctcacaccaaggagggcgttgatgcctacaacgaagtgatcgcccgggtgcgaatgtgggtgaacctgaacctgtggcagaagctgaagctaagcagagatgatgccaagcctctgctgagactgaagggattcccttcctttcctctggtcgagagacaggccaacgaagtggactggtgggacatggtgtgtaacgtgaagaagctgatcaacgagaaaaaggaggatggcaaggtgttttggcagaatctggctggctacaagagacaggaagccctgagaccatacctgagcagcgaggaagatcggaagaagggaaagaaattcgctcggtaccagctgggcgacctgctgctgcacctggaaaagaagcacggcgaggactggggaaaggtgtacgacgaggcctgggagcggattgacaagaaagtggaaggcctgagcaagcacatcaagctggaagaggaacggagaagcgaggacgcccagagcaaggccgccctgaccgactggctgcgggctaaggccagcttcgtgatcgagggcctgaaggaggccgacaaggacgagttctgcagatgcgagctgaagctgcagaagtggtacggggacctgcggggaaagcccttcgccatcgaagccgagaacagcatcctggacatcagcggcttcagcaagcagtacaactgtgccttcatctggcagaaggacggcgtgaagaagctgaacctgtacctgatcatcaactacttcaagggcggcaagctgcggttcaagaagatcaaacctgaagccttcgaagccaacagattctacaccgtgatcaacaaaaagagcggcgagatcgtgcccatggaggtgaacttcaacttcgacgaccccaacctgatcatcctgcctctggcctttggcaagagacagggcagagaattcatctggaacgacctgctgtccctggaaaccggcagcctgaagctggccaacggaagagtgatcgagaagacactgtacaacagaagaacccggcaggatgagcctgccctgttcgtggccctgaccttcgagcggcgggaggtcctggactcctccaatatcaaaccaatgaacctgatcggcgtggcaagaggcgaaaacatccccgccgtgatcgccctgaccgaccccgagggctgcccactgagccggtttaaggatagcctgggaaacccaacccacatcctgagaatcggcgagagctataaggagaagcagcggaccatccaggccaagaaggaggtggagcagcggagagccggcggctacagccggaagtacgccagcaaagccaagaatctggcagacgatatggtgagaaacaccgctagagatctgctgtactacgccgtgacccaggatgccatgctgatcttcgccaacctgagccggggcttcggccggcagggcaagcggaccttcatggccgagagacagtacacacggatggaggactggctgaccgccaagctggcctacgagggcctgagcaagacctacctgtccaagacactggcccagtacacctccaagacatgcagcaactgtgggtttaccatcaccagcgccgactacgacagggtgctggagaagctgaagaagacagcaacaggctggatgaccacaattaacggcaaggagctgaaggtggagggccagattacctactacaacagatacaagagacagaacgtagtcaaggacctgtccgtcgagctggatagactgagcgaagaatctgtgaacaacgacatctcctcctggacaaagggcagaagcggagaagctctgagcctcctgaagaaaagattctcccatagacccgtgcaggagaagttcgtgtgcctgaactgcggcttcgagacacacgcagccgagcaagccgccctgaacatcgccagatcctggctgttcctgcggagccaggagtacaagaaataccagacaaacaagacaaccggcaacaccgataagagagccttcgtcgagacctggcagtccttttaccggaagaagcttaaggaggtgtggaaacctgccgtgcggtctggcggatctggcggaggctccaccagccccaagaaaaagagaaaagtctaagctgccttctgcggggcttgccttctggccatgcccttcttctctcccttgcacctgtacctcttggtctttgaataaagcctgagtaggaaggctagcaaaaaaaaaaaaaaaaaaaaaaaaaaaaaaaaaaaaaaaaaaaaaaaaaaaaaaaaaaaaaaaaaaaaaaaaaaaaaaaagcccagccggctccccaacctctaccgaggagggcacctctgagtccgccacccccgagagcggccctggcacctccaccgagcccagcgagggcagcgcacccggcagccctgccggcagccccacctccacagaggagggaaccagcaccgagcccagcgaaggcagcgccccaggcaccagcaccgagcctagtgagcaggagattaaacggatcaacaagatcagaagaagacttgtgaaagacagcaacaccaagaaggccggcaagacaggccccatgaaaaccctgctggttagagtgatgacacccgatctgagagagcggctggaaaacctgagaaagaagcctgaaaatatcccccagcccatcagcaatacatctagagccaacctgaataagctgctgaccgattacaccgaaatgaagaaggcgatcctgcatgtgtactgggaagagttccagaaggaccctgtgggcctgatgagccgggtggcccagcctgccagcaagaagatcgatcagaacaagctgaaacctgagatggacgagaagggcaacctgaccaccgccggctttgcctgctctcagtgtggccagcccctgttcgtgtacaagctggagcaggtgtctgagaagggcaaggcttacaccaactacttcggacggtgcaatgtggccgagcacgaaaagctgatcctgctggcccagctgaagcccgagaaggatagcgacgaagccgtgacatatagcctgggaaagtttgggcagagggccctggatttctacagcattcatgtgaccaaggagtccacccaccccgtgaagcccctggcccagatcgccggaaacagatacgcctccggacctgtgggaaaggccctgagcgacgcatgtatgggcacaatcgcctccttcctgtctaagtaccaggacatcatcatcgaacaccagaaggtggtgaagggcaaccagaagagactggagagcctgcgggagctggccggcaaggaaaacctggaataccctagcgtgaccctgccacctcagcctcacaccaaggagggcgttgatgcctacaacgaagtgatcgcccgggtgcgaatgtgggtgaacctgaacctgtggcagaagctgaagctaagcagagatgatgccaagcctctgctgagactgaagggattcccttcctttcctctggtcgagagacaggccaacgaagtggactggtgggacatggtgtgtaacgtgaagaagctgatcaacgagaaaaaggaggatggcaaggtgttttggcagaatctggctggctacaagagacaggaagccctgagaccatacctgagcagcgaggaagatcggaagaagggaaagaaattcgctcggtaccagctgggcgacctgctgctgcacctggaaaagaagcacggcgaggactggggaaaggtgtacgacgaggcctgggagcggattgacaagaaagtggaaggcctgagcaagcacatcaagctggaagaggaacggagaagcgaggacgcccagagcaaggccgccctgaccgactggctgcgggctaaggccagcttcgtgatcgagggcctgaaggaggccgacaaggacgagttctgcagatgcgagctgaagctgcagaagtggtacggggacctgcggggaaagcccttcgccatcgaagccgagaacagcatcctggacatcagcggcttcagcaagcagtacaactgtgccttcatctggcagaaggacggcgtgaagaagctgaacctgtacctgatcatcaactacttcaagggcggcaagctgcggttcaagaagatcaaacctgaagccttcgaagccaacagattctacaccgtgatcaacaaaaagagcggcgagatcgtgcccatggaggtgaacttcaacttcgacgaccccaacctgatcatcctgcctctggcctttggcaagagacagggcagagaattcatctggaacgacctgctgtccctggaaaccggcagcctgaagctggccaacggaagagtgatcgagaagacactgtacaacagaagaacccggcaggatgagcctgccctgttcgtggccctgaccttcgagcggcgggaggtcctggactcctccaatatcaaaccaatgaacctgatcggcgtggcaagaggcgaaaacatccccgccgtgatcgccctgaccgaccccgagggctgcccactgagccggtttaaggatagcctgggaaacccaacccacatcctgagaatcggcgagagctataaggagaagcagcggaccatccaggccaagaaggaggtggagcagcggagagccggcggctacagccggaagtacgccagcaaagccaagaatctggcagacgatatggtgagaaacaccgctagagatctgctgtactacgccgtgacccaggatgccatgctgatcttcgccaacctgagccggggcttcggccggcagggcaagcggaccttcatggccgagagacagtacacacggatggaggactggctgaccgccaagctggcctacgagggcctgagcaagacctacctgtccaagacactggcccagtacacctccaagacatgcagcaactgtgggtttaccatcaccagcgccgactacgacagggtgctggagaagctgaagaagacagcaacaggctggatgaccacaattaacggcaaggagctgaaggtggagggccagattacctactacaacagatacaagagacagaacgtagtcaaggacctgtccgtcgagctggatagactgagcgaagaatctgtgaacaacgacatctcctcctggacaaagggcagaagcggagaagctctgagcctcctgaagaaaagattctcccatagacccgtgcaggagaagttcgtgtgcctgaactgcggcttcgagacacacgcagccgagcaagccgccctgaacatcgccagatcctggctgttcctgcggagccaggagtacaagaaataccagacaaacaagacaaccggcaacaccgataagagagccttcgtcgagacctggcagtccttttaccggaagaagcttaaggaggtgtggaaacctgccgtgcggtctggcggatctggcggaggctccaccagccccaagaaaaagagaaaagtctaagctgccttctgcggggcttgccttctggccatgcccttcttctctcccttgcacctgtacctcttggtctttgaataaagcctgagtaggaaggctagcaaaaaaaaaaaaaaaaaaaaaaaaaaaaaaaaaaaaaaaaaaaaaaaaaaaaaaaaaaaaaaaaaaaaaaaaaaaaaaaa

SEQ ID NO: 9011 - RNA, 8787 nt, synthetic construct
  source 1..8787: mol_type = other RNA
aggaaataagagagaaaagaagagtaagaagaaatataagagccaccatggcccctaagaagaagcgtaaagtgagccggatgaaccacgaccaggagttcgacccccctaaggtgtaccctcccgtccccgccgagaagagaaagcccatccgggtcctgagcctgttcgatggcatcgccaccggtctgctggtgctgaaggacctgggcatccaggtggataggtacattgcctccgaggtgtgcgaggactccatcaccgtgggaatggtgcgtcatcagggcaagatcatgtacgtgggcgacgtgcggagcgtgacacagaagcatatccaggagtggggccctttcgacctggtgatcggcggcagcccttgcaatgacctgagcatcgtgaacccagcccggaagggcctgtacgagggaaccggcagactgttcttcgagttttacagactgctgcacgacgcccggcctaaggaaggcgacgaccggcccttcttttggctgttcgagaatgtggtggccatgggagtcagcgacaagcgggatattagccggttcctggagagcaaccccgtgatgatcgatgccaaggaagtgagcgccgcccaccgggccagatacttctggggcaatctgcctggcatgaacagacccctggccagcaccgtgaacgacaagctggagctgcaggagtgcctggagcacggccggatcgccaagttcagcaaggtgagaaccatcaccacccgaagcaacagcatcaaacaaggcaaggaccagcactttcctgtgttcatgaacgagaaggaggacatcctgtggtgtaccgagatggagagagtgttcgggttcccagtccactacacagatgtcagcaacatgtctagactggccagacagagactgctgggaagaagctggtccgtccctgtgatcagacacctgttcgcccctctgaaggagtacttcgcctgcgtgagcagcggcaacagcaacgccaacagccggggccccagcttctctagcggcctggtgccactgtccctgagagggagccacatgggccccatggagatctacaaaaccgtgagcgcctggaagcggcagcctgtgcgcgtgctgagcctgtttcggaatatcgataaagtcctgaaaagcctgggattcctggagagcggctctggctccggcggtggcaccctgaagtacgtggaggatgtgacaaacgtggtcagacgggatgtggagaagtggggccccttcgatctggtgtacggcagcacccaacccctgggcagctcttgtgaccggtgccctggctggtacatgtttcagttccaccggatcctgcagtacgccctgccgagacaggagtcccagcggccattcttttggattttcatggacaacttgctgctgaccgaggatgaccaggaaactaccactcggttcctgcagaccgaagccgtgaccctgcaggacgtgagaggccgggactaccagaacgccatgcgggtgtggtccaacatccctggactgaaaagcaagcacgcacctctgacccctaaagaagaggagtacctgcaggcccaggtgcggagcagaagcaagctggacgcccctaaggtggatctgctggtgaagaattgcctcctgcccctgagagagtacttcaagtatttcagccagaatagtctgcccctgggaggcagcggcggcggcatgatgttccaggacagcgtggccttcgaggacgtggccgtgaccttcacccaggaggagtgggccctgctggaccccagccagaagaacctgtacagggacgtgatgcaggagaccttcaggaacctggccagcatcggcaagaagtggaagccccagaacatctacgtggagtacgagaacctgaggaggaacctgaggatcgtgggcgagaggctgttcgagagcaaggagggccaccagggcggcccaagcagcggcgcccctcctcccagcggcggcaggcggcccaagcagcggcgcccctcctcccagcggcggcagcccagccggctccccaacctctaccgaggagggcacctctgagtccgccacccccgagagcggccctggcacctccaccgagcccagcgagggcagcgcacccggcagccctgccggcagccccacctccacagaggagggaaccagcaccgagcccagcgaaggcagcgccccaggcaccagcaccgagcctagtgagcaggagattaaacggatcaacaagatcagaagaagacttgtgaaagacagcaacaccaagaaggccggcaagacaggccccatgaaaaccctgctggttagagtgatgacacccgatctgagagagcggctggaaaacctgagaaagaagcctgaaaatatcccccagcccatcagcaatacatctagagccaacctgaataagctgctgaccgattacaccgaaatgaagaaggcgatcctgcatgtgtactgggaagagttccagaaggaccctgtgggcctgatgagccgggtggcccagcctgccagcaagaagatcgatcagaacaagctgaaacctgagatggacgagaagggcaacctgaccaccgccggctttgcctgctctcagtgtggccagcccctgttcgtgtacaagctggagcaggtgtctgagaagggcaaggcttacaccaactacttcggacggtgcaatgtggccgagcacgaaaagctgatcctgctggcccagctgaagcccgagaaggatagcgacgaagccgtgacatatagcctgggaaagtttgggcagagggccctggatttctacagcattcatgtgaccaaggagtccacccaccccgtgaagcccctggcccagatcgccggaaacagatacgcctccggacctgtgggaaaggccctgagcgacgcatgtatgggcacaatcgcctccttcctgtctaagtaccaggacatcatcatcgaacaccagaaggtggtgaagggcaaccagaagagactggagagcctgcgggagctggccggcaaggaaaacctggaataccctagcgtgaccctgccacctcagcctcacaccaaggagggcgttgatgcctacaacgaagtgatcgcccgggtgcgaatgtgggtgaacctgaacctgtggcagaagctgaagctaagcagagatgatgccaagcctctgctgagactgaagggattcccttcctttcctctggtcgagagacaggccaacgaagtggactggtgggacatggtgtgtaacgtgaagaagctgatcaacgagaaaaaggaggatggcaaggtgttttggcagaatctggctggctacaagagacaggaagccctgagaccatacctgagcagcgaggaagatcggaagaagggaaagaaattcgctcggtaccagctgggcgacctgctgctgcacctggaaaagaagcacggcgaggactggggaaaggtgtacgacgaggcctgggagcggattgacaagaaagtggaaggcctgagcaagcacatcaagctggaagaggaacggagaagcgaggacgcccagagcaaggccgccctgaccgactggctgcgggctaaggccagcttcgtgatcgagggcctgaaggaggccgacaaggacgagttctgcagatgcgagctgaagctgcagaagtggtacggggacctgcggggaaagcccttcgccatcgaagccgagaacagcatcctggacatcagcggcttcagcaagcagtacaactgtgccttcatctggcagaaggacggcgtgaagaagctgaacctgtacctgatcatcaactacttcaagggcggcaagctgcggttcaagaagatcaaacctgaagccttcgaagccaacagattctacaccgtgatcaacaaaaagagcggcgagatcgtgcccatggaggtgaacttcaacttcgacgaccccaacctgatcatcctgcctctggcctttggcaagagacagggcagagaattcatctggaacgacctgctgtccctggaaaccggcagcctgaagctggccaacggaagagtgatcgagaagacactgtacaacagaagaacccggcaggatgagcctgccctgttcgtggccctgaccttcgagcggcgggaggtcctggactcctccaatatcaaaccaatgaacctgatcggcgtggcaagaggcgaaaacatccccgccgtgatcgccctgaccgaccccgagggctgcccactgagccggtttaaggatagcctgggaaacccaacccacatcctgagaatcggcgagagctataaggagaagcagcggaccatccaggccaagaaggaggtggagcagcggagagccggcggctacagccggaagtacgccagcaaagccaagaatctggcagacgatatggtgagaaacaccgctagagatctgctgtactacgccgtgacccaggatgccatgctgatcttcgccaacctgagccggggcttcggccggcagggcaagcggaccttcatggccgagagacagtacacacggatggaggactggctgaccgccaagctggcctacgagggcctgagcaagacctacctgtccaagacactggcccagtacacctccaagacatgcagcaactgtgggtttaccatcaccagcgccgactacgacagggtgctggagaagctgaagaagacagcaacaggctggatgaccacaattaacggcaaggagctgaaggtggagggccagattacctactacaacagatacaagagacagaacgtagtcaaggacctgtccgtcgagctggatagactgagcgaagaatctgtgaacaacgacatctcctcctggacaaagggcagaagcggagaagctctgagcctcctgaagaaaagattctcccatagacccgtgcaggagaagttcgtgtgcctgaactgcggcttcgagacacacgcagccgagcaagccgccctgaacatcgccagatcctggctgttcctgcggagccaggagtacaagaaataccagacaaacaagacaaccggcaacaccgataagagagccttcgtcgagacctggcagtccttttaccggaagaagcttaaggaggtgtggaaacctgccgtgcggtctggcggatctggcggaggctccaccagccccaagaaaaagagaaaagtctaagctgccttctgcggggcttgccttctggccatgcccttcttctctcccttgcacctgtacctcttggtctttgaataaagcctgagtaggaaggctagcaaaaaaaaaaaaaaaaaaaaaaaaaaaaaaaaaaaaaaaaaaaaaaaaaaaaaaaaaaaaaaaaaaaaaaaaaaaaaaaagcccagccggctccccaacctctaccgaggagggcacctctgagtccgccacccccgagagcggccctggcacctccaccgagcccagcgagggcagcgcacccggcagccctgccggcagccccacctccacagaggagggaaccagcaccgagcccagcgaaggcagcgccccaggcaccagcaccgagcctagtgagcaggagattaaacggatcaacaagatcagaagaagacttgtgaaagacagcaacaccaagaaggccggcaagacaggccccatgaaaaccctgctggttagagtgatgacacccgatctgagagagcggctggaaaacctgagaaagaagcctgaaaatatcccccagcccatcagcaatacatctagagccaacctgaataagctgctgaccgattacaccgaaatgaagaaggcgatcctgcatgtgtactgggaagagttccagaaggaccctgtgggcctgatgagccgggtggcccagcctgccagcaagaagatcgatcagaacaagctgaaacctgagatggacgagaagggcaacctgaccaccgccggctttgcctgctctcagtgtggccagcccctgttcgtgtacaagctggagcaggtgtctgagaagggcaaggcttacaccaactacttcggacggtgcaatgtggccgagcacgaaaagctgatcctgctggcccagctgaagcccgagaaggatagcgacgaagccgtgacatatagcctgggaaagtttgggcagagggccctggatttctacagcattcatgtgaccaaggagtccacccaccccgtgaagcccctggcccagatcgccggaaacagatacgcctccggacctgtgggaaaggccctgagcgacgcatgtatgggcacaatcgcctccttcctgtctaagtaccaggacatcatcatcgaacaccagaaggtggtgaagggcaaccagaagagactggagagcctgcgggagctggccggcaaggaaaacctggaataccctagcgtgaccctgccacctcagcctcacaccaaggagggcgttgatgcctacaacgaagtgatcgcccgggtgcgaatgtgggtgaacctgaacctgtggcagaagctgaagctaagcagagatgatgccaagcctctgctgagactgaagggattcccttcctttcctctggtcgagagacaggccaacgaagtggactggtgggacatggtgtgtaacgtgaagaagctgatcaacgagaaaaaggaggatggcaaggtgttttggcagaatctggctggctacaagagacaggaagccctgagaccatacctgagcagcgaggaagatcggaagaagggaaagaaattcgctcggtaccagctgggcgacctgctgctgcacctggaaaagaagcacggcgaggactggggaaaggtgtacgacgaggcctgggagcggattgacaagaaagtggaaggcctgagcaagcacatcaagctggaagaggaacggagaagcgaggacgcccagagcaaggccgccctgaccgactggctgcgggctaaggccagcttcgtgatcgagggcctgaaggaggccgacaaggacgagttctgcagatgcgagctgaagctgcagaagtggtacggggacctgcggggaaagcccttcgccatcgaagccgagaacagcatcctggacatcagcggcttcagcaagcagtacaactgtgccttcatctggcagaaggacggcgtgaagaagctgaacctgtacctgatcatcaactacttcaagggcggcaagctgcggttcaagaagatcaaacctgaagccttcgaagccaacagattctacaccgtgatcaacaaaaagagcggcgagatcgtgcccatggaggtgaacttcaacttcgacgaccccaacctgatcatcctgcctctggcctttggcaagagacagggcagagaattcatctggaacgacctgctgtccctggaaaccggcagcctgaagctggccaacggaagagtgatcgagaagacactgtacaacagaagaacccggcaggatgagcctgccctgttcgtggccctgaccttcgagcggcgggaggtcctggactcctccaatatcaaaccaatgaacctgatcggcgtggcaagaggcgaaaacatccccgccgtgatcgccctgaccgaccccgagggctgcccactgagccggtttaaggatagcctgggaaacccaacccacatcctgagaatcggcgagagctataaggagaagcagcggaccatccaggccaagaaggaggtggagcagcggagagccggcggctacagccggaagtacgccagcaaagccaagaatctggcagacgatatggtgagaaacaccgctagagatctgctgtactacgccgtgacccaggatgccatgctgatcttcgccaacctgagccggggcttcggccggcagggcaagcggaccttcatggccgagagacagtacacacggatggaggactggctgaccgccaagctggcctacgagggcctgagcaagacctacctgtccaagacactggcccagtacacctccaagacatgcagcaactgtgggtttaccatcaccagcgccgactacgacagggtgctggagaagctgaagaagacagcaacaggctggatgaccacaattaacggcaaggagctgaaggtggagggccagattacctactacaacagatacaagagacagaacgtagtcaaggacctgtccgtcgagctggatagactgagcgaagaatctgtgaacaacgacatctcctcctggacaaagggcagaagcggagaagctctgagcctcctgaagaaaagattctcccatagacccgtgcaggagaagttcgtgtgcctgaactgcggcttcgagacacacgcagccgagcaagccgccctgaacatcgccagatcctggctgttcctgcggagccaggagtacaagaaataccagacaaacaagacaaccggcaacaccgataagagagccttcgtcgagacctggcagtccttttaccggaagaagcttaaggaggtgtggaaacctgccgtgcggtctggcggatctggcggaggctccaccagccccaagaaaaagagaaaagtctaagctgccttctgcggggcttgccttctggccatgcccttcttctctcccttgcacctgtacctcttggtctttgaataaagcctgagtaggaaggctagcaaaaaaaaaaaaaaaaaaaaaaaaaaaaaaaaaaaaaaaaaaaaaaaaaaaaaaaaaaaaaaaaaaaaaaaaaaaaaaaa

SEQ ID NO: 9012 - RNA, 8787 nt, synthetic construct
  source 1..8787: mol_type = other RNA
aggaaataagagagaaaagaagagtaagaagaaatataagagccaccatggcccctaagaagaagcgtaaagtgagccggatgaaccacgaccaggagttcgacccccctaaggtgtaccctcccgtccccgccgagaagagaaagcccatccgggtcctgagcctgttcgatggcatcgccaccggtctgctggtgctgaaggacctgggcatccaggtggataggtacattgcctccgaggtgtgcgaggactccatcaccgtgggaatggtgcgtcatcagggcaagatcatgtacgtgggcgacgtgcggagcgtgacacagaagcatatccaggagtggggccctttcgacctggtgatcggcggcagcccttgcaatgacctgagcatcgtgaacccagcccggaagggcctgtacgagggaaccggcagactgttcttcgagttttacagactgctgcacgacgcccggcctaaggaaggcgacgaccggcccttcttttggctgttcgagaatgtggtggccatgggagtcagcgacaagcgggatattagccggttcctggagagcaaccccgtgatgatcgatgccaaggaagtgagcgccgcccaccgggccagatacttctggggcaatctgcctggcatgaacagacccctggccagcaccgtgaacgacaagctggagctgcaggagtgcctggagcacggccggatcgccaagttcagcaaggtgagaaccatcaccacccgaagcaacagcatcaaacaaggcaaggaccagcactttcctgtgttcatgaacgagaaggaggacatcctgtggtgtaccgagatggagagagtgttcgggttcccagtccactacacagatgtcagcaacatgtctagactggccagacagagactgctgggaagaagctggtccgtccctgtgatcagacacctgttcgcccctctgaaggagtacttcgcctgcgtgagcagcggcaacagcaacgccaacagccggggccccagcttctctagcggcctggtgccactgtccctgagagggagccacatgggccccatggagatctacaaaaccgtgagcgcctggaagcggcagcctgtgcgcgtgctgagcctgtttcggaatatcgataaagtcctgaaaagcctgggattcctggagagcggctctggctccggcggtggcaccctgaagtacgtggaggatgtgacaaacgtggtcagacgggatgtggagaagtggggccccttcgatctggtgtacggcagcacccaacccctgggcagctcttgtgaccggtgccctggctggtacatgtttcagttccaccggatcctgcagtacgccctgccgagacaggagtcccagcggccattcttttggattttcatggacaacttgctgctgaccgaggatgaccaggaaactaccactcggttcctgcagaccgaagccgtgaccctgcaggacgtgagaggccgggactaccagaacgccatgcgggtgtggtccaacatccctggactgaaaagcaagcacgcacctctgacccctaaagaagaggagtacctgcaggcccaggtgcggagcagaagcaagctggacgcccctaaggtggatctgctggtgaagaattgcctcctgcccctgagagagtacttcaagtatttcagccagaatagtctgcccctgggaggcagcggcggcggcgacagcgtggccttcgaggacgtggccgtgaacttcacccaggaggagtgggccctgctggacaggagccagaagaagctgtacagggaggtgatgcaggagaccctgaggaacctgaccagcatcggcaagacctggagcaaccagaacgccgaggagaggcaccagaaccccaggaggaacctgaggaggctgatcggcgagaggctgttccagagcaaggagagccaccagcacgccgagggcggcccaagcagcggcgcccctcctcccagcggcggcaggcggcccaagcagcggcgcccctcctcccagcggcggcagcccagccggctccccaacctctaccgaggagggcacctctgagtccgccacccccgagagcggccctggcacctccaccgagcccagcgagggcagcgcacccggcagccctgccggcagccccacctccacagaggagggaaccagcaccgagcccagcgaaggcagcgccccaggcaccagcaccgagcctagtgagcaggagattaaacggatcaacaagatcagaagaagacttgtgaaagacagcaacaccaagaaggccggcaagacaggccccatgaaaaccctgctggttagagtgatgacacccgatctgagagagcggctggaaaacctgagaaagaagcctgaaaatatcccccagcccatcagcaatacatctagagccaacctgaataagctgctgaccgattacaccgaaatgaagaaggcgatcctgcatgtgtactgggaagagttccagaaggaccctgtgggcctgatgagccgggtggcccagcctgccagcaagaagatcgatcagaacaagctgaaacctgagatggacgagaagggcaacctgaccaccgccggctttgcctgctctcagtgtggccagcccctgttcgtgtacaagctggagcaggtgtctgagaagggcaaggcttacaccaactacttcggacggtgcaatgtggccgagcacgaaaagctgatcctgctggcccagctgaagcccgagaaggatagcgacgaagccgtgacatatagcctgggaaagtttgggcagagggccctggatttctacagcattcatgtgaccaaggagtccacccaccccgtgaagcccctggcccagatcgccggaaacagatacgcctccggacctgtgggaaaggccctgagcgacgcatgtatgggcacaatcgcctccttcctgtctaagtaccaggacatcatcatcgaacaccagaaggtggtgaagggcaaccagaagagactggagagcctgcgggagctggccggcaaggaaaacctggaataccctagcgtgaccctgccacctcagcctcacaccaaggagggcgttgatgcctacaacgaagtgatcgcccgggtgcgaatgtgggtgaacctgaacctgtggcagaagctgaagctaagcagagatgatgccaagcctctgctgagactgaagggattcccttcctttcctctggtcgagagacaggccaacgaagtggactggtgggacatggtgtgtaacgtgaagaagctgatcaacgagaaaaaggaggatggcaaggtgttttggcagaatctggctggctacaagagacaggaagccctgagaccatacctgagcagcgaggaagatcggaagaagggaaagaaattcgctcggtaccagctgggcgacctgctgctgcacctggaaaagaagcacggcgaggactggggaaaggtgtacgacgaggcctgggagcggattgacaagaaagtggaaggcctgagcaagcacatcaagctggaagaggaacggagaagcgaggacgcccagagcaaggccgccctgaccgactggctgcgggctaaggccagcttcgtgatcgagggcctgaaggaggccgacaaggacgagttctgcagatgcgagctgaagctgcagaagtggtacggggacctgcggggaaagcccttcgccatcgaagccgagaacagcatcctggacatcagcggcttcagcaagcagtacaactgtgccttcatctggcagaaggacggcgtgaagaagctgaacctgtacctgatcatcaactacttcaagggcggcaagctgcggttcaagaagatcaaacctgaagccttcgaagccaacagattctacaccgtgatcaacaaaaagagcggcgagatcgtgcccatggaggtgaacttcaacttcgacgaccccaacctgatcatcctgcctctggcctttggcaagagacagggcagagaattcatctggaacgacctgctgtccctggaaaccggcagcctgaagctggccaacggaagagtgatcgagaagacactgtacaacagaagaacccggcaggatgagcctgccctgttcgtggccctgaccttcgagcggcgggaggtcctggactcctccaatatcaaaccaatgaacctgatcggcgtggcaagaggcgaaaacatccccgccgtgatcgccctgaccgaccccgagggctgcccactgagccggtttaaggatagcctgggaaacccaacccacatcctgagaatcggcgagagctataaggagaagcagcggaccatccaggccaagaaggaggtggagcagcggagagccggcggctacagccggaagtacgccagcaaagccaagaatctggcagacgatatggtgagaaacaccgctagagatctgctgtactacgccgtgacccaggatgccatgctgatcttcgccaacctgagccggggcttcggccggcagggcaagcggaccttcatggccgagagacagtacacacggatggaggactggctgaccgccaagctggcctacgagggcctgagcaagacctacctgtccaagacactggcccagtacacctccaagacatgcagcaactgtgggtttaccatcaccagcgccgactacgacagggtgctggagaagctgaagaagacagcaacaggctggatgaccacaattaacggcaaggagctgaaggtggagggccagattacctactacaacagatacaagagacagaacgtagtcaaggacctgtccgtcgagctggatagactgagcgaagaatctgtgaacaacgacatctcctcctggacaaagggcagaagcggagaagctctgagcctcctgaagaaaagattctcccatagacccgtgcaggagaagttcgtgtgcctgaactgcggcttcgagacacacgcagccgagcaagccgccctgaacatcgccagatcctggctgttcctgcggagccaggagtacaagaaataccagacaaacaagacaaccggcaacaccgataagagagccttcgtcgagacctggcagtccttttaccggaagaagcttaaggaggtgtggaaacctgccgtgcggtctggcggatctggcggaggctccaccagccccaagaaaaagagaaaagtctaagctgccttctgcggggcttgccttctggccatgcccttcttctctcccttgcacctgtacctcttggtctttgaataaagcctgagtaggaaggctagcaaaaaaaaaaaaaaaaaaaaaaaaaaaaaaaaaaaaaaaaaaaaaaaaaaaaaaaaaaaaaaaaaaaaaaaaaaaaaaaagcccagccggctccccaacctctaccgaggagggcacctctgagtccgccacccccgagagcggccctggcacctccaccgagcccagcgagggcagcgcacccggcagccctgccggcagccccacctccacagaggagggaaccagcaccgagcccagcgaaggcagcgccccaggcaccagcaccgagcctagtgagcaggagattaaacggatcaacaagatcagaagaagacttgtgaaagacagcaacaccaagaaggccggcaagacaggccccatgaaaaccctgctggttagagtgatgacacccgatctgagagagcggctggaaaacctgagaaagaagcctgaaaatatcccccagcccatcagcaatacatctagagccaacctgaataagctgctgaccgattacaccgaaatgaagaaggcgatcctgcatgtgtactgggaagagttccagaaggaccctgtgggcctgatgagccgggtggcccagcctgccagcaagaagatcgatcagaacaagctgaaacctgagatggacgagaagggcaacctgaccaccgccggctttgcctgctctcagtgtggccagcccctgttcgtgtacaagctggagcaggtgtctgagaagggcaaggcttacaccaactacttcggacggtgcaatgtggccgagcacgaaaagctgatcctgctggcccagctgaagcccgagaaggatagcgacgaagccgtgacatatagcctgggaaagtttgggcagagggccctggatttctacagcattcatgtgaccaaggagtccacccaccccgtgaagcccctggcccagatcgccggaaacagatacgcctccggacctgtgggaaaggccctgagcgacgcatgtatgggcacaatcgcctccttcctgtctaagtaccaggacatcatcatcgaacaccagaaggtggtgaagggcaaccagaagagactggagagcctgcgggagctggccggcaaggaaaacctggaataccctagcgtgaccctgccacctcagcctcacaccaaggagggcgttgatgcctacaacgaagtgatcgcccgggtgcgaatgtgggtgaacctgaacctgtggcagaagctgaagctaagcagagatgatgccaagcctctgctgagactgaagggattcccttcctttcctctggtcgagagacaggccaacgaagtggactggtgggacatggtgtgtaacgtgaagaagctgatcaacgagaaaaaggaggatggcaaggtgttttggcagaatctggctggctacaagagacaggaagccctgagaccatacctgagcagcgaggaagatcggaagaagggaaagaaattcgctcggtaccagctgggcgacctgctgctgcacctggaaaagaagcacggcgaggactggggaaaggtgtacgacgaggcctgggagcggattgacaagaaagtggaaggcctgagcaagcacatcaagctggaagaggaacggagaagcgaggacgcccagagcaaggccgccctgaccgactggctgcgggctaaggccagcttcgtgatcgagggcctgaaggaggccgacaaggacgagttctgcagatgcgagctgaagctgcagaagtggtacggggacctgcggggaaagcccttcgccatcgaagccgagaacagcatcctggacatcagcggcttcagcaagcagtacaactgtgccttcatctggcagaaggacggcgtgaagaagctgaacctgtacctgatcatcaactacttcaagggcggcaagctgcggttcaagaagatcaaacctgaagccttcgaagccaacagattctacaccgtgatcaacaaaaagagcggcgagatcgtgcccatggaggtgaacttcaacttcgacgaccccaacctgatcatcctgcctctggcctttggcaagagacagggcagagaattcatctggaacgacctgctgtccctggaaaccggcagcctgaagctggccaacggaagagtgatcgagaagacactgtacaacagaagaacccggcaggatgagcctgccctgttcgtggccctgaccttcgagcggcgggaggtcctggactcctccaatatcaaaccaatgaacctgatcggcgtggcaagaggcgaaaacatccccgccgtgatcgccctgaccgaccccgagggctgcccactgagccggtttaaggatagcctgggaaacccaacccacatcctgagaatcggcgagagctataaggagaagcagcggaccatccaggccaagaaggaggtggagcagcggagagccggcggctacagccggaagtacgccagcaaagccaagaatctggcagacgatatggtgagaaacaccgctagagatctgctgtactacgccgtgacccaggatgccatgctgatcttcgccaacctgagccggggcttcggccggcagggcaagcggaccttcatggccgagagacagtacacacggatggaggactggctgaccgccaagctggcctacgagggcctgagcaagacctacctgtccaagacactggcccagtacacctccaagacatgcagcaactgtgggtttaccatcaccagcgccgactacgacagggtgctggagaagctgaagaagacagcaacaggctggatgaccacaattaacggcaaggagctgaaggtggagggccagattacctactacaacagatacaagagacagaacgtagtcaaggacctgtccgtcgagctggatagactgagcgaagaatctgtgaacaacgacatctcctcctggacaaagggcagaagcggagaagctctgagcctcctgaagaaaagattctcccatagacccgtgcaggagaagttcgtgtgcctgaactgcggcttcgagacacacgcagccgagcaagccgccctgaacatcgccagatcctggctgttcctgcggagccaggagtacaagaaataccagacaaacaagacaaccggcaacaccgataagagagccttcgtcgagacctggcagtccttttaccggaagaagcttaaggaggtgtggaaacctgccgtgcggtctggcggatctggcggaggctccaccagccccaagaaaaagagaaaagtctaagctgccttctgcggggcttgccttctggccatgcccttcttctctcccttgcacctgtacctcttggtctttgaataaagcctgagtaggaaggctagcaaaaaaaaaaaaaaaaaaaaaaaaaaaaaaaaaaaaaaaaaaaaaaaaaaaaaaaaaaaaaaaaaaaaaaaaaaaaaaaa

SEQ ID NO: 9013 - RNA, 8787 nt, synthetic construct
  source 1..8787: mol_type = other RNA
aggaaataagagagaaaagaagagtaagaagaaatataagagccaccatggcccctaagaagaagcgtaaagtgagccggatgaaccacgaccaggagttcgacccccctaaggtgtaccctcccgtccccgccgagaagagaaagcccatccgggtcctgagcctgttcgatggcatcgccaccggtctgctggtgctgaaggacctgggcatccaggtggataggtacattgcctccgaggtgtgcgaggactccatcaccgtgggaatggtgcgtcatcagggcaagatcatgtacgtgggcgacgtgcggagcgtgacacagaagcatatccaggagtggggccctttcgacctggtgatcggcggcagcccttgcaatgacctgagcatcgtgaacccagcccggaagggcctgtacgagggaaccggcagactgttcttcgagttttacagactgctgcacgacgcccggcctaaggaaggcgacgaccggcccttcttttggctgttcgagaatgtggtggccatgggagtcagcgacaagcgggatattagccggttcctggagagcaaccccgtgatgatcgatgccaaggaagtgagcgccgcccaccgggccagatacttctggggcaatctgcctggcatgaacagacccctggccagcaccgtgaacgacaagctggagctgcaggagtgcctggagcacggccggatcgccaagttcagcaaggtgagaaccatcaccacccgaagcaacagcatcaaacaaggcaaggaccagcactttcctgtgttcatgaacgagaaggaggacatcctgtggtgtaccgagatggagagagtgttcgggttcccagtccactacacagatgtcagcaacatgtctagactggccagacagagactgctgggaagaagctggtccgtccctgtgatcagacacctgttcgcccctctgaaggagtacttcgcctgcgtgagcagcggcaacagcaacgccaacagccggggccccagcttctctagcggcctggtgccactgtccctgagagggagccacatgggccccatggagatctacaaaaccgtgagcgcctggaagcggcagcctgtgcgcgtgctgagcctgtttcggaatatcgataaagtcctgaaaagcctgggattcctggagagcggctctggctccggcggtggcaccctgaagtacgtggaggatgtgacaaacgtggtcagacgggatgtggagaagtggggccccttcgatctggtgtacggcagcacccaacccctgggcagctcttgtgaccggtgccctggctggtacatgtttcagttccaccggatcctgcagtacgccctgccgagacaggagtcccagcggccattcttttggattttcatggacaacttgctgctgaccgaggatgaccaggaaactaccactcggttcctgcagaccgaagccgtgaccctgcaggacgtgagaggccgggactaccagaacgccatgcgggtgtggtccaacatccctggactgaaaagcaagcacgcacctctgacccctaaagaagaggagtacctgcaggcccaggtgcggagcagaagcaagctggacgcccctaaggtggatctgctggtgaagaattgcctcctgcccctgagagagtacttcaagtatttcagccagaatagtctgcccctgggaggcagcggcggcggcttccagggcagcgtgatgttcagcgacgtgagcatcgacttcagccaggaggagtgggagtacctggacctggagcagagggccctgtacagggacgtgatgctggagaactacagcaacctggtgagcctgggctgcttcatcagcaagcccgacgtgatcagcctgctggagcagggcaaggagccctggaaggtggtgaggaagggcaagaggaggtaccccgacctggagaccaggtacggcggcccaagcagcggcgcccctcctcccagcggcggcaggcggcccaagcagcggcgcccctcctcccagcggcggcagcccagccggctccccaacctctaccgaggagggcacctctgagtccgccacccccgagagcggccctggcacctccaccgagcccagcgagggcagcgcacccggcagccctgccggcagccccacctccacagaggagggaaccagcaccgagcccagcgaaggcagcgccccaggcaccagcaccgagcctagtgagcaggagattaaacggatcaacaagatcagaagaagacttgtgaaagacagcaacaccaagaaggccggcaagacaggccccatgaaaaccctgctggttagagtgatgacacccgatctgagagagcggctggaaaacctgagaaagaagcctgaaaatatcccccagcccatcagcaatacatctagagccaacctgaataagctgctgaccgattacaccgaaatgaagaaggcgatcctgcatgtgtactgggaagagttccagaaggaccctgtgggcctgatgagccgggtggcccagcctgccagcaagaagatcgatcagaacaagctgaaacctgagatggacgagaagggcaacctgaccaccgccggctttgcctgctctcagtgtggccagcccctgttcgtgtacaagctggagcaggtgtctgagaagggcaaggcttacaccaactacttcggacggtgcaatgtggccgagcacgaaaagctgatcctgctggcccagctgaagcccgagaaggatagcgacgaagccgtgacatatagcctgggaaagtttgggcagagggccctggatttctacagcattcatgtgaccaaggagtccacccaccccgtgaagcccctggcccagatcgccggaaacagatacgcctccggacctgtgggaaaggccctgagcgacgcatgtatgggcacaatcgcctccttcctgtctaagtaccaggacatcatcatcgaacaccagaaggtggtgaagggcaaccagaagagactggagagcctgcgggagctggccggcaaggaaaacctggaataccctagcgtgaccctgccacctcagcctcacaccaaggagggcgttgatgcctacaacgaagtgatcgcccgggtgcgaatgtgggtgaacctgaacctgtggcagaagctgaagctaagcagagatgatgccaagcctctgctgagactgaagggattcccttcctttcctctggtcgagagacaggccaacgaagtggactggtgggacatggtgtgtaacgtgaagaagctgatcaacgagaaaaaggaggatggcaaggtgttttggcagaatctggctggctacaagagacaggaagccctgagaccatacctgagcagcgaggaagatcggaagaagggaaagaaattcgctcggtaccagctgggcgacctgctgctgcacctggaaaagaagcacggcgaggactggggaaaggtgtacgacgaggcctgggagcggattgacaagaaagtggaaggcctgagcaagcacatcaagctggaagaggaacggagaagcgaggacgcccagagcaaggccgccctgaccgactggctgcgggctaaggccagcttcgtgatcgagggcctgaaggaggccgacaaggacgagttctgcagatgcgagctgaagctgcagaagtggtacggggacctgcggggaaagcccttcgccatcgaagccgagaacagcatcctggacatcagcggcttcagcaagcagtacaactgtgccttcatctggcagaaggacggcgtgaagaagctgaacctgtacctgatcatcaactacttcaagggcggcaagctgcggttcaagaagatcaaacctgaagccttcgaagccaacagattctacaccgtgatcaacaaaaagagcggcgagatcgtgcccatggaggtgaacttcaacttcgacgaccccaacctgatcatcctgcctctggcctttggcaagagacagggcagagaattcatctggaacgacctgctgtccctggaaaccggcagcctgaagctggccaacggaagagtgatcgagaagacactgtacaacagaagaacccggcaggatgagcctgccctgttcgtggccctgaccttcgagcggcgggaggtcctggactcctccaatatcaaaccaatgaacctgatcggcgtggcaagaggcgaaaacatccccgccgtgatcgccctgaccgaccccgagggctgcccactgagccggtttaaggatagcctgggaaacccaacccacatcctgagaatcggcgagagctataaggagaagcagcggaccatccaggccaagaaggaggtggagcagcggagagccggcggctacagccggaagtacgccagcaaagccaagaatctggcagacgatatggtgagaaacaccgctagagatctgctgtactacgccgtgacccaggatgccatgctgatcttcgccaacctgagccggggcttcggccggcagggcaagcggaccttcatggccgagagacagtacacacggatggaggactggctgaccgccaagctggcctacgagggcctgagcaagacctacctgtccaagacactggcccagtacacctccaagacatgcagcaactgtgggtttaccatcaccagcgccgactacgacagggtgctggagaagctgaagaagacagcaacaggctggatgaccacaattaacggcaaggagctgaaggtggagggccagattacctactacaacagatacaagagacagaacgtagtcaaggacctgtccgtcgagctggatagactgagcgaagaatctgtgaacaacgacatctcctcctggacaaagggcagaagcggagaagctctgagcctcctgaagaaaagattctcccatagacccgtgcaggagaagttcgtgtgcctgaactgcggcttcgagacacacgcagccgagcaagccgccctgaacatcgccagatcctggctgttcctgcggagccaggagtacaagaaataccagacaaacaagacaaccggcaacaccgataagagagccttcgtcgagacctggcagtccttttaccggaagaagcttaaggaggtgtggaaacctgccgtgcggtctggcggatctggcggaggctccaccagccccaagaaaaagagaaaagtctaagctgccttctgcggggcttgccttctggccatgcccttcttctctcccttgcacctgtacctcttggtctttgaataaagcctgagtaggaaggctagcaaaaaaaaaaaaaaaaaaaaaaaaaaaaaaaaaaaaaaaaaaaaaaaaaaaaaaaaaaaaaaaaaaaaaaaaaaaaaaaagcccagccggctccccaacctctaccgaggagggcacctctgagtccgccacccccgagagcggccctggcacctccaccgagcccagcgagggcagcgcacccggcagccctgccggcagccccacctccacagaggagggaaccagcaccgagcccagcgaaggcagcgccccaggcaccagcaccgagcctagtgagcaggagattaaacggatcaacaagatcagaagaagacttgtgaaagacagcaacaccaagaaggccggcaagacaggccccatgaaaaccctgctggttagagtgatgacacccgatctgagagagcggctggaaaacctgagaaagaagcctgaaaatatcccccagcccatcagcaatacatctagagccaacctgaataagctgctgaccgattacaccgaaatgaagaaggcgatcctgcatgtgtactgggaagagttccagaaggaccctgtgggcctgatgagccgggtggcccagcctgccagcaagaagatcgatcagaacaagctgaaacctgagatggacgagaagggcaacctgaccaccgccggctttgcctgctctcagtgtggccagcccctgttcgtgtacaagctggagcaggtgtctgagaagggcaaggcttacaccaactacttcggacggtgcaatgtggccgagcacgaaaagctgatcctgctggcccagctgaagcccgagaaggatagcgacgaagccgtgacatatagcctgggaaagtttgggcagagggccctggatttctacagcattcatgtgaccaaggagtccacccaccccgtgaagcccctggcccagatcgccggaaacagatacgcctccggacctgtgggaaaggccctgagcgacgcatgtatgggcacaatcgcctccttcctgtctaagtaccaggacatcatcatcgaacaccagaaggtggtgaagggcaaccagaagagactggagagcctgcgggagctggccggcaaggaaaacctggaataccctagcgtgaccctgccacctcagcctcacaccaaggagggcgttgatgcctacaacgaagtgatcgcccgggtgcgaatgtgggtgaacctgaacctgtggcagaagctgaagctaagcagagatgatgccaagcctctgctgagactgaagggattcccttcctttcctctggtcgagagacaggccaacgaagtggactggtgggacatggtgtgtaacgtgaagaagctgatcaacgagaaaaaggaggatggcaaggtgttttggcagaatctggctggctacaagagacaggaagccctgagaccatacctgagcagcgaggaagatcggaagaagggaaagaaattcgctcggtaccagctgggcgacctgctgctgcacctggaaaagaagcacggcgaggactggggaaaggtgtacgacgaggcctgggagcggattgacaagaaagtggaaggcctgagcaagcacatcaagctggaagaggaacggagaagcgaggacgcccagagcaaggccgccctgaccgactggctgcgggctaaggccagcttcgtgatcgagggcctgaaggaggccgacaaggacgagttctgcagatgcgagctgaagctgcagaagtggtacggggacctgcggggaaagcccttcgccatcgaagccgagaacagcatcctggacatcagcggcttcagcaagcagtacaactgtgccttcatctggcagaaggacggcgtgaagaagctgaacctgtacctgatcatcaactacttcaagggcggcaagctgcggttcaagaagatcaaacctgaagccttcgaagccaacagattctacaccgtgatcaacaaaaagagcggcgagatcgtgcccatggaggtgaacttcaacttcgacgaccccaacctgatcatcctgcctctggcctttggcaagagacagggcagagaattcatctggaacgacctgctgtccctggaaaccggcagcctgaagctggccaacggaagagtgatcgagaagacactgtacaacagaagaacccggcaggatgagcctgccctgttcgtggccctgaccttcgagcggcgggaggtcctggactcctccaatatcaaaccaatgaacctgatcggcgtggcaagaggcgaaaacatccccgccgtgatcgccctgaccgaccccgagggctgcccactgagccggtttaaggatagcctgggaaacccaacccacatcctgagaatcggcgagagctataaggagaagcagcggaccatccaggccaagaaggaggtggagcagcggagagccggcggctacagccggaagtacgccagcaaagccaagaatctggcagacgatatggtgagaaacaccgctagagatctgctgtactacgccgtgacccaggatgccatgctgatcttcgccaacctgagccggggcttcggccggcagggcaagcggaccttcatggccgagagacagtacacacggatggaggactggctgaccgccaagctggcctacgagggcctgagcaagacctacctgtccaagacactggcccagtacacctccaagacatgcagcaactgtgggtttaccatcaccagcgccgactacgacagggtgctggagaagctgaagaagacagcaacaggctggatgaccacaattaacggcaaggagctgaaggtggagggccagattacctactacaacagatacaagagacagaacgtagtcaaggacctgtccgtcgagctggatagactgagcgaagaatctgtgaacaacgacatctcctcctggacaaagggcagaagcggagaagctctgagcctcctgaagaaaagattctcccatagacccgtgcaggagaagttcgtgtgcctgaactgcggcttcgagacacacgcagccgagcaagccgccctgaacatcgccagatcctggctgttcctgcggagccaggagtacaagaaataccagacaaacaagacaaccggcaacaccgataagagagccttcgtcgagacctggcagtccttttaccggaagaagcttaaggaggtgtggaaacctgccgtgcggtctggcggatctggcggaggctccaccagccccaagaaaaagagaaaagtctaagctgccttctgcggggcttgccttctggccatgcccttcttctctcccttgcacctgtacctcttggtctttgaataaagcctgagtaggaaggctagcaaaaaaaaaaaaaaaaaaaaaaaaaaaaaaaaaaaaaaaaaaaaaaaaaaaaaaaaaaaaaaaaaaaaaaaaaaaaaaaa

SEQ ID NO: 9014 - RNA, 8787 nt, synthetic construct
  source 1..8787: mol_type = other RNA
aggaaataagagagaaaagaagagtaagaagaaatataagagccaccatggcccctaagaagaagcgtaaagtgagccggatgaaccacgaccaggagttcgacccccctaaggtgtaccctcccgtccccgccgagaagagaaagcccatccgggtcctgagcctgttcgatggcatcgccaccggtctgctggtgctgaaggacctgggcatccaggtggataggtacattgcctccgaggtgtgcgaggactccatcaccgtgggaatggtgcgtcatcagggcaagatcatgtacgtgggcgacgtgcggagcgtgacacagaagcatatccaggagtggggccctttcgacctggtgatcggcggcagcccttgcaatgacctgagcatcgtgaacccagcccggaagggcctgtacgagggaaccggcagactgttcttcgagttttacagactgctgcacgacgcccggcctaaggaaggcgacgaccggcccttcttttggctgttcgagaatgtggtggccatgggagtcagcgacaagcgggatattagccggttcctggagagcaaccccgtgatgatcgatgccaaggaagtgagcgccgcccaccgggccagatacttctggggcaatctgcctggcatgaacagacccctggccagcaccgtgaacgacaagctggagctgcaggagtgcctggagcacggccggatcgccaagttcagcaaggtgagaaccatcaccacccgaagcaacagcatcaaacaaggcaaggaccagcactttcctgtgttcatgaacgagaaggaggacatcctgtggtgtaccgagatggagagagtgttcgggttcccagtccactacacagatgtcagcaacatgtctagactggccagacagagactgctgggaagaagctggtccgtccctgtgatcagacacctgttcgcccctctgaaggagtacttcgcctgcgtgagcagcggcaacagcaacgccaacagccggggccccagcttctctagcggcctggtgccactgtccctgagagggagccacatgggccccatggagatctacaaaaccgtgagcgcctggaagcggcagcctgtgcgcgtgctgagcctgtttcggaatatcgataaagtcctgaaaagcctgggattcctggagagcggctctggctccggcggtggcaccctgaagtacgtggaggatgtgacaaacgtggtcagacgggatgtggagaagtggggccccttcgatctggtgtacggcagcacccaacccctgggcagctcttgtgaccggtgccctggctggtacatgtttcagttccaccggatcctgcagtacgccctgccgagacaggagtcccagcggccattcttttggattttcatggacaacttgctgctgaccgaggatgaccaggaaactaccactcggttcctgcagaccgaagccgtgaccctgcaggacgtgagaggccgggactaccagaacgccatgcgggtgtggtccaacatccctggactgaaaagcaagcacgcacctctgacccctaaagaagaggagtacctgcaggcccaggtgcggagcagaagcaagctggacgcccctaaggtggatctgctggtgaagaattgcctcctgcccctgagagagtacttcaagtatttcagccagaatagtctgcccctgggaggcagcggcggcggcagccagagcctggtgaccttcggcgacgtggccgtggagttcagccccgaggagtgggagtggctggacagcgcccagaggagcctgtacaggagcgtgatgctggagaactacaggagcctggtgagcctgggcctgtgcgtgagcaagcccaagatgatcagcagcctggagcagaggaaggagccctgggtggccaagaggaccctgaccaggggcggctgccccgacagcagggccctgggcggcccaagcagcggcgcccctcctcccagcggcggcaggcggcccaagcagcggcgcccctcctcccagcggcggcagcccagccggctccccaacctctaccgaggagggcacctctgagtccgccacccccgagagcggccctggcacctccaccgagcccagcgagggcagcgcacccggcagccctgccggcagccccacctccacagaggagggaaccagcaccgagcccagcgaaggcagcgccccaggcaccagcaccgagcctagtgagcaggagattaaacggatcaacaagatcagaagaagacttgtgaaagacagcaacaccaagaaggccggcaagacaggccccatgaaaaccctgctggttagagtgatgacacccgatctgagagagcggctggaaaacctgagaaagaagcctgaaaatatcccccagcccatcagcaatacatctagagccaacctgaataagctgctgaccgattacaccgaaatgaagaaggcgatcctgcatgtgtactgggaagagttccagaaggaccctgtgggcctgatgagccgggtggcccagcctgccagcaagaagatcgatcagaacaagctgaaacctgagatggacgagaagggcaacctgaccaccgccggctttgcctgctctcagtgtggccagcccctgttcgtgtacaagctggagcaggtgtctgagaagggcaaggcttacaccaactacttcggacggtgcaatgtggccgagcacgaaaagctgatcctgctggcccagctgaagcccgagaaggatagcgacgaagccgtgacatatagcctgggaaagtttgggcagagggccctggatttctacagcattcatgtgaccaaggagtccacccaccccgtgaagcccctggcccagatcgccggaaacagatacgcctccggacctgtgggaaaggccctgagcgacgcatgtatgggcacaatcgcctccttcctgtctaagtaccaggacatcatcatcgaacaccagaaggtggtgaagggcaaccagaagagactggagagcctgcgggagctggccggcaaggaaaacctggaataccctagcgtgaccctgccacctcagcctcacaccaaggagggcgttgatgcctacaacgaagtgatcgcccgggtgcgaatgtgggtgaacctgaacctgtggcagaagctgaagctaagcagagatgatgccaagcctctgctgagactgaagggattcccttcctttcctctggtcgagagacaggccaacgaagtggactggtgggacatggtgtgtaacgtgaagaagctgatcaacgagaaaaaggaggatggcaaggtgttttggcagaatctggctggctacaagagacaggaagccctgagaccatacctgagcagcgaggaagatcggaagaagggaaagaaattcgctcggtaccagctgggcgacctgctgctgcacctggaaaagaagcacggcgaggactggggaaaggtgtacgacgaggcctgggagcggattgacaagaaagtggaaggcctgagcaagcacatcaagctggaagaggaacggagaagcgaggacgcccagagcaaggccgccctgaccgactggctgcgggctaaggccagcttcgtgatcgagggcctgaaggaggccgacaaggacgagttctgcagatgcgagctgaagctgcagaagtggtacggggacctgcggggaaagcccttcgccatcgaagccgagaacagcatcctggacatcagcggcttcagcaagcagtacaactgtgccttcatctggcagaaggacggcgtgaagaagctgaacctgtacctgatcatcaactacttcaagggcggcaagctgcggttcaagaagatcaaacctgaagccttcgaagccaacagattctacaccgtgatcaacaaaaagagcggcgagatcgtgcccatggaggtgaacttcaacttcgacgaccccaacctgatcatcctgcctctggcctttggcaagagacagggcagagaattcatctggaacgacctgctgtccctggaaaccggcagcctgaagctggccaacggaagagtgatcgagaagacactgtacaacagaagaacccggcaggatgagcctgccctgttcgtggccctgaccttcgagcggcgggaggtcctggactcctccaatatcaaaccaatgaacctgatcggcgtggcaagaggcgaaaacatccccgccgtgatcgccctgaccgaccccgagggctgcccactgagccggtttaaggatagcctgggaaacccaacccacatcctgagaatcggcgagagctataaggagaagcagcggaccatccaggccaagaaggaggtggagcagcggagagccggcggctacagccggaagtacgccagcaaagccaagaatctggcagacgatatggtgagaaacaccgctagagatctgctgtactacgccgtgacccaggatgccatgctgatcttcgccaacctgagccggggcttcggccggcagggcaagcggaccttcatggccgagagacagtacacacggatggaggactggctgaccgccaagctggcctacgagggcctgagcaagacctacctgtccaagacactggcccagtacacctccaagacatgcagcaactgtgggtttaccatcaccagcgccgactacgacagggtgctggagaagctgaagaagacagcaacaggctggatgaccacaattaacggcaaggagctgaaggtggagggccagattacctactacaacagatacaagagacagaacgtagtcaaggacctgtccgtcgagctggatagactgagcgaagaatctgtgaacaacgacatctcctcctggacaaagggcagaagcggagaagctctgagcctcctgaagaaaagattctcccatagacccgtgcaggagaagttcgtgtgcctgaactgcggcttcgagacacacgcagccgagcaagccgccctgaacatcgccagatcctggctgttcctgcggagccaggagtacaagaaataccagacaaacaagacaaccggcaacaccgataagagagccttcgtcgagacctggcagtccttttaccggaagaagcttaaggaggtgtggaaacctgccgtgcggtctggcggatctggcggaggctccaccagccccaagaaaaagagaaaagtctaagctgccttctgcggggcttgccttctggccatgcccttcttctctcccttgcacctgtacctcttggtctttgaataaagcctgagtaggaaggctagcaaaaaaaaaaaaaaaaaaaaaaaaaaaaaaaaaaaaaaaaaaaaaaaaaaaaaaaaaaaaaaaaaaaaaaaaaaaaaaaagcccagccggctccccaacctctaccgaggagggcacctctgagtccgccacccccgagagcggccctggcacctccaccgagcccagcgagggcagcgcacccggcagccctgccggcagccccacctccacagaggagggaaccagcaccgagcccagcgaaggcagcgccccaggcaccagcaccgagcctagtgagcaggagattaaacggatcaacaagatcagaagaagacttgtgaaagacagcaacaccaagaaggccggcaagacaggccccatgaaaaccctgctggttagagtgatgacacccgatctgagagagcggctggaaaacctgagaaagaagcctgaaaatatcccccagcccatcagcaatacatctagagccaacctgaataagctgctgaccgattacaccgaaatgaagaaggcgatcctgcatgtgtactgggaagagttccagaaggaccctgtgggcctgatgagccgggtggcccagcctgccagcaagaagatcgatcagaacaagctgaaacctgagatggacgagaagggcaacctgaccaccgccggctttgcctgctctcagtgtggccagcccctgttcgtgtacaagctggagcaggtgtctgagaagggcaaggcttacaccaactacttcggacggtgcaatgtggccgagcacgaaaagctgatcctgctggcccagctgaagcccgagaaggatagcgacgaagccgtgacatatagcctgggaaagtttgggcagagggccctggatttctacagcattcatgtgaccaaggagtccacccaccccgtgaagcccctggcccagatcgccggaaacagatacgcctccggacctgtgggaaaggccctgagcgacgcatgtatgggcacaatcgcctccttcctgtctaagtaccaggacatcatcatcgaacaccagaaggtggtgaagggcaaccagaagagactggagagcctgcgggagctggccggcaaggaaaacctggaataccctagcgtgaccctgccacctcagcctcacaccaaggagggcgttgatgcctacaacgaagtgatcgcccgggtgcgaatgtgggtgaacctgaacctgtggcagaagctgaagctaagcagagatgatgccaagcctctgctgagactgaagggattcccttcctttcctctggtcgagagacaggccaacgaagtggactggtgggacatggtgtgtaacgtgaagaagctgatcaacgagaaaaaggaggatggcaaggtgttttggcagaatctggctggctacaagagacaggaagccctgagaccatacctgagcagcgaggaagatcggaagaagggaaagaaattcgctcggtaccagctgggcgacctgctgctgcacctggaaaagaagcacggcgaggactggggaaaggtgtacgacgaggcctgggagcggattgacaagaaagtggaaggcctgagcaagcacatcaagctggaagaggaacggagaagcgaggacgcccagagcaaggccgccctgaccgactggctgcgggctaaggccagcttcgtgatcgagggcctgaaggaggccgacaaggacgagttctgcagatgcgagctgaagctgcagaagtggtacggggacctgcggggaaagcccttcgccatcgaagccgagaacagcatcctggacatcagcggcttcagcaagcagtacaactgtgccttcatctggcagaaggacggcgtgaagaagctgaacctgtacctgatcatcaactacttcaagggcggcaagctgcggttcaagaagatcaaacctgaagccttcgaagccaacagattctacaccgtgatcaacaaaaagagcggcgagatcgtgcccatggaggtgaacttcaacttcgacgaccccaacctgatcatcctgcctctggcctttggcaagagacagggcagagaattcatctggaacgacctgctgtccctggaaaccggcagcctgaagctggccaacggaagagtgatcgagaagacactgtacaacagaagaacccggcaggatgagcctgccctgttcgtggccctgaccttcgagcggcgggaggtcctggactcctccaatatcaaaccaatgaacctgatcggcgtggcaagaggcgaaaacatccccgccgtgatcgccctgaccgaccccgagggctgcccactgagccggtttaaggatagcctgggaaacccaacccacatcctgagaatcggcgagagctataaggagaagcagcggaccatccaggccaagaaggaggtggagcagcggagagccggcggctacagccggaagtacgccagcaaagccaagaatctggcagacgatatggtgagaaacaccgctagagatctgctgtactacgccgtgacccaggatgccatgctgatcttcgccaacctgagccggggcttcggccggcagggcaagcggaccttcatggccgagagacagtacacacggatggaggactggctgaccgccaagctggcctacgagggcctgagcaagacctacctgtccaagacactggcccagtacacctccaagacatgcagcaactgtgggtttaccatcaccagcgccgactacgacagggtgctggagaagctgaagaagacagcaacaggctggatgaccacaattaacggcaaggagctgaaggtggagggccagattacctactacaacagatacaagagacagaacgtagtcaaggacctgtccgtcgagctggatagactgagcgaagaatctgtgaacaacgacatctcctcctggacaaagggcagaagcggagaagctctgagcctcctgaagaaaagattctcccatagacccgtgcaggagaagttcgtgtgcctgaactgcggcttcgagacacacgcagccgagcaagccgccctgaacatcgccagatcctggctgttcctgcggagccaggagtacaagaaataccagacaaacaagacaaccggcaacaccgataagagagccttcgtcgagacctggcagtccttttaccggaagaagcttaaggaggtgtggaaacctgccgtgcggtctggcggatctggcggaggctccaccagccccaagaaaaagagaaaagtctaagctgccttctgcggggcttgccttctggccatgcccttcttctctcccttgcacctgtacctcttggtctttgaataaagcctgagtaggaaggctagcaaaaaaaaaaaaaaaaaaaaaaaaaaaaaaaaaaaaaaaaaaaaaaaaaaaaaaaaaaaaaaaaaaaaaaaaaaaaaaaa

SEQ ID NO: 9015 - RNA, 8787 nt, synthetic construct
  source 1..8787: mol_type = other RNA
aggaaataagagagaaaagaagagtaagaagaaatataagagccaccatggcccctaagaagaagcgtaaagtgagccggatgaaccacgaccaggagttcgacccccctaaggtgtaccctcccgtccccgccgagaagagaaagcccatccgggtcctgagcctgttcgatggcatcgccaccggtctgctggtgctgaaggacctgggcatccaggtggataggtacattgcctccgaggtgtgcgaggactccatcaccgtgggaatggtgcgtcatcagggcaagatcatgtacgtgggcgacgtgcggagcgtgacacagaagcatatccaggagtggggccctttcgacctggtgatcggcggcagcccttgcaatgacctgagcatcgtgaacccagcccggaagggcctgtacgagggaaccggcagactgttcttcgagttttacagactgctgcacgacgcccggcctaaggaaggcgacgaccggcccttcttttggctgttcgagaatgtggtggccatgggagtcagcgacaagcgggatattagccggttcctggagagcaaccccgtgatgatcgatgccaaggaagtgagcgccgcccaccgggccagatacttctggggcaatctgcctggcatgaacagacccctggccagcaccgtgaacgacaagctggagctgcaggagtgcctggagcacggccggatcgccaagttcagcaaggtgagaaccatcaccacccgaagcaacagcatcaaacaaggcaaggaccagcactttcctgtgttcatgaacgagaaggaggacatcctgtggtgtaccgagatggagagagtgttcgggttcccagtccactacacagatgtcagcaacatgtctagactggccagacagagactgctgggaagaagctggtccgtccctgtgatcagacacctgttcgcccctctgaaggagtacttcgcctgcgtgagcagcggcaacagcaacgccaacagccggggccccagcttctctagcggcctggtgccactgtccctgagagggagccacatgggccccatggagatctacaaaaccgtgagcgcctggaagcggcagcctgtgcgcgtgctgagcctgtttcggaatatcgataaagtcctgaaaagcctgggattcctggagagcggctctggctccggcggtggcaccctgaagtacgtggaggatgtgacaaacgtggtcagacgggatgtggagaagtggggccccttcgatctggtgtacggcagcacccaacccctgggcagctcttgtgaccggtgccctggctggtacatgtttcagttccaccggatcctgcagtacgccctgccgagacaggagtcccagcggccattcttttggattttcatggacaacttgctgctgaccgaggatgaccaggaaactaccactcggttcctgcagaccgaagccgtgaccctgcaggacgtgagaggccgggactaccagaacgccatgcgggtgtggtccaacatccctggactgaaaagcaagcacgcacctctgacccctaaagaagaggagtacctgcaggcccaggtgcggagcagaagcaagctggacgcccctaaggtggatctgctggtgaagaattgcctcctgcccctgagagagtacttcaagtatttcagccagaatagtctgcccctgggaggcagcggcggcggcagccaggagagcgtggccttcgaggacgtggccgtgtacttcaccaccaaggagtgggccatcatggtgcccgccgagagggccctgtacagggacgtgatgctggagaactacgaggccgtggccttcgtggtgccccccaccagcaagcccgccctgatcagccacctggagcagggcaaggagagctgcttcatcaggccccagggcgtgctgagcaggagcgactggagggccggcctgggcggcccaagcagcggcgcccctcctcccagcggcggcaggcggcccaagcagcggcgcccctcctcccagcggcggcagcccagccggctccccaacctctaccgaggagggcacctctgagtccgccacccccgagagcggccctggcacctccaccgagcccagcgagggcagcgcacccggcagccctgccggcagccccacctccacagaggagggaaccagcaccgagcccagcgaaggcagcgccccaggcaccagcaccgagcctagtgagcaggagattaaacggatcaacaagatcagaagaagacttgtgaaagacagcaacaccaagaaggccggcaagacaggccccatgaaaaccctgctggttagagtgatgacacccgatctgagagagcggctggaaaacctgagaaagaagcctgaaaatatcccccagcccatcagcaatacatctagagccaacctgaataagctgctgaccgattacaccgaaatgaagaaggcgatcctgcatgtgtactgggaagagttccagaaggaccctgtgggcctgatgagccgggtggcccagcctgccagcaagaagatcgatcagaacaagctgaaacctgagatggacgagaagggcaacctgaccaccgccggctttgcctgctctcagtgtggccagcccctgttcgtgtacaagctggagcaggtgtctgagaagggcaaggcttacaccaactacttcggacggtgcaatgtggccgagcacgaaaagctgatcctgctggcccagctgaagcccgagaaggatagcgacgaagccgtgacatatagcctgggaaagtttgggcagagggccctggatttctacagcattcatgtgaccaaggagtccacccaccccgtgaagcccctggcccagatcgccggaaacagatacgcctccggacctgtgggaaaggccctgagcgacgcatgtatgggcacaatcgcctccttcctgtctaagtaccaggacatcatcatcgaacaccagaaggtggtgaagggcaaccagaagagactggagagcctgcgggagctggccggcaaggaaaacctggaataccctagcgtgaccctgccacctcagcctcacaccaaggagggcgttgatgcctacaacgaagtgatcgcccgggtgcgaatgtgggtgaacctgaacctgtggcagaagctgaagctaagcagagatgatgccaagcctctgctgagactgaagggattcccttcctttcctctggtcgagagacaggccaacgaagtggactggtgggacatggtgtgtaacgtgaagaagctgatcaacgagaaaaaggaggatggcaaggtgttttggcagaatctggctggctacaagagacaggaagccctgagaccatacctgagcagcgaggaagatcggaagaagggaaagaaattcgctcggtaccagctgggcgacctgctgctgcacctggaaaagaagcacggcgaggactggggaaaggtgtacgacgaggcctgggagcggattgacaagaaagtggaaggcctgagcaagcacatcaagctggaagaggaacggagaagcgaggacgcccagagcaaggccgccctgaccgactggctgcgggctaaggccagcttcgtgatcgagggcctgaaggaggccgacaaggacgagttctgcagatgcgagctgaagctgcagaagtggtacggggacctgcggggaaagcccttcgccatcgaagccgagaacagcatcctggacatcagcggcttcagcaagcagtacaactgtgccttcatctggcagaaggacggcgtgaagaagctgaacctgtacctgatcatcaactacttcaagggcggcaagctgcggttcaagaagatcaaacctgaagccttcgaagccaacagattctacaccgtgatcaacaaaaagagcggcgagatcgtgcccatggaggtgaacttcaacttcgacgaccccaacctgatcatcctgcctctggcctttggcaagagacagggcagagaattcatctggaacgacctgctgtccctggaaaccggcagcctgaagctggccaacggaagagtgatcgagaagacactgtacaacagaagaacccggcaggatgagcctgccctgttcgtggccctgaccttcgagcggcgggaggtcctggactcctccaatatcaaaccaatgaacctgatcggcgtggcaagaggcgaaaacatccccgccgtgatcgccctgaccgaccccgagggctgcccactgagccggtttaaggatagcctgggaaacccaacccacatcctgagaatcggcgagagctataaggagaagcagcggaccatccaggccaagaaggaggtggagcagcggagagccggcggctacagccggaagtacgccagcaaagccaagaatctggcagacgatatggtgagaaacaccgctagagatctgctgtactacgccgtgacccaggatgccatgctgatcttcgccaacctgagccggggcttcggccggcagggcaagcggaccttcatggccgagagacagtacacacggatggaggactggctgaccgccaagctggcctacgagggcctgagcaagacctacctgtccaagacactggcccagtacacctccaagacatgcagcaactgtgggtttaccatcaccagcgccgactacgacagggtgctggagaagctgaagaagacagcaacaggctggatgaccacaattaacggcaaggagctgaaggtggagggccagattacctactacaacagatacaagagacagaacgtagtcaaggacctgtccgtcgagctggatagactgagcgaagaatctgtgaacaacgacatctcctcctggacaaagggcagaagcggagaagctctgagcctcctgaagaaaagattctcccatagacccgtgcaggagaagttcgtgtgcctgaactgcggcttcgagacacacgcagccgagcaagccgccctgaacatcgccagatcctggctgttcctgcggagccaggagtacaagaaataccagacaaacaagacaaccggcaacaccgataagagagccttcgtcgagacctggcagtccttttaccggaagaagcttaaggaggtgtggaaacctgccgtgcggtctggcggatctggcggaggctccaccagccccaagaaaaagagaaaagtctaagctgccttctgcggggcttgccttctggccatgcccttcttctctcccttgcacctgtacctcttggtctttgaataaagcctgagtaggaaggctagcaaaaaaaaaaaaaaaaaaaaaaaaaaaaaaaaaaaaaaaaaaaaaaaaaaaaaaaaaaaaaaaaaaaaaaaaaaaaaaaagcccagccggctccccaacctctaccgaggagggcacctctgagtccgccacccccgagagcggccctggcacctccaccgagcccagcgagggcagcgcacccggcagccctgccggcagccccacctccacagaggagggaaccagcaccgagcccagcgaaggcagcgccccaggcaccagcaccgagcctagtgagcaggagattaaacggatcaacaagatcagaagaagacttgtgaaagacagcaacaccaagaaggccggcaagacaggccccatgaaaaccctgctggttagagtgatgacacccgatctgagagagcggctggaaaacctgagaaagaagcctgaaaatatcccccagcccatcagcaatacatctagagccaacctgaataagctgctgaccgattacaccgaaatgaagaaggcgatcctgcatgtgtactgggaagagttccagaaggaccctgtgggcctgatgagccgggtggcccagcctgccagcaagaagatcgatcagaacaagctgaaacctgagatggacgagaagggcaacctgaccaccgccggctttgcctgctctcagtgtggccagcccctgttcgtgtacaagctggagcaggtgtctgagaagggcaaggcttacaccaactacttcggacggtgcaatgtggccgagcacgaaaagctgatcctgctggcccagctgaagcccgagaaggatagcgacgaagccgtgacatatagcctgggaaagtttgggcagagggccctggatttctacagcattcatgtgaccaaggagtccacccaccccgtgaagcccctggcccagatcgccggaaacagatacgcctccggacctgtgggaaaggccctgagcgacgcatgtatgggcacaatcgcctccttcctgtctaagtaccaggacatcatcatcgaacaccagaaggtggtgaagggcaaccagaagagactggagagcctgcgggagctggccggcaaggaaaacctggaataccctagcgtgaccctgccacctcagcctcacaccaaggagggcgttgatgcctacaacgaagtgatcgcccgggtgcgaatgtgggtgaacctgaacctgtggcagaagctgaagctaagcagagatgatgccaagcctctgctgagactgaagggattcccttcctttcctctggtcgagagacaggccaacgaagtggactggtgggacatggtgtgtaacgtgaagaagctgatcaacgagaaaaaggaggatggcaaggtgttttggcagaatctggctggctacaagagacaggaagccctgagaccatacctgagcagcgaggaagatcggaagaagggaaagaaattcgctcggtaccagctgggcgacctgctgctgcacctggaaaagaagcacggcgaggactggggaaaggtgtacgacgaggcctgggagcggattgacaagaaagtggaaggcctgagcaagcacatcaagctggaagaggaacggagaagcgaggacgcccagagcaaggccgccctgaccgactggctgcgggctaaggccagcttcgtgatcgagggcctgaaggaggccgacaaggacgagttctgcagatgcgagctgaagctgcagaagtggtacggggacctgcggggaaagcccttcgccatcgaagccgagaacagcatcctggacatcagcggcttcagcaagcagtacaactgtgccttcatctggcagaaggacggcgtgaagaagctgaacctgtacctgatcatcaactacttcaagggcggcaagctgcggttcaagaagatcaaacctgaagccttcgaagccaacagattctacaccgtgatcaacaaaaagagcggcgagatcgtgcccatggaggtgaacttcaacttcgacgaccccaacctgatcatcctgcctctggcctttggcaagagacagggcagagaattcatctggaacgacctgctgtccctggaaaccggcagcctgaagctggccaacggaagagtgatcgagaagacactgtacaacagaagaacccggcaggatgagcctgccctgttcgtggccctgaccttcgagcggcgggaggtcctggactcctccaatatcaaaccaatgaacctgatcggcgtggcaagaggcgaaaacatccccgccgtgatcgccctgaccgaccccgagggctgcccactgagccggtttaaggatagcctgggaaacccaacccacatcctgagaatcggcgagagctataaggagaagcagcggaccatccaggccaagaaggaggtggagcagcggagagccggcggctacagccggaagtacgccagcaaagccaagaatctggcagacgatatggtgagaaacaccgctagagatctgctgtactacgccgtgacccaggatgccatgctgatcttcgccaacctgagccggggcttcggccggcagggcaagcggaccttcatggccgagagacagtacacacggatggaggactggctgaccgccaagctggcctacgagggcctgagcaagacctacctgtccaagacactggcccagtacacctccaagacatgcagcaactgtgggtttaccatcaccagcgccgactacgacagggtgctggagaagctgaagaagacagcaacaggctggatgaccacaattaacggcaaggagctgaaggtggagggccagattacctactacaacagatacaagagacagaacgtagtcaaggacctgtccgtcgagctggatagactgagcgaagaatctgtgaacaacgacatctcctcctggacaaagggcagaagcggagaagctctgagcctcctgaagaaaagattctcccatagacccgtgcaggagaagttcgtgtgcctgaactgcggcttcgagacacacgcagccgagcaagccgccctgaacatcgccagatcctggctgttcctgcggagccaggagtacaagaaataccagacaaacaagacaaccggcaacaccgataagagagccttcgtcgagacctggcagtccttttaccggaagaagcttaaggaggtgtggaaacctgccgtgcggtctggcggatctggcggaggctccaccagccccaagaaaaagagaaaagtctaagctgccttctgcggggcttgccttctggccatgcccttcttctctcccttgcacctgtacctcttggtctttgaataaagcctgagtaggaaggctagcaaaaaaaaaaaaaaaaaaaaaaaaaaaaaaaaaaaaaaaaaaaaaaaaaaaaaaaaaaaaaaaaaaaaaaaaaaaaaaaa

SEQ ID NO: 9016 - RNA, 8787 nt, synthetic construct
  source 1..8787: mol_type = other RNA
aggaaataagagagaaaagaagagtaagaagaaatataagagccaccatggcccctaagaagaagcgtaaagtgagccggatgaaccacgaccaggagttcgacccccctaaggtgtaccctcccgtccccgccgagaagagaaagcccatccgggtcctgagcctgttcgatggcatcgccaccggtctgctggtgctgaaggacctgggcatccaggtggataggtacattgcctccgaggtgtgcgaggactccatcaccgtgggaatggtgcgtcatcagggcaagatcatgtacgtgggcgacgtgcggagcgtgacacagaagcatatccaggagtggggccctttcgacctggtgatcggcggcagcccttgcaatgacctgagcatcgtgaacccagcccggaagggcctgtacgagggaaccggcagactgttcttcgagttttacagactgctgcacgacgcccggcctaaggaaggcgacgaccggcccttcttttggctgttcgagaatgtggtggccatgggagtcagcgacaagcgggatattagccggttcctggagagcaaccccgtgatgatcgatgccaaggaagtgagcgccgcccaccgggccagatacttctggggcaatctgcctggcatgaacagacccctggccagcaccgtgaacgacaagctggagctgcaggagtgcctggagcacggccggatcgccaagttcagcaaggtgagaaccatcaccacccgaagcaacagcatcaaacaaggcaaggaccagcactttcctgtgttcatgaacgagaaggaggacatcctgtggtgtaccgagatggagagagtgttcgggttcccagtccactacacagatgtcagcaacatgtctagactggccagacagagactgctgggaagaagctggtccgtccctgtgatcagacacctgttcgcccctctgaaggagtacttcgcctgcgtgagcagcggcaacagcaacgccaacagccggggccccagcttctctagcggcctggtgccactgtccctgagagggagccacatgggccccatggagatctacaaaaccgtgagcgcctggaagcggcagcctgtgcgcgtgctgagcctgtttcggaatatcgataaagtcctgaaaagcctgggattcctggagagcggctctggctccggcggtggcaccctgaagtacgtggaggatgtgacaaacgtggtcagacgggatgtggagaagtggggccccttcgatctggtgtacggcagcacccaacccctgggcagctcttgtgaccggtgccctggctggtacatgtttcagttccaccggatcctgcagtacgccctgccgagacaggagtcccagcggccattcttttggattttcatggacaacttgctgctgaccgaggatgaccaggaaactaccactcggttcctgcagaccgaagccgtgaccctgcaggacgtgagaggccgggactaccagaacgccatgcgggtgtggtccaacatccctggactgaaaagcaagcacgcacctctgacccctaaagaagaggagtacctgcaggcccaggtgcggagcagaagcaagctggacgcccctaaggtggatctgctggtgaagaattgcctcctgcccctgagagagtacttcaagtatttcagccagaatagtctgcccctgggaggcagcggcggcggcagcaaggtgcccgtgaccttcggcgacctggccatctacttcagccaggaggagtgggagtggctgagccccatccagaaggacctgtacgaggacgtgatgctggagaactaccagaacctggtgagcctgggcctgagcttcaggaggcccaacgtgatcaccctgctggagaagggcaaggccccctggatcgtggagcccgtgaggaagaggaggggcgtggacagcggcagcaagagcggcggcccaagcagcggcgcccctcctcccagcggcggcaggcggcccaagcagcggcgcccctcctcccagcggcggcagcccagccggctccccaacctctaccgaggagggcacctctgagtccgccacccccgagagcggccctggcacctccaccgagcccagcgagggcagcgcacccggcagccctgccggcagccccacctccacagaggagggaaccagcaccgagcccagcgaaggcagcgccccaggcaccagcaccgagcctagtgagcaggagattaaacggatcaacaagatcagaagaagacttgtgaaagacagcaacaccaagaaggccggcaagacaggccccatgaaaaccctgctggttagagtgatgacacccgatctgagagagcggctggaaaacctgagaaagaagcctgaaaatatcccccagcccatcagcaatacatctagagccaacctgaataagctgctgaccgattacaccgaaatgaagaaggcgatcctgcatgtgtactgggaagagttccagaaggaccctgtgggcctgatgagccgggtggcccagcctgccagcaagaagatcgatcagaacaagctgaaacctgagatggacgagaagggcaacctgaccaccgccggctttgcctgctctcagtgtggccagcccctgttcgtgtacaagctggagcaggtgtctgagaagggcaaggcttacaccaactacttcggacggtgcaatgtggccgagcacgaaaagctgatcctgctggcccagctgaagcccgagaaggatagcgacgaagccgtgacatatagcctgggaaagtttgggcagagggccctggatttctacagcattcatgtgaccaaggagtccacccaccccgtgaagcccctggcccagatcgccggaaacagatacgcctccggacctgtgggaaaggccctgagcgacgcatgtatgggcacaatcgcctccttcctgtctaagtaccaggacatcatcatcgaacaccagaaggtggtgaagggcaaccagaagagactggagagcctgcgggagctggccggcaaggaaaacctggaataccctagcgtgaccctgccacctcagcctcacaccaaggagggcgttgatgcctacaacgaagtgatcgcccgggtgcgaatgtgggtgaacctgaacctgtggcagaagctgaagctaagcagagatgatgccaagcctctgctgagactgaagggattcccttcctttcctctggtcgagagacaggccaacgaagtggactggtgggacatggtgtgtaacgtgaagaagctgatcaacgagaaaaaggaggatggcaaggtgttttggcagaatctggctggctacaagagacaggaagccctgagaccatacctgagcagcgaggaagatcggaagaagggaaagaaattcgctcggtaccagctgggcgacctgctgctgcacctggaaaagaagcacggcgaggactggggaaaggtgtacgacgaggcctgggagcggattgacaagaaagtggaaggcctgagcaagcacatcaagctggaagaggaacggagaagcgaggacgcccagagcaaggccgccctgaccgactggctgcgggctaaggccagcttcgtgatcgagggcctgaaggaggccgacaaggacgagttctgcagatgcgagctgaagctgcagaagtggtacggggacctgcggggaaagcccttcgccatcgaagccgagaacagcatcctggacatcagcggcttcagcaagcagtacaactgtgccttcatctggcagaaggacggcgtgaagaagctgaacctgtacctgatcatcaactacttcaagggcggcaagctgcggttcaagaagatcaaacctgaagccttcgaagccaacagattctacaccgtgatcaacaaaaagagcggcgagatcgtgcccatggaggtgaacttcaacttcgacgaccccaacctgatcatcctgcctctggcctttggcaagagacagggcagagaattcatctggaacgacctgctgtccctggaaaccggcagcctgaagctggccaacggaagagtgatcgagaagacactgtacaacagaagaacccggcaggatgagcctgccctgttcgtggccctgaccttcgagcggcgggaggtcctggactcctccaatatcaaaccaatgaacctgatcggcgtggcaagaggcgaaaacatccccgccgtgatcgccctgaccgaccccgagggctgcccactgagccggtttaaggatagcctgggaaacccaacccacatcctgagaatcggcgagagctataaggagaagcagcggaccatccaggccaagaaggaggtggagcagcggagagccggcggctacagccggaagtacgccagcaaagccaagaatctggcagacgatatggtgagaaacaccgctagagatctgctgtactacgccgtgacccaggatgccatgctgatcttcgccaacctgagccggggcttcggccggcagggcaagcggaccttcatggccgagagacagtacacacggatggaggactggctgaccgccaagctggcctacgagggcctgagcaagacctacctgtccaagacactggcccagtacacctccaagacatgcagcaactgtgggtttaccatcaccagcgccgactacgacagggtgctggagaagctgaagaagacagcaacaggctggatgaccacaattaacggcaaggagctgaaggtggagggccagattacctactacaacagatacaagagacagaacgtagtcaaggacctgtccgtcgagctggatagactgagcgaagaatctgtgaacaacgacatctcctcctggacaaagggcagaagcggagaagctctgagcctcctgaagaaaagattctcccatagacccgtgcaggagaagttcgtgtgcctgaactgcggcttcgagacacacgcagccgagcaagccgccctgaacatcgccagatcctggctgttcctgcggagccaggagtacaagaaataccagacaaacaagacaaccggcaacaccgataagagagccttcgtcgagacctggcagtccttttaccggaagaagcttaaggaggtgtggaaacctgccgtgcggtctggcggatctggcggaggctccaccagccccaagaaaaagagaaaagtctaagctgccttctgcggggcttgccttctggccatgcccttcttctctcccttgcacctgtacctcttggtctttgaataaagcctgagtaggaaggctagcaaaaaaaaaaaaaaaaaaaaaaaaaaaaaaaaaaaaaaaaaaaaaaaaaaaaaaaaaaaaaaaaaaaaaaaaaaaaaaaagcccagccggctccccaacctctaccgaggagggcacctctgagtccgccacccccgagagcggccctggcacctccaccgagcccagcgagggcagcgcacccggcagccctgccggcagccccacctccacagaggagggaaccagcaccgagcccagcgaaggcagcgccccaggcaccagcaccgagcctagtgagcaggagattaaacggatcaacaagatcagaagaagacttgtgaaagacagcaacaccaagaaggccggcaagacaggccccatgaaaaccctgctggttagagtgatgacacccgatctgagagagcggctggaaaacctgagaaagaagcctgaaaatatcccccagcccatcagcaatacatctagagccaacctgaataagctgctgaccgattacaccgaaatgaagaaggcgatcctgcatgtgtactgggaagagttccagaaggaccctgtgggcctgatgagccgggtggcccagcctgccagcaagaagatcgatcagaacaagctgaaacctgagatggacgagaagggcaacctgaccaccgccggctttgcctgctctcagtgtggccagcccctgttcgtgtacaagctggagcaggtgtctgagaagggcaaggcttacaccaactacttcggacggtgcaatgtggccgagcacgaaaagctgatcctgctggcccagctgaagcccgagaaggatagcgacgaagccgtgacatatagcctgggaaagtttgggcagagggccctggatttctacagcattcatgtgaccaaggagtccacccaccccgtgaagcccctggcccagatcgccggaaacagatacgcctccggacctgtgggaaaggccctgagcgacgcatgtatgggcacaatcgcctccttcctgtctaagtaccaggacatcatcatcgaacaccagaaggtggtgaagggcaaccagaagagactggagagcctgcgggagctggccggcaaggaaaacctggaataccctagcgtgaccctgccacctcagcctcacaccaaggagggcgttgatgcctacaacgaagtgatcgcccgggtgcgaatgtgggtgaacctgaacctgtggcagaagctgaagctaagcagagatgatgccaagcctctgctgagactgaagggattcccttcctttcctctggtcgagagacaggccaacgaagtggactggtgggacatggtgtgtaacgtgaagaagctgatcaacgagaaaaaggaggatggcaaggtgttttggcagaatctggctggctacaagagacaggaagccctgagaccatacctgagcagcgaggaagatcggaagaagggaaagaaattcgctcggtaccagctgggcgacctgctgctgcacctggaaaagaagcacggcgaggactggggaaaggtgtacgacgaggcctgggagcggattgacaagaaagtggaaggcctgagcaagcacatcaagctggaagaggaacggagaagcgaggacgcccagagcaaggccgccctgaccgactggctgcgggctaaggccagcttcgtgatcgagggcctgaaggaggccgacaaggacgagttctgcagatgcgagctgaagctgcagaagtggtacggggacctgcggggaaagcccttcgccatcgaagccgagaacagcatcctggacatcagcggcttcagcaagcagtacaactgtgccttcatctggcagaaggacggcgtgaagaagctgaacctgtacctgatcatcaactacttcaagggcggcaagctgcggttcaagaagatcaaacctgaagccttcgaagccaacagattctacaccgtgatcaacaaaaagagcggcgagatcgtgcccatggaggtgaacttcaacttcgacgaccccaacctgatcatcctgcctctggcctttggcaagagacagggcagagaattcatctggaacgacctgctgtccctggaaaccggcagcctgaagctggccaacggaagagtgatcgagaagacactgtacaacagaagaacccggcaggatgagcctgccctgttcgtggccctgaccttcgagcggcgggaggtcctggactcctccaatatcaaaccaatgaacctgatcggcgtggcaagaggcgaaaacatccccgccgtgatcgccctgaccgaccccgagggctgcccactgagccggtttaaggatagcctgggaaacccaacccacatcctgagaatcggcgagagctataaggagaagcagcggaccatccaggccaagaaggaggtggagcagcggagagccggcggctacagccggaagtacgccagcaaagccaagaatctggcagacgatatggtgagaaacaccgctagagatctgctgtactacgccgtgacccaggatgccatgctgatcttcgccaacctgagccggggcttcggccggcagggcaagcggaccttcatggccgagagacagtacacacggatggaggactggctgaccgccaagctggcctacgagggcctgagcaagacctacctgtccaagacactggcccagtacacctccaagacatgcagcaactgtgggtttaccatcaccagcgccgactacgacagggtgctggagaagctgaagaagacagcaacaggctggatgaccacaattaacggcaaggagctgaaggtggagggccagattacctactacaacagatacaagagacagaacgtagtcaaggacctgtccgtcgagctggatagactgagcgaagaatctgtgaacaacgacatctcctcctggacaaagggcagaagcggagaagctctgagcctcctgaagaaaagattctcccatagacccgtgcaggagaagttcgtgtgcctgaactgcggcttcgagacacacgcagccgagcaagccgccctgaacatcgccagatcctggctgttcctgcggagccaggagtacaagaaataccagacaaacaagacaaccggcaacaccgataagagagccttcgtcgagacctggcagtccttttaccggaagaagcttaaggaggtgtggaaacctgccgtgcggtctggcggatctggcggaggctccaccagccccaagaaaaagagaaaagtctaagctgccttctgcggggcttgccttctggccatgcccttcttctctcccttgcacctgtacctcttggtctttgaataaagcctgagtaggaaggctagcaaaaaaaaaaaaaaaaaaaaaaaaaaaaaaaaaaaaaaaaaaaaaaaaaaaaaaaaaaaaaaaaaaaaaaaaaaaaaaaa

SEQ ID NO: 9017 - RNA, 8787 nt, synthetic construct
  source 1..8787: mol_type = other RNA
aggaaataagagagaaaagaagagtaagaagaaatataagagccaccatggcccctaagaagaagcgtaaagtgagccggatgaaccacgaccaggagttcgacccccctaaggtgtaccctcccgtccccgccgagaagagaaagcccatccgggtcctgagcctgttcgatggcatcgccaccggtctgctggtgctgaaggacctgggcatccaggtggataggtacattgcctccgaggtgtgcgaggactccatcaccgtgggaatggtgcgtcatcagggcaagatcatgtacgtgggcgacgtgcggagcgtgacacagaagcatatccaggagtggggccctttcgacctggtgatcggcggcagcccttgcaatgacctgagcatcgtgaacccagcccggaagggcctgtacgagggaaccggcagactgttcttcgagttttacagactgctgcacgacgcccggcctaaggaaggcgacgaccggcccttcttttggctgttcgagaatgtggtggccatgggagtcagcgacaagcgggatattagccggttcctggagagcaaccccgtgatgatcgatgccaaggaagtgagcgccgcccaccgggccagatacttctggggcaatctgcctggcatgaacagacccctggccagcaccgtgaacgacaagctggagctgcaggagtgcctggagcacggccggatcgccaagttcagcaaggtgagaaccatcaccacccgaagcaacagcatcaaacaaggcaaggaccagcactttcctgtgttcatgaacgagaaggaggacatcctgtggtgtaccgagatggagagagtgttcgggttcccagtccactacacagatgtcagcaacatgtctagactggccagacagagactgctgggaagaagctggtccgtccctgtgatcagacacctgttcgcccctctgaaggagtacttcgcctgcgtgagcagcggcaacagcaacgccaacagccggggccccagcttctctagcggcctggtgccactgtccctgagagggagccacatgggccccatggagatctacaaaaccgtgagcgcctggaagcggcagcctgtgcgcgtgctgagcctgtttcggaatatcgataaagtcctgaaaagcctgggattcctggagagcggctctggctccggcggtggcaccctgaagtacgtggaggatgtgacaaacgtggtcagacgggatgtggagaagtggggccccttcgatctggtgtacggcagcacccaacccctgggcagctcttgtgaccggtgccctggctggtacatgtttcagttccaccggatcctgcagtacgccctgccgagacaggagtcccagcggccattcttttggattttcatggacaacttgctgctgaccgaggatgaccaggaaactaccactcggttcctgcagaccgaagccgtgaccctgcaggacgtgagaggccgggactaccagaacgccatgcgggtgtggtccaacatccctggactgaaaagcaagcacgcacctctgacccctaaagaagaggagtacctgcaggcccaggtgcggagcagaagcaagctggacgcccctaaggtggatctgctggtgaagaattgcctcctgcccctgagagagtacttcaagtatttcagccagaatagtctgcccctgggaggcagcggcggcggcaagcccggcgccgtgagcttcgccgacgtggccgtgtacttcagccccgaggagtggggctgcctgaggcccgcccagagggccctgtacagggacgtgatgagggagacctacggccacctgggcgccctgggcttccccggccccaagcccgccctgatcagctggatggagcaggagagcgaggcctggagcagcgccgcccaggaccccgagaacggcgagagcctgggcggcgccaggggcggcccaagcagcggcgcccctcctcccagcggcggcaggcggcccaagcagcggcgcccctcctcccagcggcggcagcccagccggctccccaacctctaccgaggagggcacctctgagtccgccacccccgagagcggccctggcacctccaccgagcccagcgagggcagcgcacccggcagccctgccggcagccccacctccacagaggagggaaccagcaccgagcccagcgaaggcagcgccccaggcaccagcaccgagcctagtgagcaggagattaaacggatcaacaagatcagaagaagacttgtgaaagacagcaacaccaagaaggccggcaagacaggccccatgaaaaccctgctggttagagtgatgacacccgatctgagagagcggctggaaaacctgagaaagaagcctgaaaatatcccccagcccatcagcaatacatctagagccaacctgaataagctgctgaccgattacaccgaaatgaagaaggcgatcctgcatgtgtactgggaagagttccagaaggaccctgtgggcctgatgagccgggtggcccagcctgccagcaagaagatcgatcagaacaagctgaaacctgagatggacgagaagggcaacctgaccaccgccggctttgcctgctctcagtgtggccagcccctgttcgtgtacaagctggagcaggtgtctgagaagggcaaggcttacaccaactacttcggacggtgcaatgtggccgagcacgaaaagctgatcctgctggcccagctgaagcccgagaaggatagcgacgaagccgtgacatatagcctgggaaagtttgggcagagggccctggatttctacagcattcatgtgaccaaggagtccacccaccccgtgaagcccctggcccagatcgccggaaacagatacgcctccggacctgtgggaaaggccctgagcgacgcatgtatgggcacaatcgcctccttcctgtctaagtaccaggacatcatcatcgaacaccagaaggtggtgaagggcaaccagaagagactggagagcctgcgggagctggccggcaaggaaaacctggaataccctagcgtgaccctgccacctcagcctcacaccaaggagggcgttgatgcctacaacgaagtgatcgcccgggtgcgaatgtgggtgaacctgaacctgtggcagaagctgaagctaagcagagatgatgccaagcctctgctgagactgaagggattcccttcctttcctctggtcgagagacaggccaacgaagtggactggtgggacatggtgtgtaacgtgaagaagctgatcaacgagaaaaaggaggatggcaaggtgttttggcagaatctggctggctacaagagacaggaagccctgagaccatacctgagcagcgaggaagatcggaagaagggaaagaaattcgctcggtaccagctgggcgacctgctgctgcacctggaaaagaagcacggcgaggactggggaaaggtgtacgacgaggcctgggagcggattgacaagaaagtggaaggcctgagcaagcacatcaagctggaagaggaacggagaagcgaggacgcccagagcaaggccgccctgaccgactggctgcgggctaaggccagcttcgtgatcgagggcctgaaggaggccgacaaggacgagttctgcagatgcgagctgaagctgcagaagtggtacggggacctgcggggaaagcccttcgccatcgaagccgagaacagcatcctggacatcagcggcttcagcaagcagtacaactgtgccttcatctggcagaaggacggcgtgaagaagctgaacctgtacctgatcatcaactacttcaagggcggcaagctgcggttcaagaagatcaaacctgaagccttcgaagccaacagattctacaccgtgatcaacaaaaagagcggcgagatcgtgcccatggaggtgaacttcaacttcgacgaccccaacctgatcatcctgcctctggcctttggcaagagacagggcagagaattcatctggaacgacctgctgtccctggaaaccggcagcctgaagctggccaacggaagagtgatcgagaagacactgtacaacagaagaacccggcaggatgagcctgccctgttcgtggccctgaccttcgagcggcgggaggtcctggactcctccaatatcaaaccaatgaacctgatcggcgtggcaagaggcgaaaacatccccgccgtgatcgccctgaccgaccccgagggctgcccactgagccggtttaaggatagcctgggaaacccaacccacatcctgagaatcggcgagagctataaggagaagcagcggaccatccaggccaagaaggaggtggagcagcggagagccggcggctacagccggaagtacgccagcaaagccaagaatctggcagacgatatggtgagaaacaccgctagagatctgctgtactacgccgtgacccaggatgccatgctgatcttcgccaacctgagccggggcttcggccggcagggcaagcggaccttcatggccgagagacagtacacacggatggaggactggctgaccgccaagctggcctacgagggcctgagcaagacctacctgtccaagacactggcccagtacacctccaagacatgcagcaactgtgggtttaccatcaccagcgccgactacgacagggtgctggagaagctgaagaagacagcaacaggctggatgaccacaattaacggcaaggagctgaaggtggagggccagattacctactacaacagatacaagagacagaacgtagtcaaggacctgtccgtcgagctggatagactgagcgaagaatctgtgaacaacgacatctcctcctggacaaagggcagaagcggagaagctctgagcctcctgaagaaaagattctcccatagacccgtgcaggagaagttcgtgtgcctgaactgcggcttcgagacacacgcagccgagcaagccgccctgaacatcgccagatcctggctgttcctgcggagccaggagtacaagaaataccagacaaacaagacaaccggcaacaccgataagagagccttcgtcgagacctggcagtccttttaccggaagaagcttaaggaggtgtggaaacctgccgtgcggtctggcggatctggcggaggctccaccagccccaagaaaaagagaaaagtctaagctgccttctgcggggcttgccttctggccatgcccttcttctctcccttgcacctgtacctcttggtctttgaataaagcctgagtaggaaggctagcaaaaaaaaaaaaaaaaaaaaaaaaaaaaaaaaaaaaaaaaaaaaaaaaaaaaaaaaaaaaaaaaaaaaaaaaaaaaaaaagcccagccggctccccaacctctaccgaggagggcacctctgagtccgccacccccgagagcggccctggcacctccaccgagcccagcgagggcagcgcacccggcagccctgccggcagccccacctccacagaggagggaaccagcaccgagcccagcgaaggcagcgccccaggcaccagcaccgagcctagtgagcaggagattaaacggatcaacaagatcagaagaagacttgtgaaagacagcaacaccaagaaggccggcaagacaggccccatgaaaaccctgctggttagagtgatgacacccgatctgagagagcggctggaaaacctgagaaagaagcctgaaaatatcccccagcccatcagcaatacatctagagccaacctgaataagctgctgaccgattacaccgaaatgaagaaggcgatcctgcatgtgtactgggaagagttccagaaggaccctgtgggcctgatgagccgggtggcccagcctgccagcaagaagatcgatcagaacaagctgaaacctgagatggacgagaagggcaacctgaccaccgccggctttgcctgctctcagtgtggccagcccctgttcgtgtacaagctggagcaggtgtctgagaagggcaaggcttacaccaactacttcggacggtgcaatgtggccgagcacgaaaagctgatcctgctggcccagctgaagcccgagaaggatagcgacgaagccgtgacatatagcctgggaaagtttgggcagagggccctggatttctacagcattcatgtgaccaaggagtccacccaccccgtgaagcccctggcccagatcgccggaaacagatacgcctccggacctgtgggaaaggccctgagcgacgcatgtatgggcacaatcgcctccttcctgtctaagtaccaggacatcatcatcgaacaccagaaggtggtgaagggcaaccagaagagactggagagcctgcgggagctggccggcaaggaaaacctggaataccctagcgtgaccctgccacctcagcctcacaccaaggagggcgttgatgcctacaacgaagtgatcgcccgggtgcgaatgtgggtgaacctgaacctgtggcagaagctgaagctaagcagagatgatgccaagcctctgctgagactgaagggattcccttcctttcctctggtcgagagacaggccaacgaagtggactggtgggacatggtgtgtaacgtgaagaagctgatcaacgagaaaaaggaggatggcaaggtgttttggcagaatctggctggctacaagagacaggaagccctgagaccatacctgagcagcgaggaagatcggaagaagggaaagaaattcgctcggtaccagctgggcgacctgctgctgcacctggaaaagaagcacggcgaggactggggaaaggtgtacgacgaggcctgggagcggattgacaagaaagtggaaggcctgagcaagcacatcaagctggaagaggaacggagaagcgaggacgcccagagcaaggccgccctgaccgactggctgcgggctaaggccagcttcgtgatcgagggcctgaaggaggccgacaaggacgagttctgcagatgcgagctgaagctgcagaagtggtacggggacctgcggggaaagcccttcgccatcgaagccgagaacagcatcctggacatcagcggcttcagcaagcagtacaactgtgccttcatctggcagaaggacggcgtgaagaagctgaacctgtacctgatcatcaactacttcaagggcggcaagctgcggttcaagaagatcaaacctgaagccttcgaagccaacagattctacaccgtgatcaacaaaaagagcggcgagatcgtgcccatggaggtgaacttcaacttcgacgaccccaacctgatcatcctgcctctggcctttggcaagagacagggcagagaattcatctggaacgacctgctgtccctggaaaccggcagcctgaagctggccaacggaagagtgatcgagaagacactgtacaacagaagaacccggcaggatgagcctgccctgttcgtggccctgaccttcgagcggcgggaggtcctggactcctccaatatcaaaccaatgaacctgatcggcgtggcaagaggcgaaaacatccccgccgtgatcgccctgaccgaccccgagggctgcccactgagccggtttaaggatagcctgggaaacccaacccacatcctgagaatcggcgagagctataaggagaagcagcggaccatccaggccaagaaggaggtggagcagcggagagccggcggctacagccggaagtacgccagcaaagccaagaatctggcagacgatatggtgagaaacaccgctagagatctgctgtactacgccgtgacccaggatgccatgctgatcttcgccaacctgagccggggcttcggccggcagggcaagcggaccttcatggccgagagacagtacacacggatggaggactggctgaccgccaagctggcctacgagggcctgagcaagacctacctgtccaagacactggcccagtacacctccaagacatgcagcaactgtgggtttaccatcaccagcgccgactacgacagggtgctggagaagctgaagaagacagcaacaggctggatgaccacaattaacggcaaggagctgaaggtggagggccagattacctactacaacagatacaagagacagaacgtagtcaaggacctgtccgtcgagctggatagactgagcgaagaatctgtgaacaacgacatctcctcctggacaaagggcagaagcggagaagctctgagcctcctgaagaaaagattctcccatagacccgtgcaggagaagttcgtgtgcctgaactgcggcttcgagacacacgcagccgagcaagccgccctgaacatcgccagatcctggctgttcctgcggagccaggagtacaagaaataccagacaaacaagacaaccggcaacaccgataagagagccttcgtcgagacctggcagtccttttaccggaagaagcttaaggaggtgtggaaacctgccgtgcggtctggcggatctggcggaggctccaccagccccaagaaaaagagaaaagtctaagctgccttctgcggggcttgccttctggccatgcccttcttctctcccttgcacctgtacctcttggtctttgaataaagcctgagtaggaaggctagcaaaaaaaaaaaaaaaaaaaaaaaaaaaaaaaaaaaaaaaaaaaaaaaaaaaaaaaaaaaaaaaaaaaaaaaaaaaaaaaa

SEQ ID NO: 9018 - RNA, 8787 nt, synthetic construct
  source 1..8787: mol_type = other RNA
aggaaataagagagaaaagaagagtaagaagaaatataagagccaccatggcccctaagaagaagcgtaaagtgagccggatgaaccacgaccaggagttcgacccccctaaggtgtaccctcccgtccccgccgagaagagaaagcccatccgggtcctgagcctgttcgatggcatcgccaccggtctgctggtgctgaaggacctgggcatccaggtggataggtacattgcctccgaggtgtgcgaggactccatcaccgtgggaatggtgcgtcatcagggcaagatcatgtacgtgggcgacgtgcggagcgtgacacagaagcatatccaggagtggggccctttcgacctggtgatcggcggcagcccttgcaatgacctgagcatcgtgaacccagcccggaagggcctgtacgagggaaccggcagactgttcttcgagttttacagactgctgcacgacgcccggcctaaggaaggcgacgaccggcccttcttttggctgttcgagaatgtggtggccatgggagtcagcgacaagcgggatattagccggttcctggagagcaaccccgtgatgatcgatgccaaggaagtgagcgccgcccaccgggccagatacttctggggcaatctgcctggcatgaacagacccctggccagcaccgtgaacgacaagctggagctgcaggagtgcctggagcacggccggatcgccaagttcagcaaggtgagaaccatcaccacccgaagcaacagcatcaaacaaggcaaggaccagcactttcctgtgttcatgaacgagaaggaggacatcctgtggtgtaccgagatggagagagtgttcgggttcccagtccactacacagatgtcagcaacatgtctagactggccagacagagactgctgggaagaagctggtccgtccctgtgatcagacacctgttcgcccctctgaaggagtacttcgcctgcgtgagcagcggcaacagcaacgccaacagccggggccccagcttctctagcggcctggtgccactgtccctgagagggagccacatgggccccatggagatctacaaaaccgtgagcgcctggaagcggcagcctgtgcgcgtgctgagcctgtttcggaatatcgataaagtcctgaaaagcctgggattcctggagagcggctctggctccggcggtggcaccctgaagtacgtggaggatgtgacaaacgtggtcagacgggatgtggagaagtggggccccttcgatctggtgtacggcagcacccaacccctgggcagctcttgtgaccggtgccctggctggtacatgtttcagttccaccggatcctgcagtacgccctgccgagacaggagtcccagcggccattcttttggattttcatggacaacttgctgctgaccgaggatgaccaggaaactaccactcggttcctgcagaccgaagccgtgaccctgcaggacgtgagaggccgggactaccagaacgccatgcgggtgtggtccaacatccctggactgaaaagcaagcacgcacctctgacccctaaagaagaggagtacctgcaggcccaggtgcggagcagaagcaagctggacgcccctaaggtggatctgctggtgaagaattgcctcctgcccctgagagagtacttcaagtatttcagccagaatagtctgcccctgggaggcagcggcggcggcgtgaggatgcccgtgaccttcgaggacgtggccgtgaccttcacccaggaggagtggggccagctggaccccgcccagaggaccctgtaccaggaggtgatgctggagacctgcggcctgctggtgagcctgggctgccccctgcccaagcccgagctgttctaccccctggaccacagccccgagctgcagaccctgaagaggggcctgagccccaacagctgccccggcgacagcaccaagggcggcccaagcagcggcgcccctcctcccagcggcggcaggcggcccaagcagcggcgcccctcctcccagcggcggcagcccagccggctccccaacctctaccgaggagggcacctctgagtccgccacccccgagagcggccctggcacctccaccgagcccagcgagggcagcgcacccggcagccctgccggcagccccacctccacagaggagggaaccagcaccgagcccagcgaaggcagcgccccaggcaccagcaccgagcctagtgagcaggagattaaacggatcaacaagatcagaagaagacttgtgaaagacagcaacaccaagaaggccggcaagacaggccccatgaaaaccctgctggttagagtgatgacacccgatctgagagagcggctggaaaacctgagaaagaagcctgaaaatatcccccagcccatcagcaatacatctagagccaacctgaataagctgctgaccgattacaccgaaatgaagaaggcgatcctgcatgtgtactgggaagagttccagaaggaccctgtgggcctgatgagccgggtggcccagcctgccagcaagaagatcgatcagaacaagctgaaacctgagatggacgagaagggcaacctgaccaccgccggctttgcctgctctcagtgtggccagcccctgttcgtgtacaagctggagcaggtgtctgagaagggcaaggcttacaccaactacttcggacggtgcaatgtggccgagcacgaaaagctgatcctgctggcccagctgaagcccgagaaggatagcgacgaagccgtgacatatagcctgggaaagtttgggcagagggccctggatttctacagcattcatgtgaccaaggagtccacccaccccgtgaagcccctggcccagatcgccggaaacagatacgcctccggacctgtgggaaaggccctgagcgacgcatgtatgggcacaatcgcctccttcctgtctaagtaccaggacatcatcatcgaacaccagaaggtggtgaagggcaaccagaagagactggagagcctgcgggagctggccggcaaggaaaacctggaataccctagcgtgaccctgccacctcagcctcacaccaaggagggcgttgatgcctacaacgaagtgatcgcccgggtgcgaatgtgggtgaacctgaacctgtggcagaagctgaagctaagcagagatgatgccaagcctctgctgagactgaagggattcccttcctttcctctggtcgagagacaggccaacgaagtggactggtgggacatggtgtgtaacgtgaagaagctgatcaacgagaaaaaggaggatggcaaggtgttttggcagaatctggctggctacaagagacaggaagccctgagaccatacctgagcagcgaggaagatcggaagaagggaaagaaattcgctcggtaccagctgggcgacctgctgctgcacctggaaaagaagcacggcgaggactggggaaaggtgtacgacgaggcctgggagcggattgacaagaaagtggaaggcctgagcaagcacatcaagctggaagaggaacggagaagcgaggacgcccagagcaaggccgccctgaccgactggctgcgggctaaggccagcttcgtgatcgagggcctgaaggaggccgacaaggacgagttctgcagatgcgagctgaagctgcagaagtggtacggggacctgcggggaaagcccttcgccatcgaagccgagaacagcatcctggacatcagcggcttcagcaagcagtacaactgtgccttcatctggcagaaggacggcgtgaagaagctgaacctgtacctgatcatcaactacttcaagggcggcaagctgcggttcaagaagatcaaacctgaagccttcgaagccaacagattctacaccgtgatcaacaaaaagagcggcgagatcgtgcccatggaggtgaacttcaacttcgacgaccccaacctgatcatcctgcctctggcctttggcaagagacagggcagagaattcatctggaacgacctgctgtccctggaaaccggcagcctgaagctggccaacggaagagtgatcgagaagacactgtacaacagaagaacccggcaggatgagcctgccctgttcgtggccctgaccttcgagcggcgggaggtcctggactcctccaatatcaaaccaatgaacctgatcggcgtggcaagaggcgaaaacatccccgccgtgatcgccctgaccgaccccgagggctgcccactgagccggtttaaggatagcctgggaaacccaacccacatcctgagaatcggcgagagctataaggagaagcagcggaccatccaggccaagaaggaggtggagcagcggagagccggcggctacagccggaagtacgccagcaaagccaagaatctggcagacgatatggtgagaaacaccgctagagatctgctgtactacgccgtgacccaggatgccatgctgatcttcgccaacctgagccggggcttcggccggcagggcaagcggaccttcatggccgagagacagtacacacggatggaggactggctgaccgccaagctggcctacgagggcctgagcaagacctacctgtccaagacactggcccagtacacctccaagacatgcagcaactgtgggtttaccatcaccagcgccgactacgacagggtgctggagaagctgaagaagacagcaacaggctggatgaccacaattaacggcaaggagctgaaggtggagggccagattacctactacaacagatacaagagacagaacgtagtcaaggacctgtccgtcgagctggatagactgagcgaagaatctgtgaacaacgacatctcctcctggacaaagggcagaagcggagaagctctgagcctcctgaagaaaagattctcccatagacccgtgcaggagaagttcgtgtgcctgaactgcggcttcgagacacacgcagccgagcaagccgccctgaacatcgccagatcctggctgttcctgcggagccaggagtacaagaaataccagacaaacaagacaaccggcaacaccgataagagagccttcgtcgagacctggcagtccttttaccggaagaagcttaaggaggtgtggaaacctgccgtgcggtctggcggatctggcggaggctccaccagccccaagaaaaagagaaaagtctaagctgccttctgcggggcttgccttctggccatgcccttcttctctcccttgcacctgtacctcttggtctttgaataaagcctgagtaggaaggctagcaaaaaaaaaaaaaaaaaaaaaaaaaaaaaaaaaaaaaaaaaaaaaaaaaaaaaaaaaaaaaaaaaaaaaaaaaaaaaaaagcccagccggctccccaacctctaccgaggagggcacctctgagtccgccacccccgagagcggccctggcacctccaccgagcccagcgagggcagcgcacccggcagccctgccggcagccccacctccacagaggagggaaccagcaccgagcccagcgaaggcagcgccccaggcaccagcaccgagcctagtgagcaggagattaaacggatcaacaagatcagaagaagacttgtgaaagacagcaacaccaagaaggccggcaagacaggccccatgaaaaccctgctggttagagtgatgacacccgatctgagagagcggctggaaaacctgagaaagaagcctgaaaatatcccccagcccatcagcaatacatctagagccaacctgaataagctgctgaccgattacaccgaaatgaagaaggcgatcctgcatgtgtactgggaagagttccagaaggaccctgtgggcctgatgagccgggtggcccagcctgccagcaagaagatcgatcagaacaagctgaaacctgagatggacgagaagggcaacctgaccaccgccggctttgcctgctctcagtgtggccagcccctgttcgtgtacaagctggagcaggtgtctgagaagggcaaggcttacaccaactacttcggacggtgcaatgtggccgagcacgaaaagctgatcctgctggcccagctgaagcccgagaaggatagcgacgaagccgtgacatatagcctgggaaagtttgggcagagggccctggatttctacagcattcatgtgaccaaggagtccacccaccccgtgaagcccctggcccagatcgccggaaacagatacgcctccggacctgtgggaaaggccctgagcgacgcatgtatgggcacaatcgcctccttcctgtctaagtaccaggacatcatcatcgaacaccagaaggtggtgaagggcaaccagaagagactggagagcctgcgggagctggccggcaaggaaaacctggaataccctagcgtgaccctgccacctcagcctcacaccaaggagggcgttgatgcctacaacgaagtgatcgcccgggtgcgaatgtgggtgaacctgaacctgtggcagaagctgaagctaagcagagatgatgccaagcctctgctgagactgaagggattcccttcctttcctctggtcgagagacaggccaacgaagtggactggtgggacatggtgtgtaacgtgaagaagctgatcaacgagaaaaaggaggatggcaaggtgttttggcagaatctggctggctacaagagacaggaagccctgagaccatacctgagcagcgaggaagatcggaagaagggaaagaaattcgctcggtaccagctgggcgacctgctgctgcacctggaaaagaagcacggcgaggactggggaaaggtgtacgacgaggcctgggagcggattgacaagaaagtggaaggcctgagcaagcacatcaagctggaagaggaacggagaagcgaggacgcccagagcaaggccgccctgaccgactggctgcgggctaaggccagcttcgtgatcgagggcctgaaggaggccgacaaggacgagttctgcagatgcgagctgaagctgcagaagtggtacggggacctgcggggaaagcccttcgccatcgaagccgagaacagcatcctggacatcagcggcttcagcaagcagtacaactgtgccttcatctggcagaaggacggcgtgaagaagctgaacctgtacctgatcatcaactacttcaagggcggcaagctgcggttcaagaagatcaaacctgaagccttcgaagccaacagattctacaccgtgatcaacaaaaagagcggcgagatcgtgcccatggaggtgaacttcaacttcgacgaccccaacctgatcatcctgcctctggcctttggcaagagacagggcagagaattcatctggaacgacctgctgtccctggaaaccggcagcctgaagctggccaacggaagagtgatcgagaagacactgtacaacagaagaacccggcaggatgagcctgccctgttcgtggccctgaccttcgagcggcgggaggtcctggactcctccaatatcaaaccaatgaacctgatcggcgtggcaagaggcgaaaacatccccgccgtgatcgccctgaccgaccccgagggctgcccactgagccggtttaaggatagcctgggaaacccaacccacatcctgagaatcggcgagagctataaggagaagcagcggaccatccaggccaagaaggaggtggagcagcggagagccggcggctacagccggaagtacgccagcaaagccaagaatctggcagacgatatggtgagaaacaccgctagagatctgctgtactacgccgtgacccaggatgccatgctgatcttcgccaacctgagccggggcttcggccggcagggcaagcggaccttcatggccgagagacagtacacacggatggaggactggctgaccgccaagctggcctacgagggcctgagcaagacctacctgtccaagacactggcccagtacacctccaagacatgcagcaactgtgggtttaccatcaccagcgccgactacgacagggtgctggagaagctgaagaagacagcaacaggctggatgaccacaattaacggcaaggagctgaaggtggagggccagattacctactacaacagatacaagagacagaacgtagtcaaggacctgtccgtcgagctggatagactgagcgaagaatctgtgaacaacgacatctcctcctggacaaagggcagaagcggagaagctctgagcctcctgaagaaaagattctcccatagacccgtgcaggagaagttcgtgtgcctgaactgcggcttcgagacacacgcagccgagcaagccgccctgaacatcgccagatcctggctgttcctgcggagccaggagtacaagaaataccagacaaacaagacaaccggcaacaccgataagagagccttcgtcgagacctggcagtccttttaccggaagaagcttaaggaggtgtggaaacctgccgtgcggtctggcggatctggcggaggctccaccagccccaagaaaaagagaaaagtctaagctgccttctgcggggcttgccttctggccatgcccttcttctctcccttgcacctgtacctcttggtctttgaataaagcctgagtaggaaggctagcaaaaaaaaaaaaaaaaaaaaaaaaaaaaaaaaaaaaaaaaaaaaaaaaaaaaaaaaaaaaaaaaaaaaaaaaaaaaaaaa

SEQ ID NO: 9019 - RNA, 8787 nt, synthetic construct
  source 1..8787: mol_type = other RNA
aggaaataagagagaaaagaagagtaagaagaaatataagagccaccatggcccctaagaagaagcgtaaagtgagccggatgaaccacgaccaggagttcgacccccctaaggtgtaccctcccgtccccgccgagaagagaaagcccatccgggtcctgagcctgttcgatggcatcgccaccggtctgctggtgctgaaggacctgggcatccaggtggataggtacattgcctccgaggtgtgcgaggactccatcaccgtgggaatggtgcgtcatcagggcaagatcatgtacgtgggcgacgtgcggagcgtgacacagaagcatatccaggagtggggccctttcgacctggtgatcggcggcagcccttgcaatgacctgagcatcgtgaacccagcccggaagggcctgtacgagggaaccggcagactgttcttcgagttttacagactgctgcacgacgcccggcctaaggaaggcgacgaccggcccttcttttggctgttcgagaatgtggtggccatgggagtcagcgacaagcgggatattagccggttcctggagagcaaccccgtgatgatcgatgccaaggaagtgagcgccgcccaccgggccagatacttctggggcaatctgcctggcatgaacagacccctggccagcaccgtgaacgacaagctggagctgcaggagtgcctggagcacggccggatcgccaagttcagcaaggtgagaaccatcaccacccgaagcaacagcatcaaacaaggcaaggaccagcactttcctgtgttcatgaacgagaaggaggacatcctgtggtgtaccgagatggagagagtgttcgggttcccagtccactacacagatgtcagcaacatgtctagactggccagacagagactgctgggaagaagctggtccgtccctgtgatcagacacctgttcgcccctctgaaggagtacttcgcctgcgtgagcagcggcaacagcaacgccaacagccggggccccagcttctctagcggcctggtgccactgtccctgagagggagccacatgggccccatggagatctacaaaaccgtgagcgcctggaagcggcagcctgtgcgcgtgctgagcctgtttcggaatatcgataaagtcctgaaaagcctgggattcctggagagcggctctggctccggcggtggcaccctgaagtacgtggaggatgtgacaaacgtggtcagacgggatgtggagaagtggggccccttcgatctggtgtacggcagcacccaacccctgggcagctcttgtgaccggtgccctggctggtacatgtttcagttccaccggatcctgcagtacgccctgccgagacaggagtcccagcggccattcttttggattttcatggacaacttgctgctgaccgaggatgaccaggaaactaccactcggttcctgcagaccgaagccgtgaccctgcaggacgtgagaggccgggactaccagaacgccatgcgggtgtggtccaacatccctggactgaaaagcaagcacgcacctctgacccctaaagaagaggagtacctgcaggcccaggtgcggagcagaagcaagctggacgcccctaaggtggatctgctggtgaagaattgcctcctgcccctgagagagtacttcaagtatttcagccagaatagtctgcccctgggaggcagcggcggcggcatggccttcgaggacgtggccgtgcacttcagccaggaggagtggggcctgctggacaccgcccagaggagcctgtacaggagggtgatgctggagaacttcgccctgctggccagcctgggcctgagcgtgagcaggccccacgtggtgacccagctggagaggggcgaggagccctgggtgctgagcggcgtggacgtgaccctgccccaggacgcccagaggaggcccaggaggggcagcggcggcccaagcagcggcgcccctcctcccagcggcggcaggcggcccaagcagcggcgcccctcctcccagcggcggcagcccagccggctccccaacctctaccgaggagggcacctctgagtccgccacccccgagagcggccctggcacctccaccgagcccagcgagggcagcgcacccggcagccctgccggcagccccacctccacagaggagggaaccagcaccgagcccagcgaaggcagcgccccaggcaccagcaccgagcctagtgagcaggagattaaacggatcaacaagatcagaagaagacttgtgaaagacagcaacaccaagaaggccggcaagacaggccccatgaaaaccctgctggttagagtgatgacacccgatctgagagagcggctggaaaacctgagaaagaagcctgaaaatatcccccagcccatcagcaatacatctagagccaacctgaataagctgctgaccgattacaccgaaatgaagaaggcgatcctgcatgtgtactgggaagagttccagaaggaccctgtgggcctgatgagccgggtggcccagcctgccagcaagaagatcgatcagaacaagctgaaacctgagatggacgagaagggcaacctgaccaccgccggctttgcctgctctcagtgtggccagcccctgttcgtgtacaagctggagcaggtgtctgagaagggcaaggcttacaccaactacttcggacggtgcaatgtggccgagcacgaaaagctgatcctgctggcccagctgaagcccgagaaggatagcgacgaagccgtgacatatagcctgggaaagtttgggcagagggccctggatttctacagcattcatgtgaccaaggagtccacccaccccgtgaagcccctggcccagatcgccggaaacagatacgcctccggacctgtgggaaaggccctgagcgacgcatgtatgggcacaatcgcctccttcctgtctaagtaccaggacatcatcatcgaacaccagaaggtggtgaagggcaaccagaagagactggagagcctgcgggagctggccggcaaggaaaacctggaataccctagcgtgaccctgccacctcagcctcacaccaaggagggcgttgatgcctacaacgaagtgatcgcccgggtgcgaatgtgggtgaacctgaacctgtggcagaagctgaagctaagcagagatgatgccaagcctctgctgagactgaagggattcccttcctttcctctggtcgagagacaggccaacgaagtggactggtgggacatggtgtgtaacgtgaagaagctgatcaacgagaaaaaggaggatggcaaggtgttttggcagaatctggctggctacaagagacaggaagccctgagaccatacctgagcagcgaggaagatcggaagaagggaaagaaattcgctcggtaccagctgggcgacctgctgctgcacctggaaaagaagcacggcgaggactggggaaaggtgtacgacgaggcctgggagcggattgacaagaaagtggaaggcctgagcaagcacatcaagctggaagaggaacggagaagcgaggacgcccagagcaaggccgccctgaccgactggctgcgggctaaggccagcttcgtgatcgagggcctgaaggaggccgacaaggacgagttctgcagatgcgagctgaagctgcagaagtggtacggggacctgcggggaaagcccttcgccatcgaagccgagaacagcatcctggacatcagcggcttcagcaagcagtacaactgtgccttcatctggcagaaggacggcgtgaagaagctgaacctgtacctgatcatcaactacttcaagggcggcaagctgcggttcaagaagatcaaacctgaagccttcgaagccaacagattctacaccgtgatcaacaaaaagagcggcgagatcgtgcccatggaggtgaacttcaacttcgacgaccccaacctgatcatcctgcctctggcctttggcaagagacagggcagagaattcatctggaacgacctgctgtccctggaaaccggcagcctgaagctggccaacggaagagtgatcgagaagacactgtacaacagaagaacccggcaggatgagcctgccctgttcgtggccctgaccttcgagcggcgggaggtcctggactcctccaatatcaaaccaatgaacctgatcggcgtggcaagaggcgaaaacatccccgccgtgatcgccctgaccgaccccgagggctgcccactgagccggtttaaggatagcctgggaaacccaacccacatcctgagaatcggcgagagctataaggagaagcagcggaccatccaggccaagaaggaggtggagcagcggagagccggcggctacagccggaagtacgccagcaaagccaagaatctggcagacgatatggtgagaaacaccgctagagatctgctgtactacgccgtgacccaggatgccatgctgatcttcgccaacctgagccggggcttcggccggcagggcaagcggaccttcatggccgagagacagtacacacggatggaggactggctgaccgccaagctggcctacgagggcctgagcaagacctacctgtccaagacactggcccagtacacctccaagacatgcagcaactgtgggtttaccatcaccagcgccgactacgacagggtgctggagaagctgaagaagacagcaacaggctggatgaccacaattaacggcaaggagctgaaggtggagggccagattacctactacaacagatacaagagacagaacgtagtcaaggacctgtccgtcgagctggatagactgagcgaagaatctgtgaacaacgacatctcctcctggacaaagggcagaagcggagaagctctgagcctcctgaagaaaagattctcccatagacccgtgcaggagaagttcgtgtgcctgaactgcggcttcgagacacacgcagccgagcaagccgccctgaacatcgccagatcctggctgttcctgcggagccaggagtacaagaaataccagacaaacaagacaaccggcaacaccgataagagagccttcgtcgagacctggcagtccttttaccggaagaagcttaaggaggtgtggaaacctgccgtgcggtctggcggatctggcggaggctccaccagccccaagaaaaagagaaaagtctaagctgccttctgcggggcttgccttctggccatgcccttcttctctcccttgcacctgtacctcttggtctttgaataaagcctgagtaggaaggctagcaaaaaaaaaaaaaaaaaaaaaaaaaaaaaaaaaaaaaaaaaaaaaaaaaaaaaaaaaaaaaaaaaaaaaaaaaaaaaaaagcccagccggctccccaacctctaccgaggagggcacctctgagtccgccacccccgagagcggccctggcacctccaccgagcccagcgagggcagcgcacccggcagccctgccggcagccccacctccacagaggagggaaccagcaccgagcccagcgaaggcagcgccccaggcaccagcaccgagcctagtgagcaggagattaaacggatcaacaagatcagaagaagacttgtgaaagacagcaacaccaagaaggccggcaagacaggccccatgaaaaccctgctggttagagtgatgacacccgatctgagagagcggctggaaaacctgagaaagaagcctgaaaatatcccccagcccatcagcaatacatctagagccaacctgaataagctgctgaccgattacaccgaaatgaagaaggcgatcctgcatgtgtactgggaagagttccagaaggaccctgtgggcctgatgagccgggtggcccagcctgccagcaagaagatcgatcagaacaagctgaaacctgagatggacgagaagggcaacctgaccaccgccggctttgcctgctctcagtgtggccagcccctgttcgtgtacaagctggagcaggtgtctgagaagggcaaggcttacaccaactacttcggacggtgcaatgtggccgagcacgaaaagctgatcctgctggcccagctgaagcccgagaaggatagcgacgaagccgtgacatatagcctgggaaagtttgggcagagggccctggatttctacagcattcatgtgaccaaggagtccacccaccccgtgaagcccctggcccagatcgccggaaacagatacgcctccggacctgtgggaaaggccctgagcgacgcatgtatgggcacaatcgcctccttcctgtctaagtaccaggacatcatcatcgaacaccagaaggtggtgaagggcaaccagaagagactggagagcctgcgggagctggccggcaaggaaaacctggaataccctagcgtgaccctgccacctcagcctcacaccaaggagggcgttgatgcctacaacgaagtgatcgcccgggtgcgaatgtgggtgaacctgaacctgtggcagaagctgaagctaagcagagatgatgccaagcctctgctgagactgaagggattcccttcctttcctctggtcgagagacaggccaacgaagtggactggtgggacatggtgtgtaacgtgaagaagctgatcaacgagaaaaaggaggatggcaaggtgttttggcagaatctggctggctacaagagacaggaagccctgagaccatacctgagcagcgaggaagatcggaagaagggaaagaaattcgctcggtaccagctgggcgacctgctgctgcacctggaaaagaagcacggcgaggactggggaaaggtgtacgacgaggcctgggagcggattgacaagaaagtggaaggcctgagcaagcacatcaagctggaagaggaacggagaagcgaggacgcccagagcaaggccgccctgaccgactggctgcgggctaaggccagcttcgtgatcgagggcctgaaggaggccgacaaggacgagttctgcagatgcgagctgaagctgcagaagtggtacggggacctgcggggaaagcccttcgccatcgaagccgagaacagcatcctggacatcagcggcttcagcaagcagtacaactgtgccttcatctggcagaaggacggcgtgaagaagctgaacctgtacctgatcatcaactacttcaagggcggcaagctgcggttcaagaagatcaaacctgaagccttcgaagccaacagattctacaccgtgatcaacaaaaagagcggcgagatcgtgcccatggaggtgaacttcaacttcgacgaccccaacctgatcatcctgcctctggcctttggcaagagacagggcagagaattcatctggaacgacctgctgtccctggaaaccggcagcctgaagctggccaacggaagagtgatcgagaagacactgtacaacagaagaacccggcaggatgagcctgccctgttcgtggccctgaccttcgagcggcgggaggtcctggactcctccaatatcaaaccaatgaacctgatcggcgtggcaagaggcgaaaacatccccgccgtgatcgccctgaccgaccccgagggctgcccactgagccggtttaaggatagcctgggaaacccaacccacatcctgagaatcggcgagagctataaggagaagcagcggaccatccaggccaagaaggaggtggagcagcggagagccggcggctacagccggaagtacgccagcaaagccaagaatctggcagacgatatggtgagaaacaccgctagagatctgctgtactacgccgtgacccaggatgccatgctgatcttcgccaacctgagccggggcttcggccggcagggcaagcggaccttcatggccgagagacagtacacacggatggaggactggctgaccgccaagctggcctacgagggcctgagcaagacctacctgtccaagacactggcccagtacacctccaagacatgcagcaactgtgggtttaccatcaccagcgccgactacgacagggtgctggagaagctgaagaagacagcaacaggctggatgaccacaattaacggcaaggagctgaaggtggagggccagattacctactacaacagatacaagagacagaacgtagtcaaggacctgtccgtcgagctggatagactgagcgaagaatctgtgaacaacgacatctcctcctggacaaagggcagaagcggagaagctctgagcctcctgaagaaaagattctcccatagacccgtgcaggagaagttcgtgtgcctgaactgcggcttcgagacacacgcagccgagcaagccgccctgaacatcgccagatcctggctgttcctgcggagccaggagtacaagaaataccagacaaacaagacaaccggcaacaccgataagagagccttcgtcgagacctggcagtccttttaccggaagaagcttaaggaggtgtggaaacctgccgtgcggtctggcggatctggcggaggctccaccagccccaagaaaaagagaaaagtctaagctgccttctgcggggcttgccttctggccatgcccttcttctctcccttgcacctgtacctcttggtctttgaataaagcctgagtaggaaggctagcaaaaaaaaaaaaaaaaaaaaaaaaaaaaaaaaaaaaaaaaaaaaaaaaaaaaaaaaaaaaaaaaaaaaaaaaaaaaaaaa

SEQ ID NO: 9020 - RNA, 8787 nt, synthetic construct
  source 1..8787: mol_type = other RNA
aggaaataagagagaaaagaagagtaagaagaaatataagagccaccatggcccctaagaagaagcgtaaagtgagccggatgaaccacgaccaggagttcgacccccctaaggtgtaccctcccgtccccgccgagaagagaaagcccatccgggtcctgagcctgttcgatggcatcgccaccggtctgctggtgctgaaggacctgggcatccaggtggataggtacattgcctccgaggtgtgcgaggactccatcaccgtgggaatggtgcgtcatcagggcaagatcatgtacgtgggcgacgtgcggagcgtgacacagaagcatatccaggagtggggccctttcgacctggtgatcggcggcagcccttgcaatgacctgagcatcgtgaacccagcccggaagggcctgtacgagggaaccggcagactgttcttcgagttttacagactgctgcacgacgcccggcctaaggaaggcgacgaccggcccttcttttggctgttcgagaatgtggtggccatgggagtcagcgacaagcgggatattagccggttcctggagagcaaccccgtgatgatcgatgccaaggaagtgagcgccgcccaccgggccagatacttctggggcaatctgcctggcatgaacagacccctggccagcaccgtgaacgacaagctggagctgcaggagtgcctggagcacggccggatcgccaagttcagcaaggtgagaaccatcaccacccgaagcaacagcatcaaacaaggcaaggaccagcactttcctgtgttcatgaacgagaaggaggacatcctgtggtgtaccgagatggagagagtgttcgggttcccagtccactacacagatgtcagcaacatgtctagactggccagacagagactgctgggaagaagctggtccgtccctgtgatcagacacctgttcgcccctctgaaggagtacttcgcctgcgtgagcagcggcaacagcaacgccaacagccggggccccagcttctctagcggcctggtgccactgtccctgagagggagccacatgggccccatggagatctacaaaaccgtgagcgcctggaagcggcagcctgtgcgcgtgctgagcctgtttcggaatatcgataaagtcctgaaaagcctgggattcctggagagcggctctggctccggcggtggcaccctgaagtacgtggaggatgtgacaaacgtggtcagacgggatgtggagaagtggggccccttcgatctggtgtacggcagcacccaacccctgggcagctcttgtgaccggtgccctggctggtacatgtttcagttccaccggatcctgcagtacgccctgccgagacaggagtcccagcggccattcttttggattttcatggacaacttgctgctgaccgaggatgaccaggaaactaccactcggttcctgcagaccgaagccgtgaccctgcaggacgtgagaggccgggactaccagaacgccatgcgggtgtggtccaacatccctggactgaaaagcaagcacgcacctctgacccctaaagaagaggagtacctgcaggcccaggtgcggagcagaagcaagctggacgcccctaaggtggatctgctggtgaagaattgcctcctgcccctgagagagtacttcaagtatttcagccagaatagtctgcccctgggaggcagcggcggcggcttccagagcgaggtgatgttcagggacgtgaccgtgaacttcagccaggaggagtgggagtgcctgaacagctacgagagggacctgtacaaggacgtgatgctggagaactacagccacctggtgagcctgggctgcagcatcagcaagcccgacgtgatcaccctgctggagcagggcaaggagccctggatgatcgtgagggacgagaggaggaggtggagccaggacctggagaccaggggcggcccaagcagcggcgcccctcctcccagcggcggcaggcggcccaagcagcggcgcccctcctcccagcggcggcagcccagccggctccccaacctctaccgaggagggcacctctgagtccgccacccccgagagcggccctggcacctccaccgagcccagcgagggcagcgcacccggcagccctgccggcagccccacctccacagaggagggaaccagcaccgagcccagcgaaggcagcgccccaggcaccagcaccgagcctagtgagcaggagattaaacggatcaacaagatcagaagaagacttgtgaaagacagcaacaccaagaaggccggcaagacaggccccatgaaaaccctgctggttagagtgatgacacccgatctgagagagcggctggaaaacctgagaaagaagcctgaaaatatcccccagcccatcagcaatacatctagagccaacctgaataagctgctgaccgattacaccgaaatgaagaaggcgatcctgcatgtgtactgggaagagttccagaaggaccctgtgggcctgatgagccgggtggcccagcctgccagcaagaagatcgatcagaacaagctgaaacctgagatggacgagaagggcaacctgaccaccgccggctttgcctgctctcagtgtggccagcccctgttcgtgtacaagctggagcaggtgtctgagaagggcaaggcttacaccaactacttcggacggtgcaatgtggccgagcacgaaaagctgatcctgctggcccagctgaagcccgagaaggatagcgacgaagccgtgacatatagcctgggaaagtttgggcagagggccctggatttctacagcattcatgtgaccaaggagtccacccaccccgtgaagcccctggcccagatcgccggaaacagatacgcctccggacctgtgggaaaggccctgagcgacgcatgtatgggcacaatcgcctccttcctgtctaagtaccaggacatcatcatcgaacaccagaaggtggtgaagggcaaccagaagagactggagagcctgcgggagctggccggcaaggaaaacctggaataccctagcgtgaccctgccacctcagcctcacaccaaggagggcgttgatgcctacaacgaagtgatcgcccgggtgcgaatgtgggtgaacctgaacctgtggcagaagctgaagctaagcagagatgatgccaagcctctgctgagactgaagggattcccttcctttcctctggtcgagagacaggccaacgaagtggactggtgggacatggtgtgtaacgtgaagaagctgatcaacgagaaaaaggaggatggcaaggtgttttggcagaatctggctggctacaagagacaggaagccctgagaccatacctgagcagcgaggaagatcggaagaagggaaagaaattcgctcggtaccagctgggcgacctgctgctgcacctggaaaagaagcacggcgaggactggggaaaggtgtacgacgaggcctgggagcggattgacaagaaagtggaaggcctgagcaagcacatcaagctggaagaggaacggagaagcgaggacgcccagagcaaggccgccctgaccgactggctgcgggctaaggccagcttcgtgatcgagggcctgaaggaggccgacaaggacgagttctgcagatgcgagctgaagctgcagaagtggtacggggacctgcggggaaagcccttcgccatcgaagccgagaacagcatcctggacatcagcggcttcagcaagcagtacaactgtgccttcatctggcagaaggacggcgtgaagaagctgaacctgtacctgatcatcaactacttcaagggcggcaagctgcggttcaagaagatcaaacctgaagccttcgaagccaacagattctacaccgtgatcaacaaaaagagcggcgagatcgtgcccatggaggtgaacttcaacttcgacgaccccaacctgatcatcctgcctctggcctttggcaagagacagggcagagaattcatctggaacgacctgctgtccctggaaaccggcagcctgaagctggccaacggaagagtgatcgagaagacactgtacaacagaagaacccggcaggatgagcctgccctgttcgtggccctgaccttcgagcggcgggaggtcctggactcctccaatatcaaaccaatgaacctgatcggcgtggcaagaggcgaaaacatccccgccgtgatcgccctgaccgaccccgagggctgcccactgagccggtttaaggatagcctgggaaacccaacccacatcctgagaatcggcgagagctataaggagaagcagcggaccatccaggccaagaaggaggtggagcagcggagagccggcggctacagccggaagtacgccagcaaagccaagaatctggcagacgatatggtgagaaacaccgctagagatctgctgtactacgccgtgacccaggatgccatgctgatcttcgccaacctgagccggggcttcggccggcagggcaagcggaccttcatggccgagagacagtacacacggatggaggactggctgaccgccaagctggcctacgagggcctgagcaagacctacctgtccaagacactggcccagtacacctccaagacatgcagcaactgtgggtttaccatcaccagcgccgactacgacagggtgctggagaagctgaagaagacagcaacaggctggatgaccacaattaacggcaaggagctgaaggtggagggccagattacctactacaacagatacaagagacagaacgtagtcaaggacctgtccgtcgagctggatagactgagcgaagaatctgtgaacaacgacatctcctcctggacaaagggcagaagcggagaagctctgagcctcctgaagaaaagattctcccatagacccgtgcaggagaagttcgtgtgcctgaactgcggcttcgagacacacgcagccgagcaagccgccctgaacatcgccagatcctggctgttcctgcggagccaggagtacaagaaataccagacaaacaagacaaccggcaacaccgataagagagccttcgtcgagacctggcagtccttttaccggaagaagcttaaggaggtgtggaaacctgccgtgcggtctggcggatctggcggaggctccaccagccccaagaaaaagagaaaagtctaagctgccttctgcggggcttgccttctggccatgcccttcttctctcccttgcacctgtacctcttggtctttgaataaagcctgagtaggaaggctagcaaaaaaaaaaaaaaaaaaaaaaaaaaaaaaaaaaaaaaaaaaaaaaaaaaaaaaaaaaaaaaaaaaaaaaaaaaaaaaaagcccagccggctccccaacctctaccgaggagggcacctctgagtccgccacccccgagagcggccctggcacctccaccgagcccagcgagggcagcgcacccggcagccctgccggcagccccacctccacagaggagggaaccagcaccgagcccagcgaaggcagcgccccaggcaccagcaccgagcctagtgagcaggagattaaacggatcaacaagatcagaagaagacttgtgaaagacagcaacaccaagaaggccggcaagacaggccccatgaaaaccctgctggttagagtgatgacacccgatctgagagagcggctggaaaacctgagaaagaagcctgaaaatatcccccagcccatcagcaatacatctagagccaacctgaataagctgctgaccgattacaccgaaatgaagaaggcgatcctgcatgtgtactgggaagagttccagaaggaccctgtgggcctgatgagccgggtggcccagcctgccagcaagaagatcgatcagaacaagctgaaacctgagatggacgagaagggcaacctgaccaccgccggctttgcctgctctcagtgtggccagcccctgttcgtgtacaagctggagcaggtgtctgagaagggcaaggcttacaccaactacttcggacggtgcaatgtggccgagcacgaaaagctgatcctgctggcccagctgaagcccgagaaggatagcgacgaagccgtgacatatagcctgggaaagtttgggcagagggccctggatttctacagcattcatgtgaccaaggagtccacccaccccgtgaagcccctggcccagatcgccggaaacagatacgcctccggacctgtgggaaaggccctgagcgacgcatgtatgggcacaatcgcctccttcctgtctaagtaccaggacatcatcatcgaacaccagaaggtggtgaagggcaaccagaagagactggagagcctgcgggagctggccggcaaggaaaacctggaataccctagcgtgaccctgccacctcagcctcacaccaaggagggcgttgatgcctacaacgaagtgatcgcccgggtgcgaatgtgggtgaacctgaacctgtggcagaagctgaagctaagcagagatgatgccaagcctctgctgagactgaagggattcccttcctttcctctggtcgagagacaggccaacgaagtggactggtgggacatggtgtgtaacgtgaagaagctgatcaacgagaaaaaggaggatggcaaggtgttttggcagaatctggctggctacaagagacaggaagccctgagaccatacctgagcagcgaggaagatcggaagaagggaaagaaattcgctcggtaccagctgggcgacctgctgctgcacctggaaaagaagcacggcgaggactggggaaaggtgtacgacgaggcctgggagcggattgacaagaaagtggaaggcctgagcaagcacatcaagctggaagaggaacggagaagcgaggacgcccagagcaaggccgccctgaccgactggctgcgggctaaggccagcttcgtgatcgagggcctgaaggaggccgacaaggacgagttctgcagatgcgagctgaagctgcagaagtggtacggggacctgcggggaaagcccttcgccatcgaagccgagaacagcatcctggacatcagcggcttcagcaagcagtacaactgtgccttcatctggcagaaggacggcgtgaagaagctgaacctgtacctgatcatcaactacttcaagggcggcaagctgcggttcaagaagatcaaacctgaagccttcgaagccaacagattctacaccgtgatcaacaaaaagagcggcgagatcgtgcccatggaggtgaacttcaacttcgacgaccccaacctgatcatcctgcctctggcctttggcaagagacagggcagagaattcatctggaacgacctgctgtccctggaaaccggcagcctgaagctggccaacggaagagtgatcgagaagacactgtacaacagaagaacccggcaggatgagcctgccctgttcgtggccctgaccttcgagcggcgggaggtcctggactcctccaatatcaaaccaatgaacctgatcggcgtggcaagaggcgaaaacatccccgccgtgatcgccctgaccgaccccgagggctgcccactgagccggtttaaggatagcctgggaaacccaacccacatcctgagaatcggcgagagctataaggagaagcagcggaccatccaggccaagaaggaggtggagcagcggagagccggcggctacagccggaagtacgccagcaaagccaagaatctggcagacgatatggtgagaaacaccgctagagatctgctgtactacgccgtgacccaggatgccatgctgatcttcgccaacctgagccggggcttcggccggcagggcaagcggaccttcatggccgagagacagtacacacggatggaggactggctgaccgccaagctggcctacgagggcctgagcaagacctacctgtccaagacactggcccagtacacctccaagacatgcagcaactgtgggtttaccatcaccagcgccgactacgacagggtgctggagaagctgaagaagacagcaacaggctggatgaccacaattaacggcaaggagctgaaggtggagggccagattacctactacaacagatacaagagacagaacgtagtcaaggacctgtccgtcgagctggatagactgagcgaagaatctgtgaacaacgacatctcctcctggacaaagggcagaagcggagaagctctgagcctcctgaagaaaagattctcccatagacccgtgcaggagaagttcgtgtgcctgaactgcggcttcgagacacacgcagccgagcaagccgccctgaacatcgccagatcctggctgttcctgcggagccaggagtacaagaaataccagacaaacaagacaaccggcaacaccgataagagagccttcgtcgagacctggcagtccttttaccggaagaagcttaaggaggtgtggaaacctgccgtgcggtctggcggatctggcggaggctccaccagccccaagaaaaagagaaaagtctaagctgccttctgcggggcttgccttctggccatgcccttcttctctcccttgcacctgtacctcttggtctttgaataaagcctgagtaggaaggctagcaaaaaaaaaaaaaaaaaaaaaaaaaaaaaaaaaaaaaaaaaaaaaaaaaaaaaaaaaaaaaaaaaaaaaaaaaaaaaaaa

SEQ ID NO: 9021 - RNA, 8787 nt, synthetic construct
  source 1..8787: mol_type = other RNA
aggaaataagagagaaaagaagagtaagaagaaatataagagccaccatggcccctaagaagaagcgtaaagtgagccggatgaaccacgaccaggagttcgacccccctaaggtgtaccctcccgtccccgccgagaagagaaagcccatccgggtcctgagcctgttcgatggcatcgccaccggtctgctggtgctgaaggacctgggcatccaggtggataggtacattgcctccgaggtgtgcgaggactccatcaccgtgggaatggtgcgtcatcagggcaagatcatgtacgtgggcgacgtgcggagcgtgacacagaagcatatccaggagtggggccctttcgacctggtgatcggcggcagcccttgcaatgacctgagcatcgtgaacccagcccggaagggcctgtacgagggaaccggcagactgttcttcgagttttacagactgctgcacgacgcccggcctaaggaaggcgacgaccggcccttcttttggctgttcgagaatgtggtggccatgggagtcagcgacaagcgggatattagccggttcctggagagcaaccccgtgatgatcgatgccaaggaagtgagcgccgcccaccgggccagatacttctggggcaatctgcctggcatgaacagacccctggccagcaccgtgaacgacaagctggagctgcaggagtgcctggagcacggccggatcgccaagttcagcaaggtgagaaccatcaccacccgaagcaacagcatcaaacaaggcaaggaccagcactttcctgtgttcatgaacgagaaggaggacatcctgtggtgtaccgagatggagagagtgttcgggttcccagtccactacacagatgtcagcaacatgtctagactggccagacagagactgctgggaagaagctggtccgtccctgtgatcagacacctgttcgcccctctgaaggagtacttcgcctgcgtgagcagcggcaacagcaacgccaacagccggggccccagcttctctagcggcctggtgccactgtccctgagagggagccacatgggccccatggagatctacaaaaccgtgagcgcctggaagcggcagcctgtgcgcgtgctgagcctgtttcggaatatcgataaagtcctgaaaagcctgggattcctggagagcggctctggctccggcggtggcaccctgaagtacgtggaggatgtgacaaacgtggtcagacgggatgtggagaagtggggccccttcgatctggtgtacggcagcacccaacccctgggcagctcttgtgaccggtgccctggctggtacatgtttcagttccaccggatcctgcagtacgccctgccgagacaggagtcccagcggccattcttttggattttcatggacaacttgctgctgaccgaggatgaccaggaaactaccactcggttcctgcagaccgaagccgtgaccctgcaggacgtgagaggccgggactaccagaacgccatgcgggtgtggtccaacatccctggactgaaaagcaagcacgcacctctgacccctaaagaagaggagtacctgcaggcccaggtgcggagcagaagcaagctggacgcccctaaggtggatctgctggtgaagaattgcctcctgcccctgagagagtacttcaagtatttcagccagaatagtctgcccctgggaggcagcggcggcggcgtgcaggagcccgtgaccttcaaggacgtggccgtggacttcacccaggaggagtggggccagctggacctggtgcagaggaccctgtacagggacgtgatgctggagacctacggccacctgctgagcgtgggcaaccagatcgccaagcccgaggtgatcagcctgctggagcagggcgaggagccctggagcgtggagcagacctgcccccagagggcctgccccgagtggatgaggaacggcggcccaagcagcggcgcccctcctcccagcggcggcaggcggcccaagcagcggcgcccctcctcccagcggcggcagcccagccggctccccaacctctaccgaggagggcacctctgagtccgccacccccgagagcggccctggcacctccaccgagcccagcgagggcagcgcacccggcagccctgccggcagccccacctccacagaggagggaaccagcaccgagcccagcgaaggcagcgccccaggcaccagcaccgagcctagtgagcaggagattaaacggatcaacaagatcagaagaagacttgtgaaagacagcaacaccaagaaggccggcaagacaggccccatgaaaaccctgctggttagagtgatgacacccgatctgagagagcggctggaaaacctgagaaagaagcctgaaaatatcccccagcccatcagcaatacatctagagccaacctgaataagctgctgaccgattacaccgaaatgaagaaggcgatcctgcatgtgtactgggaagagttccagaaggaccctgtgggcctgatgagccgggtggcccagcctgccagcaagaagatcgatcagaacaagctgaaacctgagatggacgagaagggcaacctgaccaccgccggctttgcctgctctcagtgtggccagcccctgttcgtgtacaagctggagcaggtgtctgagaagggcaaggcttacaccaactacttcggacggtgcaatgtggccgagcacgaaaagctgatcctgctggcccagctgaagcccgagaaggatagcgacgaagccgtgacatatagcctgggaaagtttgggcagagggccctggatttctacagcattcatgtgaccaaggagtccacccaccccgtgaagcccctggcccagatcgccggaaacagatacgcctccggacctgtgggaaaggccctgagcgacgcatgtatgggcacaatcgcctccttcctgtctaagtaccaggacatcatcatcgaacaccagaaggtggtgaagggcaaccagaagagactggagagcctgcgggagctggccggcaaggaaaacctggaataccctagcgtgaccctgccacctcagcctcacaccaaggagggcgttgatgcctacaacgaagtgatcgcccgggtgcgaatgtgggtgaacctgaacctgtggcagaagctgaagctaagcagagatgatgccaagcctctgctgagactgaagggattcccttcctttcctctggtcgagagacaggccaacgaagtggactggtgggacatggtgtgtaacgtgaagaagctgatcaacgagaaaaaggaggatggcaaggtgttttggcagaatctggctggctacaagagacaggaagccctgagaccatacctgagcagcgaggaagatcggaagaagggaaagaaattcgctcggtaccagctgggcgacctgctgctgcacctggaaaagaagcacggcgaggactggggaaaggtgtacgacgaggcctgggagcggattgacaagaaagtggaaggcctgagcaagcacatcaagctggaagaggaacggagaagcgaggacgcccagagcaaggccgccctgaccgactggctgcgggctaaggccagcttcgtgatcgagggcctgaaggaggccgacaaggacgagttctgcagatgcgagctgaagctgcagaagtggtacggggacctgcggggaaagcccttcgccatcgaagccgagaacagcatcctggacatcagcggcttcagcaagcagtacaactgtgccttcatctggcagaaggacggcgtgaagaagctgaacctgtacctgatcatcaactacttcaagggcggcaagctgcggttcaagaagatcaaacctgaagccttcgaagccaacagattctacaccgtgatcaacaaaaagagcggcgagatcgtgcccatggaggtgaacttcaacttcgacgaccccaacctgatcatcctgcctctggcctttggcaagagacagggcagagaattcatctggaacgacctgctgtccctggaaaccggcagcctgaagctggccaacggaagagtgatcgagaagacactgtacaacagaagaacccggcaggatgagcctgccctgttcgtggccctgaccttcgagcggcgggaggtcctggactcctccaatatcaaaccaatgaacctgatcggcgtggcaagaggcgaaaacatccccgccgtgatcgccctgaccgaccccgagggctgcccactgagccggtttaaggatagcctgggaaacccaacccacatcctgagaatcggcgagagctataaggagaagcagcggaccatccaggccaagaaggaggtggagcagcggagagccggcggctacagccggaagtacgccagcaaagccaagaatctggcagacgatatggtgagaaacaccgctagagatctgctgtactacgccgtgacccaggatgccatgctgatcttcgccaacctgagccggggcttcggccggcagggcaagcggaccttcatggccgagagacagtacacacggatggaggactggctgaccgccaagctggcctacgagggcctgagcaagacctacctgtccaagacactggcccagtacacctccaagacatgcagcaactgtgggtttaccatcaccagcgccgactacgacagggtgctggagaagctgaagaagacagcaacaggctggatgaccacaattaacggcaaggagctgaaggtggagggccagattacctactacaacagatacaagagacagaacgtagtcaaggacctgtccgtcgagctggatagactgagcgaagaatctgtgaacaacgacatctcctcctggacaaagggcagaagcggagaagctctgagcctcctgaagaaaagattctcccatagacccgtgcaggagaagttcgtgtgcctgaactgcggcttcgagacacacgcagccgagcaagccgccctgaacatcgccagatcctggctgttcctgcggagccaggagtacaagaaataccagacaaacaagacaaccggcaacaccgataagagagccttcgtcgagacctggcagtccttttaccggaagaagcttaaggaggtgtggaaacctgccgtgcggtctggcggatctggcggaggctccaccagccccaagaaaaagagaaaagtctaagctgccttctgcggggcttgccttctggccatgcccttcttctctcccttgcacctgtacctcttggtctttgaataaagcctgagtaggaaggctagcaaaaaaaaaaaaaaaaaaaaaaaaaaaaaaaaaaaaaaaaaaaaaaaaaaaaaaaaaaaaaaaaaaaaaaaaaaaaaaaagcccagccggctccccaacctctaccgaggagggcacctctgagtccgccacccccgagagcggccctggcacctccaccgagcccagcgagggcagcgcacccggcagccctgccggcagccccacctccacagaggagggaaccagcaccgagcccagcgaaggcagcgccccaggcaccagcaccgagcctagtgagcaggagattaaacggatcaacaagatcagaagaagacttgtgaaagacagcaacaccaagaaggccggcaagacaggccccatgaaaaccctgctggttagagtgatgacacccgatctgagagagcggctggaaaacctgagaaagaagcctgaaaatatcccccagcccatcagcaatacatctagagccaacctgaataagctgctgaccgattacaccgaaatgaagaaggcgatcctgcatgtgtactgggaagagttccagaaggaccctgtgggcctgatgagccgggtggcccagcctgccagcaagaagatcgatcagaacaagctgaaacctgagatggacgagaagggcaacctgaccaccgccggctttgcctgctctcagtgtggccagcccctgttcgtgtacaagctggagcaggtgtctgagaagggcaaggcttacaccaactacttcggacggtgcaatgtggccgagcacgaaaagctgatcctgctggcccagctgaagcccgagaaggatagcgacgaagccgtgacatatagcctgggaaagtttgggcagagggccctggatttctacagcattcatgtgaccaaggagtccacccaccccgtgaagcccctggcccagatcgccggaaacagatacgcctccggacctgtgggaaaggccctgagcgacgcatgtatgggcacaatcgcctccttcctgtctaagtaccaggacatcatcatcgaacaccagaaggtggtgaagggcaaccagaagagactggagagcctgcgggagctggccggcaaggaaaacctggaataccctagcgtgaccctgccacctcagcctcacaccaaggagggcgttgatgcctacaacgaagtgatcgcccgggtgcgaatgtgggtgaacctgaacctgtggcagaagctgaagctaagcagagatgatgccaagcctctgctgagactgaagggattcccttcctttcctctggtcgagagacaggccaacgaagtggactggtgggacatggtgtgtaacgtgaagaagctgatcaacgagaaaaaggaggatggcaaggtgttttggcagaatctggctggctacaagagacaggaagccctgagaccatacctgagcagcgaggaagatcggaagaagggaaagaaattcgctcggtaccagctgggcgacctgctgctgcacctggaaaagaagcacggcgaggactggggaaaggtgtacgacgaggcctgggagcggattgacaagaaagtggaaggcctgagcaagcacatcaagctggaagaggaacggagaagcgaggacgcccagagcaaggccgccctgaccgactggctgcgggctaaggccagcttcgtgatcgagggcctgaaggaggccgacaaggacgagttctgcagatgcgagctgaagctgcagaagtggtacggggacctgcggggaaagcccttcgccatcgaagccgagaacagcatcctggacatcagcggcttcagcaagcagtacaactgtgccttcatctggcagaaggacggcgtgaagaagctgaacctgtacctgatcatcaactacttcaagggcggcaagctgcggttcaagaagatcaaacctgaagccttcgaagccaacagattctacaccgtgatcaacaaaaagagcggcgagatcgtgcccatggaggtgaacttcaacttcgacgaccccaacctgatcatcctgcctctggcctttggcaagagacagggcagagaattcatctggaacgacctgctgtccctggaaaccggcagcctgaagctggccaacggaagagtgatcgagaagacactgtacaacagaagaacccggcaggatgagcctgccctgttcgtggccctgaccttcgagcggcgggaggtcctggactcctccaatatcaaaccaatgaacctgatcggcgtggcaagaggcgaaaacatccccgccgtgatcgccctgaccgaccccgagggctgcccactgagccggtttaaggatagcctgggaaacccaacccacatcctgagaatcggcgagagctataaggagaagcagcggaccatccaggccaagaaggaggtggagcagcggagagccggcggctacagccggaagtacgccagcaaagccaagaatctggcagacgatatggtgagaaacaccgctagagatctgctgtactacgccgtgacccaggatgccatgctgatcttcgccaacctgagccggggcttcggccggcagggcaagcggaccttcatggccgagagacagtacacacggatggaggactggctgaccgccaagctggcctacgagggcctgagcaagacctacctgtccaagacactggcccagtacacctccaagacatgcagcaactgtgggtttaccatcaccagcgccgactacgacagggtgctggagaagctgaagaagacagcaacaggctggatgaccacaattaacggcaaggagctgaaggtggagggccagattacctactacaacagatacaagagacagaacgtagtcaaggacctgtccgtcgagctggatagactgagcgaagaatctgtgaacaacgacatctcctcctggacaaagggcagaagcggagaagctctgagcctcctgaagaaaagattctcccatagacccgtgcaggagaagttcgtgtgcctgaactgcggcttcgagacacacgcagccgagcaagccgccctgaacatcgccagatcctggctgttcctgcggagccaggagtacaagaaataccagacaaacaagacaaccggcaacaccgataagagagccttcgtcgagacctggcagtccttttaccggaagaagcttaaggaggtgtggaaacctgccgtgcggtctggcggatctggcggaggctccaccagccccaagaaaaagagaaaagtctaagctgccttctgcggggcttgccttctggccatgcccttcttctctcccttgcacctgtacctcttggtctttgaataaagcctgagtaggaaggctagcaaaaaaaaaaaaaaaaaaaaaaaaaaaaaaaaaaaaaaaaaaaaaaaaaaaaaaaaaaaaaaaaaaaaaaaaaaaaaaaa

SEQ ID NO: 9022 - RNA, 8787 nt, synthetic construct
  source 1..8787: mol_type = other RNA
aggaaataagagagaaaagaagagtaagaagaaatataagagccaccatggcccctaagaagaagcgtaaagtgagccggatgaaccacgaccaggagttcgacccccctaaggtgtaccctcccgtccccgccgagaagagaaagcccatccgggtcctgagcctgttcgatggcatcgccaccggtctgctggtgctgaaggacctgggcatccaggtggataggtacattgcctccgaggtgtgcgaggactccatcaccgtgggaatggtgcgtcatcagggcaagatcatgtacgtgggcgacgtgcggagcgtgacacagaagcatatccaggagtggggccctttcgacctggtgatcggcggcagcccttgcaatgacctgagcatcgtgaacccagcccggaagggcctgtacgagggaaccggcagactgttcttcgagttttacagactgctgcacgacgcccggcctaaggaaggcgacgaccggcccttcttttggctgttcgagaatgtggtggccatgggagtcagcgacaagcgggatattagccggttcctggagagcaaccccgtgatgatcgatgccaaggaagtgagcgccgcccaccgggccagatacttctggggcaatctgcctggcatgaacagacccctggccagcaccgtgaacgacaagctggagctgcaggagtgcctggagcacggccggatcgccaagttcagcaaggtgagaaccatcaccacccgaagcaacagcatcaaacaaggcaaggaccagcactttcctgtgttcatgaacgagaaggaggacatcctgtggtgtaccgagatggagagagtgttcgggttcccagtccactacacagatgtcagcaacatgtctagactggccagacagagactgctgggaagaagctggtccgtccctgtgatcagacacctgttcgcccctctgaaggagtacttcgcctgcgtgagcagcggcaacagcaacgccaacagccggggccccagcttctctagcggcctggtgccactgtccctgagagggagccacatgggccccatggagatctacaaaaccgtgagcgcctggaagcggcagcctgtgcgcgtgctgagcctgtttcggaatatcgataaagtcctgaaaagcctgggattcctggagagcggctctggctccggcggtggcaccctgaagtacgtggaggatgtgacaaacgtggtcagacgggatgtggagaagtggggccccttcgatctggtgtacggcagcacccaacccctgggcagctcttgtgaccggtgccctggctggtacatgtttcagttccaccggatcctgcagtacgccctgccgagacaggagtcccagcggccattcttttggattttcatggacaacttgctgctgaccgaggatgaccaggaaactaccactcggttcctgcagaccgaagccgtgaccctgcaggacgtgagaggccgggactaccagaacgccatgcgggtgtggtccaacatccctggactgaaaagcaagcacgcacctctgacccctaaagaagaggagtacctgcaggcccaggtgcggagcagaagcaagctggacgcccctaaggtggatctgctggtgaagaattgcctcctgcccctgagagagtacttcaagtatttcagccagaatagtctgcccctgggaggcagcggcggcggcggcgaggagcccgtgaacttcgaggaggtggccgtgtacttcagcagggaggagtgggccctgctggaccccgcccagagggccctgtacagggacgtgatgctggagacctacgagtgcgtggccagcctggcccccctgcccgcccccaagcccatggtgatcagcctgctggaggagggcgaggagccctggatccccgacgtgggcagccccgaggccgtggccggcgacgtgagccccggcggcccaagcagcggcgcccctcctcccagcggcggcaggcggcccaagcagcggcgcccctcctcccagcggcggcagcccagccggctccccaacctctaccgaggagggcacctctgagtccgccacccccgagagcggccctggcacctccaccgagcccagcgagggcagcgcacccggcagccctgccggcagccccacctccacagaggagggaaccagcaccgagcccagcgaaggcagcgccccaggcaccagcaccgagcctagtgagcaggagattaaacggatcaacaagatcagaagaagacttgtgaaagacagcaacaccaagaaggccggcaagacaggccccatgaaaaccctgctggttagagtgatgacacccgatctgagagagcggctggaaaacctgagaaagaagcctgaaaatatcccccagcccatcagcaatacatctagagccaacctgaataagctgctgaccgattacaccgaaatgaagaaggcgatcctgcatgtgtactgggaagagttccagaaggaccctgtgggcctgatgagccgggtggcccagcctgccagcaagaagatcgatcagaacaagctgaaacctgagatggacgagaagggcaacctgaccaccgccggctttgcctgctctcagtgtggccagcccctgttcgtgtacaagctggagcaggtgtctgagaagggcaaggcttacaccaactacttcggacggtgcaatgtggccgagcacgaaaagctgatcctgctggcccagctgaagcccgagaaggatagcgacgaagccgtgacatatagcctgggaaagtttgggcagagggccctggatttctacagcattcatgtgaccaaggagtccacccaccccgtgaagcccctggcccagatcgccggaaacagatacgcctccggacctgtgggaaaggccctgagcgacgcatgtatgggcacaatcgcctccttcctgtctaagtaccaggacatcatcatcgaacaccagaaggtggtgaagggcaaccagaagagactggagagcctgcgggagctggccggcaaggaaaacctggaataccctagcgtgaccctgccacctcagcctcacaccaaggagggcgttgatgcctacaacgaagtgatcgcccgggtgcgaatgtgggtgaacctgaacctgtggcagaagctgaagctaagcagagatgatgccaagcctctgctgagactgaagggattcccttcctttcctctggtcgagagacaggccaacgaagtggactggtgggacatggtgtgtaacgtgaagaagctgatcaacgagaaaaaggaggatggcaaggtgttttggcagaatctggctggctacaagagacaggaagccctgagaccatacctgagcagcgaggaagatcggaagaagggaaagaaattcgctcggtaccagctgggcgacctgctgctgcacctggaaaagaagcacggcgaggactggggaaaggtgtacgacgaggcctgggagcggattgacaagaaagtggaaggcctgagcaagcacatcaagctggaagaggaacggagaagcgaggacgcccagagcaaggccgccctgaccgactggctgcgggctaaggccagcttcgtgatcgagggcctgaaggaggccgacaaggacgagttctgcagatgcgagctgaagctgcagaagtggtacggggacctgcggggaaagcccttcgccatcgaagccgagaacagcatcctggacatcagcggcttcagcaagcagtacaactgtgccttcatctggcagaaggacggcgtgaagaagctgaacctgtacctgatcatcaactacttcaagggcggcaagctgcggttcaagaagatcaaacctgaagccttcgaagccaacagattctacaccgtgatcaacaaaaagagcggcgagatcgtgcccatggaggtgaacttcaacttcgacgaccccaacctgatcatcctgcctctggcctttggcaagagacagggcagagaattcatctggaacgacctgctgtccctggaaaccggcagcctgaagctggccaacggaagagtgatcgagaagacactgtacaacagaagaacccggcaggatgagcctgccctgttcgtggccctgaccttcgagcggcgggaggtcctggactcctccaatatcaaaccaatgaacctgatcggcgtggcaagaggcgaaaacatccccgccgtgatcgccctgaccgaccccgagggctgcccactgagccggtttaaggatagcctgggaaacccaacccacatcctgagaatcggcgagagctataaggagaagcagcggaccatccaggccaagaaggaggtggagcagcggagagccggcggctacagccggaagtacgccagcaaagccaagaatctggcagacgatatggtgagaaacaccgctagagatctgctgtactacgccgtgacccaggatgccatgctgatcttcgccaacctgagccggggcttcggccggcagggcaagcggaccttcatggccgagagacagtacacacggatggaggactggctgaccgccaagctggcctacgagggcctgagcaagacctacctgtccaagacactggcccagtacacctccaagacatgcagcaactgtgggtttaccatcaccagcgccgactacgacagggtgctggagaagctgaagaagacagcaacaggctggatgaccacaattaacggcaaggagctgaaggtggagggccagattacctactacaacagatacaagagacagaacgtagtcaaggacctgtccgtcgagctggatagactgagcgaagaatctgtgaacaacgacatctcctcctggacaaagggcagaagcggagaagctctgagcctcctgaagaaaagattctcccatagacccgtgcaggagaagttcgtgtgcctgaactgcggcttcgagacacacgcagccgagcaagccgccctgaacatcgccagatcctggctgttcctgcggagccaggagtacaagaaataccagacaaacaagacaaccggcaacaccgataagagagccttcgtcgagacctggcagtccttttaccggaagaagcttaaggaggtgtggaaacctgccgtgcggtctggcggatctggcggaggctccaccagccccaagaaaaagagaaaagtctaagctgccttctgcggggcttgccttctggccatgcccttcttctctcccttgcacctgtacctcttggtctttgaataaagcctgagtaggaaggctagcaaaaaaaaaaaaaaaaaaaaaaaaaaaaaaaaaaaaaaaaaaaaaaaaaaaaaaaaaaaaaaaaaaaaaaaaaaaaaaaagcccagccggctccccaacctctaccgaggagggcacctctgagtccgccacccccgagagcggccctggcacctccaccgagcccagcgagggcagcgcacccggcagccctgccggcagccccacctccacagaggagggaaccagcaccgagcccagcgaaggcagcgccccaggcaccagcaccgagcctagtgagcaggagattaaacggatcaacaagatcagaagaagacttgtgaaagacagcaacaccaagaaggccggcaagacaggccccatgaaaaccctgctggttagagtgatgacacccgatctgagagagcggctggaaaacctgagaaagaagcctgaaaatatcccccagcccatcagcaatacatctagagccaacctgaataagctgctgaccgattacaccgaaatgaagaaggcgatcctgcatgtgtactgggaagagttccagaaggaccctgtgggcctgatgagccgggtggcccagcctgccagcaagaagatcgatcagaacaagctgaaacctgagatggacgagaagggcaacctgaccaccgccggctttgcctgctctcagtgtggccagcccctgttcgtgtacaagctggagcaggtgtctgagaagggcaaggcttacaccaactacttcggacggtgcaatgtggccgagcacgaaaagctgatcctgctggcccagctgaagcccgagaaggatagcgacgaagccgtgacatatagcctgggaaagtttgggcagagggccctggatttctacagcattcatgtgaccaaggagtccacccaccccgtgaagcccctggcccagatcgccggaaacagatacgcctccggacctgtgggaaaggccctgagcgacgcatgtatgggcacaatcgcctccttcctgtctaagtaccaggacatcatcatcgaacaccagaaggtggtgaagggcaaccagaagagactggagagcctgcgggagctggccggcaaggaaaacctggaataccctagcgtgaccctgccacctcagcctcacaccaaggagggcgttgatgcctacaacgaagtgatcgcccgggtgcgaatgtgggtgaacctgaacctgtggcagaagctgaagctaagcagagatgatgccaagcctctgctgagactgaagggattcccttcctttcctctggtcgagagacaggccaacgaagtggactggtgggacatggtgtgtaacgtgaagaagctgatcaacgagaaaaaggaggatggcaaggtgttttggcagaatctggctggctacaagagacaggaagccctgagaccatacctgagcagcgaggaagatcggaagaagggaaagaaattcgctcggtaccagctgggcgacctgctgctgcacctggaaaagaagcacggcgaggactggggaaaggtgtacgacgaggcctgggagcggattgacaagaaagtggaaggcctgagcaagcacatcaagctggaagaggaacggagaagcgaggacgcccagagcaaggccgccctgaccgactggctgcgggctaaggccagcttcgtgatcgagggcctgaaggaggccgacaaggacgagttctgcagatgcgagctgaagctgcagaagtggtacggggacctgcggggaaagcccttcgccatcgaagccgagaacagcatcctggacatcagcggcttcagcaagcagtacaactgtgccttcatctggcagaaggacggcgtgaagaagctgaacctgtacctgatcatcaactacttcaagggcggcaagctgcggttcaagaagatcaaacctgaagccttcgaagccaacagattctacaccgtgatcaacaaaaagagcggcgagatcgtgcccatggaggtgaacttcaacttcgacgaccccaacctgatcatcctgcctctggcctttggcaagagacagggcagagaattcatctggaacgacctgctgtccctggaaaccggcagcctgaagctggccaacggaagagtgatcgagaagacactgtacaacagaagaacccggcaggatgagcctgccctgttcgtggccctgaccttcgagcggcgggaggtcctggactcctccaatatcaaaccaatgaacctgatcggcgtggcaagaggcgaaaacatccccgccgtgatcgccctgaccgaccccgagggctgcccactgagccggtttaaggatagcctgggaaacccaacccacatcctgagaatcggcgagagctataaggagaagcagcggaccatccaggccaagaaggaggtggagcagcggagagccggcggctacagccggaagtacgccagcaaagccaagaatctggcagacgatatggtgagaaacaccgctagagatctgctgtactacgccgtgacccaggatgccatgctgatcttcgccaacctgagccggggcttcggccggcagggcaagcggaccttcatggccgagagacagtacacacggatggaggactggctgaccgccaagctggcctacgagggcctgagcaagacctacctgtccaagacactggcccagtacacctccaagacatgcagcaactgtgggtttaccatcaccagcgccgactacgacagggtgctggagaagctgaagaagacagcaacaggctggatgaccacaattaacggcaaggagctgaaggtggagggccagattacctactacaacagatacaagagacagaacgtagtcaaggacctgtccgtcgagctggatagactgagcgaagaatctgtgaacaacgacatctcctcctggacaaagggcagaagcggagaagctctgagcctcctgaagaaaagattctcccatagacccgtgcaggagaagttcgtgtgcctgaactgcggcttcgagacacacgcagccgagcaagccgccctgaacatcgccagatcctggctgttcctgcggagccaggagtacaagaaataccagacaaacaagacaaccggcaacaccgataagagagccttcgtcgagacctggcagtccttttaccggaagaagcttaaggaggtgtggaaacctgccgtgcggtctggcggatctggcggaggctccaccagccccaagaaaaagagaaaagtctaagctgccttctgcggggcttgccttctggccatgcccttcttctctcccttgcacctgtacctcttggtctttgaataaagcctgagtaggaaggctagcaaaaaaaaaaaaaaaaaaaaaaaaaaaaaaaaaaaaaaaaaaaaaaaaaaaaaaaaaaaaaaaaaaaaaaaaaaaaaaaa

SEQ ID NO: 9023 - RNA, 8787 nt, synthetic construct
  source 1..8787: mol_type = other RNA
aggaaataagagagaaaagaagagtaagaagaaatataagagccaccatggcccctaagaagaagcgtaaagtgagccggatgaaccacgaccaggagttcgacccccctaaggtgtaccctcccgtccccgccgagaagagaaagcccatccgggtcctgagcctgttcgatggcatcgccaccggtctgctggtgctgaaggacctgggcatccaggtggataggtacattgcctccgaggtgtgcgaggactccatcaccgtgggaatggtgcgtcatcagggcaagatcatgtacgtgggcgacgtgcggagcgtgacacagaagcatatccaggagtggggccctttcgacctggtgatcggcggcagcccttgcaatgacctgagcatcgtgaacccagcccggaagggcctgtacgagggaaccggcagactgttcttcgagttttacagactgctgcacgacgcccggcctaaggaaggcgacgaccggcccttcttttggctgttcgagaatgtggtggccatgggagtcagcgacaagcgggatattagccggttcctggagagcaaccccgtgatgatcgatgccaaggaagtgagcgccgcccaccgggccagatacttctggggcaatctgcctggcatgaacagacccctggccagcaccgtgaacgacaagctggagctgcaggagtgcctggagcacggccggatcgccaagttcagcaaggtgagaaccatcaccacccgaagcaacagcatcaaacaaggcaaggaccagcactttcctgtgttcatgaacgagaaggaggacatcctgtggtgtaccgagatggagagagtgttcgggttcccagtccactacacagatgtcagcaacatgtctagactggccagacagagactgctgggaagaagctggtccgtccctgtgatcagacacctgttcgcccctctgaaggagtacttcgcctgcgtgagcagcggcaacagcaacgccaacagccggggccccagcttctctagcggcctggtgccactgtccctgagagggagccacatgggccccatggagatctacaaaaccgtgagcgcctggaagcggcagcctgtgcgcgtgctgagcctgtttcggaatatcgataaagtcctgaaaagcctgggattcctggagagcggctctggctccggcggtggcaccctgaagtacgtggaggatgtgacaaacgtggtcagacgggatgtggagaagtggggccccttcgatctggtgtacggcagcacccaacccctgggcagctcttgtgaccggtgccctggctggtacatgtttcagttccaccggatcctgcagtacgccctgccgagacaggagtcccagcggccattcttttggattttcatggacaacttgctgctgaccgaggatgaccaggaaactaccactcggttcctgcagaccgaagccgtgaccctgcaggacgtgagaggccgggactaccagaacgccatgcgggtgtggtccaacatccctggactgaaaagcaagcacgcacctctgacccctaaagaagaggagtacctgcaggcccaggtgcggagcagaagcaagctggacgcccctaaggtggatctgctggtgaagaattgcctcctgcccctgagagagtacttcaagtatttcagccagaatagtctgcccctgggaggcagcggcggcggccagccccagggcaccatgaccttcaaggacgtggaggtgaccttcagccaggacgagtggggcctgctggacgccagccagaggaacctgtacagggacgtgatgctggagaactacggcaacatggccagcgtggtgggccccttcaccaagcccgccctgatcagctggctggaggccagggagccctggggcctgaacgtgcagggcgtgcagttcaagggcaaccccggcgccgcccccggcggcccaagcagcggcgcccctcctcccagcggcggcaggcggcccaagcagcggcgcccctcctcccagcggcggcagcccagccggctccccaacctctaccgaggagggcacctctgagtccgccacccccgagagcggccctggcacctccaccgagcccagcgagggcagcgcacccggcagccctgccggcagccccacctccacagaggagggaaccagcaccgagcccagcgaaggcagcgccccaggcaccagcaccgagcctagtgagcaggagattaaacggatcaacaagatcagaagaagacttgtgaaagacagcaacaccaagaaggccggcaagacaggccccatgaaaaccctgctggttagagtgatgacacccgatctgagagagcggctggaaaacctgagaaagaagcctgaaaatatcccccagcccatcagcaatacatctagagccaacctgaataagctgctgaccgattacaccgaaatgaagaaggcgatcctgcatgtgtactgggaagagttccagaaggaccctgtgggcctgatgagccgggtggcccagcctgccagcaagaagatcgatcagaacaagctgaaacctgagatggacgagaagggcaacctgaccaccgccggctttgcctgctctcagtgtggccagcccctgttcgtgtacaagctggagcaggtgtctgagaagggcaaggcttacaccaactacttcggacggtgcaatgtggccgagcacgaaaagctgatcctgctggcccagctgaagcccgagaaggatagcgacgaagccgtgacatatagcctgggaaagtttgggcagagggccctggatttctacagcattcatgtgaccaaggagtccacccaccccgtgaagcccctggcccagatcgccggaaacagatacgcctccggacctgtgggaaaggccctgagcgacgcatgtatgggcacaatcgcctccttcctgtctaagtaccaggacatcatcatcgaacaccagaaggtggtgaagggcaaccagaagagactggagagcctgcgggagctggccggcaaggaaaacctggaataccctagcgtgaccctgccacctcagcctcacaccaaggagggcgttgatgcctacaacgaagtgatcgcccgggtgcgaatgtgggtgaacctgaacctgtggcagaagctgaagctaagcagagatgatgccaagcctctgctgagactgaagggattcccttcctttcctctggtcgagagacaggccaacgaagtggactggtgggacatggtgtgtaacgtgaagaagctgatcaacgagaaaaaggaggatggcaaggtgttttggcagaatctggctggctacaagagacaggaagccctgagaccatacctgagcagcgaggaagatcggaagaagggaaagaaattcgctcggtaccagctgggcgacctgctgctgcacctggaaaagaagcacggcgaggactggggaaaggtgtacgacgaggcctgggagcggattgacaagaaagtggaaggcctgagcaagcacatcaagctggaagaggaacggagaagcgaggacgcccagagcaaggccgccctgaccgactggctgcgggctaaggccagcttcgtgatcgagggcctgaaggaggccgacaaggacgagttctgcagatgcgagctgaagctgcagaagtggtacggggacctgcggggaaagcccttcgccatcgaagccgagaacagcatcctggacatcagcggcttcagcaagcagtacaactgtgccttcatctggcagaaggacggcgtgaagaagctgaacctgtacctgatcatcaactacttcaagggcggcaagctgcggttcaagaagatcaaacctgaagccttcgaagccaacagattctacaccgtgatcaacaaaaagagcggcgagatcgtgcccatggaggtgaacttcaacttcgacgaccccaacctgatcatcctgcctctggcctttggcaagagacagggcagagaattcatctggaacgacctgctgtccctggaaaccggcagcctgaagctggccaacggaagagtgatcgagaagacactgtacaacagaagaacccggcaggatgagcctgccctgttcgtggccctgaccttcgagcggcgggaggtcctggactcctccaatatcaaaccaatgaacctgatcggcgtggcaagaggcgaaaacatccccgccgtgatcgccctgaccgaccccgagggctgcccactgagccggtttaaggatagcctgggaaacccaacccacatcctgagaatcggcgagagctataaggagaagcagcggaccatccaggccaagaaggaggtggagcagcggagagccggcggctacagccggaagtacgccagcaaagccaagaatctggcagacgatatggtgagaaacaccgctagagatctgctgtactacgccgtgacccaggatgccatgctgatcttcgccaacctgagccggggcttcggccggcagggcaagcggaccttcatggccgagagacagtacacacggatggaggactggctgaccgccaagctggcctacgagggcctgagcaagacctacctgtccaagacactggcccagtacacctccaagacatgcagcaactgtgggtttaccatcaccagcgccgactacgacagggtgctggagaagctgaagaagacagcaacaggctggatgaccacaattaacggcaaggagctgaaggtggagggccagattacctactacaacagatacaagagacagaacgtagtcaaggacctgtccgtcgagctggatagactgagcgaagaatctgtgaacaacgacatctcctcctggacaaagggcagaagcggagaagctctgagcctcctgaagaaaagattctcccatagacccgtgcaggagaagttcgtgtgcctgaactgcggcttcgagacacacgcagccgagcaagccgccctgaacatcgccagatcctggctgttcctgcggagccaggagtacaagaaataccagacaaacaagacaaccggcaacaccgataagagagccttcgtcgagacctggcagtccttttaccggaagaagcttaaggaggtgtggaaacctgccgtgcggtctggcggatctggcggaggctccaccagccccaagaaaaagagaaaagtctaagctgccttctgcggggcttgccttctggccatgcccttcttctctcccttgcacctgtacctcttggtctttgaataaagcctgagtaggaaggctagcaaaaaaaaaaaaaaaaaaaaaaaaaaaaaaaaaaaaaaaaaaaaaaaaaaaaaaaaaaaaaaaaaaaaaaaaaaaaaaaagcccagccggctccccaacctctaccgaggagggcacctctgagtccgccacccccgagagcggccctggcacctccaccgagcccagcgagggcagcgcacccggcagccctgccggcagccccacctccacagaggagggaaccagcaccgagcccagcgaaggcagcgccccaggcaccagcaccgagcctagtgagcaggagattaaacggatcaacaagatcagaagaagacttgtgaaagacagcaacaccaagaaggccggcaagacaggccccatgaaaaccctgctggttagagtgatgacacccgatctgagagagcggctggaaaacctgagaaagaagcctgaaaatatcccccagcccatcagcaatacatctagagccaacctgaataagctgctgaccgattacaccgaaatgaagaaggcgatcctgcatgtgtactgggaagagttccagaaggaccctgtgggcctgatgagccgggtggcccagcctgccagcaagaagatcgatcagaacaagctgaaacctgagatggacgagaagggcaacctgaccaccgccggctttgcctgctctcagtgtggccagcccctgttcgtgtacaagctggagcaggtgtctgagaagggcaaggcttacaccaactacttcggacggtgcaatgtggccgagcacgaaaagctgatcctgctggcccagctgaagcccgagaaggatagcgacgaagccgtgacatatagcctgggaaagtttgggcagagggccctggatttctacagcattcatgtgaccaaggagtccacccaccccgtgaagcccctggcccagatcgccggaaacagatacgcctccggacctgtgggaaaggccctgagcgacgcatgtatgggcacaatcgcctccttcctgtctaagtaccaggacatcatcatcgaacaccagaaggtggtgaagggcaaccagaagagactggagagcctgcgggagctggccggcaaggaaaacctggaataccctagcgtgaccctgccacctcagcctcacaccaaggagggcgttgatgcctacaacgaagtgatcgcccgggtgcgaatgtgggtgaacctgaacctgtggcagaagctgaagctaagcagagatgatgccaagcctctgctgagactgaagggattcccttcctttcctctggtcgagagacaggccaacgaagtggactggtgggacatggtgtgtaacgtgaagaagctgatcaacgagaaaaaggaggatggcaaggtgttttggcagaatctggctggctacaagagacaggaagccctgagaccatacctgagcagcgaggaagatcggaagaagggaaagaaattcgctcggtaccagctgggcgacctgctgctgcacctggaaaagaagcacggcgaggactggggaaaggtgtacgacgaggcctgggagcggattgacaagaaagtggaaggcctgagcaagcacatcaagctggaagaggaacggagaagcgaggacgcccagagcaaggccgccctgaccgactggctgcgggctaaggccagcttcgtgatcgagggcctgaaggaggccgacaaggacgagttctgcagatgcgagctgaagctgcagaagtggtacggggacctgcggggaaagcccttcgccatcgaagccgagaacagcatcctggacatcagcggcttcagcaagcagtacaactgtgccttcatctggcagaaggacggcgtgaagaagctgaacctgtacctgatcatcaactacttcaagggcggcaagctgcggttcaagaagatcaaacctgaagccttcgaagccaacagattctacaccgtgatcaacaaaaagagcggcgagatcgtgcccatggaggtgaacttcaacttcgacgaccccaacctgatcatcctgcctctggcctttggcaagagacagggcagagaattcatctggaacgacctgctgtccctggaaaccggcagcctgaagctggccaacggaagagtgatcgagaagacactgtacaacagaagaacccggcaggatgagcctgccctgttcgtggccctgaccttcgagcggcgggaggtcctggactcctccaatatcaaaccaatgaacctgatcggcgtggcaagaggcgaaaacatccccgccgtgatcgccctgaccgaccccgagggctgcccactgagccggtttaaggatagcctgggaaacccaacccacatcctgagaatcggcgagagctataaggagaagcagcggaccatccaggccaagaaggaggtggagcagcggagagccggcggctacagccggaagtacgccagcaaagccaagaatctggcagacgatatggtgagaaacaccgctagagatctgctgtactacgccgtgacccaggatgccatgctgatcttcgccaacctgagccggggcttcggccggcagggcaagcggaccttcatggccgagagacagtacacacggatggaggactggctgaccgccaagctggcctacgagggcctgagcaagacctacctgtccaagacactggcccagtacacctccaagacatgcagcaactgtgggtttaccatcaccagcgccgactacgacagggtgctggagaagctgaagaagacagcaacaggctggatgaccacaattaacggcaaggagctgaaggtggagggccagattacctactacaacagatacaagagacagaacgtagtcaaggacctgtccgtcgagctggatagactgagcgaagaatctgtgaacaacgacatctcctcctggacaaagggcagaagcggagaagctctgagcctcctgaagaaaagattctcccatagacccgtgcaggagaagttcgtgtgcctgaactgcggcttcgagacacacgcagccgagcaagccgccctgaacatcgccagatcctggctgttcctgcggagccaggagtacaagaaataccagacaaacaagacaaccggcaacaccgataagagagccttcgtcgagacctggcagtccttttaccggaagaagcttaaggaggtgtggaaacctgccgtgcggtctggcggatctggcggaggctccaccagccccaagaaaaagagaaaagtctaagctgccttctgcggggcttgccttctggccatgcccttcttctctcccttgcacctgtacctcttggtctttgaataaagcctgagtaggaaggctagcaaaaaaaaaaaaaaaaaaaaaaaaaaaaaaaaaaaaaaaaaaaaaaaaaaaaaaaaaaaaaaaaaaaaaaaaaaaaaaaa

SEQ ID NO: 9024 - RNA, 8787 nt, synthetic construct
  source 1..8787: mol_type = other RNA
aggaaataagagagaaaagaagagtaagaagaaatataagagccaccatggcccctaagaagaagcgtaaagtgagccggatgaaccacgaccaggagttcgacccccctaaggtgtaccctcccgtccccgccgagaagagaaagcccatccgggtcctgagcctgttcgatggcatcgccaccggtctgctggtgctgaaggacctgggcatccaggtggataggtacattgcctccgaggtgtgcgaggactccatcaccgtgggaatggtgcgtcatcagggcaagatcatgtacgtgggcgacgtgcggagcgtgacacagaagcatatccaggagtggggccctttcgacctggtgatcggcggcagcccttgcaatgacctgagcatcgtgaacccagcccggaagggcctgtacgagggaaccggcagactgttcttcgagttttacagactgctgcacgacgcccggcctaaggaaggcgacgaccggcccttcttttggctgttcgagaatgtggtggccatgggagtcagcgacaagcgggatattagccggttcctggagagcaaccccgtgatgatcgatgccaaggaagtgagcgccgcccaccgggccagatacttctggggcaatctgcctggcatgaacagacccctggccagcaccgtgaacgacaagctggagctgcaggagtgcctggagcacggccggatcgccaagttcagcaaggtgagaaccatcaccacccgaagcaacagcatcaaacaaggcaaggaccagcactttcctgtgttcatgaacgagaaggaggacatcctgtggtgtaccgagatggagagagtgttcgggttcccagtccactacacagatgtcagcaacatgtctagactggccagacagagactgctgggaagaagctggtccgtccctgtgatcagacacctgttcgcccctctgaaggagtacttcgcctgcgtgagcagcggcaacagcaacgccaacagccggggccccagcttctctagcggcctggtgccactgtccctgagagggagccacatgggccccatggagatctacaaaaccgtgagcgcctggaagcggcagcctgtgcgcgtgctgagcctgtttcggaatatcgataaagtcctgaaaagcctgggattcctggagagcggctctggctccggcggtggcaccctgaagtacgtggaggatgtgacaaacgtggtcagacgggatgtggagaagtggggccccttcgatctggtgtacggcagcacccaacccctgggcagctcttgtgaccggtgccctggctggtacatgtttcagttccaccggatcctgcagtacgccctgccgagacaggagtcccagcggccattcttttggattttcatggacaacttgctgctgaccgaggatgaccaggaaactaccactcggttcctgcagaccgaagccgtgaccctgcaggacgtgagaggccgggactaccagaacgccatgcgggtgtggtccaacatccctggactgaaaagcaagcacgcacctctgacccctaaagaagaggagtacctgcaggcccaggtgcggagcagaagcaagctggacgcccctaaggtggatctgctggtgaagaattgcctcctgcccctgagagagtacttcaagtatttcagccagaatagtctgcccctgggaggcagcggcggcggcaggcccggcgccgtgagcttcgccgacgtggccgtgtacttcagccccgaggagtggggctgcctgaggcccgcccagagggccctgtacagggacgtgatgagggagacctacggccacctgggcgccctgggcttcgccggccccaagcccgccctgatcagctggctggagaggaagaaggaggtgtggagccccgaggccgaggaccccgaggagggcgccaggcaccccggcagcggcggcggcccaagcagcggcgcccctcctcccagcggcggcaggcggcccaagcagcggcgcccctcctcccagcggcggcagcccagccggctccccaacctctaccgaggagggcacctctgagtccgccacccccgagagcggccctggcacctccaccgagcccagcgagggcagcgcacccggcagccctgccggcagccccacctccacagaggagggaaccagcaccgagcccagcgaaggcagcgccccaggcaccagcaccgagcctagtgagcaggagattaaacggatcaacaagatcagaagaagacttgtgaaagacagcaacaccaagaaggccggcaagacaggccccatgaaaaccctgctggttagagtgatgacacccgatctgagagagcggctggaaaacctgagaaagaagcctgaaaatatcccccagcccatcagcaatacatctagagccaacctgaataagctgctgaccgattacaccgaaatgaagaaggcgatcctgcatgtgtactgggaagagttccagaaggaccctgtgggcctgatgagccgggtggcccagcctgccagcaagaagatcgatcagaacaagctgaaacctgagatggacgagaagggcaacctgaccaccgccggctttgcctgctctcagtgtggccagcccctgttcgtgtacaagctggagcaggtgtctgagaagggcaaggcttacaccaactacttcggacggtgcaatgtggccgagcacgaaaagctgatcctgctggcccagctgaagcccgagaaggatagcgacgaagccgtgacatatagcctgggaaagtttgggcagagggccctggatttctacagcattcatgtgaccaaggagtccacccaccccgtgaagcccctggcccagatcgccggaaacagatacgcctccggacctgtgggaaaggccctgagcgacgcatgtatgggcacaatcgcctccttcctgtctaagtaccaggacatcatcatcgaacaccagaaggtggtgaagggcaaccagaagagactggagagcctgcgggagctggccggcaaggaaaacctggaataccctagcgtgaccctgccacctcagcctcacaccaaggagggcgttgatgcctacaacgaagtgatcgcccgggtgcgaatgtgggtgaacctgaacctgtggcagaagctgaagctaagcagagatgatgccaagcctctgctgagactgaagggattcccttcctttcctctggtcgagagacaggccaacgaagtggactggtgggacatggtgtgtaacgtgaagaagctgatcaacgagaaaaaggaggatggcaaggtgttttggcagaatctggctggctacaagagacaggaagccctgagaccatacctgagcagcgaggaagatcggaagaagggaaagaaattcgctcggtaccagctgggcgacctgctgctgcacctggaaaagaagcacggcgaggactggggaaaggtgtacgacgaggcctgggagcggattgacaagaaagtggaaggcctgagcaagcacatcaagctggaagaggaacggagaagcgaggacgcccagagcaaggccgccctgaccgactggctgcgggctaaggccagcttcgtgatcgagggcctgaaggaggccgacaaggacgagttctgcagatgcgagctgaagctgcagaagtggtacggggacctgcggggaaagcccttcgccatcgaagccgagaacagcatcctggacatcagcggcttcagcaagcagtacaactgtgccttcatctggcagaaggacggcgtgaagaagctgaacctgtacctgatcatcaactacttcaagggcggcaagctgcggttcaagaagatcaaacctgaagccttcgaagccaacagattctacaccgtgatcaacaaaaagagcggcgagatcgtgcccatggaggtgaacttcaacttcgacgaccccaacctgatcatcctgcctctggcctttggcaagagacagggcagagaattcatctggaacgacctgctgtccctggaaaccggcagcctgaagctggccaacggaagagtgatcgagaagacactgtacaacagaagaacccggcaggatgagcctgccctgttcgtggccctgaccttcgagcggcgggaggtcctggactcctccaatatcaaaccaatgaacctgatcggcgtggcaagaggcgaaaacatccccgccgtgatcgccctgaccgaccccgagggctgcccactgagccggtttaaggatagcctgggaaacccaacccacatcctgagaatcggcgagagctataaggagaagcagcggaccatccaggccaagaaggaggtggagcagcggagagccggcggctacagccggaagtacgccagcaaagccaagaatctggcagacgatatggtgagaaacaccgctagagatctgctgtactacgccgtgacccaggatgccatgctgatcttcgccaacctgagccggggcttcggccggcagggcaagcggaccttcatggccgagagacagtacacacggatggaggactggctgaccgccaagctggcctacgagggcctgagcaagacctacctgtccaagacactggcccagtacacctccaagacatgcagcaactgtgggtttaccatcaccagcgccgactacgacagggtgctggagaagctgaagaagacagcaacaggctggatgaccacaattaacggcaaggagctgaaggtggagggccagattacctactacaacagatacaagagacagaacgtagtcaaggacctgtccgtcgagctggatagactgagcgaagaatctgtgaacaacgacatctcctcctggacaaagggcagaagcggagaagctctgagcctcctgaagaaaagattctcccatagacccgtgcaggagaagttcgtgtgcctgaactgcggcttcgagacacacgcagccgagcaagccgccctgaacatcgccagatcctggctgttcctgcggagccaggagtacaagaaataccagacaaacaagacaaccggcaacaccgataagagagccttcgtcgagacctggcagtccttttaccggaagaagcttaaggaggtgtggaaacctgccgtgcggtctggcggatctggcggaggctccaccagccccaagaaaaagagaaaagtctaagctgccttctgcggggcttgccttctggccatgcccttcttctctcccttgcacctgtacctcttggtctttgaataaagcctgagtaggaaggctagcaaaaaaaaaaaaaaaaaaaaaaaaaaaaaaaaaaaaaaaaaaaaaaaaaaaaaaaaaaaaaaaaaaaaaaaaaaaaaaaagcccagccggctccccaacctctaccgaggagggcacctctgagtccgccacccccgagagcggccctggcacctccaccgagcccagcgagggcagcgcacccggcagccctgccggcagccccacctccacagaggagggaaccagcaccgagcccagcgaaggcagcgccccaggcaccagcaccgagcctagtgagcaggagattaaacggatcaacaagatcagaagaagacttgtgaaagacagcaacaccaagaaggccggcaagacaggccccatgaaaaccctgctggttagagtgatgacacccgatctgagagagcggctggaaaacctgagaaagaagcctgaaaatatcccccagcccatcagcaatacatctagagccaacctgaataagctgctgaccgattacaccgaaatgaagaaggcgatcctgcatgtgtactgggaagagttccagaaggaccctgtgggcctgatgagccgggtggcccagcctgccagcaagaagatcgatcagaacaagctgaaacctgagatggacgagaagggcaacctgaccaccgccggctttgcctgctctcagtgtggccagcccctgttcgtgtacaagctggagcaggtgtctgagaagggcaaggcttacaccaactacttcggacggtgcaatgtggccgagcacgaaaagctgatcctgctggcccagctgaagcccgagaaggatagcgacgaagccgtgacatatagcctgggaaagtttgggcagagggccctggatttctacagcattcatgtgaccaaggagtccacccaccccgtgaagcccctggcccagatcgccggaaacagatacgcctccggacctgtgggaaaggccctgagcgacgcatgtatgggcacaatcgcctccttcctgtctaagtaccaggacatcatcatcgaacaccagaaggtggtgaagggcaaccagaagagactggagagcctgcgggagctggccggcaaggaaaacctggaataccctagcgtgaccctgccacctcagcctcacaccaaggagggcgttgatgcctacaacgaagtgatcgcccgggtgcgaatgtgggtgaacctgaacctgtggcagaagctgaagctaagcagagatgatgccaagcctctgctgagactgaagggattcccttcctttcctctggtcgagagacaggccaacgaagtggactggtgggacatggtgtgtaacgtgaagaagctgatcaacgagaaaaaggaggatggcaaggtgttttggcagaatctggctggctacaagagacaggaagccctgagaccatacctgagcagcgaggaagatcggaagaagggaaagaaattcgctcggtaccagctgggcgacctgctgctgcacctggaaaagaagcacggcgaggactggggaaaggtgtacgacgaggcctgggagcggattgacaagaaagtggaaggcctgagcaagcacatcaagctggaagaggaacggagaagcgaggacgcccagagcaaggccgccctgaccgactggctgcgggctaaggccagcttcgtgatcgagggcctgaaggaggccgacaaggacgagttctgcagatgcgagctgaagctgcagaagtggtacggggacctgcggggaaagcccttcgccatcgaagccgagaacagcatcctggacatcagcggcttcagcaagcagtacaactgtgccttcatctggcagaaggacggcgtgaagaagctgaacctgtacctgatcatcaactacttcaagggcggcaagctgcggttcaagaagatcaaacctgaagccttcgaagccaacagattctacaccgtgatcaacaaaaagagcggcgagatcgtgcccatggaggtgaacttcaacttcgacgaccccaacctgatcatcctgcctctggcctttggcaagagacagggcagagaattcatctggaacgacctgctgtccctggaaaccggcagcctgaagctggccaacggaagagtgatcgagaagacactgtacaacagaagaacccggcaggatgagcctgccctgttcgtggccctgaccttcgagcggcgggaggtcctggactcctccaatatcaaaccaatgaacctgatcggcgtggcaagaggcgaaaacatccccgccgtgatcgccctgaccgaccccgagggctgcccactgagccggtttaaggatagcctgggaaacccaacccacatcctgagaatcggcgagagctataaggagaagcagcggaccatccaggccaagaaggaggtggagcagcggagagccggcggctacagccggaagtacgccagcaaagccaagaatctggcagacgatatggtgagaaacaccgctagagatctgctgtactacgccgtgacccaggatgccatgctgatcttcgccaacctgagccggggcttcggccggcagggcaagcggaccttcatggccgagagacagtacacacggatggaggactggctgaccgccaagctggcctacgagggcctgagcaagacctacctgtccaagacactggcccagtacacctccaagacatgcagcaactgtgggtttaccatcaccagcgccgactacgacagggtgctggagaagctgaagaagacagcaacaggctggatgaccacaattaacggcaaggagctgaaggtggagggccagattacctactacaacagatacaagagacagaacgtagtcaaggacctgtccgtcgagctggatagactgagcgaagaatctgtgaacaacgacatctcctcctggacaaagggcagaagcggagaagctctgagcctcctgaagaaaagattctcccatagacccgtgcaggagaagttcgtgtgcctgaactgcggcttcgagacacacgcagccgagcaagccgccctgaacatcgccagatcctggctgttcctgcggagccaggagtacaagaaataccagacaaacaagacaaccggcaacaccgataagagagccttcgtcgagacctggcagtccttttaccggaagaagcttaaggaggtgtggaaacctgccgtgcggtctggcggatctggcggaggctccaccagccccaagaaaaagagaaaagtctaagctgccttctgcggggcttgccttctggccatgcccttcttctctcccttgcacctgtacctcttggtctttgaataaagcctgagtaggaaggctagcaaaaaaaaaaaaaaaaaaaaaaaaaaaaaaaaaaaaaaaaaaaaaaaaaaaaaaaaaaaaaaaaaaaaaaaaaaaaaaaa

SEQ ID NO: 9025 - RNA, 8787 nt, synthetic construct
  source 1..8787: mol_type = other RNA
aggaaataagagagaaaagaagagtaagaagaaatataagagccaccatggcccctaagaagaagcgtaaagtgagccggatgaaccacgaccaggagttcgacccccctaaggtgtaccctcccgtccccgccgagaagagaaagcccatccgggtcctgagcctgttcgatggcatcgccaccggtctgctggtgctgaaggacctgggcatccaggtggataggtacattgcctccgaggtgtgcgaggactccatcaccgtgggaatggtgcgtcatcagggcaagatcatgtacgtgggcgacgtgcggagcgtgacacagaagcatatccaggagtggggccctttcgacctggtgatcggcggcagcccttgcaatgacctgagcatcgtgaacccagcccggaagggcctgtacgagggaaccggcagactgttcttcgagttttacagactgctgcacgacgcccggcctaaggaaggcgacgaccggcccttcttttggctgttcgagaatgtggtggccatgggagtcagcgacaagcgggatattagccggttcctggagagcaaccccgtgatgatcgatgccaaggaagtgagcgccgcccaccgggccagatacttctggggcaatctgcctggcatgaacagacccctggccagcaccgtgaacgacaagctggagctgcaggagtgcctggagcacggccggatcgccaagttcagcaaggtgagaaccatcaccacccgaagcaacagcatcaaacaaggcaaggaccagcactttcctgtgttcatgaacgagaaggaggacatcctgtggtgtaccgagatggagagagtgttcgggttcccagtccactacacagatgtcagcaacatgtctagactggccagacagagactgctgggaagaagctggtccgtccctgtgatcagacacctgttcgcccctctgaaggagtacttcgcctgcgtgagcagcggcaacagcaacgccaacagccggggccccagcttctctagcggcctggtgccactgtccctgagagggagccacatgggccccatggagatctacaaaaccgtgagcgcctggaagcggcagcctgtgcgcgtgctgagcctgtttcggaatatcgataaagtcctgaaaagcctgggattcctggagagcggctctggctccggcggtggcaccctgaagtacgtggaggatgtgacaaacgtggtcagacgggatgtggagaagtggggccccttcgatctggtgtacggcagcacccaacccctgggcagctcttgtgaccggtgccctggctggtacatgtttcagttccaccggatcctgcagtacgccctgccgagacaggagtcccagcggccattcttttggattttcatggacaacttgctgctgaccgaggatgaccaggaaactaccactcggttcctgcagaccgaagccgtgaccctgcaggacgtgagaggccgggactaccagaacgccatgcgggtgtggtccaacatccctggactgaaaagcaagcacgcacctctgacccctaaagaagaggagtacctgcaggcccaggtgcggagcagaagcaagctggacgcccctaaggtggatctgctggtgaagaattgcctcctgcccctgagagagtacttcaagtatttcagccagaatagtctgcccctgggaggcagcggcggcggctggcccgagagcgtgaccttcgaggacgtggccgtgtacttcacccagaaccagtgggccagcctggaccccgcccagagggccctgtacagggaggtgatgctggagaactacgccaacgtggccagcctggtggccttccccttccccaagcccgccctgatcagccacctggagaggggcgaggccccctggggccccgacccctgggacaccgagatccccaggggcatcagccagggcggcggcccaagcagcggcgcccctcctcccagcggcggcaggcggcccaagcagcggcgcccctcctcccagcggcggcagcccagccggctccccaacctctaccgaggagggcacctctgagtccgccacccccgagagcggccctggcacctccaccgagcccagcgagggcagcgcacccggcagccctgccggcagccccacctccacagaggagggaaccagcaccgagcccagcgaaggcagcgccccaggcaccagcaccgagcctagtgagcaggagattaaacggatcaacaagatcagaagaagacttgtgaaagacagcaacaccaagaaggccggcaagacaggccccatgaaaaccctgctggttagagtgatgacacccgatctgagagagcggctggaaaacctgagaaagaagcctgaaaatatcccccagcccatcagcaatacatctagagccaacctgaataagctgctgaccgattacaccgaaatgaagaaggcgatcctgcatgtgtactgggaagagttccagaaggaccctgtgggcctgatgagccgggtggcccagcctgccagcaagaagatcgatcagaacaagctgaaacctgagatggacgagaagggcaacctgaccaccgccggctttgcctgctctcagtgtggccagcccctgttcgtgtacaagctggagcaggtgtctgagaagggcaaggcttacaccaactacttcggacggtgcaatgtggccgagcacgaaaagctgatcctgctggcccagctgaagcccgagaaggatagcgacgaagccgtgacatatagcctgggaaagtttgggcagagggccctggatttctacagcattcatgtgaccaaggagtccacccaccccgtgaagcccctggcccagatcgccggaaacagatacgcctccggacctgtgggaaaggccctgagcgacgcatgtatgggcacaatcgcctccttcctgtctaagtaccaggacatcatcatcgaacaccagaaggtggtgaagggcaaccagaagagactggagagcctgcgggagctggccggcaaggaaaacctggaataccctagcgtgaccctgccacctcagcctcacaccaaggagggcgttgatgcctacaacgaagtgatcgcccgggtgcgaatgtgggtgaacctgaacctgtggcagaagctgaagctaagcagagatgatgccaagcctctgctgagactgaagggattcccttcctttcctctggtcgagagacaggccaacgaagtggactggtgggacatggtgtgtaacgtgaagaagctgatcaacgagaaaaaggaggatggcaaggtgttttggcagaatctggctggctacaagagacaggaagccctgagaccatacctgagcagcgaggaagatcggaagaagggaaagaaattcgctcggtaccagctgggcgacctgctgctgcacctggaaaagaagcacggcgaggactggggaaaggtgtacgacgaggcctgggagcggattgacaagaaagtggaaggcctgagcaagcacatcaagctggaagaggaacggagaagcgaggacgcccagagcaaggccgccctgaccgactggctgcgggctaaggccagcttcgtgatcgagggcctgaaggaggccgacaaggacgagttctgcagatgcgagctgaagctgcagaagtggtacggggacctgcggggaaagcccttcgccatcgaagccgagaacagcatcctggacatcagcggcttcagcaagcagtacaactgtgccttcatctggcagaaggacggcgtgaagaagctgaacctgtacctgatcatcaactacttcaagggcggcaagctgcggttcaagaagatcaaacctgaagccttcgaagccaacagattctacaccgtgatcaacaaaaagagcggcgagatcgtgcccatggaggtgaacttcaacttcgacgaccccaacctgatcatcctgcctctggcctttggcaagagacagggcagagaattcatctggaacgacctgctgtccctggaaaccggcagcctgaagctggccaacggaagagtgatcgagaagacactgtacaacagaagaacccggcaggatgagcctgccctgttcgtggccctgaccttcgagcggcgggaggtcctggactcctccaatatcaaaccaatgaacctgatcggcgtggcaagaggcgaaaacatccccgccgtgatcgccctgaccgaccccgagggctgcccactgagccggtttaaggatagcctgggaaacccaacccacatcctgagaatcggcgagagctataaggagaagcagcggaccatccaggccaagaaggaggtggagcagcggagagccggcggctacagccggaagtacgccagcaaagccaagaatctggcagacgatatggtgagaaacaccgctagagatctgctgtactacgccgtgacccaggatgccatgctgatcttcgccaacctgagccggggcttcggccggcagggcaagcggaccttcatggccgagagacagtacacacggatggaggactggctgaccgccaagctggcctacgagggcctgagcaagacctacctgtccaagacactggcccagtacacctccaagacatgcagcaactgtgggtttaccatcaccagcgccgactacgacagggtgctggagaagctgaagaagacagcaacaggctggatgaccacaattaacggcaaggagctgaaggtggagggccagattacctactacaacagatacaagagacagaacgtagtcaaggacctgtccgtcgagctggatagactgagcgaagaatctgtgaacaacgacatctcctcctggacaaagggcagaagcggagaagctctgagcctcctgaagaaaagattctcccatagacccgtgcaggagaagttcgtgtgcctgaactgcggcttcgagacacacgcagccgagcaagccgccctgaacatcgccagatcctggctgttcctgcggagccaggagtacaagaaataccagacaaacaagacaaccggcaacaccgataagagagccttcgtcgagacctggcagtccttttaccggaagaagcttaaggaggtgtggaaacctgccgtgcggtctggcggatctggcggaggctccaccagccccaagaaaaagagaaaagtctaagctgccttctgcggggcttgccttctggccatgcccttcttctctcccttgcacctgtacctcttggtctttgaataaagcctgagtaggaaggctagcaaaaaaaaaaaaaaaaaaaaaaaaaaaaaaaaaaaaaaaaaaaaaaaaaaaaaaaaaaaaaaaaaaaaaaaaaaaaaaaagcccagccggctccccaacctctaccgaggagggcacctctgagtccgccacccccgagagcggccctggcacctccaccgagcccagcgagggcagcgcacccggcagccctgccggcagccccacctccacagaggagggaaccagcaccgagcccagcgaaggcagcgccccaggcaccagcaccgagcctagtgagcaggagattaaacggatcaacaagatcagaagaagacttgtgaaagacagcaacaccaagaaggccggcaagacaggccccatgaaaaccctgctggttagagtgatgacacccgatctgagagagcggctggaaaacctgagaaagaagcctgaaaatatcccccagcccatcagcaatacatctagagccaacctgaataagctgctgaccgattacaccgaaatgaagaaggcgatcctgcatgtgtactgggaagagttccagaaggaccctgtgggcctgatgagccgggtggcccagcctgccagcaagaagatcgatcagaacaagctgaaacctgagatggacgagaagggcaacctgaccaccgccggctttgcctgctctcagtgtggccagcccctgttcgtgtacaagctggagcaggtgtctgagaagggcaaggcttacaccaactacttcggacggtgcaatgtggccgagcacgaaaagctgatcctgctggcccagctgaagcccgagaaggatagcgacgaagccgtgacatatagcctgggaaagtttgggcagagggccctggatttctacagcattcatgtgaccaaggagtccacccaccccgtgaagcccctggcccagatcgccggaaacagatacgcctccggacctgtgggaaaggccctgagcgacgcatgtatgggcacaatcgcctccttcctgtctaagtaccaggacatcatcatcgaacaccagaaggtggtgaagggcaaccagaagagactggagagcctgcgggagctggccggcaaggaaaacctggaataccctagcgtgaccctgccacctcagcctcacaccaaggagggcgttgatgcctacaacgaagtgatcgcccgggtgcgaatgtgggtgaacctgaacctgtggcagaagctgaagctaagcagagatgatgccaagcctctgctgagactgaagggattcccttcctttcctctggtcgagagacaggccaacgaagtggactggtgggacatggtgtgtaacgtgaagaagctgatcaacgagaaaaaggaggatggcaaggtgttttggcagaatctggctggctacaagagacaggaagccctgagaccatacctgagcagcgaggaagatcggaagaagggaaagaaattcgctcggtaccagctgggcgacctgctgctgcacctggaaaagaagcacggcgaggactggggaaaggtgtacgacgaggcctgggagcggattgacaagaaagtggaaggcctgagcaagcacatcaagctggaagaggaacggagaagcgaggacgcccagagcaaggccgccctgaccgactggctgcgggctaaggccagcttcgtgatcgagggcctgaaggaggccgacaaggacgagttctgcagatgcgagctgaagctgcagaagtggtacggggacctgcggggaaagcccttcgccatcgaagccgagaacagcatcctggacatcagcggcttcagcaagcagtacaactgtgccttcatctggcagaaggacggcgtgaagaagctgaacctgtacctgatcatcaactacttcaagggcggcaagctgcggttcaagaagatcaaacctgaagccttcgaagccaacagattctacaccgtgatcaacaaaaagagcggcgagatcgtgcccatggaggtgaacttcaacttcgacgaccccaacctgatcatcctgcctctggcctttggcaagagacagggcagagaattcatctggaacgacctgctgtccctggaaaccggcagcctgaagctggccaacggaagagtgatcgagaagacactgtacaacagaagaacccggcaggatgagcctgccctgttcgtggccctgaccttcgagcggcgggaggtcctggactcctccaatatcaaaccaatgaacctgatcggcgtggcaagaggcgaaaacatccccgccgtgatcgccctgaccgaccccgagggctgcccactgagccggtttaaggatagcctgggaaacccaacccacatcctgagaatcggcgagagctataaggagaagcagcggaccatccaggccaagaaggaggtggagcagcggagagccggcggctacagccggaagtacgccagcaaagccaagaatctggcagacgatatggtgagaaacaccgctagagatctgctgtactacgccgtgacccaggatgccatgctgatcttcgccaacctgagccggggcttcggccggcagggcaagcggaccttcatggccgagagacagtacacacggatggaggactggctgaccgccaagctggcctacgagggcctgagcaagacctacctgtccaagacactggcccagtacacctccaagacatgcagcaactgtgggtttaccatcaccagcgccgactacgacagggtgctggagaagctgaagaagacagcaacaggctggatgaccacaattaacggcaaggagctgaaggtggagggccagattacctactacaacagatacaagagacagaacgtagtcaaggacctgtccgtcgagctggatagactgagcgaagaatctgtgaacaacgacatctcctcctggacaaagggcagaagcggagaagctctgagcctcctgaagaaaagattctcccatagacccgtgcaggagaagttcgtgtgcctgaactgcggcttcgagacacacgcagccgagcaagccgccctgaacatcgccagatcctggctgttcctgcggagccaggagtacaagaaataccagacaaacaagacaaccggcaacaccgataagagagccttcgtcgagacctggcagtccttttaccggaagaagcttaaggaggtgtggaaacctgccgtgcggtctggcggatctggcggaggctccaccagccccaagaaaaagagaaaagtctaagctgccttctgcggggcttgccttctggccatgcccttcttctctcccttgcacctgtacctcttggtctttgaataaagcctgagtaggaaggctagcaaaaaaaaaaaaaaaaaaaaaaaaaaaaaaaaaaaaaaaaaaaaaaaaaaaaaaaaaaaaaaaaaaaaaaaaaaaaaaaa

SEQ ID NO: 9026 - RNA, 8787 nt, synthetic construct
  source 1..8787: mol_type = other RNA
aggaaataagagagaaaagaagagtaagaagaaatataagagccaccatggcccctaagaagaagcgtaaagtgagccggatgaaccacgaccaggagttcgacccccctaaggtgtaccctcccgtccccgccgagaagagaaagcccatccgggtcctgagcctgttcgatggcatcgccaccggtctgctggtgctgaaggacctgggcatccaggtggataggtacattgcctccgaggtgtgcgaggactccatcaccgtgggaatggtgcgtcatcagggcaagatcatgtacgtgggcgacgtgcggagcgtgacacagaagcatatccaggagtggggccctttcgacctggtgatcggcggcagcccttgcaatgacctgagcatcgtgaacccagcccggaagggcctgtacgagggaaccggcagactgttcttcgagttttacagactgctgcacgacgcccggcctaaggaaggcgacgaccggcccttcttttggctgttcgagaatgtggtggccatgggagtcagcgacaagcgggatattagccggttcctggagagcaaccccgtgatgatcgatgccaaggaagtgagcgccgcccaccgggccagatacttctggggcaatctgcctggcatgaacagacccctggccagcaccgtgaacgacaagctggagctgcaggagtgcctggagcacggccggatcgccaagttcagcaaggtgagaaccatcaccacccgaagcaacagcatcaaacaaggcaaggaccagcactttcctgtgttcatgaacgagaaggaggacatcctgtggtgtaccgagatggagagagtgttcgggttcccagtccactacacagatgtcagcaacatgtctagactggccagacagagactgctgggaagaagctggtccgtccctgtgatcagacacctgttcgcccctctgaaggagtacttcgcctgcgtgagcagcggcaacagcaacgccaacagccggggccccagcttctctagcggcctggtgccactgtccctgagagggagccacatgggccccatggagatctacaaaaccgtgagcgcctggaagcggcagcctgtgcgcgtgctgagcctgtttcggaatatcgataaagtcctgaaaagcctgggattcctggagagcggctctggctccggcggtggcaccctgaagtacgtggaggatgtgacaaacgtggtcagacgggatgtggagaagtggggccccttcgatctggtgtacggcagcacccaacccctgggcagctcttgtgaccggtgccctggctggtacatgtttcagttccaccggatcctgcagtacgccctgccgagacaggagtcccagcggccattcttttggattttcatggacaacttgctgctgaccgaggatgaccaggaaactaccactcggttcctgcagaccgaagccgtgaccctgcaggacgtgagaggccgggactaccagaacgccatgcgggtgtggtccaacatccctggactgaaaagcaagcacgcacctctgacccctaaagaagaggagtacctgcaggcccaggtgcggagcagaagcaagctggacgcccctaaggtggatctgctggtgaagaattgcctcctgcccctgagagagtacttcaagtatttcagccagaatagtctgcccctgggaggcagcggcggcggcgtgcaggagcccgtgaccttcaaggacgtggccgtggacttcacccaggaggagtggggccagctggacctggtgcagaggaccctgtacagggacgtgatgctggagacctacggccacctgctgagcgtgggcaaccagatcgccaagcccgaggtgatcagcctgctggagcagggcgaggagccctggagcgtggagcagacctgcccccagaggagctgccccgagtggatgaggaacggcggcccaagcagcggcgcccctcctcccagcggcggcaggcggcccaagcagcggcgcccctcctcccagcggcggcagcccagccggctccccaacctctaccgaggagggcacctctgagtccgccacccccgagagcggccctggcacctccaccgagcccagcgagggcagcgcacccggcagccctgccggcagccccacctccacagaggagggaaccagcaccgagcccagcgaaggcagcgccccaggcaccagcaccgagcctagtgagcaggagattaaacggatcaacaagatcagaagaagacttgtgaaagacagcaacaccaagaaggccggcaagacaggccccatgaaaaccctgctggttagagtgatgacacccgatctgagagagcggctggaaaacctgagaaagaagcctgaaaatatcccccagcccatcagcaatacatctagagccaacctgaataagctgctgaccgattacaccgaaatgaagaaggcgatcctgcatgtgtactgggaagagttccagaaggaccctgtgggcctgatgagccgggtggcccagcctgccagcaagaagatcgatcagaacaagctgaaacctgagatggacgagaagggcaacctgaccaccgccggctttgcctgctctcagtgtggccagcccctgttcgtgtacaagctggagcaggtgtctgagaagggcaaggcttacaccaactacttcggacggtgcaatgtggccgagcacgaaaagctgatcctgctggcccagctgaagcccgagaaggatagcgacgaagccgtgacatatagcctgggaaagtttgggcagagggccctggatttctacagcattcatgtgaccaaggagtccacccaccccgtgaagcccctggcccagatcgccggaaacagatacgcctccggacctgtgggaaaggccctgagcgacgcatgtatgggcacaatcgcctccttcctgtctaagtaccaggacatcatcatcgaacaccagaaggtggtgaagggcaaccagaagagactggagagcctgcgggagctggccggcaaggaaaacctggaataccctagcgtgaccctgccacctcagcctcacaccaaggagggcgttgatgcctacaacgaagtgatcgcccgggtgcgaatgtgggtgaacctgaacctgtggcagaagctgaagctaagcagagatgatgccaagcctctgctgagactgaagggattcccttcctttcctctggtcgagagacaggccaacgaagtggactggtgggacatggtgtgtaacgtgaagaagctgatcaacgagaaaaaggaggatggcaaggtgttttggcagaatctggctggctacaagagacaggaagccctgagaccatacctgagcagcgaggaagatcggaagaagggaaagaaattcgctcggtaccagctgggcgacctgctgctgcacctggaaaagaagcacggcgaggactggggaaaggtgtacgacgaggcctgggagcggattgacaagaaagtggaaggcctgagcaagcacatcaagctggaagaggaacggagaagcgaggacgcccagagcaaggccgccctgaccgactggctgcgggctaaggccagcttcgtgatcgagggcctgaaggaggccgacaaggacgagttctgcagatgcgagctgaagctgcagaagtggtacggggacctgcggggaaagcccttcgccatcgaagccgagaacagcatcctggacatcagcggcttcagcaagcagtacaactgtgccttcatctggcagaaggacggcgtgaagaagctgaacctgtacctgatcatcaactacttcaagggcggcaagctgcggttcaagaagatcaaacctgaagccttcgaagccaacagattctacaccgtgatcaacaaaaagagcggcgagatcgtgcccatggaggtgaacttcaacttcgacgaccccaacctgatcatcctgcctctggcctttggcaagagacagggcagagaattcatctggaacgacctgctgtccctggaaaccggcagcctgaagctggccaacggaagagtgatcgagaagacactgtacaacagaagaacccggcaggatgagcctgccctgttcgtggccctgaccttcgagcggcgggaggtcctggactcctccaatatcaaaccaatgaacctgatcggcgtggcaagaggcgaaaacatccccgccgtgatcgccctgaccgaccccgagggctgcccactgagccggtttaaggatagcctgggaaacccaacccacatcctgagaatcggcgagagctataaggagaagcagcggaccatccaggccaagaaggaggtggagcagcggagagccggcggctacagccggaagtacgccagcaaagccaagaatctggcagacgatatggtgagaaacaccgctagagatctgctgtactacgccgtgacccaggatgccatgctgatcttcgccaacctgagccggggcttcggccggcagggcaagcggaccttcatggccgagagacagtacacacggatggaggactggctgaccgccaagctggcctacgagggcctgagcaagacctacctgtccaagacactggcccagtacacctccaagacatgcagcaactgtgggtttaccatcaccagcgccgactacgacagggtgctggagaagctgaagaagacagcaacaggctggatgaccacaattaacggcaaggagctgaaggtggagggccagattacctactacaacagatacaagagacagaacgtagtcaaggacctgtccgtcgagctggatagactgagcgaagaatctgtgaacaacgacatctcctcctggacaaagggcagaagcggagaagctctgagcctcctgaagaaaagattctcccatagacccgtgcaggagaagttcgtgtgcctgaactgcggcttcgagacacacgcagccgagcaagccgccctgaacatcgccagatcctggctgttcctgcggagccaggagtacaagaaataccagacaaacaagacaaccggcaacaccgataagagagccttcgtcgagacctggcagtccttttaccggaagaagcttaaggaggtgtggaaacctgccgtgcggtctggcggatctggcggaggctccaccagccccaagaaaaagagaaaagtctaagctgccttctgcggggcttgccttctggccatgcccttcttctctcccttgcacctgtacctcttggtctttgaataaagcctgagtaggaaggctagcaaaaaaaaaaaaaaaaaaaaaaaaaaaaaaaaaaaaaaaaaaaaaaaaaaaaaaaaaaaaaaaaaaaaaaaaaaaaaaaagcccagccggctccccaacctctaccgaggagggcacctctgagtccgccacccccgagagcggccctggcacctccaccgagcccagcgagggcagcgcacccggcagccctgccggcagccccacctccacagaggagggaaccagcaccgagcccagcgaaggcagcgccccaggcaccagcaccgagcctagtgagcaggagattaaacggatcaacaagatcagaagaagacttgtgaaagacagcaacaccaagaaggccggcaagacaggccccatgaaaaccctgctggttagagtgatgacacccgatctgagagagcggctggaaaacctgagaaagaagcctgaaaatatcccccagcccatcagcaatacatctagagccaacctgaataagctgctgaccgattacaccgaaatgaagaaggcgatcctgcatgtgtactgggaagagttccagaaggaccctgtgggcctgatgagccgggtggcccagcctgccagcaagaagatcgatcagaacaagctgaaacctgagatggacgagaagggcaacctgaccaccgccggctttgcctgctctcagtgtggccagcccctgttcgtgtacaagctggagcaggtgtctgagaagggcaaggcttacaccaactacttcggacggtgcaatgtggccgagcacgaaaagctgatcctgctggcccagctgaagcccgagaaggatagcgacgaagccgtgacatatagcctgggaaagtttgggcagagggccctggatttctacagcattcatgtgaccaaggagtccacccaccccgtgaagcccctggcccagatcgccggaaacagatacgcctccggacctgtgggaaaggccctgagcgacgcatgtatgggcacaatcgcctccttcctgtctaagtaccaggacatcatcatcgaacaccagaaggtggtgaagggcaaccagaagagactggagagcctgcgggagctggccggcaaggaaaacctggaataccctagcgtgaccctgccacctcagcctcacaccaaggagggcgttgatgcctacaacgaagtgatcgcccgggtgcgaatgtgggtgaacctgaacctgtggcagaagctgaagctaagcagagatgatgccaagcctctgctgagactgaagggattcccttcctttcctctggtcgagagacaggccaacgaagtggactggtgggacatggtgtgtaacgtgaagaagctgatcaacgagaaaaaggaggatggcaaggtgttttggcagaatctggctggctacaagagacaggaagccctgagaccatacctgagcagcgaggaagatcggaagaagggaaagaaattcgctcggtaccagctgggcgacctgctgctgcacctggaaaagaagcacggcgaggactggggaaaggtgtacgacgaggcctgggagcggattgacaagaaagtggaaggcctgagcaagcacatcaagctggaagaggaacggagaagcgaggacgcccagagcaaggccgccctgaccgactggctgcgggctaaggccagcttcgtgatcgagggcctgaaggaggccgacaaggacgagttctgcagatgcgagctgaagctgcagaagtggtacggggacctgcggggaaagcccttcgccatcgaagccgagaacagcatcctggacatcagcggcttcagcaagcagtacaactgtgccttcatctggcagaaggacggcgtgaagaagctgaacctgtacctgatcatcaactacttcaagggcggcaagctgcggttcaagaagatcaaacctgaagccttcgaagccaacagattctacaccgtgatcaacaaaaagagcggcgagatcgtgcccatggaggtgaacttcaacttcgacgaccccaacctgatcatcctgcctctggcctttggcaagagacagggcagagaattcatctggaacgacctgctgtccctggaaaccggcagcctgaagctggccaacggaagagtgatcgagaagacactgtacaacagaagaacccggcaggatgagcctgccctgttcgtggccctgaccttcgagcggcgggaggtcctggactcctccaatatcaaaccaatgaacctgatcggcgtggcaagaggcgaaaacatccccgccgtgatcgccctgaccgaccccgagggctgcccactgagccggtttaaggatagcctgggaaacccaacccacatcctgagaatcggcgagagctataaggagaagcagcggaccatccaggccaagaaggaggtggagcagcggagagccggcggctacagccggaagtacgccagcaaagccaagaatctggcagacgatatggtgagaaacaccgctagagatctgctgtactacgccgtgacccaggatgccatgctgatcttcgccaacctgagccggggcttcggccggcagggcaagcggaccttcatggccgagagacagtacacacggatggaggactggctgaccgccaagctggcctacgagggcctgagcaagacctacctgtccaagacactggcccagtacacctccaagacatgcagcaactgtgggtttaccatcaccagcgccgactacgacagggtgctggagaagctgaagaagacagcaacaggctggatgaccacaattaacggcaaggagctgaaggtggagggccagattacctactacaacagatacaagagacagaacgtagtcaaggacctgtccgtcgagctggatagactgagcgaagaatctgtgaacaacgacatctcctcctggacaaagggcagaagcggagaagctctgagcctcctgaagaaaagattctcccatagacccgtgcaggagaagttcgtgtgcctgaactgcggcttcgagacacacgcagccgagcaagccgccctgaacatcgccagatcctggctgttcctgcggagccaggagtacaagaaataccagacaaacaagacaaccggcaacaccgataagagagccttcgtcgagacctggcagtccttttaccggaagaagcttaaggaggtgtggaaacctgccgtgcggtctggcggatctggcggaggctccaccagccccaagaaaaagagaaaagtctaagctgccttctgcggggcttgccttctggccatgcccttcttctctcccttgcacctgtacctcttggtctttgaataaagcctgagtaggaaggctagcaaaaaaaaaaaaaaaaaaaaaaaaaaaaaaaaaaaaaaaaaaaaaaaaaaaaaaaaaaaaaaaaaaaaaaaaaaaaaaaa

SEQ ID NO: 9027 - RNA, 8787 nt, synthetic construct
  source 1..8787: mol_type = other RNA
aggaaataagagagaaaagaagagtaagaagaaatataagagccaccatggcccctaagaagaagcgtaaagtgagccggatgaaccacgaccaggagttcgacccccctaaggtgtaccctcccgtccccgccgagaagagaaagcccatccgggtcctgagcctgttcgatggcatcgccaccggtctgctggtgctgaaggacctgggcatccaggtggataggtacattgcctccgaggtgtgcgaggactccatcaccgtgggaatggtgcgtcatcagggcaagatcatgtacgtgggcgacgtgcggagcgtgacacagaagcatatccaggagtggggccctttcgacctggtgatcggcggcagcccttgcaatgacctgagcatcgtgaacccagcccggaagggcctgtacgagggaaccggcagactgttcttcgagttttacagactgctgcacgacgcccggcctaaggaaggcgacgaccggcccttcttttggctgttcgagaatgtggtggccatgggagtcagcgacaagcgggatattagccggttcctggagagcaaccccgtgatgatcgatgccaaggaagtgagcgccgcccaccgggccagatacttctggggcaatctgcctggcatgaacagacccctggccagcaccgtgaacgacaagctggagctgcaggagtgcctggagcacggccggatcgccaagttcagcaaggtgagaaccatcaccacccgaagcaacagcatcaaacaaggcaaggaccagcactttcctgtgttcatgaacgagaaggaggacatcctgtggtgtaccgagatggagagagtgttcgggttcccagtccactacacagatgtcagcaacatgtctagactggccagacagagactgctgggaagaagctggtccgtccctgtgatcagacacctgttcgcccctctgaaggagtacttcgcctgcgtgagcagcggcaacagcaacgccaacagccggggccccagcttctctagcggcctggtgccactgtccctgagagggagccacatgggccccatggagatctacaaaaccgtgagcgcctggaagcggcagcctgtgcgcgtgctgagcctgtttcggaatatcgataaagtcctgaaaagcctgggattcctggagagcggctctggctccggcggtggcaccctgaagtacgtggaggatgtgacaaacgtggtcagacgggatgtggagaagtggggccccttcgatctggtgtacggcagcacccaacccctgggcagctcttgtgaccggtgccctggctggtacatgtttcagttccaccggatcctgcagtacgccctgccgagacaggagtcccagcggccattcttttggattttcatggacaacttgctgctgaccgaggatgaccaggaaactaccactcggttcctgcagaccgaagccgtgaccctgcaggacgtgagaggccgggactaccagaacgccatgcgggtgtggtccaacatccctggactgaaaagcaagcacgcacctctgacccctaaagaagaggagtacctgcaggcccaggtgcggagcagaagcaagctggacgcccctaaggtggatctgctggtgaagaattgcctcctgcccctgagagagtacttcaagtatttcagccagaatagtctgcccctgggaggcagcggcggcggcatgcccctgggcagcgagctgttcagggacgtggccatcgtgttcagccaggaggagtggcagtggctggcccccgcccagagggacctgtacagggacgtgatgctggagacctacagcaacctggtgagcctgggcctggccatcagcaagcccgacgtgatcagcttcctggagcagggcaaggagccctggatggtggagagggtggtggccggcggcctgtgccccgaggccgagctgggcggcccaagcagcggcgcccctcctcccagcggcggcaggcggcccaagcagcggcgcccctcctcccagcggcggcagcccagccggctccccaacctctaccgaggagggcacctctgagtccgccacccccgagagcggccctggcacctccaccgagcccagcgagggcagcgcacccggcagccctgccggcagccccacctccacagaggagggaaccagcaccgagcccagcgaaggcagcgccccaggcaccagcaccgagcctagtgagcaggagattaaacggatcaacaagatcagaagaagacttgtgaaagacagcaacaccaagaaggccggcaagacaggccccatgaaaaccctgctggttagagtgatgacacccgatctgagagagcggctggaaaacctgagaaagaagcctgaaaatatcccccagcccatcagcaatacatctagagccaacctgaataagctgctgaccgattacaccgaaatgaagaaggcgatcctgcatgtgtactgggaagagttccagaaggaccctgtgggcctgatgagccgggtggcccagcctgccagcaagaagatcgatcagaacaagctgaaacctgagatggacgagaagggcaacctgaccaccgccggctttgcctgctctcagtgtggccagcccctgttcgtgtacaagctggagcaggtgtctgagaagggcaaggcttacaccaactacttcggacggtgcaatgtggccgagcacgaaaagctgatcctgctggcccagctgaagcccgagaaggatagcgacgaagccgtgacatatagcctgggaaagtttgggcagagggccctggatttctacagcattcatgtgaccaaggagtccacccaccccgtgaagcccctggcccagatcgccggaaacagatacgcctccggacctgtgggaaaggccctgagcgacgcatgtatgggcacaatcgcctccttcctgtctaagtaccaggacatcatcatcgaacaccagaaggtggtgaagggcaaccagaagagactggagagcctgcgggagctggccggcaaggaaaacctggaataccctagcgtgaccctgccacctcagcctcacaccaaggagggcgttgatgcctacaacgaagtgatcgcccgggtgcgaatgtgggtgaacctgaacctgtggcagaagctgaagctaagcagagatgatgccaagcctctgctgagactgaagggattcccttcctttcctctggtcgagagacaggccaacgaagtggactggtgggacatggtgtgtaacgtgaagaagctgatcaacgagaaaaaggaggatggcaaggtgttttggcagaatctggctggctacaagagacaggaagccctgagaccatacctgagcagcgaggaagatcggaagaagggaaagaaattcgctcggtaccagctgggcgacctgctgctgcacctggaaaagaagcacggcgaggactggggaaaggtgtacgacgaggcctgggagcggattgacaagaaagtggaaggcctgagcaagcacatcaagctggaagaggaacggagaagcgaggacgcccagagcaaggccgccctgaccgactggctgcgggctaaggccagcttcgtgatcgagggcctgaaggaggccgacaaggacgagttctgcagatgcgagctgaagctgcagaagtggtacggggacctgcggggaaagcccttcgccatcgaagccgagaacagcatcctggacatcagcggcttcagcaagcagtacaactgtgccttcatctggcagaaggacggcgtgaagaagctgaacctgtacctgatcatcaactacttcaagggcggcaagctgcggttcaagaagatcaaacctgaagccttcgaagccaacagattctacaccgtgatcaacaaaaagagcggcgagatcgtgcccatggaggtgaacttcaacttcgacgaccccaacctgatcatcctgcctctggcctttggcaagagacagggcagagaattcatctggaacgacctgctgtccctggaaaccggcagcctgaagctggccaacggaagagtgatcgagaagacactgtacaacagaagaacccggcaggatgagcctgccctgttcgtggccctgaccttcgagcggcgggaggtcctggactcctccaatatcaaaccaatgaacctgatcggcgtggcaagaggcgaaaacatccccgccgtgatcgccctgaccgaccccgagggctgcccactgagccggtttaaggatagcctgggaaacccaacccacatcctgagaatcggcgagagctataaggagaagcagcggaccatccaggccaagaaggaggtggagcagcggagagccggcggctacagccggaagtacgccagcaaagccaagaatctggcagacgatatggtgagaaacaccgctagagatctgctgtactacgccgtgacccaggatgccatgctgatcttcgccaacctgagccggggcttcggccggcagggcaagcggaccttcatggccgagagacagtacacacggatggaggactggctgaccgccaagctggcctacgagggcctgagcaagacctacctgtccaagacactggcccagtacacctccaagacatgcagcaactgtgggtttaccatcaccagcgccgactacgacagggtgctggagaagctgaagaagacagcaacaggctggatgaccacaattaacggcaaggagctgaaggtggagggccagattacctactacaacagatacaagagacagaacgtagtcaaggacctgtccgtcgagctggatagactgagcgaagaatctgtgaacaacgacatctcctcctggacaaagggcagaagcggagaagctctgagcctcctgaagaaaagattctcccatagacccgtgcaggagaagttcgtgtgcctgaactgcggcttcgagacacacgcagccgagcaagccgccctgaacatcgccagatcctggctgttcctgcggagccaggagtacaagaaataccagacaaacaagacaaccggcaacaccgataagagagccttcgtcgagacctggcagtccttttaccggaagaagcttaaggaggtgtggaaacctgccgtgcggtctggcggatctggcggaggctccaccagccccaagaaaaagagaaaagtctaagctgccttctgcggggcttgccttctggccatgcccttcttctctcccttgcacctgtacctcttggtctttgaataaagcctgagtaggaaggctagcaaaaaaaaaaaaaaaaaaaaaaaaaaaaaaaaaaaaaaaaaaaaaaaaaaaaaaaaaaaaaaaaaaaaaaaaaaaaaaaagcccagccggctccccaacctctaccgaggagggcacctctgagtccgccacccccgagagcggccctggcacctccaccgagcccagcgagggcagcgcacccggcagccctgccggcagccccacctccacagaggagggaaccagcaccgagcccagcgaaggcagcgccccaggcaccagcaccgagcctagtgagcaggagattaaacggatcaacaagatcagaagaagacttgtgaaagacagcaacaccaagaaggccggcaagacaggccccatgaaaaccctgctggttagagtgatgacacccgatctgagagagcggctggaaaacctgagaaagaagcctgaaaatatcccccagcccatcagcaatacatctagagccaacctgaataagctgctgaccgattacaccgaaatgaagaaggcgatcctgcatgtgtactgggaagagttccagaaggaccctgtgggcctgatgagccgggtggcccagcctgccagcaagaagatcgatcagaacaagctgaaacctgagatggacgagaagggcaacctgaccaccgccggctttgcctgctctcagtgtggccagcccctgttcgtgtacaagctggagcaggtgtctgagaagggcaaggcttacaccaactacttcggacggtgcaatgtggccgagcacgaaaagctgatcctgctggcccagctgaagcccgagaaggatagcgacgaagccgtgacatatagcctgggaaagtttgggcagagggccctggatttctacagcattcatgtgaccaaggagtccacccaccccgtgaagcccctggcccagatcgccggaaacagatacgcctccggacctgtgggaaaggccctgagcgacgcatgtatgggcacaatcgcctccttcctgtctaagtaccaggacatcatcatcgaacaccagaaggtggtgaagggcaaccagaagagactggagagcctgcgggagctggccggcaaggaaaacctggaataccctagcgtgaccctgccacctcagcctcacaccaaggagggcgttgatgcctacaacgaagtgatcgcccgggtgcgaatgtgggtgaacctgaacctgtggcagaagctgaagctaagcagagatgatgccaagcctctgctgagactgaagggattcccttcctttcctctggtcgagagacaggccaacgaagtggactggtgggacatggtgtgtaacgtgaagaagctgatcaacgagaaaaaggaggatggcaaggtgttttggcagaatctggctggctacaagagacaggaagccctgagaccatacctgagcagcgaggaagatcggaagaagggaaagaaattcgctcggtaccagctgggcgacctgctgctgcacctggaaaagaagcacggcgaggactggggaaaggtgtacgacgaggcctgggagcggattgacaagaaagtggaaggcctgagcaagcacatcaagctggaagaggaacggagaagcgaggacgcccagagcaaggccgccctgaccgactggctgcgggctaaggccagcttcgtgatcgagggcctgaaggaggccgacaaggacgagttctgcagatgcgagctgaagctgcagaagtggtacggggacctgcggggaaagcccttcgccatcgaagccgagaacagcatcctggacatcagcggcttcagcaagcagtacaactgtgccttcatctggcagaaggacggcgtgaagaagctgaacctgtacctgatcatcaactacttcaagggcggcaagctgcggttcaagaagatcaaacctgaagccttcgaagccaacagattctacaccgtgatcaacaaaaagagcggcgagatcgtgcccatggaggtgaacttcaacttcgacgaccccaacctgatcatcctgcctctggcctttggcaagagacagggcagagaattcatctggaacgacctgctgtccctggaaaccggcagcctgaagctggccaacggaagagtgatcgagaagacactgtacaacagaagaacccggcaggatgagcctgccctgttcgtggccctgaccttcgagcggcgggaggtcctggactcctccaatatcaaaccaatgaacctgatcggcgtggcaagaggcgaaaacatccccgccgtgatcgccctgaccgaccccgagggctgcccactgagccggtttaaggatagcctgggaaacccaacccacatcctgagaatcggcgagagctataaggagaagcagcggaccatccaggccaagaaggaggtggagcagcggagagccggcggctacagccggaagtacgccagcaaagccaagaatctggcagacgatatggtgagaaacaccgctagagatctgctgtactacgccgtgacccaggatgccatgctgatcttcgccaacctgagccggggcttcggccggcagggcaagcggaccttcatggccgagagacagtacacacggatggaggactggctgaccgccaagctggcctacgagggcctgagcaagacctacctgtccaagacactggcccagtacacctccaagacatgcagcaactgtgggtttaccatcaccagcgccgactacgacagggtgctggagaagctgaagaagacagcaacaggctggatgaccacaattaacggcaaggagctgaaggtggagggccagattacctactacaacagatacaagagacagaacgtagtcaaggacctgtccgtcgagctggatagactgagcgaagaatctgtgaacaacgacatctcctcctggacaaagggcagaagcggagaagctctgagcctcctgaagaaaagattctcccatagacccgtgcaggagaagttcgtgtgcctgaactgcggcttcgagacacacgcagccgagcaagccgccctgaacatcgccagatcctggctgttcctgcggagccaggagtacaagaaataccagacaaacaagacaaccggcaacaccgataagagagccttcgtcgagacctggcagtccttttaccggaagaagcttaaggaggtgtggaaacctgccgtgcggtctggcggatctggcggaggctccaccagccccaagaaaaagagaaaagtctaagctgccttctgcggggcttgccttctggccatgcccttcttctctcccttgcacctgtacctcttggtctttgaataaagcctgagtaggaaggctagcaaaaaaaaaaaaaaaaaaaaaaaaaaaaaaaaaaaaaaaaaaaaaaaaaaaaaaaaaaaaaaaaaaaaaaaaaaaaaaaa

SEQ ID NO: 9028 - RNA, 8787 nt, synthetic construct
  source 1..8787: mol_type = other RNA
aggaaataagagagaaaagaagagtaagaagaaatataagagccaccatggcccctaagaagaagcgtaaagtgagccggatgaaccacgaccaggagttcgacccccctaaggtgtaccctcccgtccccgccgagaagagaaagcccatccgggtcctgagcctgttcgatggcatcgccaccggtctgctggtgctgaaggacctgggcatccaggtggataggtacattgcctccgaggtgtgcgaggactccatcaccgtgggaatggtgcgtcatcagggcaagatcatgtacgtgggcgacgtgcggagcgtgacacagaagcatatccaggagtggggccctttcgacctggtgatcggcggcagcccttgcaatgacctgagcatcgtgaacccagcccggaagggcctgtacgagggaaccggcagactgttcttcgagttttacagactgctgcacgacgcccggcctaaggaaggcgacgaccggcccttcttttggctgttcgagaatgtggtggccatgggagtcagcgacaagcgggatattagccggttcctggagagcaaccccgtgatgatcgatgccaaggaagtgagcgccgcccaccgggccagatacttctggggcaatctgcctggcatgaacagacccctggccagcaccgtgaacgacaagctggagctgcaggagtgcctggagcacggccggatcgccaagttcagcaaggtgagaaccatcaccacccgaagcaacagcatcaaacaaggcaaggaccagcactttcctgtgttcatgaacgagaaggaggacatcctgtggtgtaccgagatggagagagtgttcgggttcccagtccactacacagatgtcagcaacatgtctagactggccagacagagactgctgggaagaagctggtccgtccctgtgatcagacacctgttcgcccctctgaaggagtacttcgcctgcgtgagcagcggcaacagcaacgccaacagccggggccccagcttctctagcggcctggtgccactgtccctgagagggagccacatgggccccatggagatctacaaaaccgtgagcgcctggaagcggcagcctgtgcgcgtgctgagcctgtttcggaatatcgataaagtcctgaaaagcctgggattcctggagagcggctctggctccggcggtggcaccctgaagtacgtggaggatgtgacaaacgtggtcagacgggatgtggagaagtggggccccttcgatctggtgtacggcagcacccaacccctgggcagctcttgtgaccggtgccctggctggtacatgtttcagttccaccggatcctgcagtacgccctgccgagacaggagtcccagcggccattcttttggattttcatggacaacttgctgctgaccgaggatgaccaggaaactaccactcggttcctgcagaccgaagccgtgaccctgcaggacgtgagaggccgggactaccagaacgccatgcgggtgtggtccaacatccctggactgaaaagcaagcacgcacctctgacccctaaagaagaggagtacctgcaggcccaggtgcggagcagaagcaagctggacgcccctaaggtggatctgctggtgaagaattgcctcctgcccctgagagagtacttcaagtatttcagccagaatagtctgcccctgggaggcagcggcggcggccagccccaggaggccgtgaccttcaaggacgtggaggtgaccttcagccaggacgagtggggctggctggacgccagccagaggaacctgtacagggacgtgatgctggagaactacggcaacgtggccagcctggtgggccccttcaccaagcccgccctgatcagctggctggaggccagggagccctggggcctgaacgtgcagggcgcccaccccaagggcagccccagcgccgcccccggcggcccaagcagcggcgcccctcctcccagcggcggcaggcggcccaagcagcggcgcccctcctcccagcggcggcagcccagccggctccccaacctctaccgaggagggcacctctgagtccgccacccccgagagcggccctggcacctccaccgagcccagcgagggcagcgcacccggcagccctgccggcagccccacctccacagaggagggaaccagcaccgagcccagcgaaggcagcgccccaggcaccagcaccgagcctagtgagcaggagattaaacggatcaacaagatcagaagaagacttgtgaaagacagcaacaccaagaaggccggcaagacaggccccatgaaaaccctgctggttagagtgatgacacccgatctgagagagcggctggaaaacctgagaaagaagcctgaaaatatcccccagcccatcagcaatacatctagagccaacctgaataagctgctgaccgattacaccgaaatgaagaaggcgatcctgcatgtgtactgggaagagttccagaaggaccctgtgggcctgatgagccgggtggcccagcctgccagcaagaagatcgatcagaacaagctgaaacctgagatggacgagaagggcaacctgaccaccgccggctttgcctgctctcagtgtggccagcccctgttcgtgtacaagctggagcaggtgtctgagaagggcaaggcttacaccaactacttcggacggtgcaatgtggccgagcacgaaaagctgatcctgctggcccagctgaagcccgagaaggatagcgacgaagccgtgacatatagcctgggaaagtttgggcagagggccctggatttctacagcattcatgtgaccaaggagtccacccaccccgtgaagcccctggcccagatcgccggaaacagatacgcctccggacctgtgggaaaggccctgagcgacgcatgtatgggcacaatcgcctccttcctgtctaagtaccaggacatcatcatcgaacaccagaaggtggtgaagggcaaccagaagagactggagagcctgcgggagctggccggcaaggaaaacctggaataccctagcgtgaccctgccacctcagcctcacaccaaggagggcgttgatgcctacaacgaagtgatcgcccgggtgcgaatgtgggtgaacctgaacctgtggcagaagctgaagctaagcagagatgatgccaagcctctgctgagactgaagggattcccttcctttcctctggtcgagagacaggccaacgaagtggactggtgggacatggtgtgtaacgtgaagaagctgatcaacgagaaaaaggaggatggcaaggtgttttggcagaatctggctggctacaagagacaggaagccctgagaccatacctgagcagcgaggaagatcggaagaagggaaagaaattcgctcggtaccagctgggcgacctgctgctgcacctggaaaagaagcacggcgaggactggggaaaggtgtacgacgaggcctgggagcggattgacaagaaagtggaaggcctgagcaagcacatcaagctggaagaggaacggagaagcgaggacgcccagagcaaggccgccctgaccgactggctgcgggctaaggccagcttcgtgatcgagggcctgaaggaggccgacaaggacgagttctgcagatgcgagctgaagctgcagaagtggtacggggacctgcggggaaagcccttcgccatcgaagccgagaacagcatcctggacatcagcggcttcagcaagcagtacaactgtgccttcatctggcagaaggacggcgtgaagaagctgaacctgtacctgatcatcaactacttcaagggcggcaagctgcggttcaagaagatcaaacctgaagccttcgaagccaacagattctacaccgtgatcaacaaaaagagcggcgagatcgtgcccatggaggtgaacttcaacttcgacgaccccaacctgatcatcctgcctctggcctttggcaagagacagggcagagaattcatctggaacgacctgctgtccctggaaaccggcagcctgaagctggccaacggaagagtgatcgagaagacactgtacaacagaagaacccggcaggatgagcctgccctgttcgtggccctgaccttcgagcggcgggaggtcctggactcctccaatatcaaaccaatgaacctgatcggcgtggcaagaggcgaaaacatccccgccgtgatcgccctgaccgaccccgagggctgcccactgagccggtttaaggatagcctgggaaacccaacccacatcctgagaatcggcgagagctataaggagaagcagcggaccatccaggccaagaaggaggtggagcagcggagagccggcggctacagccggaagtacgccagcaaagccaagaatctggcagacgatatggtgagaaacaccgctagagatctgctgtactacgccgtgacccaggatgccatgctgatcttcgccaacctgagccggggcttcggccggcagggcaagcggaccttcatggccgagagacagtacacacggatggaggactggctgaccgccaagctggcctacgagggcctgagcaagacctacctgtccaagacactggcccagtacacctccaagacatgcagcaactgtgggtttaccatcaccagcgccgactacgacagggtgctggagaagctgaagaagacagcaacaggctggatgaccacaattaacggcaaggagctgaaggtggagggccagattacctactacaacagatacaagagacagaacgtagtcaaggacctgtccgtcgagctggatagactgagcgaagaatctgtgaacaacgacatctcctcctggacaaagggcagaagcggagaagctctgagcctcctgaagaaaagattctcccatagacccgtgcaggagaagttcgtgtgcctgaactgcggcttcgagacacacgcagccgagcaagccgccctgaacatcgccagatcctggctgttcctgcggagccaggagtacaagaaataccagacaaacaagacaaccggcaacaccgataagagagccttcgtcgagacctggcagtccttttaccggaagaagcttaaggaggtgtggaaacctgccgtgcggtctggcggatctggcggaggctccaccagccccaagaaaaagagaaaagtctaagctgccttctgcggggcttgccttctggccatgcccttcttctctcccttgcacctgtacctcttggtctttgaataaagcctgagtaggaaggctagcaaaaaaaaaaaaaaaaaaaaaaaaaaaaaaaaaaaaaaaaaaaaaaaaaaaaaaaaaaaaaaaaaaaaaaaaaaaaaaaagcccagccggctccccaacctctaccgaggagggcacctctgagtccgccacccccgagagcggccctggcacctccaccgagcccagcgagggcagcgcacccggcagccctgccggcagccccacctccacagaggagggaaccagcaccgagcccagcgaaggcagcgccccaggcaccagcaccgagcctagtgagcaggagattaaacggatcaacaagatcagaagaagacttgtgaaagacagcaacaccaagaaggccggcaagacaggccccatgaaaaccctgctggttagagtgatgacacccgatctgagagagcggctggaaaacctgagaaagaagcctgaaaatatcccccagcccatcagcaatacatctagagccaacctgaataagctgctgaccgattacaccgaaatgaagaaggcgatcctgcatgtgtactgggaagagttccagaaggaccctgtgggcctgatgagccgggtggcccagcctgccagcaagaagatcgatcagaacaagctgaaacctgagatggacgagaagggcaacctgaccaccgccggctttgcctgctctcagtgtggccagcccctgttcgtgtacaagctggagcaggtgtctgagaagggcaaggcttacaccaactacttcggacggtgcaatgtggccgagcacgaaaagctgatcctgctggcccagctgaagcccgagaaggatagcgacgaagccgtgacatatagcctgggaaagtttgggcagagggccctggatttctacagcattcatgtgaccaaggagtccacccaccccgtgaagcccctggcccagatcgccggaaacagatacgcctccggacctgtgggaaaggccctgagcgacgcatgtatgggcacaatcgcctccttcctgtctaagtaccaggacatcatcatcgaacaccagaaggtggtgaagggcaaccagaagagactggagagcctgcgggagctggccggcaaggaaaacctggaataccctagcgtgaccctgccacctcagcctcacaccaaggagggcgttgatgcctacaacgaagtgatcgcccgggtgcgaatgtgggtgaacctgaacctgtggcagaagctgaagctaagcagagatgatgccaagcctctgctgagactgaagggattcccttcctttcctctggtcgagagacaggccaacgaagtggactggtgggacatggtgtgtaacgtgaagaagctgatcaacgagaaaaaggaggatggcaaggtgttttggcagaatctggctggctacaagagacaggaagccctgagaccatacctgagcagcgaggaagatcggaagaagggaaagaaattcgctcggtaccagctgggcgacctgctgctgcacctggaaaagaagcacggcgaggactggggaaaggtgtacgacgaggcctgggagcggattgacaagaaagtggaaggcctgagcaagcacatcaagctggaagaggaacggagaagcgaggacgcccagagcaaggccgccctgaccgactggctgcgggctaaggccagcttcgtgatcgagggcctgaaggaggccgacaaggacgagttctgcagatgcgagctgaagctgcagaagtggtacggggacctgcggggaaagcccttcgccatcgaagccgagaacagcatcctggacatcagcggcttcagcaagcagtacaactgtgccttcatctggcagaaggacggcgtgaagaagctgaacctgtacctgatcatcaactacttcaagggcggcaagctgcggttcaagaagatcaaacctgaagccttcgaagccaacagattctacaccgtgatcaacaaaaagagcggcgagatcgtgcccatggaggtgaacttcaacttcgacgaccccaacctgatcatcctgcctctggcctttggcaagagacagggcagagaattcatctggaacgacctgctgtccctggaaaccggcagcctgaagctggccaacggaagagtgatcgagaagacactgtacaacagaagaacccggcaggatgagcctgccctgttcgtggccctgaccttcgagcggcgggaggtcctggactcctccaatatcaaaccaatgaacctgatcggcgtggcaagaggcgaaaacatccccgccgtgatcgccctgaccgaccccgagggctgcccactgagccggtttaaggatagcctgggaaacccaacccacatcctgagaatcggcgagagctataaggagaagcagcggaccatccaggccaagaaggaggtggagcagcggagagccggcggctacagccggaagtacgccagcaaagccaagaatctggcagacgatatggtgagaaacaccgctagagatctgctgtactacgccgtgacccaggatgccatgctgatcttcgccaacctgagccggggcttcggccggcagggcaagcggaccttcatggccgagagacagtacacacggatggaggactggctgaccgccaagctggcctacgagggcctgagcaagacctacctgtccaagacactggcccagtacacctccaagacatgcagcaactgtgggtttaccatcaccagcgccgactacgacagggtgctggagaagctgaagaagacagcaacaggctggatgaccacaattaacggcaaggagctgaaggtggagggccagattacctactacaacagatacaagagacagaacgtagtcaaggacctgtccgtcgagctggatagactgagcgaagaatctgtgaacaacgacatctcctcctggacaaagggcagaagcggagaagctctgagcctcctgaagaaaagattctcccatagacccgtgcaggagaagttcgtgtgcctgaactgcggcttcgagacacacgcagccgagcaagccgccctgaacatcgccagatcctggctgttcctgcggagccaggagtacaagaaataccagacaaacaagacaaccggcaacaccgataagagagccttcgtcgagacctggcagtccttttaccggaagaagcttaaggaggtgtggaaacctgccgtgcggtctggcggatctggcggaggctccaccagccccaagaaaaagagaaaagtctaagctgccttctgcggggcttgccttctggccatgcccttcttctctcccttgcacctgtacctcttggtctttgaataaagcctgagtaggaaggctagcaaaaaaaaaaaaaaaaaaaaaaaaaaaaaaaaaaaaaaaaaaaaaaaaaaaaaaaaaaaaaaaaaaaaaaaaaaaaaaaa

SEQ ID NO: 9029 - RNA, 8787 nt, synthetic construct
  source 1..8787: mol_type = other RNA
aggaaataagagagaaaagaagagtaagaagaaatataagagccaccatggcccctaagaagaagcgtaaagtgagccggatgaaccacgaccaggagttcgacccccctaaggtgtaccctcccgtccccgccgagaagagaaagcccatccgggtcctgagcctgttcgatggcatcgccaccggtctgctggtgctgaaggacctgggcatccaggtggataggtacattgcctccgaggtgtgcgaggactccatcaccgtgggaatggtgcgtcatcagggcaagatcatgtacgtgggcgacgtgcggagcgtgacacagaagcatatccaggagtggggccctttcgacctggtgatcggcggcagcccttgcaatgacctgagcatcgtgaacccagcccggaagggcctgtacgagggaaccggcagactgttcttcgagttttacagactgctgcacgacgcccggcctaaggaaggcgacgaccggcccttcttttggctgttcgagaatgtggtggccatgggagtcagcgacaagcgggatattagccggttcctggagagcaaccccgtgatgatcgatgccaaggaagtgagcgccgcccaccgggccagatacttctggggcaatctgcctggcatgaacagacccctggccagcaccgtgaacgacaagctggagctgcaggagtgcctggagcacggccggatcgccaagttcagcaaggtgagaaccatcaccacccgaagcaacagcatcaaacaaggcaaggaccagcactttcctgtgttcatgaacgagaaggaggacatcctgtggtgtaccgagatggagagagtgttcgggttcccagtccactacacagatgtcagcaacatgtctagactggccagacagagactgctgggaagaagctggtccgtccctgtgatcagacacctgttcgcccctctgaaggagtacttcgcctgcgtgagcagcggcaacagcaacgccaacagccggggccccagcttctctagcggcctggtgccactgtccctgagagggagccacatgggccccatggagatctacaaaaccgtgagcgcctggaagcggcagcctgtgcgcgtgctgagcctgtttcggaatatcgataaagtcctgaaaagcctgggattcctggagagcggctctggctccggcggtggcaccctgaagtacgtggaggatgtgacaaacgtggtcagacgggatgtggagaagtggggccccttcgatctggtgtacggcagcacccaacccctgggcagctcttgtgaccggtgccctggctggtacatgtttcagttccaccggatcctgcagtacgccctgccgagacaggagtcccagcggccattcttttggattttcatggacaacttgctgctgaccgaggatgaccaggaaactaccactcggttcctgcagaccgaagccgtgaccctgcaggacgtgagaggccgggactaccagaacgccatgcgggtgtggtccaacatccctggactgaaaagcaagcacgcacctctgacccctaaagaagaggagtacctgcaggcccaggtgcggagcagaagcaagctggacgcccctaaggtggatctgctggtgaagaattgcctcctgcccctgagagagtacttcaagtatttcagccagaatagtctgcccctgggaggcagcggcggcggcgcccacggcagcgtgatgttcagcgacgtgagcatcgacttcagccaggaggagtgggactacctggacctggagcagagggacctgtacagggacgtgatgctggagaactacagcaacctggtgagcctgggctgcttcgtgagcaagcccgacgtgatcttcctgctggagcagggcaaggagccctggaaggtggtgaggaagggcaggaggaggtaccccgacctggagaccaactacggcggcccaagcagcggcgcccctcctcccagcggcggcaggcggcccaagcagcggcgcccctcctcccagcggcggcagcccagccggctccccaacctctaccgaggagggcacctctgagtccgccacccccgagagcggccctggcacctccaccgagcccagcgagggcagcgcacccggcagccctgccggcagccccacctccacagaggagggaaccagcaccgagcccagcgaaggcagcgccccaggcaccagcaccgagcctagtgagcaggagattaaacggatcaacaagatcagaagaagacttgtgaaagacagcaacaccaagaaggccggcaagacaggccccatgaaaaccctgctggttagagtgatgacacccgatctgagagagcggctggaaaacctgagaaagaagcctgaaaatatcccccagcccatcagcaatacatctagagccaacctgaataagctgctgaccgattacaccgaaatgaagaaggcgatcctgcatgtgtactgggaagagttccagaaggaccctgtgggcctgatgagccgggtggcccagcctgccagcaagaagatcgatcagaacaagctgaaacctgagatggacgagaagggcaacctgaccaccgccggctttgcctgctctcagtgtggccagcccctgttcgtgtacaagctggagcaggtgtctgagaagggcaaggcttacaccaactacttcggacggtgcaatgtggccgagcacgaaaagctgatcctgctggcccagctgaagcccgagaaggatagcgacgaagccgtgacatatagcctgggaaagtttgggcagagggccctggatttctacagcattcatgtgaccaaggagtccacccaccccgtgaagcccctggcccagatcgccggaaacagatacgcctccggacctgtgggaaaggccctgagcgacgcatgtatgggcacaatcgcctccttcctgtctaagtaccaggacatcatcatcgaacaccagaaggtggtgaagggcaaccagaagagactggagagcctgcgggagctggccggcaaggaaaacctggaataccctagcgtgaccctgccacctcagcctcacaccaaggagggcgttgatgcctacaacgaagtgatcgcccgggtgcgaatgtgggtgaacctgaacctgtggcagaagctgaagctaagcagagatgatgccaagcctctgctgagactgaagggattcccttcctttcctctggtcgagagacaggccaacgaagtggactggtgggacatggtgtgtaacgtgaagaagctgatcaacgagaaaaaggaggatggcaaggtgttttggcagaatctggctggctacaagagacaggaagccctgagaccatacctgagcagcgaggaagatcggaagaagggaaagaaattcgctcggtaccagctgggcgacctgctgctgcacctggaaaagaagcacggcgaggactggggaaaggtgtacgacgaggcctgggagcggattgacaagaaagtggaaggcctgagcaagcacatcaagctggaagaggaacggagaagcgaggacgcccagagcaaggccgccctgaccgactggctgcgggctaaggccagcttcgtgatcgagggcctgaaggaggccgacaaggacgagttctgcagatgcgagctgaagctgcagaagtggtacggggacctgcggggaaagcccttcgccatcgaagccgagaacagcatcctggacatcagcggcttcagcaagcagtacaactgtgccttcatctggcagaaggacggcgtgaagaagctgaacctgtacctgatcatcaactacttcaagggcggcaagctgcggttcaagaagatcaaacctgaagccttcgaagccaacagattctacaccgtgatcaacaaaaagagcggcgagatcgtgcccatggaggtgaacttcaacttcgacgaccccaacctgatcatcctgcctctggcctttggcaagagacagggcagagaattcatctggaacgacctgctgtccctggaaaccggcagcctgaagctggccaacggaagagtgatcgagaagacactgtacaacagaagaacccggcaggatgagcctgccctgttcgtggccctgaccttcgagcggcgggaggtcctggactcctccaatatcaaaccaatgaacctgatcggcgtggcaagaggcgaaaacatccccgccgtgatcgccctgaccgaccccgagggctgcccactgagccggtttaaggatagcctgggaaacccaacccacatcctgagaatcggcgagagctataaggagaagcagcggaccatccaggccaagaaggaggtggagcagcggagagccggcggctacagccggaagtacgccagcaaagccaagaatctggcagacgatatggtgagaaacaccgctagagatctgctgtactacgccgtgacccaggatgccatgctgatcttcgccaacctgagccggggcttcggccggcagggcaagcggaccttcatggccgagagacagtacacacggatggaggactggctgaccgccaagctggcctacgagggcctgagcaagacctacctgtccaagacactggcccagtacacctccaagacatgcagcaactgtgggtttaccatcaccagcgccgactacgacagggtgctggagaagctgaagaagacagcaacaggctggatgaccacaattaacggcaaggagctgaaggtggagggccagattacctactacaacagatacaagagacagaacgtagtcaaggacctgtccgtcgagctggatagactgagcgaagaatctgtgaacaacgacatctcctcctggacaaagggcagaagcggagaagctctgagcctcctgaagaaaagattctcccatagacccgtgcaggagaagttcgtgtgcctgaactgcggcttcgagacacacgcagccgagcaagccgccctgaacatcgccagatcctggctgttcctgcggagccaggagtacaagaaataccagacaaacaagacaaccggcaacaccgataagagagccttcgtcgagacctggcagtccttttaccggaagaagcttaaggaggtgtggaaacctgccgtgcggtctggcggatctggcggaggctccaccagccccaagaaaaagagaaaagtctaagctgccttctgcggggcttgccttctggccatgcccttcttctctcccttgcacctgtacctcttggtctttgaataaagcctgagtaggaaggctagcaaaaaaaaaaaaaaaaaaaaaaaaaaaaaaaaaaaaaaaaaaaaaaaaaaaaaaaaaaaaaaaaaaaaaaaaaaaaaaaagcccagccggctccccaacctctaccgaggagggcacctctgagtccgccacccccgagagcggccctggcacctccaccgagcccagcgagggcagcgcacccggcagccctgccggcagccccacctccacagaggagggaaccagcaccgagcccagcgaaggcagcgccccaggcaccagcaccgagcctagtgagcaggagattaaacggatcaacaagatcagaagaagacttgtgaaagacagcaacaccaagaaggccggcaagacaggccccatgaaaaccctgctggttagagtgatgacacccgatctgagagagcggctggaaaacctgagaaagaagcctgaaaatatcccccagcccatcagcaatacatctagagccaacctgaataagctgctgaccgattacaccgaaatgaagaaggcgatcctgcatgtgtactgggaagagttccagaaggaccctgtgggcctgatgagccgggtggcccagcctgccagcaagaagatcgatcagaacaagctgaaacctgagatggacgagaagggcaacctgaccaccgccggctttgcctgctctcagtgtggccagcccctgttcgtgtacaagctggagcaggtgtctgagaagggcaaggcttacaccaactacttcggacggtgcaatgtggccgagcacgaaaagctgatcctgctggcccagctgaagcccgagaaggatagcgacgaagccgtgacatatagcctgggaaagtttgggcagagggccctggatttctacagcattcatgtgaccaaggagtccacccaccccgtgaagcccctggcccagatcgccggaaacagatacgcctccggacctgtgggaaaggccctgagcgacgcatgtatgggcacaatcgcctccttcctgtctaagtaccaggacatcatcatcgaacaccagaaggtggtgaagggcaaccagaagagactggagagcctgcgggagctggccggcaaggaaaacctggaataccctagcgtgaccctgccacctcagcctcacaccaaggagggcgttgatgcctacaacgaagtgatcgcccgggtgcgaatgtgggtgaacctgaacctgtggcagaagctgaagctaagcagagatgatgccaagcctctgctgagactgaagggattcccttcctttcctctggtcgagagacaggccaacgaagtggactggtgggacatggtgtgtaacgtgaagaagctgatcaacgagaaaaaggaggatggcaaggtgttttggcagaatctggctggctacaagagacaggaagccctgagaccatacctgagcagcgaggaagatcggaagaagggaaagaaattcgctcggtaccagctgggcgacctgctgctgcacctggaaaagaagcacggcgaggactggggaaaggtgtacgacgaggcctgggagcggattgacaagaaagtggaaggcctgagcaagcacatcaagctggaagaggaacggagaagcgaggacgcccagagcaaggccgccctgaccgactggctgcgggctaaggccagcttcgtgatcgagggcctgaaggaggccgacaaggacgagttctgcagatgcgagctgaagctgcagaagtggtacggggacctgcggggaaagcccttcgccatcgaagccgagaacagcatcctggacatcagcggcttcagcaagcagtacaactgtgccttcatctggcagaaggacggcgtgaagaagctgaacctgtacctgatcatcaactacttcaagggcggcaagctgcggttcaagaagatcaaacctgaagccttcgaagccaacagattctacaccgtgatcaacaaaaagagcggcgagatcgtgcccatggaggtgaacttcaacttcgacgaccccaacctgatcatcctgcctctggcctttggcaagagacagggcagagaattcatctggaacgacctgctgtccctggaaaccggcagcctgaagctggccaacggaagagtgatcgagaagacactgtacaacagaagaacccggcaggatgagcctgccctgttcgtggccctgaccttcgagcggcgggaggtcctggactcctccaatatcaaaccaatgaacctgatcggcgtggcaagaggcgaaaacatccccgccgtgatcgccctgaccgaccccgagggctgcccactgagccggtttaaggatagcctgggaaacccaacccacatcctgagaatcggcgagagctataaggagaagcagcggaccatccaggccaagaaggaggtggagcagcggagagccggcggctacagccggaagtacgccagcaaagccaagaatctggcagacgatatggtgagaaacaccgctagagatctgctgtactacgccgtgacccaggatgccatgctgatcttcgccaacctgagccggggcttcggccggcagggcaagcggaccttcatggccgagagacagtacacacggatggaggactggctgaccgccaagctggcctacgagggcctgagcaagacctacctgtccaagacactggcccagtacacctccaagacatgcagcaactgtgggtttaccatcaccagcgccgactacgacagggtgctggagaagctgaagaagacagcaacaggctggatgaccacaattaacggcaaggagctgaaggtggagggccagattacctactacaacagatacaagagacagaacgtagtcaaggacctgtccgtcgagctggatagactgagcgaagaatctgtgaacaacgacatctcctcctggacaaagggcagaagcggagaagctctgagcctcctgaagaaaagattctcccatagacccgtgcaggagaagttcgtgtgcctgaactgcggcttcgagacacacgcagccgagcaagccgccctgaacatcgccagatcctggctgttcctgcggagccaggagtacaagaaataccagacaaacaagacaaccggcaacaccgataagagagccttcgtcgagacctggcagtccttttaccggaagaagcttaaggaggtgtggaaacctgccgtgcggtctggcggatctggcggaggctccaccagccccaagaaaaagagaaaagtctaagctgccttctgcggggcttgccttctggccatgcccttcttctctcccttgcacctgtacctcttggtctttgaataaagcctgagtaggaaggctagcaaaaaaaaaaaaaaaaaaaaaaaaaaaaaaaaaaaaaaaaaaaaaaaaaaaaaaaaaaaaaaaaaaaaaaaaaaaaaaaa

SEQ ID NO: 9030 - RNA, 8787 nt, synthetic construct
  source 1..8787: mol_type = other RNA
aggaaataagagagaaaagaagagtaagaagaaatataagagccaccatggcccctaagaagaagcgtaaagtgagccggatgaaccacgaccaggagttcgacccccctaaggtgtaccctcccgtccccgccgagaagagaaagcccatccgggtcctgagcctgttcgatggcatcgccaccggtctgctggtgctgaaggacctgggcatccaggtggataggtacattgcctccgaggtgtgcgaggactccatcaccgtgggaatggtgcgtcatcagggcaagatcatgtacgtgggcgacgtgcggagcgtgacacagaagcatatccaggagtggggccctttcgacctggtgatcggcggcagcccttgcaatgacctgagcatcgtgaacccagcccggaagggcctgtacgagggaaccggcagactgttcttcgagttttacagactgctgcacgacgcccggcctaaggaaggcgacgaccggcccttcttttggctgttcgagaatgtggtggccatgggagtcagcgacaagcgggatattagccggttcctggagagcaaccccgtgatgatcgatgccaaggaagtgagcgccgcccaccgggccagatacttctggggcaatctgcctggcatgaacagacccctggccagcaccgtgaacgacaagctggagctgcaggagtgcctggagcacggccggatcgccaagttcagcaaggtgagaaccatcaccacccgaagcaacagcatcaaacaaggcaaggaccagcactttcctgtgttcatgaacgagaaggaggacatcctgtggtgtaccgagatggagagagtgttcgggttcccagtccactacacagatgtcagcaacatgtctagactggccagacagagactgctgggaagaagctggtccgtccctgtgatcagacacctgttcgcccctctgaaggagtacttcgcctgcgtgagcagcggcaacagcaacgccaacagccggggccccagcttctctagcggcctggtgccactgtccctgagagggagccacatgggccccatggagatctacaaaaccgtgagcgcctggaagcggcagcctgtgcgcgtgctgagcctgtttcggaatatcgataaagtcctgaaaagcctgggattcctggagagcggctctggctccggcggtggcaccctgaagtacgtggaggatgtgacaaacgtggtcagacgggatgtggagaagtggggccccttcgatctggtgtacggcagcacccaacccctgggcagctcttgtgaccggtgccctggctggtacatgtttcagttccaccggatcctgcagtacgccctgccgagacaggagtcccagcggccattcttttggattttcatggacaacttgctgctgaccgaggatgaccaggaaactaccactcggttcctgcagaccgaagccgtgaccctgcaggacgtgagaggccgggactaccagaacgccatgcgggtgtggtccaacatccctggactgaaaagcaagcacgcacctctgacccctaaagaagaggagtacctgcaggcccaggtgcggagcagaagcaagctggacgcccctaaggtggatctgctggtgaagaattgcctcctgcccctgagagagtacttcaagtatttcagccagaatagtctgcccctgggaggcagcggcggcggcgtgcaggagcccgtgaccttcaaggacgtggccgtggacttcacccaggaggagtggggccagctggacctggtgcagaggaccctgtacagggacgtgatgctggagacctacggccacctgctgagcgtgggcaaccagatcgccaagcccgaggtgatcagcctgctggagcagggcgaggagccctggagcctggagcagacctgcccccagagggcctgccccgagtggatgaggaacggcggcccaagcagcggcgcccctcctcccagcggcggcaggcggcccaagcagcggcgcccctcctcccagcggcggcagcccagccggctccccaacctctaccgaggagggcacctctgagtccgccacccccgagagcggccctggcacctccaccgagcccagcgagggcagcgcacccggcagccctgccggcagccccacctccacagaggagggaaccagcaccgagcccagcgaaggcagcgccccaggcaccagcaccgagcctagtgagcaggagattaaacggatcaacaagatcagaagaagacttgtgaaagacagcaacaccaagaaggccggcaagacaggccccatgaaaaccctgctggttagagtgatgacacccgatctgagagagcggctggaaaacctgagaaagaagcctgaaaatatcccccagcccatcagcaatacatctagagccaacctgaataagctgctgaccgattacaccgaaatgaagaaggcgatcctgcatgtgtactgggaagagttccagaaggaccctgtgggcctgatgagccgggtggcccagcctgccagcaagaagatcgatcagaacaagctgaaacctgagatggacgagaagggcaacctgaccaccgccggctttgcctgctctcagtgtggccagcccctgttcgtgtacaagctggagcaggtgtctgagaagggcaaggcttacaccaactacttcggacggtgcaatgtggccgagcacgaaaagctgatcctgctggcccagctgaagcccgagaaggatagcgacgaagccgtgacatatagcctgggaaagtttgggcagagggccctggatttctacagcattcatgtgaccaaggagtccacccaccccgtgaagcccctggcccagatcgccggaaacagatacgcctccggacctgtgggaaaggccctgagcgacgcatgtatgggcacaatcgcctccttcctgtctaagtaccaggacatcatcatcgaacaccagaaggtggtgaagggcaaccagaagagactggagagcctgcgggagctggccggcaaggaaaacctggaataccctagcgtgaccctgccacctcagcctcacaccaaggagggcgttgatgcctacaacgaagtgatcgcccgggtgcgaatgtgggtgaacctgaacctgtggcagaagctgaagctaagcagagatgatgccaagcctctgctgagactgaagggattcccttcctttcctctggtcgagagacaggccaacgaagtggactggtgggacatggtgtgtaacgtgaagaagctgatcaacgagaaaaaggaggatggcaaggtgttttggcagaatctggctggctacaagagacaggaagccctgagaccatacctgagcagcgaggaagatcggaagaagggaaagaaattcgctcggtaccagctgggcgacctgctgctgcacctggaaaagaagcacggcgaggactggggaaaggtgtacgacgaggcctgggagcggattgacaagaaagtggaaggcctgagcaagcacatcaagctggaagaggaacggagaagcgaggacgcccagagcaaggccgccctgaccgactggctgcgggctaaggccagcttcgtgatcgagggcctgaaggaggccgacaaggacgagttctgcagatgcgagctgaagctgcagaagtggtacggggacctgcggggaaagcccttcgccatcgaagccgagaacagcatcctggacatcagcggcttcagcaagcagtacaactgtgccttcatctggcagaaggacggcgtgaagaagctgaacctgtacctgatcatcaactacttcaagggcggcaagctgcggttcaagaagatcaaacctgaagccttcgaagccaacagattctacaccgtgatcaacaaaaagagcggcgagatcgtgcccatggaggtgaacttcaacttcgacgaccccaacctgatcatcctgcctctggcctttggcaagagacagggcagagaattcatctggaacgacctgctgtccctggaaaccggcagcctgaagctggccaacggaagagtgatcgagaagacactgtacaacagaagaacccggcaggatgagcctgccctgttcgtggccctgaccttcgagcggcgggaggtcctggactcctccaatatcaaaccaatgaacctgatcggcgtggcaagaggcgaaaacatccccgccgtgatcgccctgaccgaccccgagggctgcccactgagccggtttaaggatagcctgggaaacccaacccacatcctgagaatcggcgagagctataaggagaagcagcggaccatccaggccaagaaggaggtggagcagcggagagccggcggctacagccggaagtacgccagcaaagccaagaatctggcagacgatatggtgagaaacaccgctagagatctgctgtactacgccgtgacccaggatgccatgctgatcttcgccaacctgagccggggcttcggccggcagggcaagcggaccttcatggccgagagacagtacacacggatggaggactggctgaccgccaagctggcctacgagggcctgagcaagacctacctgtccaagacactggcccagtacacctccaagacatgcagcaactgtgggtttaccatcaccagcgccgactacgacagggtgctggagaagctgaagaagacagcaacaggctggatgaccacaattaacggcaaggagctgaaggtggagggccagattacctactacaacagatacaagagacagaacgtagtcaaggacctgtccgtcgagctggatagactgagcgaagaatctgtgaacaacgacatctcctcctggacaaagggcagaagcggagaagctctgagcctcctgaagaaaagattctcccatagacccgtgcaggagaagttcgtgtgcctgaactgcggcttcgagacacacgcagccgagcaagccgccctgaacatcgccagatcctggctgttcctgcggagccaggagtacaagaaataccagacaaacaagacaaccggcaacaccgataagagagccttcgtcgagacctggcagtccttttaccggaagaagcttaaggaggtgtggaaacctgccgtgcggtctggcggatctggcggaggctccaccagccccaagaaaaagagaaaagtctaagctgccttctgcggggcttgccttctggccatgcccttcttctctcccttgcacctgtacctcttggtctttgaataaagcctgagtaggaaggctagcaaaaaaaaaaaaaaaaaaaaaaaaaaaaaaaaaaaaaaaaaaaaaaaaaaaaaaaaaaaaaaaaaaaaaaaaaaaaaaaagcccagccggctccccaacctctaccgaggagggcacctctgagtccgccacccccgagagcggccctggcacctccaccgagcccagcgagggcagcgcacccggcagccctgccggcagccccacctccacagaggagggaaccagcaccgagcccagcgaaggcagcgccccaggcaccagcaccgagcctagtgagcaggagattaaacggatcaacaagatcagaagaagacttgtgaaagacagcaacaccaagaaggccggcaagacaggccccatgaaaaccctgctggttagagtgatgacacccgatctgagagagcggctggaaaacctgagaaagaagcctgaaaatatcccccagcccatcagcaatacatctagagccaacctgaataagctgctgaccgattacaccgaaatgaagaaggcgatcctgcatgtgtactgggaagagttccagaaggaccctgtgggcctgatgagccgggtggcccagcctgccagcaagaagatcgatcagaacaagctgaaacctgagatggacgagaagggcaacctgaccaccgccggctttgcctgctctcagtgtggccagcccctgttcgtgtacaagctggagcaggtgtctgagaagggcaaggcttacaccaactacttcggacggtgcaatgtggccgagcacgaaaagctgatcctgctggcccagctgaagcccgagaaggatagcgacgaagccgtgacatatagcctgggaaagtttgggcagagggccctggatttctacagcattcatgtgaccaaggagtccacccaccccgtgaagcccctggcccagatcgccggaaacagatacgcctccggacctgtgggaaaggccctgagcgacgcatgtatgggcacaatcgcctccttcctgtctaagtaccaggacatcatcatcgaacaccagaaggtggtgaagggcaaccagaagagactggagagcctgcgggagctggccggcaaggaaaacctggaataccctagcgtgaccctgccacctcagcctcacaccaaggagggcgttgatgcctacaacgaagtgatcgcccgggtgcgaatgtgggtgaacctgaacctgtggcagaagctgaagctaagcagagatgatgccaagcctctgctgagactgaagggattcccttcctttcctctggtcgagagacaggccaacgaagtggactggtgggacatggtgtgtaacgtgaagaagctgatcaacgagaaaaaggaggatggcaaggtgttttggcagaatctggctggctacaagagacaggaagccctgagaccatacctgagcagcgaggaagatcggaagaagggaaagaaattcgctcggtaccagctgggcgacctgctgctgcacctggaaaagaagcacggcgaggactggggaaaggtgtacgacgaggcctgggagcggattgacaagaaagtggaaggcctgagcaagcacatcaagctggaagaggaacggagaagcgaggacgcccagagcaaggccgccctgaccgactggctgcgggctaaggccagcttcgtgatcgagggcctgaaggaggccgacaaggacgagttctgcagatgcgagctgaagctgcagaagtggtacggggacctgcggggaaagcccttcgccatcgaagccgagaacagcatcctggacatcagcggcttcagcaagcagtacaactgtgccttcatctggcagaaggacggcgtgaagaagctgaacctgtacctgatcatcaactacttcaagggcggcaagctgcggttcaagaagatcaaacctgaagccttcgaagccaacagattctacaccgtgatcaacaaaaagagcggcgagatcgtgcccatggaggtgaacttcaacttcgacgaccccaacctgatcatcctgcctctggcctttggcaagagacagggcagagaattcatctggaacgacctgctgtccctggaaaccggcagcctgaagctggccaacggaagagtgatcgagaagacactgtacaacagaagaacccggcaggatgagcctgccctgttcgtggccctgaccttcgagcggcgggaggtcctggactcctccaatatcaaaccaatgaacctgatcggcgtggcaagaggcgaaaacatccccgccgtgatcgccctgaccgaccccgagggctgcccactgagccggtttaaggatagcctgggaaacccaacccacatcctgagaatcggcgagagctataaggagaagcagcggaccatccaggccaagaaggaggtggagcagcggagagccggcggctacagccggaagtacgccagcaaagccaagaatctggcagacgatatggtgagaaacaccgctagagatctgctgtactacgccgtgacccaggatgccatgctgatcttcgccaacctgagccggggcttcggccggcagggcaagcggaccttcatggccgagagacagtacacacggatggaggactggctgaccgccaagctggcctacgagggcctgagcaagacctacctgtccaagacactggcccagtacacctccaagacatgcagcaactgtgggtttaccatcaccagcgccgactacgacagggtgctggagaagctgaagaagacagcaacaggctggatgaccacaattaacggcaaggagctgaaggtggagggccagattacctactacaacagatacaagagacagaacgtagtcaaggacctgtccgtcgagctggatagactgagcgaagaatctgtgaacaacgacatctcctcctggacaaagggcagaagcggagaagctctgagcctcctgaagaaaagattctcccatagacccgtgcaggagaagttcgtgtgcctgaactgcggcttcgagacacacgcagccgagcaagccgccctgaacatcgccagatcctggctgttcctgcggagccaggagtacaagaaataccagacaaacaagacaaccggcaacaccgataagagagccttcgtcgagacctggcagtccttttaccggaagaagcttaaggaggtgtggaaacctgccgtgcggtctggcggatctggcggaggctccaccagccccaagaaaaagagaaaagtctaagctgccttctgcggggcttgccttctggccatgcccttcttctctcccttgcacctgtacctcttggtctttgaataaagcctgagtaggaaggctagcaaaaaaaaaaaaaaaaaaaaaaaaaaaaaaaaaaaaaaaaaaaaaaaaaaaaaaaaaaaaaaaaaaaaaaaaaaaaaaaa

SEQ ID NO: 9031 - RNA, 8787 nt, synthetic construct
  source 1..8787: mol_type = other RNA
aggaaataagagagaaaagaagagtaagaagaaatataagagccaccatggcccctaagaagaagcgtaaagtgagccggatgaaccacgaccaggagttcgacccccctaaggtgtaccctcccgtccccgccgagaagagaaagcccatccgggtcctgagcctgttcgatggcatcgccaccggtctgctggtgctgaaggacctgggcatccaggtggataggtacattgcctccgaggtgtgcgaggactccatcaccgtgggaatggtgcgtcatcagggcaagatcatgtacgtgggcgacgtgcggagcgtgacacagaagcatatccaggagtggggccctttcgacctggtgatcggcggcagcccttgcaatgacctgagcatcgtgaacccagcccggaagggcctgtacgagggaaccggcagactgttcttcgagttttacagactgctgcacgacgcccggcctaaggaaggcgacgaccggcccttcttttggctgttcgagaatgtggtggccatgggagtcagcgacaagcgggatattagccggttcctggagagcaaccccgtgatgatcgatgccaaggaagtgagcgccgcccaccgggccagatacttctggggcaatctgcctggcatgaacagacccctggccagcaccgtgaacgacaagctggagctgcaggagtgcctggagcacggccggatcgccaagttcagcaaggtgagaaccatcaccacccgaagcaacagcatcaaacaaggcaaggaccagcactttcctgtgttcatgaacgagaaggaggacatcctgtggtgtaccgagatggagagagtgttcgggttcccagtccactacacagatgtcagcaacatgtctagactggccagacagagactgctgggaagaagctggtccgtccctgtgatcagacacctgttcgcccctctgaaggagtacttcgcctgcgtgagcagcggcaacagcaacgccaacagccggggccccagcttctctagcggcctggtgccactgtccctgagagggagccacatgggccccatggagatctacaaaaccgtgagcgcctggaagcggcagcctgtgcgcgtgctgagcctgtttcggaatatcgataaagtcctgaaaagcctgggattcctggagagcggctctggctccggcggtggcaccctgaagtacgtggaggatgtgacaaacgtggtcagacgggatgtggagaagtggggccccttcgatctggtgtacggcagcacccaacccctgggcagctcttgtgaccggtgccctggctggtacatgtttcagttccaccggatcctgcagtacgccctgccgagacaggagtcccagcggccattcttttggattttcatggacaacttgctgctgaccgaggatgaccaggaaactaccactcggttcctgcagaccgaagccgtgaccctgcaggacgtgagaggccgggactaccagaacgccatgcgggtgtggtccaacatccctggactgaaaagcaagcacgcacctctgacccctaaagaagaggagtacctgcaggcccaggtgcggagcagaagcaagctggacgcccctaaggtggatctgctggtgaagaattgcctcctgcccctgagagagtacttcaagtatttcagccagaatagtctgcccctgggaggcagcggcggcggcttccaggagcccgtgaccttcgaggacgtggccgtgtacttcacccagaacgagtgggccagcctgcaccccatgcagagggccctgtacagggaggtgatgctggagaactacgccaacgtgaccagcctgagcgccttccccttcagcaagcccgacctgatcttccagctggagcagggcgaggccgcctggggccccgacccctggaccctggccggcggcgaggccctgaggggcatgggcggcccaagcagcggcgcccctcctcccagcggcggcaggcggcccaagcagcggcgcccctcctcccagcggcggcagcccagccggctccccaacctctaccgaggagggcacctctgagtccgccacccccgagagcggccctggcacctccaccgagcccagcgagggcagcgcacccggcagccctgccggcagccccacctccacagaggagggaaccagcaccgagcccagcgaaggcagcgccccaggcaccagcaccgagcctagtgagcaggagattaaacggatcaacaagatcagaagaagacttgtgaaagacagcaacaccaagaaggccggcaagacaggccccatgaaaaccctgctggttagagtgatgacacccgatctgagagagcggctggaaaacctgagaaagaagcctgaaaatatcccccagcccatcagcaatacatctagagccaacctgaataagctgctgaccgattacaccgaaatgaagaaggcgatcctgcatgtgtactgggaagagttccagaaggaccctgtgggcctgatgagccgggtggcccagcctgccagcaagaagatcgatcagaacaagctgaaacctgagatggacgagaagggcaacctgaccaccgccggctttgcctgctctcagtgtggccagcccctgttcgtgtacaagctggagcaggtgtctgagaagggcaaggcttacaccaactacttcggacggtgcaatgtggccgagcacgaaaagctgatcctgctggcccagctgaagcccgagaaggatagcgacgaagccgtgacatatagcctgggaaagtttgggcagagggccctggatttctacagcattcatgtgaccaaggagtccacccaccccgtgaagcccctggcccagatcgccggaaacagatacgcctccggacctgtgggaaaggccctgagcgacgcatgtatgggcacaatcgcctccttcctgtctaagtaccaggacatcatcatcgaacaccagaaggtggtgaagggcaaccagaagagactggagagcctgcgggagctggccggcaaggaaaacctggaataccctagcgtgaccctgccacctcagcctcacaccaaggagggcgttgatgcctacaacgaagtgatcgcccgggtgcgaatgtgggtgaacctgaacctgtggcagaagctgaagctaagcagagatgatgccaagcctctgctgagactgaagggattcccttcctttcctctggtcgagagacaggccaacgaagtggactggtgggacatggtgtgtaacgtgaagaagctgatcaacgagaaaaaggaggatggcaaggtgttttggcagaatctggctggctacaagagacaggaagccctgagaccatacctgagcagcgaggaagatcggaagaagggaaagaaattcgctcggtaccagctgggcgacctgctgctgcacctggaaaagaagcacggcgaggactggggaaaggtgtacgacgaggcctgggagcggattgacaagaaagtggaaggcctgagcaagcacatcaagctggaagaggaacggagaagcgaggacgcccagagcaaggccgccctgaccgactggctgcgggctaaggccagcttcgtgatcgagggcctgaaggaggccgacaaggacgagttctgcagatgcgagctgaagctgcagaagtggtacggggacctgcggggaaagcccttcgccatcgaagccgagaacagcatcctggacatcagcggcttcagcaagcagtacaactgtgccttcatctggcagaaggacggcgtgaagaagctgaacctgtacctgatcatcaactacttcaagggcggcaagctgcggttcaagaagatcaaacctgaagccttcgaagccaacagattctacaccgtgatcaacaaaaagagcggcgagatcgtgcccatggaggtgaacttcaacttcgacgaccccaacctgatcatcctgcctctggcctttggcaagagacagggcagagaattcatctggaacgacctgctgtccctggaaaccggcagcctgaagctggccaacggaagagtgatcgagaagacactgtacaacagaagaacccggcaggatgagcctgccctgttcgtggccctgaccttcgagcggcgggaggtcctggactcctccaatatcaaaccaatgaacctgatcggcgtggcaagaggcgaaaacatccccgccgtgatcgccctgaccgaccccgagggctgcccactgagccggtttaaggatagcctgggaaacccaacccacatcctgagaatcggcgagagctataaggagaagcagcggaccatccaggccaagaaggaggtggagcagcggagagccggcggctacagccggaagtacgccagcaaagccaagaatctggcagacgatatggtgagaaacaccgctagagatctgctgtactacgccgtgacccaggatgccatgctgatcttcgccaacctgagccggggcttcggccggcagggcaagcggaccttcatggccgagagacagtacacacggatggaggactggctgaccgccaagctggcctacgagggcctgagcaagacctacctgtccaagacactggcccagtacacctccaagacatgcagcaactgtgggtttaccatcaccagcgccgactacgacagggtgctggagaagctgaagaagacagcaacaggctggatgaccacaattaacggcaaggagctgaaggtggagggccagattacctactacaacagatacaagagacagaacgtagtcaaggacctgtccgtcgagctggatagactgagcgaagaatctgtgaacaacgacatctcctcctggacaaagggcagaagcggagaagctctgagcctcctgaagaaaagattctcccatagacccgtgcaggagaagttcgtgtgcctgaactgcggcttcgagacacacgcagccgagcaagccgccctgaacatcgccagatcctggctgttcctgcggagccaggagtacaagaaataccagacaaacaagacaaccggcaacaccgataagagagccttcgtcgagacctggcagtccttttaccggaagaagcttaaggaggtgtggaaacctgccgtgcggtctggcggatctggcggaggctccaccagccccaagaaaaagagaaaagtctaagctgccttctgcggggcttgccttctggccatgcccttcttctctcccttgcacctgtacctcttggtctttgaataaagcctgagtaggaaggctagcaaaaaaaaaaaaaaaaaaaaaaaaaaaaaaaaaaaaaaaaaaaaaaaaaaaaaaaaaaaaaaaaaaaaaaaaaaaaaaaagcccagccggctccccaacctctaccgaggagggcacctctgagtccgccacccccgagagcggccctggcacctccaccgagcccagcgagggcagcgcacccggcagccctgccggcagccccacctccacagaggagggaaccagcaccgagcccagcgaaggcagcgccccaggcaccagcaccgagcctagtgagcaggagattaaacggatcaacaagatcagaagaagacttgtgaaagacagcaacaccaagaaggccggcaagacaggccccatgaaaaccctgctggttagagtgatgacacccgatctgagagagcggctggaaaacctgagaaagaagcctgaaaatatcccccagcccatcagcaatacatctagagccaacctgaataagctgctgaccgattacaccgaaatgaagaaggcgatcctgcatgtgtactgggaagagttccagaaggaccctgtgggcctgatgagccgggtggcccagcctgccagcaagaagatcgatcagaacaagctgaaacctgagatggacgagaagggcaacctgaccaccgccggctttgcctgctctcagtgtggccagcccctgttcgtgtacaagctggagcaggtgtctgagaagggcaaggcttacaccaactacttcggacggtgcaatgtggccgagcacgaaaagctgatcctgctggcccagctgaagcccgagaaggatagcgacgaagccgtgacatatagcctgggaaagtttgggcagagggccctggatttctacagcattcatgtgaccaaggagtccacccaccccgtgaagcccctggcccagatcgccggaaacagatacgcctccggacctgtgggaaaggccctgagcgacgcatgtatgggcacaatcgcctccttcctgtctaagtaccaggacatcatcatcgaacaccagaaggtggtgaagggcaaccagaagagactggagagcctgcgggagctggccggcaaggaaaacctggaataccctagcgtgaccctgccacctcagcctcacaccaaggagggcgttgatgcctacaacgaagtgatcgcccgggtgcgaatgtgggtgaacctgaacctgtggcagaagctgaagctaagcagagatgatgccaagcctctgctgagactgaagggattcccttcctttcctctggtcgagagacaggccaacgaagtggactggtgggacatggtgtgtaacgtgaagaagctgatcaacgagaaaaaggaggatggcaaggtgttttggcagaatctggctggctacaagagacaggaagccctgagaccatacctgagcagcgaggaagatcggaagaagggaaagaaattcgctcggtaccagctgggcgacctgctgctgcacctggaaaagaagcacggcgaggactggggaaaggtgtacgacgaggcctgggagcggattgacaagaaagtggaaggcctgagcaagcacatcaagctggaagaggaacggagaagcgaggacgcccagagcaaggccgccctgaccgactggctgcgggctaaggccagcttcgtgatcgagggcctgaaggaggccgacaaggacgagttctgcagatgcgagctgaagctgcagaagtggtacggggacctgcggggaaagcccttcgccatcgaagccgagaacagcatcctggacatcagcggcttcagcaagcagtacaactgtgccttcatctggcagaaggacggcgtgaagaagctgaacctgtacctgatcatcaactacttcaagggcggcaagctgcggttcaagaagatcaaacctgaagccttcgaagccaacagattctacaccgtgatcaacaaaaagagcggcgagatcgtgcccatggaggtgaacttcaacttcgacgaccccaacctgatcatcctgcctctggcctttggcaagagacagggcagagaattcatctggaacgacctgctgtccctggaaaccggcagcctgaagctggccaacggaagagtgatcgagaagacactgtacaacagaagaacccggcaggatgagcctgccctgttcgtggccctgaccttcgagcggcgggaggtcctggactcctccaatatcaaaccaatgaacctgatcggcgtggcaagaggcgaaaacatccccgccgtgatcgccctgaccgaccccgagggctgcccactgagccggtttaaggatagcctgggaaacccaacccacatcctgagaatcggcgagagctataaggagaagcagcggaccatccaggccaagaaggaggtggagcagcggagagccggcggctacagccggaagtacgccagcaaagccaagaatctggcagacgatatggtgagaaacaccgctagagatctgctgtactacgccgtgacccaggatgccatgctgatcttcgccaacctgagccggggcttcggccggcagggcaagcggaccttcatggccgagagacagtacacacggatggaggactggctgaccgccaagctggcctacgagggcctgagcaagacctacctgtccaagacactggcccagtacacctccaagacatgcagcaactgtgggtttaccatcaccagcgccgactacgacagggtgctggagaagctgaagaagacagcaacaggctggatgaccacaattaacggcaaggagctgaaggtggagggccagattacctactacaacagatacaagagacagaacgtagtcaaggacctgtccgtcgagctggatagactgagcgaagaatctgtgaacaacgacatctcctcctggacaaagggcagaagcggagaagctctgagcctcctgaagaaaagattctcccatagacccgtgcaggagaagttcgtgtgcctgaactgcggcttcgagacacacgcagccgagcaagccgccctgaacatcgccagatcctggctgttcctgcggagccaggagtacaagaaataccagacaaacaagacaaccggcaacaccgataagagagccttcgtcgagacctggcagtccttttaccggaagaagcttaaggaggtgtggaaacctgccgtgcggtctggcggatctggcggaggctccaccagccccaagaaaaagagaaaagtctaagctgccttctgcggggcttgccttctggccatgcccttcttctctcccttgcacctgtacctcttggtctttgaataaagcctgagtaggaaggctagcaaaaaaaaaaaaaaaaaaaaaaaaaaaaaaaaaaaaaaaaaaaaaaaaaaaaaaaaaaaaaaaaaaaaaaaaaaaaaaaa

SEQ ID NO: 9032 - RNA, 8787 nt, synthetic construct
  source 1..8787: mol_type = other RNA
aggaaataagagagaaaagaagagtaagaagaaatataagagccaccatggcccctaagaagaagcgtaaagtgagccggatgaaccacgaccaggagttcgacccccctaaggtgtaccctcccgtccccgccgagaagagaaagcccatccgggtcctgagcctgttcgatggcatcgccaccggtctgctggtgctgaaggacctgggcatccaggtggataggtacattgcctccgaggtgtgcgaggactccatcaccgtgggaatggtgcgtcatcagggcaagatcatgtacgtgggcgacgtgcggagcgtgacacagaagcatatccaggagtggggccctttcgacctggtgatcggcggcagcccttgcaatgacctgagcatcgtgaacccagcccggaagggcctgtacgagggaaccggcagactgttcttcgagttttacagactgctgcacgacgcccggcctaaggaaggcgacgaccggcccttcttttggctgttcgagaatgtggtggccatgggagtcagcgacaagcgggatattagccggttcctggagagcaaccccgtgatgatcgatgccaaggaagtgagcgccgcccaccgggccagatacttctggggcaatctgcctggcatgaacagacccctggccagcaccgtgaacgacaagctggagctgcaggagtgcctggagcacggccggatcgccaagttcagcaaggtgagaaccatcaccacccgaagcaacagcatcaaacaaggcaaggaccagcactttcctgtgttcatgaacgagaaggaggacatcctgtggtgtaccgagatggagagagtgttcgggttcccagtccactacacagatgtcagcaacatgtctagactggccagacagagactgctgggaagaagctggtccgtccctgtgatcagacacctgttcgcccctctgaaggagtacttcgcctgcgtgagcagcggcaacagcaacgccaacagccggggccccagcttctctagcggcctggtgccactgtccctgagagggagccacatgggccccatggagatctacaaaaccgtgagcgcctggaagcggcagcctgtgcgcgtgctgagcctgtttcggaatatcgataaagtcctgaaaagcctgggattcctggagagcggctctggctccggcggtggcaccctgaagtacgtggaggatgtgacaaacgtggtcagacgggatgtggagaagtggggccccttcgatctggtgtacggcagcacccaacccctgggcagctcttgtgaccggtgccctggctggtacatgtttcagttccaccggatcctgcagtacgccctgccgagacaggagtcccagcggccattcttttggattttcatggacaacttgctgctgaccgaggatgaccaggaaactaccactcggttcctgcagaccgaagccgtgaccctgcaggacgtgagaggccgggactaccagaacgccatgcgggtgtggtccaacatccctggactgaaaagcaagcacgcacctctgacccctaaagaagaggagtacctgcaggcccaggtgcggagcagaagcaagctggacgcccctaaggtggatctgctggtgaagaattgcctcctgcccctgagagagtacttcaagtatttcagccagaatagtctgcccctgggaggcagcggcggcggccagccccagggcaccatgaccttcaaggacgtggaggtgaccttcagccaggacgagtggggcctgctggacgccagccagaggaacctgtacagggacgtgatgctggagaactacggcaacatggccagcgtggtgggccccttcaccaagcccgccctgatcagctggctggaggccagggagccctggggcctgaacgtgcagggcgtgcagctgaagggcaaccccggcgccgcccccggcggcccaagcagcggcgcccctcctcccagcggcggcaggcggcccaagcagcggcgcccctcctcccagcggcggcagcccagccggctccccaacctctaccgaggagggcacctctgagtccgccacccccgagagcggccctggcacctccaccgagcccagcgagggcagcgcacccggcagccctgccggcagccccacctccacagaggagggaaccagcaccgagcccagcgaaggcagcgccccaggcaccagcaccgagcctagtgagcaggagattaaacggatcaacaagatcagaagaagacttgtgaaagacagcaacaccaagaaggccggcaagacaggccccatgaaaaccctgctggttagagtgatgacacccgatctgagagagcggctggaaaacctgagaaagaagcctgaaaatatcccccagcccatcagcaatacatctagagccaacctgaataagctgctgaccgattacaccgaaatgaagaaggcgatcctgcatgtgtactgggaagagttccagaaggaccctgtgggcctgatgagccgggtggcccagcctgccagcaagaagatcgatcagaacaagctgaaacctgagatggacgagaagggcaacctgaccaccgccggctttgcctgctctcagtgtggccagcccctgttcgtgtacaagctggagcaggtgtctgagaagggcaaggcttacaccaactacttcggacggtgcaatgtggccgagcacgaaaagctgatcctgctggcccagctgaagcccgagaaggatagcgacgaagccgtgacatatagcctgggaaagtttgggcagagggccctggatttctacagcattcatgtgaccaaggagtccacccaccccgtgaagcccctggcccagatcgccggaaacagatacgcctccggacctgtgggaaaggccctgagcgacgcatgtatgggcacaatcgcctccttcctgtctaagtaccaggacatcatcatcgaacaccagaaggtggtgaagggcaaccagaagagactggagagcctgcgggagctggccggcaaggaaaacctggaataccctagcgtgaccctgccacctcagcctcacaccaaggagggcgttgatgcctacaacgaagtgatcgcccgggtgcgaatgtgggtgaacctgaacctgtggcagaagctgaagctaagcagagatgatgccaagcctctgctgagactgaagggattcccttcctttcctctggtcgagagacaggccaacgaagtggactggtgggacatggtgtgtaacgtgaagaagctgatcaacgagaaaaaggaggatggcaaggtgttttggcagaatctggctggctacaagagacaggaagccctgagaccatacctgagcagcgaggaagatcggaagaagggaaagaaattcgctcggtaccagctgggcgacctgctgctgcacctggaaaagaagcacggcgaggactggggaaaggtgtacgacgaggcctgggagcggattgacaagaaagtggaaggcctgagcaagcacatcaagctggaagaggaacggagaagcgaggacgcccagagcaaggccgccctgaccgactggctgcgggctaaggccagcttcgtgatcgagggcctgaaggaggccgacaaggacgagttctgcagatgcgagctgaagctgcagaagtggtacggggacctgcggggaaagcccttcgccatcgaagccgagaacagcatcctggacatcagcggcttcagcaagcagtacaactgtgccttcatctggcagaaggacggcgtgaagaagctgaacctgtacctgatcatcaactacttcaagggcggcaagctgcggttcaagaagatcaaacctgaagccttcgaagccaacagattctacaccgtgatcaacaaaaagagcggcgagatcgtgcccatggaggtgaacttcaacttcgacgaccccaacctgatcatcctgcctctggcctttggcaagagacagggcagagaattcatctggaacgacctgctgtccctggaaaccggcagcctgaagctggccaacggaagagtgatcgagaagacactgtacaacagaagaacccggcaggatgagcctgccctgttcgtggccctgaccttcgagcggcgggaggtcctggactcctccaatatcaaaccaatgaacctgatcggcgtggcaagaggcgaaaacatccccgccgtgatcgccctgaccgaccccgagggctgcccactgagccggtttaaggatagcctgggaaacccaacccacatcctgagaatcggcgagagctataaggagaagcagcggaccatccaggccaagaaggaggtggagcagcggagagccggcggctacagccggaagtacgccagcaaagccaagaatctggcagacgatatggtgagaaacaccgctagagatctgctgtactacgccgtgacccaggatgccatgctgatcttcgccaacctgagccggggcttcggccggcagggcaagcggaccttcatggccgagagacagtacacacggatggaggactggctgaccgccaagctggcctacgagggcctgagcaagacctacctgtccaagacactggcccagtacacctccaagacatgcagcaactgtgggtttaccatcaccagcgccgactacgacagggtgctggagaagctgaagaagacagcaacaggctggatgaccacaattaacggcaaggagctgaaggtggagggccagattacctactacaacagatacaagagacagaacgtagtcaaggacctgtccgtcgagctggatagactgagcgaagaatctgtgaacaacgacatctcctcctggacaaagggcagaagcggagaagctctgagcctcctgaagaaaagattctcccatagacccgtgcaggagaagttcgtgtgcctgaactgcggcttcgagacacacgcagccgagcaagccgccctgaacatcgccagatcctggctgttcctgcggagccaggagtacaagaaataccagacaaacaagacaaccggcaacaccgataagagagccttcgtcgagacctggcagtccttttaccggaagaagcttaaggaggtgtggaaacctgccgtgcggtctggcggatctggcggaggctccaccagccccaagaaaaagagaaaagtctaagctgccttctgcggggcttgccttctggccatgcccttcttctctcccttgcacctgtacctcttggtctttgaataaagcctgagtaggaaggctagcaaaaaaaaaaaaaaaaaaaaaaaaaaaaaaaaaaaaaaaaaaaaaaaaaaaaaaaaaaaaaaaaaaaaaaaaaaaaaaaagcccagccggctccccaacctctaccgaggagggcacctctgagtccgccacccccgagagcggccctggcacctccaccgagcccagcgagggcagcgcacccggcagccctgccggcagccccacctccacagaggagggaaccagcaccgagcccagcgaaggcagcgccccaggcaccagcaccgagcctagtgagcaggagattaaacggatcaacaagatcagaagaagacttgtgaaagacagcaacaccaagaaggccggcaagacaggccccatgaaaaccctgctggttagagtgatgacacccgatctgagagagcggctggaaaacctgagaaagaagcctgaaaatatcccccagcccatcagcaatacatctagagccaacctgaataagctgctgaccgattacaccgaaatgaagaaggcgatcctgcatgtgtactgggaagagttccagaaggaccctgtgggcctgatgagccgggtggcccagcctgccagcaagaagatcgatcagaacaagctgaaacctgagatggacgagaagggcaacctgaccaccgccggctttgcctgctctcagtgtggccagcccctgttcgtgtacaagctggagcaggtgtctgagaagggcaaggcttacaccaactacttcggacggtgcaatgtggccgagcacgaaaagctgatcctgctggcccagctgaagcccgagaaggatagcgacgaagccgtgacatatagcctgggaaagtttgggcagagggccctggatttctacagcattcatgtgaccaaggagtccacccaccccgtgaagcccctggcccagatcgccggaaacagatacgcctccggacctgtgggaaaggccctgagcgacgcatgtatgggcacaatcgcctccttcctgtctaagtaccaggacatcatcatcgaacaccagaaggtggtgaagggcaaccagaagagactggagagcctgcgggagctggccggcaaggaaaacctggaataccctagcgtgaccctgccacctcagcctcacaccaaggagggcgttgatgcctacaacgaagtgatcgcccgggtgcgaatgtgggtgaacctgaacctgtggcagaagctgaagctaagcagagatgatgccaagcctctgctgagactgaagggattcccttcctttcctctggtcgagagacaggccaacgaagtggactggtgggacatggtgtgtaacgtgaagaagctgatcaacgagaaaaaggaggatggcaaggtgttttggcagaatctggctggctacaagagacaggaagccctgagaccatacctgagcagcgaggaagatcggaagaagggaaagaaattcgctcggtaccagctgggcgacctgctgctgcacctggaaaagaagcacggcgaggactggggaaaggtgtacgacgaggcctgggagcggattgacaagaaagtggaaggcctgagcaagcacatcaagctggaagaggaacggagaagcgaggacgcccagagcaaggccgccctgaccgactggctgcgggctaaggccagcttcgtgatcgagggcctgaaggaggccgacaaggacgagttctgcagatgcgagctgaagctgcagaagtggtacggggacctgcggggaaagcccttcgccatcgaagccgagaacagcatcctggacatcagcggcttcagcaagcagtacaactgtgccttcatctggcagaaggacggcgtgaagaagctgaacctgtacctgatcatcaactacttcaagggcggcaagctgcggttcaagaagatcaaacctgaagccttcgaagccaacagattctacaccgtgatcaacaaaaagagcggcgagatcgtgcccatggaggtgaacttcaacttcgacgaccccaacctgatcatcctgcctctggcctttggcaagagacagggcagagaattcatctggaacgacctgctgtccctggaaaccggcagcctgaagctggccaacggaagagtgatcgagaagacactgtacaacagaagaacccggcaggatgagcctgccctgttcgtggccctgaccttcgagcggcgggaggtcctggactcctccaatatcaaaccaatgaacctgatcggcgtggcaagaggcgaaaacatccccgccgtgatcgccctgaccgaccccgagggctgcccactgagccggtttaaggatagcctgggaaacccaacccacatcctgagaatcggcgagagctataaggagaagcagcggaccatccaggccaagaaggaggtggagcagcggagagccggcggctacagccggaagtacgccagcaaagccaagaatctggcagacgatatggtgagaaacaccgctagagatctgctgtactacgccgtgacccaggatgccatgctgatcttcgccaacctgagccggggcttcggccggcagggcaagcggaccttcatggccgagagacagtacacacggatggaggactggctgaccgccaagctggcctacgagggcctgagcaagacctacctgtccaagacactggcccagtacacctccaagacatgcagcaactgtgggtttaccatcaccagcgccgactacgacagggtgctggagaagctgaagaagacagcaacaggctggatgaccacaattaacggcaaggagctgaaggtggagggccagattacctactacaacagatacaagagacagaacgtagtcaaggacctgtccgtcgagctggatagactgagcgaagaatctgtgaacaacgacatctcctcctggacaaagggcagaagcggagaagctctgagcctcctgaagaaaagattctcccatagacccgtgcaggagaagttcgtgtgcctgaactgcggcttcgagacacacgcagccgagcaagccgccctgaacatcgccagatcctggctgttcctgcggagccaggagtacaagaaataccagacaaacaagacaaccggcaacaccgataagagagccttcgtcgagacctggcagtccttttaccggaagaagcttaaggaggtgtggaaacctgccgtgcggtctggcggatctggcggaggctccaccagccccaagaaaaagagaaaagtctaagctgccttctgcggggcttgccttctggccatgcccttcttctctcccttgcacctgtacctcttggtctttgaataaagcctgagtaggaaggctagcaaaaaaaaaaaaaaaaaaaaaaaaaaaaaaaaaaaaaaaaaaaaaaaaaaaaaaaaaaaaaaaaaaaaaaaaaaaaaaaa

SEQ ID NO: 9033 - RNA, 8787 nt, synthetic construct
  source 1..8787: mol_type = other RNA
aggaaataagagagaaaagaagagtaagaagaaatataagagccaccatggcccctaagaagaagcgtaaagtgagccggatgaaccacgaccaggagttcgacccccctaaggtgtaccctcccgtccccgccgagaagagaaagcccatccgggtcctgagcctgttcgatggcatcgccaccggtctgctggtgctgaaggacctgggcatccaggtggataggtacattgcctccgaggtgtgcgaggactccatcaccgtgggaatggtgcgtcatcagggcaagatcatgtacgtgggcgacgtgcggagcgtgacacagaagcatatccaggagtggggccctttcgacctggtgatcggcggcagcccttgcaatgacctgagcatcgtgaacccagcccggaagggcctgtacgagggaaccggcagactgttcttcgagttttacagactgctgcacgacgcccggcctaaggaaggcgacgaccggcccttcttttggctgttcgagaatgtggtggccatgggagtcagcgacaagcgggatattagccggttcctggagagcaaccccgtgatgatcgatgccaaggaagtgagcgccgcccaccgggccagatacttctggggcaatctgcctggcatgaacagacccctggccagcaccgtgaacgacaagctggagctgcaggagtgcctggagcacggccggatcgccaagttcagcaaggtgagaaccatcaccacccgaagcaacagcatcaaacaaggcaaggaccagcactttcctgtgttcatgaacgagaaggaggacatcctgtggtgtaccgagatggagagagtgttcgggttcccagtccactacacagatgtcagcaacatgtctagactggccagacagagactgctgggaagaagctggtccgtccctgtgatcagacacctgttcgcccctctgaaggagtacttcgcctgcgtgagcagcggcaacagcaacgccaacagccggggccccagcttctctagcggcctggtgccactgtccctgagagggagccacatgggccccatggagatctacaaaaccgtgagcgcctggaagcggcagcctgtgcgcgtgctgagcctgtttcggaatatcgataaagtcctgaaaagcctgggattcctggagagcggctctggctccggcggtggcaccctgaagtacgtggaggatgtgacaaacgtggtcagacgggatgtggagaagtggggccccttcgatctggtgtacggcagcacccaacccctgggcagctcttgtgaccggtgccctggctggtacatgtttcagttccaccggatcctgcagtacgccctgccgagacaggagtcccagcggccattcttttggattttcatggacaacttgctgctgaccgaggatgaccaggaaactaccactcggttcctgcagaccgaagccgtgaccctgcaggacgtgagaggccgggactaccagaacgccatgcgggtgtggtccaacatccctggactgaaaagcaagcacgcacctctgacccctaaagaagaggagtacctgcaggcccaggtgcggagcagaagcaagctggacgcccctaaggtggatctgctggtgaagaattgcctcctgcccctgagagagtacttcaagtatttcagccagaatagtctgcccctgggaggcagcggcggcggcagccagggcaggctgaggttccaggacgtggccatcgacttcaccctggaggagtgggagtgcctggacctgggccagagggagctgtacagggacgtgatgctggagaactacggcaacctggccagcctgggcctgatcgtgtgcaagcccgacctggtgaccttcctggagaagatgagggacccccaggacgtgaggggcatcgagaccaccgccatccaccccgacctggccagcttcggcggcccaagcagcggcgcccctcctcccagcggcggcaggcggcccaagcagcggcgcccctcctcccagcggcggcagcccagccggctccccaacctctaccgaggagggcacctctgagtccgccacccccgagagcggccctggcacctccaccgagcccagcgagggcagcgcacccggcagccctgccggcagccccacctccacagaggagggaaccagcaccgagcccagcgaaggcagcgccccaggcaccagcaccgagcctagtgagcaggagattaaacggatcaacaagatcagaagaagacttgtgaaagacagcaacaccaagaaggccggcaagacaggccccatgaaaaccctgctggttagagtgatgacacccgatctgagagagcggctggaaaacctgagaaagaagcctgaaaatatcccccagcccatcagcaatacatctagagccaacctgaataagctgctgaccgattacaccgaaatgaagaaggcgatcctgcatgtgtactgggaagagttccagaaggaccctgtgggcctgatgagccgggtggcccagcctgccagcaagaagatcgatcagaacaagctgaaacctgagatggacgagaagggcaacctgaccaccgccggctttgcctgctctcagtgtggccagcccctgttcgtgtacaagctggagcaggtgtctgagaagggcaaggcttacaccaactacttcggacggtgcaatgtggccgagcacgaaaagctgatcctgctggcccagctgaagcccgagaaggatagcgacgaagccgtgacatatagcctgggaaagtttgggcagagggccctggatttctacagcattcatgtgaccaaggagtccacccaccccgtgaagcccctggcccagatcgccggaaacagatacgcctccggacctgtgggaaaggccctgagcgacgcatgtatgggcacaatcgcctccttcctgtctaagtaccaggacatcatcatcgaacaccagaaggtggtgaagggcaaccagaagagactggagagcctgcgggagctggccggcaaggaaaacctggaataccctagcgtgaccctgccacctcagcctcacaccaaggagggcgttgatgcctacaacgaagtgatcgcccgggtgcgaatgtgggtgaacctgaacctgtggcagaagctgaagctaagcagagatgatgccaagcctctgctgagactgaagggattcccttcctttcctctggtcgagagacaggccaacgaagtggactggtgggacatggtgtgtaacgtgaagaagctgatcaacgagaaaaaggaggatggcaaggtgttttggcagaatctggctggctacaagagacaggaagccctgagaccatacctgagcagcgaggaagatcggaagaagggaaagaaattcgctcggtaccagctgggcgacctgctgctgcacctggaaaagaagcacggcgaggactggggaaaggtgtacgacgaggcctgggagcggattgacaagaaagtggaaggcctgagcaagcacatcaagctggaagaggaacggagaagcgaggacgcccagagcaaggccgccctgaccgactggctgcgggctaaggccagcttcgtgatcgagggcctgaaggaggccgacaaggacgagttctgcagatgcgagctgaagctgcagaagtggtacggggacctgcggggaaagcccttcgccatcgaagccgagaacagcatcctggacatcagcggcttcagcaagcagtacaactgtgccttcatctggcagaaggacggcgtgaagaagctgaacctgtacctgatcatcaactacttcaagggcggcaagctgcggttcaagaagatcaaacctgaagccttcgaagccaacagattctacaccgtgatcaacaaaaagagcggcgagatcgtgcccatggaggtgaacttcaacttcgacgaccccaacctgatcatcctgcctctggcctttggcaagagacagggcagagaattcatctggaacgacctgctgtccctggaaaccggcagcctgaagctggccaacggaagagtgatcgagaagacactgtacaacagaagaacccggcaggatgagcctgccctgttcgtggccctgaccttcgagcggcgggaggtcctggactcctccaatatcaaaccaatgaacctgatcggcgtggcaagaggcgaaaacatccccgccgtgatcgccctgaccgaccccgagggctgcccactgagccggtttaaggatagcctgggaaacccaacccacatcctgagaatcggcgagagctataaggagaagcagcggaccatccaggccaagaaggaggtggagcagcggagagccggcggctacagccggaagtacgccagcaaagccaagaatctggcagacgatatggtgagaaacaccgctagagatctgctgtactacgccgtgacccaggatgccatgctgatcttcgccaacctgagccggggcttcggccggcagggcaagcggaccttcatggccgagagacagtacacacggatggaggactggctgaccgccaagctggcctacgagggcctgagcaagacctacctgtccaagacactggcccagtacacctccaagacatgcagcaactgtgggtttaccatcaccagcgccgactacgacagggtgctggagaagctgaagaagacagcaacaggctggatgaccacaattaacggcaaggagctgaaggtggagggccagattacctactacaacagatacaagagacagaacgtagtcaaggacctgtccgtcgagctggatagactgagcgaagaatctgtgaacaacgacatctcctcctggacaaagggcagaagcggagaagctctgagcctcctgaagaaaagattctcccatagacccgtgcaggagaagttcgtgtgcctgaactgcggcttcgagacacacgcagccgagcaagccgccctgaacatcgccagatcctggctgttcctgcggagccaggagtacaagaaataccagacaaacaagacaaccggcaacaccgataagagagccttcgtcgagacctggcagtccttttaccggaagaagcttaaggaggtgtggaaacctgccgtgcggtctggcggatctggcggaggctccaccagccccaagaaaaagagaaaagtctaagctgccttctgcggggcttgccttctggccatgcccttcttctctcccttgcacctgtacctcttggtctttgaataaagcctgagtaggaaggctagcaaaaaaaaaaaaaaaaaaaaaaaaaaaaaaaaaaaaaaaaaaaaaaaaaaaaaaaaaaaaaaaaaaaaaaaaaaaaaaaagcccagccggctccccaacctctaccgaggagggcacctctgagtccgccacccccgagagcggccctggcacctccaccgagcccagcgagggcagcgcacccggcagccctgccggcagccccacctccacagaggagggaaccagcaccgagcccagcgaaggcagcgccccaggcaccagcaccgagcctagtgagcaggagattaaacggatcaacaagatcagaagaagacttgtgaaagacagcaacaccaagaaggccggcaagacaggccccatgaaaaccctgctggttagagtgatgacacccgatctgagagagcggctggaaaacctgagaaagaagcctgaaaatatcccccagcccatcagcaatacatctagagccaacctgaataagctgctgaccgattacaccgaaatgaagaaggcgatcctgcatgtgtactgggaagagttccagaaggaccctgtgggcctgatgagccgggtggcccagcctgccagcaagaagatcgatcagaacaagctgaaacctgagatggacgagaagggcaacctgaccaccgccggctttgcctgctctcagtgtggccagcccctgttcgtgtacaagctggagcaggtgtctgagaagggcaaggcttacaccaactacttcggacggtgcaatgtggccgagcacgaaaagctgatcctgctggcccagctgaagcccgagaaggatagcgacgaagccgtgacatatagcctgggaaagtttgggcagagggccctggatttctacagcattcatgtgaccaaggagtccacccaccccgtgaagcccctggcccagatcgccggaaacagatacgcctccggacctgtgggaaaggccctgagcgacgcatgtatgggcacaatcgcctccttcctgtctaagtaccaggacatcatcatcgaacaccagaaggtggtgaagggcaaccagaagagactggagagcctgcgggagctggccggcaaggaaaacctggaataccctagcgtgaccctgccacctcagcctcacaccaaggagggcgttgatgcctacaacgaagtgatcgcccgggtgcgaatgtgggtgaacctgaacctgtggcagaagctgaagctaagcagagatgatgccaagcctctgctgagactgaagggattcccttcctttcctctggtcgagagacaggccaacgaagtggactggtgggacatggtgtgtaacgtgaagaagctgatcaacgagaaaaaggaggatggcaaggtgttttggcagaatctggctggctacaagagacaggaagccctgagaccatacctgagcagcgaggaagatcggaagaagggaaagaaattcgctcggtaccagctgggcgacctgctgctgcacctggaaaagaagcacggcgaggactggggaaaggtgtacgacgaggcctgggagcggattgacaagaaagtggaaggcctgagcaagcacatcaagctggaagaggaacggagaagcgaggacgcccagagcaaggccgccctgaccgactggctgcgggctaaggccagcttcgtgatcgagggcctgaaggaggccgacaaggacgagttctgcagatgcgagctgaagctgcagaagtggtacggggacctgcggggaaagcccttcgccatcgaagccgagaacagcatcctggacatcagcggcttcagcaagcagtacaactgtgccttcatctggcagaaggacggcgtgaagaagctgaacctgtacctgatcatcaactacttcaagggcggcaagctgcggttcaagaagatcaaacctgaagccttcgaagccaacagattctacaccgtgatcaacaaaaagagcggcgagatcgtgcccatggaggtgaacttcaacttcgacgaccccaacctgatcatcctgcctctggcctttggcaagagacagggcagagaattcatctggaacgacctgctgtccctggaaaccggcagcctgaagctggccaacggaagagtgatcgagaagacactgtacaacagaagaacccggcaggatgagcctgccctgttcgtggccctgaccttcgagcggcgggaggtcctggactcctccaatatcaaaccaatgaacctgatcggcgtggcaagaggcgaaaacatccccgccgtgatcgccctgaccgaccccgagggctgcccactgagccggtttaaggatagcctgggaaacccaacccacatcctgagaatcggcgagagctataaggagaagcagcggaccatccaggccaagaaggaggtggagcagcggagagccggcggctacagccggaagtacgccagcaaagccaagaatctggcagacgatatggtgagaaacaccgctagagatctgctgtactacgccgtgacccaggatgccatgctgatcttcgccaacctgagccggggcttcggccggcagggcaagcggaccttcatggccgagagacagtacacacggatggaggactggctgaccgccaagctggcctacgagggcctgagcaagacctacctgtccaagacactggcccagtacacctccaagacatgcagcaactgtgggtttaccatcaccagcgccgactacgacagggtgctggagaagctgaagaagacagcaacaggctggatgaccacaattaacggcaaggagctgaaggtggagggccagattacctactacaacagatacaagagacagaacgtagtcaaggacctgtccgtcgagctggatagactgagcgaagaatctgtgaacaacgacatctcctcctggacaaagggcagaagcggagaagctctgagcctcctgaagaaaagattctcccatagacccgtgcaggagaagttcgtgtgcctgaactgcggcttcgagacacacgcagccgagcaagccgccctgaacatcgccagatcctggctgttcctgcggagccaggagtacaagaaataccagacaaacaagacaaccggcaacaccgataagagagccttcgtcgagacctggcagtccttttaccggaagaagcttaaggaggtgtggaaacctgccgtgcggtctggcggatctggcggaggctccaccagccccaagaaaaagagaaaagtctaagctgccttctgcggggcttgccttctggccatgcccttcttctctcccttgcacctgtacctcttggtctttgaataaagcctgagtaggaaggctagcaaaaaaaaaaaaaaaaaaaaaaaaaaaaaaaaaaaaaaaaaaaaaaaaaaaaaaaaaaaaaaaaaaaaaaaaaaaaaaaa

SEQ ID NO: 9034 - RNA, 8787 nt, synthetic construct
  source 1..8787: mol_type = other RNA
aggaaataagagagaaaagaagagtaagaagaaatataagagccaccatggcccctaagaagaagcgtaaagtgagccggatgaaccacgaccaggagttcgacccccctaaggtgtaccctcccgtccccgccgagaagagaaagcccatccgggtcctgagcctgttcgatggcatcgccaccggtctgctggtgctgaaggacctgggcatccaggtggataggtacattgcctccgaggtgtgcgaggactccatcaccgtgggaatggtgcgtcatcagggcaagatcatgtacgtgggcgacgtgcggagcgtgacacagaagcatatccaggagtggggccctttcgacctggtgatcggcggcagcccttgcaatgacctgagcatcgtgaacccagcccggaagggcctgtacgagggaaccggcagactgttcttcgagttttacagactgctgcacgacgcccggcctaaggaaggcgacgaccggcccttcttttggctgttcgagaatgtggtggccatgggagtcagcgacaagcgggatattagccggttcctggagagcaaccccgtgatgatcgatgccaaggaagtgagcgccgcccaccgggccagatacttctggggcaatctgcctggcatgaacagacccctggccagcaccgtgaacgacaagctggagctgcaggagtgcctggagcacggccggatcgccaagttcagcaaggtgagaaccatcaccacccgaagcaacagcatcaaacaaggcaaggaccagcactttcctgtgttcatgaacgagaaggaggacatcctgtggtgtaccgagatggagagagtgttcgggttcccagtccactacacagatgtcagcaacatgtctagactggccagacagagactgctgggaagaagctggtccgtccctgtgatcagacacctgttcgcccctctgaaggagtacttcgcctgcgtgagcagcggcaacagcaacgccaacagccggggccccagcttctctagcggcctggtgccactgtccctgagagggagccacatgggccccatggagatctacaaaaccgtgagcgcctggaagcggcagcctgtgcgcgtgctgagcctgtttcggaatatcgataaagtcctgaaaagcctgggattcctggagagcggctctggctccggcggtggcaccctgaagtacgtggaggatgtgacaaacgtggtcagacgggatgtggagaagtggggccccttcgatctggtgtacggcagcacccaacccctgggcagctcttgtgaccggtgccctggctggtacatgtttcagttccaccggatcctgcagtacgccctgccgagacaggagtcccagcggccattcttttggattttcatggacaacttgctgctgaccgaggatgaccaggaaactaccactcggttcctgcagaccgaagccgtgaccctgcaggacgtgagaggccgggactaccagaacgccatgcgggtgtggtccaacatccctggactgaaaagcaagcacgcacctctgacccctaaagaagaggagtacctgcaggcccaggtgcggagcagaagcaagctggacgcccctaaggtggatctgctggtgaagaattgcctcctgcccctgagagagtacttcaagtatttcagccagaatagtctgcccctgggaggcagcggcggcggcgcccaggaccccgtgaccttcgacgacatcagcgtgtacttcagcagggacgagtgggccctgctggacgccggccagaagcagctgtacagggaggtgatggccgagaactacagggccctggtgagcgtgggctacgtgatggaggagcccggcctggtgagccacatcgagcacgagcagcagggcagccccatcaggagcaggagcagcctgcacgccggcaggcactgcggcttcatcggcggcccaagcagcggcgcccctcctcccagcggcggcaggcggcccaagcagcggcgcccctcctcccagcggcggcagcccagccggctccccaacctctaccgaggagggcacctctgagtccgccacccccgagagcggccctggcacctccaccgagcccagcgagggcagcgcacccggcagccctgccggcagccccacctccacagaggagggaaccagcaccgagcccagcgaaggcagcgccccaggcaccagcaccgagcctagtgagcaggagattaaacggatcaacaagatcagaagaagacttgtgaaagacagcaacaccaagaaggccggcaagacaggccccatgaaaaccctgctggttagagtgatgacacccgatctgagagagcggctggaaaacctgagaaagaagcctgaaaatatcccccagcccatcagcaatacatctagagccaacctgaataagctgctgaccgattacaccgaaatgaagaaggcgatcctgcatgtgtactgggaagagttccagaaggaccctgtgggcctgatgagccgggtggcccagcctgccagcaagaagatcgatcagaacaagctgaaacctgagatggacgagaagggcaacctgaccaccgccggctttgcctgctctcagtgtggccagcccctgttcgtgtacaagctggagcaggtgtctgagaagggcaaggcttacaccaactacttcggacggtgcaatgtggccgagcacgaaaagctgatcctgctggcccagctgaagcccgagaaggatagcgacgaagccgtgacatatagcctgggaaagtttgggcagagggccctggatttctacagcattcatgtgaccaaggagtccacccaccccgtgaagcccctggcccagatcgccggaaacagatacgcctccggacctgtgggaaaggccctgagcgacgcatgtatgggcacaatcgcctccttcctgtctaagtaccaggacatcatcatcgaacaccagaaggtggtgaagggcaaccagaagagactggagagcctgcgggagctggccggcaaggaaaacctggaataccctagcgtgaccctgccacctcagcctcacaccaaggagggcgttgatgcctacaacgaagtgatcgcccgggtgcgaatgtgggtgaacctgaacctgtggcagaagctgaagctaagcagagatgatgccaagcctctgctgagactgaagggattcccttcctttcctctggtcgagagacaggccaacgaagtggactggtgggacatggtgtgtaacgtgaagaagctgatcaacgagaaaaaggaggatggcaaggtgttttggcagaatctggctggctacaagagacaggaagccctgagaccatacctgagcagcgaggaagatcggaagaagggaaagaaattcgctcggtaccagctgggcgacctgctgctgcacctggaaaagaagcacggcgaggactggggaaaggtgtacgacgaggcctgggagcggattgacaagaaagtggaaggcctgagcaagcacatcaagctggaagaggaacggagaagcgaggacgcccagagcaaggccgccctgaccgactggctgcgggctaaggccagcttcgtgatcgagggcctgaaggaggccgacaaggacgagttctgcagatgcgagctgaagctgcagaagtggtacggggacctgcggggaaagcccttcgccatcgaagccgagaacagcatcctggacatcagcggcttcagcaagcagtacaactgtgccttcatctggcagaaggacggcgtgaagaagctgaacctgtacctgatcatcaactacttcaagggcggcaagctgcggttcaagaagatcaaacctgaagccttcgaagccaacagattctacaccgtgatcaacaaaaagagcggcgagatcgtgcccatggaggtgaacttcaacttcgacgaccccaacctgatcatcctgcctctggcctttggcaagagacagggcagagaattcatctggaacgacctgctgtccctggaaaccggcagcctgaagctggccaacggaagagtgatcgagaagacactgtacaacagaagaacccggcaggatgagcctgccctgttcgtggccctgaccttcgagcggcgggaggtcctggactcctccaatatcaaaccaatgaacctgatcggcgtggcaagaggcgaaaacatccccgccgtgatcgccctgaccgaccccgagggctgcccactgagccggtttaaggatagcctgggaaacccaacccacatcctgagaatcggcgagagctataaggagaagcagcggaccatccaggccaagaaggaggtggagcagcggagagccggcggctacagccggaagtacgccagcaaagccaagaatctggcagacgatatggtgagaaacaccgctagagatctgctgtactacgccgtgacccaggatgccatgctgatcttcgccaacctgagccggggcttcggccggcagggcaagcggaccttcatggccgagagacagtacacacggatggaggactggctgaccgccaagctggcctacgagggcctgagcaagacctacctgtccaagacactggcccagtacacctccaagacatgcagcaactgtgggtttaccatcaccagcgccgactacgacagggtgctggagaagctgaagaagacagcaacaggctggatgaccacaattaacggcaaggagctgaaggtggagggccagattacctactacaacagatacaagagacagaacgtagtcaaggacctgtccgtcgagctggatagactgagcgaagaatctgtgaacaacgacatctcctcctggacaaagggcagaagcggagaagctctgagcctcctgaagaaaagattctcccatagacccgtgcaggagaagttcgtgtgcctgaactgcggcttcgagacacacgcagccgagcaagccgccctgaacatcgccagatcctggctgttcctgcggagccaggagtacaagaaataccagacaaacaagacaaccggcaacaccgataagagagccttcgtcgagacctggcagtccttttaccggaagaagcttaaggaggtgtggaaacctgccgtgcggtctggcggatctggcggaggctccaccagccccaagaaaaagagaaaagtctaagctgccttctgcggggcttgccttctggccatgcccttcttctctcccttgcacctgtacctcttggtctttgaataaagcctgagtaggaaggctagcaaaaaaaaaaaaaaaaaaaaaaaaaaaaaaaaaaaaaaaaaaaaaaaaaaaaaaaaaaaaaaaaaaaaaaaaaaaaaaaagcccagccggctccccaacctctaccgaggagggcacctctgagtccgccacccccgagagcggccctggcacctccaccgagcccagcgagggcagcgcacccggcagccctgccggcagccccacctccacagaggagggaaccagcaccgagcccagcgaaggcagcgccccaggcaccagcaccgagcctagtgagcaggagattaaacggatcaacaagatcagaagaagacttgtgaaagacagcaacaccaagaaggccggcaagacaggccccatgaaaaccctgctggttagagtgatgacacccgatctgagagagcggctggaaaacctgagaaagaagcctgaaaatatcccccagcccatcagcaatacatctagagccaacctgaataagctgctgaccgattacaccgaaatgaagaaggcgatcctgcatgtgtactgggaagagttccagaaggaccctgtgggcctgatgagccgggtggcccagcctgccagcaagaagatcgatcagaacaagctgaaacctgagatggacgagaagggcaacctgaccaccgccggctttgcctgctctcagtgtggccagcccctgttcgtgtacaagctggagcaggtgtctgagaagggcaaggcttacaccaactacttcggacggtgcaatgtggccgagcacgaaaagctgatcctgctggcccagctgaagcccgagaaggatagcgacgaagccgtgacatatagcctgggaaagtttgggcagagggccctggatttctacagcattcatgtgaccaaggagtccacccaccccgtgaagcccctggcccagatcgccggaaacagatacgcctccggacctgtgggaaaggccctgagcgacgcatgtatgggcacaatcgcctccttcctgtctaagtaccaggacatcatcatcgaacaccagaaggtggtgaagggcaaccagaagagactggagagcctgcgggagctggccggcaaggaaaacctggaataccctagcgtgaccctgccacctcagcctcacaccaaggagggcgttgatgcctacaacgaagtgatcgcccgggtgcgaatgtgggtgaacctgaacctgtggcagaagctgaagctaagcagagatgatgccaagcctctgctgagactgaagggattcccttcctttcctctggtcgagagacaggccaacgaagtggactggtgggacatggtgtgtaacgtgaagaagctgatcaacgagaaaaaggaggatggcaaggtgttttggcagaatctggctggctacaagagacaggaagccctgagaccatacctgagcagcgaggaagatcggaagaagggaaagaaattcgctcggtaccagctgggcgacctgctgctgcacctggaaaagaagcacggcgaggactggggaaaggtgtacgacgaggcctgggagcggattgacaagaaagtggaaggcctgagcaagcacatcaagctggaagaggaacggagaagcgaggacgcccagagcaaggccgccctgaccgactggctgcgggctaaggccagcttcgtgatcgagggcctgaaggaggccgacaaggacgagttctgcagatgcgagctgaagctgcagaagtggtacggggacctgcggggaaagcccttcgccatcgaagccgagaacagcatcctggacatcagcggcttcagcaagcagtacaactgtgccttcatctggcagaaggacggcgtgaagaagctgaacctgtacctgatcatcaactacttcaagggcggcaagctgcggttcaagaagatcaaacctgaagccttcgaagccaacagattctacaccgtgatcaacaaaaagagcggcgagatcgtgcccatggaggtgaacttcaacttcgacgaccccaacctgatcatcctgcctctggcctttggcaagagacagggcagagaattcatctggaacgacctgctgtccctggaaaccggcagcctgaagctggccaacggaagagtgatcgagaagacactgtacaacagaagaacccggcaggatgagcctgccctgttcgtggccctgaccttcgagcggcgggaggtcctggactcctccaatatcaaaccaatgaacctgatcggcgtggcaagaggcgaaaacatccccgccgtgatcgccctgaccgaccccgagggctgcccactgagccggtttaaggatagcctgggaaacccaacccacatcctgagaatcggcgagagctataaggagaagcagcggaccatccaggccaagaaggaggtggagcagcggagagccggcggctacagccggaagtacgccagcaaagccaagaatctggcagacgatatggtgagaaacaccgctagagatctgctgtactacgccgtgacccaggatgccatgctgatcttcgccaacctgagccggggcttcggccggcagggcaagcggaccttcatggccgagagacagtacacacggatggaggactggctgaccgccaagctggcctacgagggcctgagcaagacctacctgtccaagacactggcccagtacacctccaagacatgcagcaactgtgggtttaccatcaccagcgccgactacgacagggtgctggagaagctgaagaagacagcaacaggctggatgaccacaattaacggcaaggagctgaaggtggagggccagattacctactacaacagatacaagagacagaacgtagtcaaggacctgtccgtcgagctggatagactgagcgaagaatctgtgaacaacgacatctcctcctggacaaagggcagaagcggagaagctctgagcctcctgaagaaaagattctcccatagacccgtgcaggagaagttcgtgtgcctgaactgcggcttcgagacacacgcagccgagcaagccgccctgaacatcgccagatcctggctgttcctgcggagccaggagtacaagaaataccagacaaacaagacaaccggcaacaccgataagagagccttcgtcgagacctggcagtccttttaccggaagaagcttaaggaggtgtggaaacctgccgtgcggtctggcggatctggcggaggctccaccagccccaagaaaaagagaaaagtctaagctgccttctgcggggcttgccttctggccatgcccttcttctctcccttgcacctgtacctcttggtctttgaataaagcctgagtaggaaggctagcaaaaaaaaaaaaaaaaaaaaaaaaaaaaaaaaaaaaaaaaaaaaaaaaaaaaaaaaaaaaaaaaaaaaaaaaaaaaaaaa

SEQ ID NO: 9035 - RNA, 8787 nt, synthetic construct
  source 1..8787: mol_type = other RNA
aggaaataagagagaaaagaagagtaagaagaaatataagagccaccatggcccctaagaagaagcgtaaagtgagccggatgaaccacgaccaggagttcgacccccctaaggtgtaccctcccgtccccgccgagaagagaaagcccatccgggtcctgagcctgttcgatggcatcgccaccggtctgctggtgctgaaggacctgggcatccaggtggataggtacattgcctccgaggtgtgcgaggactccatcaccgtgggaatggtgcgtcatcagggcaagatcatgtacgtgggcgacgtgcggagcgtgacacagaagcatatccaggagtggggccctttcgacctggtgatcggcggcagcccttgcaatgacctgagcatcgtgaacccagcccggaagggcctgtacgagggaaccggcagactgttcttcgagttttacagactgctgcacgacgcccggcctaaggaaggcgacgaccggcccttcttttggctgttcgagaatgtggtggccatgggagtcagcgacaagcgggatattagccggttcctggagagcaaccccgtgatgatcgatgccaaggaagtgagcgccgcccaccgggccagatacttctggggcaatctgcctggcatgaacagacccctggccagcaccgtgaacgacaagctggagctgcaggagtgcctggagcacggccggatcgccaagttcagcaaggtgagaaccatcaccacccgaagcaacagcatcaaacaaggcaaggaccagcactttcctgtgttcatgaacgagaaggaggacatcctgtggtgtaccgagatggagagagtgttcgggttcccagtccactacacagatgtcagcaacatgtctagactggccagacagagactgctgggaagaagctggtccgtccctgtgatcagacacctgttcgcccctctgaaggagtacttcgcctgcgtgagcagcggcaacagcaacgccaacagccggggccccagcttctctagcggcctggtgccactgtccctgagagggagccacatgggccccatggagatctacaaaaccgtgagcgcctggaagcggcagcctgtgcgcgtgctgagcctgtttcggaatatcgataaagtcctgaaaagcctgggattcctggagagcggctctggctccggcggtggcaccctgaagtacgtggaggatgtgacaaacgtggtcagacgggatgtggagaagtggggccccttcgatctggtgtacggcagcacccaacccctgggcagctcttgtgaccggtgccctggctggtacatgtttcagttccaccggatcctgcagtacgccctgccgagacaggagtcccagcggccattcttttggattttcatggacaacttgctgctgaccgaggatgaccaggaaactaccactcggttcctgcagaccgaagccgtgaccctgcaggacgtgagaggccgggactaccagaacgccatgcgggtgtggtccaacatccctggactgaaaagcaagcacgcacctctgacccctaaagaagaggagtacctgcaggcccaggtgcggagcagaagcaagctggacgcccctaaggtggatctgctggtgaagaattgcctcctgcccctgagagagtacttcaagtatttcagccagaatagtctgcccctgggaggcagcggcggcggcatggccttcgaggacgtggccgtgtacttcagccaggaggagtggggcctgctggacaccgcccagagggccctgtacaggcacgtgatgctggagaacttcaccctggtgaccagcctgggcctgagcaccagcaggccccacgtggtgatccagctggagaggggcgaggagccctgggtgcccagcggcaaggacatgaccctggccaggaacacctacaggaggctgaacgccggcgagggcggcccaagcagcggcgcccctcctcccagcggcggcaggcggcccaagcagcggcgcccctcctcccagcggcggcagcccagccggctccccaacctctaccgaggagggcacctctgagtccgccacccccgagagcggccctggcacctccaccgagcccagcgagggcagcgcacccggcagccctgccggcagccccacctccacagaggagggaaccagcaccgagcccagcgaaggcagcgccccaggcaccagcaccgagcctagtgagcaggagattaaacggatcaacaagatcagaagaagacttgtgaaagacagcaacaccaagaaggccggcaagacaggccccatgaaaaccctgctggttagagtgatgacacccgatctgagagagcggctggaaaacctgagaaagaagcctgaaaatatcccccagcccatcagcaatacatctagagccaacctgaataagctgctgaccgattacaccgaaatgaagaaggcgatcctgcatgtgtactgggaagagttccagaaggaccctgtgggcctgatgagccgggtggcccagcctgccagcaagaagatcgatcagaacaagctgaaacctgagatggacgagaagggcaacctgaccaccgccggctttgcctgctctcagtgtggccagcccctgttcgtgtacaagctggagcaggtgtctgagaagggcaaggcttacaccaactacttcggacggtgcaatgtggccgagcacgaaaagctgatcctgctggcccagctgaagcccgagaaggatagcgacgaagccgtgacatatagcctgggaaagtttgggcagagggccctggatttctacagcattcatgtgaccaaggagtccacccaccccgtgaagcccctggcccagatcgccggaaacagatacgcctccggacctgtgggaaaggccctgagcgacgcatgtatgggcacaatcgcctccttcctgtctaagtaccaggacatcatcatcgaacaccagaaggtggtgaagggcaaccagaagagactggagagcctgcgggagctggccggcaaggaaaacctggaataccctagcgtgaccctgccacctcagcctcacaccaaggagggcgttgatgcctacaacgaagtgatcgcccgggtgcgaatgtgggtgaacctgaacctgtggcagaagctgaagctaagcagagatgatgccaagcctctgctgagactgaagggattcccttcctttcctctggtcgagagacaggccaacgaagtggactggtgggacatggtgtgtaacgtgaagaagctgatcaacgagaaaaaggaggatggcaaggtgttttggcagaatctggctggctacaagagacaggaagccctgagaccatacctgagcagcgaggaagatcggaagaagggaaagaaattcgctcggtaccagctgggcgacctgctgctgcacctggaaaagaagcacggcgaggactggggaaaggtgtacgacgaggcctgggagcggattgacaagaaagtggaaggcctgagcaagcacatcaagctggaagaggaacggagaagcgaggacgcccagagcaaggccgccctgaccgactggctgcgggctaaggccagcttcgtgatcgagggcctgaaggaggccgacaaggacgagttctgcagatgcgagctgaagctgcagaagtggtacggggacctgcggggaaagcccttcgccatcgaagccgagaacagcatcctggacatcagcggcttcagcaagcagtacaactgtgccttcatctggcagaaggacggcgtgaagaagctgaacctgtacctgatcatcaactacttcaagggcggcaagctgcggttcaagaagatcaaacctgaagccttcgaagccaacagattctacaccgtgatcaacaaaaagagcggcgagatcgtgcccatggaggtgaacttcaacttcgacgaccccaacctgatcatcctgcctctggcctttggcaagagacagggcagagaattcatctggaacgacctgctgtccctggaaaccggcagcctgaagctggccaacggaagagtgatcgagaagacactgtacaacagaagaacccggcaggatgagcctgccctgttcgtggccctgaccttcgagcggcgggaggtcctggactcctccaatatcaaaccaatgaacctgatcggcgtggcaagaggcgaaaacatccccgccgtgatcgccctgaccgaccccgagggctgcccactgagccggtttaaggatagcctgggaaacccaacccacatcctgagaatcggcgagagctataaggagaagcagcggaccatccaggccaagaaggaggtggagcagcggagagccggcggctacagccggaagtacgccagcaaagccaagaatctggcagacgatatggtgagaaacaccgctagagatctgctgtactacgccgtgacccaggatgccatgctgatcttcgccaacctgagccggggcttcggccggcagggcaagcggaccttcatggccgagagacagtacacacggatggaggactggctgaccgccaagctggcctacgagggcctgagcaagacctacctgtccaagacactggcccagtacacctccaagacatgcagcaactgtgggtttaccatcaccagcgccgactacgacagggtgctggagaagctgaagaagacagcaacaggctggatgaccacaattaacggcaaggagctgaaggtggagggccagattacctactacaacagatacaagagacagaacgtagtcaaggacctgtccgtcgagctggatagactgagcgaagaatctgtgaacaacgacatctcctcctggacaaagggcagaagcggagaagctctgagcctcctgaagaaaagattctcccatagacccgtgcaggagaagttcgtgtgcctgaactgcggcttcgagacacacgcagccgagcaagccgccctgaacatcgccagatcctggctgttcctgcggagccaggagtacaagaaataccagacaaacaagacaaccggcaacaccgataagagagccttcgtcgagacctggcagtccttttaccggaagaagcttaaggaggtgtggaaacctgccgtgcggtctggcggatctggcggaggctccaccagccccaagaaaaagagaaaagtctaagctgccttctgcggggcttgccttctggccatgcccttcttctctcccttgcacctgtacctcttggtctttgaataaagcctgagtaggaaggctagcaaaaaaaaaaaaaaaaaaaaaaaaaaaaaaaaaaaaaaaaaaaaaaaaaaaaaaaaaaaaaaaaaaaaaaaaaaaaaaaagcccagccggctccccaacctctaccgaggagggcacctctgagtccgccacccccgagagcggccctggcacctccaccgagcccagcgagggcagcgcacccggcagccctgccggcagccccacctccacagaggagggaaccagcaccgagcccagcgaaggcagcgccccaggcaccagcaccgagcctagtgagcaggagattaaacggatcaacaagatcagaagaagacttgtgaaagacagcaacaccaagaaggccggcaagacaggccccatgaaaaccctgctggttagagtgatgacacccgatctgagagagcggctggaaaacctgagaaagaagcctgaaaatatcccccagcccatcagcaatacatctagagccaacctgaataagctgctgaccgattacaccgaaatgaagaaggcgatcctgcatgtgtactgggaagagttccagaaggaccctgtgggcctgatgagccgggtggcccagcctgccagcaagaagatcgatcagaacaagctgaaacctgagatggacgagaagggcaacctgaccaccgccggctttgcctgctctcagtgtggccagcccctgttcgtgtacaagctggagcaggtgtctgagaagggcaaggcttacaccaactacttcggacggtgcaatgtggccgagcacgaaaagctgatcctgctggcccagctgaagcccgagaaggatagcgacgaagccgtgacatatagcctgggaaagtttgggcagagggccctggatttctacagcattcatgtgaccaaggagtccacccaccccgtgaagcccctggcccagatcgccggaaacagatacgcctccggacctgtgggaaaggccctgagcgacgcatgtatgggcacaatcgcctccttcctgtctaagtaccaggacatcatcatcgaacaccagaaggtggtgaagggcaaccagaagagactggagagcctgcgggagctggccggcaaggaaaacctggaataccctagcgtgaccctgccacctcagcctcacaccaaggagggcgttgatgcctacaacgaagtgatcgcccgggtgcgaatgtgggtgaacctgaacctgtggcagaagctgaagctaagcagagatgatgccaagcctctgctgagactgaagggattcccttcctttcctctggtcgagagacaggccaacgaagtggactggtgggacatggtgtgtaacgtgaagaagctgatcaacgagaaaaaggaggatggcaaggtgttttggcagaatctggctggctacaagagacaggaagccctgagaccatacctgagcagcgaggaagatcggaagaagggaaagaaattcgctcggtaccagctgggcgacctgctgctgcacctggaaaagaagcacggcgaggactggggaaaggtgtacgacgaggcctgggagcggattgacaagaaagtggaaggcctgagcaagcacatcaagctggaagaggaacggagaagcgaggacgcccagagcaaggccgccctgaccgactggctgcgggctaaggccagcttcgtgatcgagggcctgaaggaggccgacaaggacgagttctgcagatgcgagctgaagctgcagaagtggtacggggacctgcggggaaagcccttcgccatcgaagccgagaacagcatcctggacatcagcggcttcagcaagcagtacaactgtgccttcatctggcagaaggacggcgtgaagaagctgaacctgtacctgatcatcaactacttcaagggcggcaagctgcggttcaagaagatcaaacctgaagccttcgaagccaacagattctacaccgtgatcaacaaaaagagcggcgagatcgtgcccatggaggtgaacttcaacttcgacgaccccaacctgatcatcctgcctctggcctttggcaagagacagggcagagaattcatctggaacgacctgctgtccctggaaaccggcagcctgaagctggccaacggaagagtgatcgagaagacactgtacaacagaagaacccggcaggatgagcctgccctgttcgtggccctgaccttcgagcggcgggaggtcctggactcctccaatatcaaaccaatgaacctgatcggcgtggcaagaggcgaaaacatccccgccgtgatcgccctgaccgaccccgagggctgcccactgagccggtttaaggatagcctgggaaacccaacccacatcctgagaatcggcgagagctataaggagaagcagcggaccatccaggccaagaaggaggtggagcagcggagagccggcggctacagccggaagtacgccagcaaagccaagaatctggcagacgatatggtgagaaacaccgctagagatctgctgtactacgccgtgacccaggatgccatgctgatcttcgccaacctgagccggggcttcggccggcagggcaagcggaccttcatggccgagagacagtacacacggatggaggactggctgaccgccaagctggcctacgagggcctgagcaagacctacctgtccaagacactggcccagtacacctccaagacatgcagcaactgtgggtttaccatcaccagcgccgactacgacagggtgctggagaagctgaagaagacagcaacaggctggatgaccacaattaacggcaaggagctgaaggtggagggccagattacctactacaacagatacaagagacagaacgtagtcaaggacctgtccgtcgagctggatagactgagcgaagaatctgtgaacaacgacatctcctcctggacaaagggcagaagcggagaagctctgagcctcctgaagaaaagattctcccatagacccgtgcaggagaagttcgtgtgcctgaactgcggcttcgagacacacgcagccgagcaagccgccctgaacatcgccagatcctggctgttcctgcggagccaggagtacaagaaataccagacaaacaagacaaccggcaacaccgataagagagccttcgtcgagacctggcagtccttttaccggaagaagcttaaggaggtgtggaaacctgccgtgcggtctggcggatctggcggaggctccaccagccccaagaaaaagagaaaagtctaagctgccttctgcggggcttgccttctggccatgcccttcttctctcccttgcacctgtacctcttggtctttgaataaagcctgagtaggaaggctagcaaaaaaaaaaaaaaaaaaaaaaaaaaaaaaaaaaaaaaaaaaaaaaaaaaaaaaaaaaaaaaaaaaaaaaaaaaaaaaaa

SEQ ID NO: 9036 - RNA, 8787 nt, synthetic construct
  source 1..8787: mol_type = other RNA
aggaaataagagagaaaagaagagtaagaagaaatataagagccaccatggcccctaagaagaagcgtaaagtgagccggatgaaccacgaccaggagttcgacccccctaaggtgtaccctcccgtccccgccgagaagagaaagcccatccgggtcctgagcctgttcgatggcatcgccaccggtctgctggtgctgaaggacctgggcatccaggtggataggtacattgcctccgaggtgtgcgaggactccatcaccgtgggaatggtgcgtcatcagggcaagatcatgtacgtgggcgacgtgcggagcgtgacacagaagcatatccaggagtggggccctttcgacctggtgatcggcggcagcccttgcaatgacctgagcatcgtgaacccagcccggaagggcctgtacgagggaaccggcagactgttcttcgagttttacagactgctgcacgacgcccggcctaaggaaggcgacgaccggcccttcttttggctgttcgagaatgtggtggccatgggagtcagcgacaagcgggatattagccggttcctggagagcaaccccgtgatgatcgatgccaaggaagtgagcgccgcccaccgggccagatacttctggggcaatctgcctggcatgaacagacccctggccagcaccgtgaacgacaagctggagctgcaggagtgcctggagcacggccggatcgccaagttcagcaaggtgagaaccatcaccacccgaagcaacagcatcaaacaaggcaaggaccagcactttcctgtgttcatgaacgagaaggaggacatcctgtggtgtaccgagatggagagagtgttcgggttcccagtccactacacagatgtcagcaacatgtctagactggccagacagagactgctgggaagaagctggtccgtccctgtgatcagacacctgttcgcccctctgaaggagtacttcgcctgcgtgagcagcggcaacagcaacgccaacagccggggccccagcttctctagcggcctggtgccactgtccctgagagggagccacatgggccccatggagatctacaaaaccgtgagcgcctggaagcggcagcctgtgcgcgtgctgagcctgtttcggaatatcgataaagtcctgaaaagcctgggattcctggagagcggctctggctccggcggtggcaccctgaagtacgtggaggatgtgacaaacgtggtcagacgggatgtggagaagtggggccccttcgatctggtgtacggcagcacccaacccctgggcagctcttgtgaccggtgccctggctggtacatgtttcagttccaccggatcctgcagtacgccctgccgagacaggagtcccagcggccattcttttggattttcatggacaacttgctgctgaccgaggatgaccaggaaactaccactcggttcctgcagaccgaagccgtgaccctgcaggacgtgagaggccgggactaccagaacgccatgcgggtgtggtccaacatccctggactgaaaagcaagcacgcacctctgacccctaaagaagaggagtacctgcaggcccaggtgcggagcagaagcaagctggacgcccctaaggtggatctgctggtgaagaattgcctcctgcccctgagagagtacttcaagtatttcagccagaatagtctgcccctgggaggcagcggcggcggcatggtgaccttcgaggacgtggccgtgcacttcaccaagaccgagtggaccggcctgagccccgcccagagggccctgtacaggagcgtgatgctggagaacttcggcaacctgaccgccctgggctaccccgtgcccaagcccgccctgatcagcctgctggagggcggcgacatggactggggcctggaggcccaggacgacccccccgccgagaggaccaagaacgtgtgcaaggtgatcggcggcccaagcagcggcgcccctcctcccagcggcggcaggcggcccaagcagcggcgcccctcctcccagcggcggcagcccagccggctccccaacctctaccgaggagggcacctctgagtccgccacccccgagagcggccctggcacctccaccgagcccagcgagggcagcgcacccggcagccctgccggcagccccacctccacagaggagggaaccagcaccgagcccagcgaaggcagcgccccaggcaccagcaccgagcctagtgagcaggagattaaacggatcaacaagatcagaagaagacttgtgaaagacagcaacaccaagaaggccggcaagacaggccccatgaaaaccctgctggttagagtgatgacacccgatctgagagagcggctggaaaacctgagaaagaagcctgaaaatatcccccagcccatcagcaatacatctagagccaacctgaataagctgctgaccgattacaccgaaatgaagaaggcgatcctgcatgtgtactgggaagagttccagaaggaccctgtgggcctgatgagccgggtggcccagcctgccagcaagaagatcgatcagaacaagctgaaacctgagatggacgagaagggcaacctgaccaccgccggctttgcctgctctcagtgtggccagcccctgttcgtgtacaagctggagcaggtgtctgagaagggcaaggcttacaccaactacttcggacggtgcaatgtggccgagcacgaaaagctgatcctgctggcccagctgaagcccgagaaggatagcgacgaagccgtgacatatagcctgggaaagtttgggcagagggccctggatttctacagcattcatgtgaccaaggagtccacccaccccgtgaagcccctggcccagatcgccggaaacagatacgcctccggacctgtgggaaaggccctgagcgacgcatgtatgggcacaatcgcctccttcctgtctaagtaccaggacatcatcatcgaacaccagaaggtggtgaagggcaaccagaagagactggagagcctgcgggagctggccggcaaggaaaacctggaataccctagcgtgaccctgccacctcagcctcacaccaaggagggcgttgatgcctacaacgaagtgatcgcccgggtgcgaatgtgggtgaacctgaacctgtggcagaagctgaagctaagcagagatgatgccaagcctctgctgagactgaagggattcccttcctttcctctggtcgagagacaggccaacgaagtggactggtgggacatggtgtgtaacgtgaagaagctgatcaacgagaaaaaggaggatggcaaggtgttttggcagaatctggctggctacaagagacaggaagccctgagaccatacctgagcagcgaggaagatcggaagaagggaaagaaattcgctcggtaccagctgggcgacctgctgctgcacctggaaaagaagcacggcgaggactggggaaaggtgtacgacgaggcctgggagcggattgacaagaaagtggaaggcctgagcaagcacatcaagctggaagaggaacggagaagcgaggacgcccagagcaaggccgccctgaccgactggctgcgggctaaggccagcttcgtgatcgagggcctgaaggaggccgacaaggacgagttctgcagatgcgagctgaagctgcagaagtggtacggggacctgcggggaaagcccttcgccatcgaagccgagaacagcatcctggacatcagcggcttcagcaagcagtacaactgtgccttcatctggcagaaggacggcgtgaagaagctgaacctgtacctgatcatcaactacttcaagggcggcaagctgcggttcaagaagatcaaacctgaagccttcgaagccaacagattctacaccgtgatcaacaaaaagagcggcgagatcgtgcccatggaggtgaacttcaacttcgacgaccccaacctgatcatcctgcctctggcctttggcaagagacagggcagagaattcatctggaacgacctgctgtccctggaaaccggcagcctgaagctggccaacggaagagtgatcgagaagacactgtacaacagaagaacccggcaggatgagcctgccctgttcgtggccctgaccttcgagcggcgggaggtcctggactcctccaatatcaaaccaatgaacctgatcggcgtggcaagaggcgaaaacatccccgccgtgatcgccctgaccgaccccgagggctgcccactgagccggtttaaggatagcctgggaaacccaacccacatcctgagaatcggcgagagctataaggagaagcagcggaccatccaggccaagaaggaggtggagcagcggagagccggcggctacagccggaagtacgccagcaaagccaagaatctggcagacgatatggtgagaaacaccgctagagatctgctgtactacgccgtgacccaggatgccatgctgatcttcgccaacctgagccggggcttcggccggcagggcaagcggaccttcatggccgagagacagtacacacggatggaggactggctgaccgccaagctggcctacgagggcctgagcaagacctacctgtccaagacactggcccagtacacctccaagacatgcagcaactgtgggtttaccatcaccagcgccgactacgacagggtgctggagaagctgaagaagacagcaacaggctggatgaccacaattaacggcaaggagctgaaggtggagggccagattacctactacaacagatacaagagacagaacgtagtcaaggacctgtccgtcgagctggatagactgagcgaagaatctgtgaacaacgacatctcctcctggacaaagggcagaagcggagaagctctgagcctcctgaagaaaagattctcccatagacccgtgcaggagaagttcgtgtgcctgaactgcggcttcgagacacacgcagccgagcaagccgccctgaacatcgccagatcctggctgttcctgcggagccaggagtacaagaaataccagacaaacaagacaaccggcaacaccgataagagagccttcgtcgagacctggcagtccttttaccggaagaagcttaaggaggtgtggaaacctgccgtgcggtctggcggatctggcggaggctccaccagccccaagaaaaagagaaaagtctaagctgccttctgcggggcttgccttctggccatgcccttcttctctcccttgcacctgtacctcttggtctttgaataaagcctgagtaggaaggctagcaaaaaaaaaaaaaaaaaaaaaaaaaaaaaaaaaaaaaaaaaaaaaaaaaaaaaaaaaaaaaaaaaaaaaaaaaaaaaaaagcccagccggctccccaacctctaccgaggagggcacctctgagtccgccacccccgagagcggccctggcacctccaccgagcccagcgagggcagcgcacccggcagccctgccggcagccccacctccacagaggagggaaccagcaccgagcccagcgaaggcagcgccccaggcaccagcaccgagcctagtgagcaggagattaaacggatcaacaagatcagaagaagacttgtgaaagacagcaacaccaagaaggccggcaagacaggccccatgaaaaccctgctggttagagtgatgacacccgatctgagagagcggctggaaaacctgagaaagaagcctgaaaatatcccccagcccatcagcaatacatctagagccaacctgaataagctgctgaccgattacaccgaaatgaagaaggcgatcctgcatgtgtactgggaagagttccagaaggaccctgtgggcctgatgagccgggtggcccagcctgccagcaagaagatcgatcagaacaagctgaaacctgagatggacgagaagggcaacctgaccaccgccggctttgcctgctctcagtgtggccagcccctgttcgtgtacaagctggagcaggtgtctgagaagggcaaggcttacaccaactacttcggacggtgcaatgtggccgagcacgaaaagctgatcctgctggcccagctgaagcccgagaaggatagcgacgaagccgtgacatatagcctgggaaagtttgggcagagggccctggatttctacagcattcatgtgaccaaggagtccacccaccccgtgaagcccctggcccagatcgccggaaacagatacgcctccggacctgtgggaaaggccctgagcgacgcatgtatgggcacaatcgcctccttcctgtctaagtaccaggacatcatcatcgaacaccagaaggtggtgaagggcaaccagaagagactggagagcctgcgggagctggccggcaaggaaaacctggaataccctagcgtgaccctgccacctcagcctcacaccaaggagggcgttgatgcctacaacgaagtgatcgcccgggtgcgaatgtgggtgaacctgaacctgtggcagaagctgaagctaagcagagatgatgccaagcctctgctgagactgaagggattcccttcctttcctctggtcgagagacaggccaacgaagtggactggtgggacatggtgtgtaacgtgaagaagctgatcaacgagaaaaaggaggatggcaaggtgttttggcagaatctggctggctacaagagacaggaagccctgagaccatacctgagcagcgaggaagatcggaagaagggaaagaaattcgctcggtaccagctgggcgacctgctgctgcacctggaaaagaagcacggcgaggactggggaaaggtgtacgacgaggcctgggagcggattgacaagaaagtggaaggcctgagcaagcacatcaagctggaagaggaacggagaagcgaggacgcccagagcaaggccgccctgaccgactggctgcgggctaaggccagcttcgtgatcgagggcctgaaggaggccgacaaggacgagttctgcagatgcgagctgaagctgcagaagtggtacggggacctgcggggaaagcccttcgccatcgaagccgagaacagcatcctggacatcagcggcttcagcaagcagtacaactgtgccttcatctggcagaaggacggcgtgaagaagctgaacctgtacctgatcatcaactacttcaagggcggcaagctgcggttcaagaagatcaaacctgaagccttcgaagccaacagattctacaccgtgatcaacaaaaagagcggcgagatcgtgcccatggaggtgaacttcaacttcgacgaccccaacctgatcatcctgcctctggcctttggcaagagacagggcagagaattcatctggaacgacctgctgtccctggaaaccggcagcctgaagctggccaacggaagagtgatcgagaagacactgtacaacagaagaacccggcaggatgagcctgccctgttcgtggccctgaccttcgagcggcgggaggtcctggactcctccaatatcaaaccaatgaacctgatcggcgtggcaagaggcgaaaacatccccgccgtgatcgccctgaccgaccccgagggctgcccactgagccggtttaaggatagcctgggaaacccaacccacatcctgagaatcggcgagagctataaggagaagcagcggaccatccaggccaagaaggaggtggagcagcggagagccggcggctacagccggaagtacgccagcaaagccaagaatctggcagacgatatggtgagaaacaccgctagagatctgctgtactacgccgtgacccaggatgccatgctgatcttcgccaacctgagccggggcttcggccggcagggcaagcggaccttcatggccgagagacagtacacacggatggaggactggctgaccgccaagctggcctacgagggcctgagcaagacctacctgtccaagacactggcccagtacacctccaagacatgcagcaactgtgggtttaccatcaccagcgccgactacgacagggtgctggagaagctgaagaagacagcaacaggctggatgaccacaattaacggcaaggagctgaaggtggagggccagattacctactacaacagatacaagagacagaacgtagtcaaggacctgtccgtcgagctggatagactgagcgaagaatctgtgaacaacgacatctcctcctggacaaagggcagaagcggagaagctctgagcctcctgaagaaaagattctcccatagacccgtgcaggagaagttcgtgtgcctgaactgcggcttcgagacacacgcagccgagcaagccgccctgaacatcgccagatcctggctgttcctgcggagccaggagtacaagaaataccagacaaacaagacaaccggcaacaccgataagagagccttcgtcgagacctggcagtccttttaccggaagaagcttaaggaggtgtggaaacctgccgtgcggtctggcggatctggcggaggctccaccagccccaagaaaaagagaaaagtctaagctgccttctgcggggcttgccttctggccatgcccttcttctctcccttgcacctgtacctcttggtctttgaataaagcctgagtaggaaggctagcaaaaaaaaaaaaaaaaaaaaaaaaaaaaaaaaaaaaaaaaaaaaaaaaaaaaaaaaaaaaaaaaaaaaaaaaaaaaaaaa

SEQ ID NO: 9037 - RNA, 8787 nt, synthetic construct
  source 1..8787: mol_type = other RNA
aggaaataagagagaaaagaagagtaagaagaaatataagagccaccatggcccctaagaagaagcgtaaagtgagccggatgaaccacgaccaggagttcgacccccctaaggtgtaccctcccgtccccgccgagaagagaaagcccatccgggtcctgagcctgttcgatggcatcgccaccggtctgctggtgctgaaggacctgggcatccaggtggataggtacattgcctccgaggtgtgcgaggactccatcaccgtgggaatggtgcgtcatcagggcaagatcatgtacgtgggcgacgtgcggagcgtgacacagaagcatatccaggagtggggccctttcgacctggtgatcggcggcagcccttgcaatgacctgagcatcgtgaacccagcccggaagggcctgtacgagggaaccggcagactgttcttcgagttttacagactgctgcacgacgcccggcctaaggaaggcgacgaccggcccttcttttggctgttcgagaatgtggtggccatgggagtcagcgacaagcgggatattagccggttcctggagagcaaccccgtgatgatcgatgccaaggaagtgagcgccgcccaccgggccagatacttctggggcaatctgcctggcatgaacagacccctggccagcaccgtgaacgacaagctggagctgcaggagtgcctggagcacggccggatcgccaagttcagcaaggtgagaaccatcaccacccgaagcaacagcatcaaacaaggcaaggaccagcactttcctgtgttcatgaacgagaaggaggacatcctgtggtgtaccgagatggagagagtgttcgggttcccagtccactacacagatgtcagcaacatgtctagactggccagacagagactgctgggaagaagctggtccgtccctgtgatcagacacctgttcgcccctctgaaggagtacttcgcctgcgtgagcagcggcaacagcaacgccaacagccggggccccagcttctctagcggcctggtgccactgtccctgagagggagccacatgggccccatggagatctacaaaaccgtgagcgcctggaagcggcagcctgtgcgcgtgctgagcctgtttcggaatatcgataaagtcctgaaaagcctgggattcctggagagcggctctggctccggcggtggcaccctgaagtacgtggaggatgtgacaaacgtggtcagacgggatgtggagaagtggggccccttcgatctggtgtacggcagcacccaacccctgggcagctcttgtgaccggtgccctggctggtacatgtttcagttccaccggatcctgcagtacgccctgccgagacaggagtcccagcggccattcttttggattttcatggacaacttgctgctgaccgaggatgaccaggaaactaccactcggttcctgcagaccgaagccgtgaccctgcaggacgtgagaggccgggactaccagaacgccatgcgggtgtggtccaacatccctggactgaaaagcaagcacgcacctctgacccctaaagaagaggagtacctgcaggcccaggtgcggagcagaagcaagctggacgcccctaaggtggatctgctggtgaagaattgcctcctgcccctgagagagtacttcaagtatttcagccagaatagtctgcccctgggaggcagcggcggcggcatggccttcgaggacgtggccgtgtacttcagccaggaggagtggggcctgctggacaccgcccagagggccctgtacaggcacgtgatgctggacaacttcaccctggtgaccagcctgggcctgagcaccagcaggccccacgtggtgatccagctggagaggggcgaggagccctgggtgcccagcggcaaggacatgaccctggccaggaacacctacaggaggctgaacgccggcgagggcggcccaagcagcggcgcccctcctcccagcggcggcaggcggcccaagcagcggcgcccctcctcccagcggcggcagcccagccggctccccaacctctaccgaggagggcacctctgagtccgccacccccgagagcggccctggcacctccaccgagcccagcgagggcagcgcacccggcagccctgccggcagccccacctccacagaggagggaaccagcaccgagcccagcgaaggcagcgccccaggcaccagcaccgagcctagtgagcaggagattaaacggatcaacaagatcagaagaagacttgtgaaagacagcaacaccaagaaggccggcaagacaggccccatgaaaaccctgctggttagagtgatgacacccgatctgagagagcggctggaaaacctgagaaagaagcctgaaaatatcccccagcccatcagcaatacatctagagccaacctgaataagctgctgaccgattacaccgaaatgaagaaggcgatcctgcatgtgtactgggaagagttccagaaggaccctgtgggcctgatgagccgggtggcccagcctgccagcaagaagatcgatcagaacaagctgaaacctgagatggacgagaagggcaacctgaccaccgccggctttgcctgctctcagtgtggccagcccctgttcgtgtacaagctggagcaggtgtctgagaagggcaaggcttacaccaactacttcggacggtgcaatgtggccgagcacgaaaagctgatcctgctggcccagctgaagcccgagaaggatagcgacgaagccgtgacatatagcctgggaaagtttgggcagagggccctggatttctacagcattcatgtgaccaaggagtccacccaccccgtgaagcccctggcccagatcgccggaaacagatacgcctccggacctgtgggaaaggccctgagcgacgcatgtatgggcacaatcgcctccttcctgtctaagtaccaggacatcatcatcgaacaccagaaggtggtgaagggcaaccagaagagactggagagcctgcgggagctggccggcaaggaaaacctggaataccctagcgtgaccctgccacctcagcctcacaccaaggagggcgttgatgcctacaacgaagtgatcgcccgggtgcgaatgtgggtgaacctgaacctgtggcagaagctgaagctaagcagagatgatgccaagcctctgctgagactgaagggattcccttcctttcctctggtcgagagacaggccaacgaagtggactggtgggacatggtgtgtaacgtgaagaagctgatcaacgagaaaaaggaggatggcaaggtgttttggcagaatctggctggctacaagagacaggaagccctgagaccatacctgagcagcgaggaagatcggaagaagggaaagaaattcgctcggtaccagctgggcgacctgctgctgcacctggaaaagaagcacggcgaggactggggaaaggtgtacgacgaggcctgggagcggattgacaagaaagtggaaggcctgagcaagcacatcaagctggaagaggaacggagaagcgaggacgcccagagcaaggccgccctgaccgactggctgcgggctaaggccagcttcgtgatcgagggcctgaaggaggccgacaaggacgagttctgcagatgcgagctgaagctgcagaagtggtacggggacctgcggggaaagcccttcgccatcgaagccgagaacagcatcctggacatcagcggcttcagcaagcagtacaactgtgccttcatctggcagaaggacggcgtgaagaagctgaacctgtacctgatcatcaactacttcaagggcggcaagctgcggttcaagaagatcaaacctgaagccttcgaagccaacagattctacaccgtgatcaacaaaaagagcggcgagatcgtgcccatggaggtgaacttcaacttcgacgaccccaacctgatcatcctgcctctggcctttggcaagagacagggcagagaattcatctggaacgacctgctgtccctggaaaccggcagcctgaagctggccaacggaagagtgatcgagaagacactgtacaacagaagaacccggcaggatgagcctgccctgttcgtggccctgaccttcgagcggcgggaggtcctggactcctccaatatcaaaccaatgaacctgatcggcgtggcaagaggcgaaaacatccccgccgtgatcgccctgaccgaccccgagggctgcccactgagccggtttaaggatagcctgggaaacccaacccacatcctgagaatcggcgagagctataaggagaagcagcggaccatccaggccaagaaggaggtggagcagcggagagccggcggctacagccggaagtacgccagcaaagccaagaatctggcagacgatatggtgagaaacaccgctagagatctgctgtactacgccgtgacccaggatgccatgctgatcttcgccaacctgagccggggcttcggccggcagggcaagcggaccttcatggccgagagacagtacacacggatggaggactggctgaccgccaagctggcctacgagggcctgagcaagacctacctgtccaagacactggcccagtacacctccaagacatgcagcaactgtgggtttaccatcaccagcgccgactacgacagggtgctggagaagctgaagaagacagcaacaggctggatgaccacaattaacggcaaggagctgaaggtggagggccagattacctactacaacagatacaagagacagaacgtagtcaaggacctgtccgtcgagctggatagactgagcgaagaatctgtgaacaacgacatctcctcctggacaaagggcagaagcggagaagctctgagcctcctgaagaaaagattctcccatagacccgtgcaggagaagttcgtgtgcctgaactgcggcttcgagacacacgcagccgagcaagccgccctgaacatcgccagatcctggctgttcctgcggagccaggagtacaagaaataccagacaaacaagacaaccggcaacaccgataagagagccttcgtcgagacctggcagtccttttaccggaagaagcttaaggaggtgtggaaacctgccgtgcggtctggcggatctggcggaggctccaccagccccaagaaaaagagaaaagtctaagctgccttctgcggggcttgccttctggccatgcccttcttctctcccttgcacctgtacctcttggtctttgaataaagcctgagtaggaaggctagcaaaaaaaaaaaaaaaaaaaaaaaaaaaaaaaaaaaaaaaaaaaaaaaaaaaaaaaaaaaaaaaaaaaaaaaaaaaaaaaagcccagccggctccccaacctctaccgaggagggcacctctgagtccgccacccccgagagcggccctggcacctccaccgagcccagcgagggcagcgcacccggcagccctgccggcagccccacctccacagaggagggaaccagcaccgagcccagcgaaggcagcgccccaggcaccagcaccgagcctagtgagcaggagattaaacggatcaacaagatcagaagaagacttgtgaaagacagcaacaccaagaaggccggcaagacaggccccatgaaaaccctgctggttagagtgatgacacccgatctgagagagcggctggaaaacctgagaaagaagcctgaaaatatcccccagcccatcagcaatacatctagagccaacctgaataagctgctgaccgattacaccgaaatgaagaaggcgatcctgcatgtgtactgggaagagttccagaaggaccctgtgggcctgatgagccgggtggcccagcctgccagcaagaagatcgatcagaacaagctgaaacctgagatggacgagaagggcaacctgaccaccgccggctttgcctgctctcagtgtggccagcccctgttcgtgtacaagctggagcaggtgtctgagaagggcaaggcttacaccaactacttcggacggtgcaatgtggccgagcacgaaaagctgatcctgctggcccagctgaagcccgagaaggatagcgacgaagccgtgacatatagcctgggaaagtttgggcagagggccctggatttctacagcattcatgtgaccaaggagtccacccaccccgtgaagcccctggcccagatcgccggaaacagatacgcctccggacctgtgggaaaggccctgagcgacgcatgtatgggcacaatcgcctccttcctgtctaagtaccaggacatcatcatcgaacaccagaaggtggtgaagggcaaccagaagagactggagagcctgcgggagctggccggcaaggaaaacctggaataccctagcgtgaccctgccacctcagcctcacaccaaggagggcgttgatgcctacaacgaagtgatcgcccgggtgcgaatgtgggtgaacctgaacctgtggcagaagctgaagctaagcagagatgatgccaagcctctgctgagactgaagggattcccttcctttcctctggtcgagagacaggccaacgaagtggactggtgggacatggtgtgtaacgtgaagaagctgatcaacgagaaaaaggaggatggcaaggtgttttggcagaatctggctggctacaagagacaggaagccctgagaccatacctgagcagcgaggaagatcggaagaagggaaagaaattcgctcggtaccagctgggcgacctgctgctgcacctggaaaagaagcacggcgaggactggggaaaggtgtacgacgaggcctgggagcggattgacaagaaagtggaaggcctgagcaagcacatcaagctggaagaggaacggagaagcgaggacgcccagagcaaggccgccctgaccgactggctgcgggctaaggccagcttcgtgatcgagggcctgaaggaggccgacaaggacgagttctgcagatgcgagctgaagctgcagaagtggtacggggacctgcggggaaagcccttcgccatcgaagccgagaacagcatcctggacatcagcggcttcagcaagcagtacaactgtgccttcatctggcagaaggacggcgtgaagaagctgaacctgtacctgatcatcaactacttcaagggcggcaagctgcggttcaagaagatcaaacctgaagccttcgaagccaacagattctacaccgtgatcaacaaaaagagcggcgagatcgtgcccatggaggtgaacttcaacttcgacgaccccaacctgatcatcctgcctctggcctttggcaagagacagggcagagaattcatctggaacgacctgctgtccctggaaaccggcagcctgaagctggccaacggaagagtgatcgagaagacactgtacaacagaagaacccggcaggatgagcctgccctgttcgtggccctgaccttcgagcggcgggaggtcctggactcctccaatatcaaaccaatgaacctgatcggcgtggcaagaggcgaaaacatccccgccgtgatcgccctgaccgaccccgagggctgcccactgagccggtttaaggatagcctgggaaacccaacccacatcctgagaatcggcgagagctataaggagaagcagcggaccatccaggccaagaaggaggtggagcagcggagagccggcggctacagccggaagtacgccagcaaagccaagaatctggcagacgatatggtgagaaacaccgctagagatctgctgtactacgccgtgacccaggatgccatgctgatcttcgccaacctgagccggggcttcggccggcagggcaagcggaccttcatggccgagagacagtacacacggatggaggactggctgaccgccaagctggcctacgagggcctgagcaagacctacctgtccaagacactggcccagtacacctccaagacatgcagcaactgtgggtttaccatcaccagcgccgactacgacagggtgctggagaagctgaagaagacagcaacaggctggatgaccacaattaacggcaaggagctgaaggtggagggccagattacctactacaacagatacaagagacagaacgtagtcaaggacctgtccgtcgagctggatagactgagcgaagaatctgtgaacaacgacatctcctcctggacaaagggcagaagcggagaagctctgagcctcctgaagaaaagattctcccatagacccgtgcaggagaagttcgtgtgcctgaactgcggcttcgagacacacgcagccgagcaagccgccctgaacatcgccagatcctggctgttcctgcggagccaggagtacaagaaataccagacaaacaagacaaccggcaacaccgataagagagccttcgtcgagacctggcagtccttttaccggaagaagcttaaggaggtgtggaaacctgccgtgcggtctggcggatctggcggaggctccaccagccccaagaaaaagagaaaagtctaagctgccttctgcggggcttgccttctggccatgcccttcttctctcccttgcacctgtacctcttggtctttgaataaagcctgagtaggaaggctagcaaaaaaaaaaaaaaaaaaaaaaaaaaaaaaaaaaaaaaaaaaaaaaaaaaaaaaaaaaaaaaaaaaaaaaaaaaaaaaaa

SEQ ID NO: 9038 - RNA, 8787 nt, synthetic construct
  source 1..8787: mol_type = other RNA
aggaaataagagagaaaagaagagtaagaagaaatataagagccaccatggcccctaagaagaagcgtaaagtgagccggatgaaccacgaccaggagttcgacccccctaaggtgtaccctcccgtccccgccgagaagagaaagcccatccgggtcctgagcctgttcgatggcatcgccaccggtctgctggtgctgaaggacctgggcatccaggtggataggtacattgcctccgaggtgtgcgaggactccatcaccgtgggaatggtgcgtcatcagggcaagatcatgtacgtgggcgacgtgcggagcgtgacacagaagcatatccaggagtggggccctttcgacctggtgatcggcggcagcccttgcaatgacctgagcatcgtgaacccagcccggaagggcctgtacgagggaaccggcagactgttcttcgagttttacagactgctgcacgacgcccggcctaaggaaggcgacgaccggcccttcttttggctgttcgagaatgtggtggccatgggagtcagcgacaagcgggatattagccggttcctggagagcaaccccgtgatgatcgatgccaaggaagtgagcgccgcccaccgggccagatacttctggggcaatctgcctggcatgaacagacccctggccagcaccgtgaacgacaagctggagctgcaggagtgcctggagcacggccggatcgccaagttcagcaaggtgagaaccatcaccacccgaagcaacagcatcaaacaaggcaaggaccagcactttcctgtgttcatgaacgagaaggaggacatcctgtggtgtaccgagatggagagagtgttcgggttcccagtccactacacagatgtcagcaacatgtctagactggccagacagagactgctgggaagaagctggtccgtccctgtgatcagacacctgttcgcccctctgaaggagtacttcgcctgcgtgagcagcggcaacagcaacgccaacagccggggccccagcttctctagcggcctggtgccactgtccctgagagggagccacatgggccccatggagatctacaaaaccgtgagcgcctggaagcggcagcctgtgcgcgtgctgagcctgtttcggaatatcgataaagtcctgaaaagcctgggattcctggagagcggctctggctccggcggtggcaccctgaagtacgtggaggatgtgacaaacgtggtcagacgggatgtggagaagtggggccccttcgatctggtgtacggcagcacccaacccctgggcagctcttgtgaccggtgccctggctggtacatgtttcagttccaccggatcctgcagtacgccctgccgagacaggagtcccagcggccattcttttggattttcatggacaacttgctgctgaccgaggatgaccaggaaactaccactcggttcctgcagaccgaagccgtgaccctgcaggacgtgagaggccgggactaccagaacgccatgcgggtgtggtccaacatccctggactgaaaagcaagcacgcacctctgacccctaaagaagaggagtacctgcaggcccaggtgcggagcagaagcaagctggacgcccctaaggtggatctgctggtgaagaattgcctcctgcccctgagagagtacttcaagtatttcagccagaatagtctgcccctgggaggcagcggcggcggcgtgcaggagcccgtgaccttcaaggacgtggccgtggacttcacccaggaggagtggggccagctggacctggtgcagaggaccctgtacagggacgtgatgctggagacctacggccacctgctgagcgtgggcaaccagatcaccaagcccgaggtgatcagcctgctggagcagggcgaggagccctggagcgtggagcaggcctacccccagagcacctgccccgagtggatgaggaacggcggcccaagcagcggcgcccctcctcccagcggcggcaggcggcccaagcagcggcgcccctcctcccagcggcggcagcccagccggctccccaacctctaccgaggagggcacctctgagtccgccacccccgagagcggccctggcacctccaccgagcccagcgagggcagcgcacccggcagccctgccggcagccccacctccacagaggagggaaccagcaccgagcccagcgaaggcagcgccccaggcaccagcaccgagcctagtgagcaggagattaaacggatcaacaagatcagaagaagacttgtgaaagacagcaacaccaagaaggccggcaagacaggccccatgaaaaccctgctggttagagtgatgacacccgatctgagagagcggctggaaaacctgagaaagaagcctgaaaatatcccccagcccatcagcaatacatctagagccaacctgaataagctgctgaccgattacaccgaaatgaagaaggcgatcctgcatgtgtactgggaagagttccagaaggaccctgtgggcctgatgagccgggtggcccagcctgccagcaagaagatcgatcagaacaagctgaaacctgagatggacgagaagggcaacctgaccaccgccggctttgcctgctctcagtgtggccagcccctgttcgtgtacaagctggagcaggtgtctgagaagggcaaggcttacaccaactacttcggacggtgcaatgtggccgagcacgaaaagctgatcctgctggcccagctgaagcccgagaaggatagcgacgaagccgtgacatatagcctgggaaagtttgggcagagggccctggatttctacagcattcatgtgaccaaggagtccacccaccccgtgaagcccctggcccagatcgccggaaacagatacgcctccggacctgtgggaaaggccctgagcgacgcatgtatgggcacaatcgcctccttcctgtctaagtaccaggacatcatcatcgaacaccagaaggtggtgaagggcaaccagaagagactggagagcctgcgggagctggccggcaaggaaaacctggaataccctagcgtgaccctgccacctcagcctcacaccaaggagggcgttgatgcctacaacgaagtgatcgcccgggtgcgaatgtgggtgaacctgaacctgtggcagaagctgaagctaagcagagatgatgccaagcctctgctgagactgaagggattcccttcctttcctctggtcgagagacaggccaacgaagtggactggtgggacatggtgtgtaacgtgaagaagctgatcaacgagaaaaaggaggatggcaaggtgttttggcagaatctggctggctacaagagacaggaagccctgagaccatacctgagcagcgaggaagatcggaagaagggaaagaaattcgctcggtaccagctgggcgacctgctgctgcacctggaaaagaagcacggcgaggactggggaaaggtgtacgacgaggcctgggagcggattgacaagaaagtggaaggcctgagcaagcacatcaagctggaagaggaacggagaagcgaggacgcccagagcaaggccgccctgaccgactggctgcgggctaaggccagcttcgtgatcgagggcctgaaggaggccgacaaggacgagttctgcagatgcgagctgaagctgcagaagtggtacggggacctgcggggaaagcccttcgccatcgaagccgagaacagcatcctggacatcagcggcttcagcaagcagtacaactgtgccttcatctggcagaaggacggcgtgaagaagctgaacctgtacctgatcatcaactacttcaagggcggcaagctgcggttcaagaagatcaaacctgaagccttcgaagccaacagattctacaccgtgatcaacaaaaagagcggcgagatcgtgcccatggaggtgaacttcaacttcgacgaccccaacctgatcatcctgcctctggcctttggcaagagacagggcagagaattcatctggaacgacctgctgtccctggaaaccggcagcctgaagctggccaacggaagagtgatcgagaagacactgtacaacagaagaacccggcaggatgagcctgccctgttcgtggccctgaccttcgagcggcgggaggtcctggactcctccaatatcaaaccaatgaacctgatcggcgtggcaagaggcgaaaacatccccgccgtgatcgccctgaccgaccccgagggctgcccactgagccggtttaaggatagcctgggaaacccaacccacatcctgagaatcggcgagagctataaggagaagcagcggaccatccaggccaagaaggaggtggagcagcggagagccggcggctacagccggaagtacgccagcaaagccaagaatctggcagacgatatggtgagaaacaccgctagagatctgctgtactacgccgtgacccaggatgccatgctgatcttcgccaacctgagccggggcttcggccggcagggcaagcggaccttcatggccgagagacagtacacacggatggaggactggctgaccgccaagctggcctacgagggcctgagcaagacctacctgtccaagacactggcccagtacacctccaagacatgcagcaactgtgggtttaccatcaccagcgccgactacgacagggtgctggagaagctgaagaagacagcaacaggctggatgaccacaattaacggcaaggagctgaaggtggagggccagattacctactacaacagatacaagagacagaacgtagtcaaggacctgtccgtcgagctggatagactgagcgaagaatctgtgaacaacgacatctcctcctggacaaagggcagaagcggagaagctctgagcctcctgaagaaaagattctcccatagacccgtgcaggagaagttcgtgtgcctgaactgcggcttcgagacacacgcagccgagcaagccgccctgaacatcgccagatcctggctgttcctgcggagccaggagtacaagaaataccagacaaacaagacaaccggcaacaccgataagagagccttcgtcgagacctggcagtccttttaccggaagaagcttaaggaggtgtggaaacctgccgtgcggtctggcggatctggcggaggctccaccagccccaagaaaaagagaaaagtctaagctgccttctgcggggcttgccttctggccatgcccttcttctctcccttgcacctgtacctcttggtctttgaataaagcctgagtaggaaggctagcaaaaaaaaaaaaaaaaaaaaaaaaaaaaaaaaaaaaaaaaaaaaaaaaaaaaaaaaaaaaaaaaaaaaaaaaaaaaaaaagcccagccggctccccaacctctaccgaggagggcacctctgagtccgccacccccgagagcggccctggcacctccaccgagcccagcgagggcagcgcacccggcagccctgccggcagccccacctccacagaggagggaaccagcaccgagcccagcgaaggcagcgccccaggcaccagcaccgagcctagtgagcaggagattaaacggatcaacaagatcagaagaagacttgtgaaagacagcaacaccaagaaggccggcaagacaggccccatgaaaaccctgctggttagagtgatgacacccgatctgagagagcggctggaaaacctgagaaagaagcctgaaaatatcccccagcccatcagcaatacatctagagccaacctgaataagctgctgaccgattacaccgaaatgaagaaggcgatcctgcatgtgtactgggaagagttccagaaggaccctgtgggcctgatgagccgggtggcccagcctgccagcaagaagatcgatcagaacaagctgaaacctgagatggacgagaagggcaacctgaccaccgccggctttgcctgctctcagtgtggccagcccctgttcgtgtacaagctggagcaggtgtctgagaagggcaaggcttacaccaactacttcggacggtgcaatgtggccgagcacgaaaagctgatcctgctggcccagctgaagcccgagaaggatagcgacgaagccgtgacatatagcctgggaaagtttgggcagagggccctggatttctacagcattcatgtgaccaaggagtccacccaccccgtgaagcccctggcccagatcgccggaaacagatacgcctccggacctgtgggaaaggccctgagcgacgcatgtatgggcacaatcgcctccttcctgtctaagtaccaggacatcatcatcgaacaccagaaggtggtgaagggcaaccagaagagactggagagcctgcgggagctggccggcaaggaaaacctggaataccctagcgtgaccctgccacctcagcctcacaccaaggagggcgttgatgcctacaacgaagtgatcgcccgggtgcgaatgtgggtgaacctgaacctgtggcagaagctgaagctaagcagagatgatgccaagcctctgctgagactgaagggattcccttcctttcctctggtcgagagacaggccaacgaagtggactggtgggacatggtgtgtaacgtgaagaagctgatcaacgagaaaaaggaggatggcaaggtgttttggcagaatctggctggctacaagagacaggaagccctgagaccatacctgagcagcgaggaagatcggaagaagggaaagaaattcgctcggtaccagctgggcgacctgctgctgcacctggaaaagaagcacggcgaggactggggaaaggtgtacgacgaggcctgggagcggattgacaagaaagtggaaggcctgagcaagcacatcaagctggaagaggaacggagaagcgaggacgcccagagcaaggccgccctgaccgactggctgcgggctaaggccagcttcgtgatcgagggcctgaaggaggccgacaaggacgagttctgcagatgcgagctgaagctgcagaagtggtacggggacctgcggggaaagcccttcgccatcgaagccgagaacagcatcctggacatcagcggcttcagcaagcagtacaactgtgccttcatctggcagaaggacggcgtgaagaagctgaacctgtacctgatcatcaactacttcaagggcggcaagctgcggttcaagaagatcaaacctgaagccttcgaagccaacagattctacaccgtgatcaacaaaaagagcggcgagatcgtgcccatggaggtgaacttcaacttcgacgaccccaacctgatcatcctgcctctggcctttggcaagagacagggcagagaattcatctggaacgacctgctgtccctggaaaccggcagcctgaagctggccaacggaagagtgatcgagaagacactgtacaacagaagaacccggcaggatgagcctgccctgttcgtggccctgaccttcgagcggcgggaggtcctggactcctccaatatcaaaccaatgaacctgatcggcgtggcaagaggcgaaaacatccccgccgtgatcgccctgaccgaccccgagggctgcccactgagccggtttaaggatagcctgggaaacccaacccacatcctgagaatcggcgagagctataaggagaagcagcggaccatccaggccaagaaggaggtggagcagcggagagccggcggctacagccggaagtacgccagcaaagccaagaatctggcagacgatatggtgagaaacaccgctagagatctgctgtactacgccgtgacccaggatgccatgctgatcttcgccaacctgagccggggcttcggccggcagggcaagcggaccttcatggccgagagacagtacacacggatggaggactggctgaccgccaagctggcctacgagggcctgagcaagacctacctgtccaagacactggcccagtacacctccaagacatgcagcaactgtgggtttaccatcaccagcgccgactacgacagggtgctggagaagctgaagaagacagcaacaggctggatgaccacaattaacggcaaggagctgaaggtggagggccagattacctactacaacagatacaagagacagaacgtagtcaaggacctgtccgtcgagctggatagactgagcgaagaatctgtgaacaacgacatctcctcctggacaaagggcagaagcggagaagctctgagcctcctgaagaaaagattctcccatagacccgtgcaggagaagttcgtgtgcctgaactgcggcttcgagacacacgcagccgagcaagccgccctgaacatcgccagatcctggctgttcctgcggagccaggagtacaagaaataccagacaaacaagacaaccggcaacaccgataagagagccttcgtcgagacctggcagtccttttaccggaagaagcttaaggaggtgtggaaacctgccgtgcggtctggcggatctggcggaggctccaccagccccaagaaaaagagaaaagtctaagctgccttctgcggggcttgccttctggccatgcccttcttctctcccttgcacctgtacctcttggtctttgaataaagcctgagtaggaaggctagcaaaaaaaaaaaaaaaaaaaaaaaaaaaaaaaaaaaaaaaaaaaaaaaaaaaaaaaaaaaaaaaaaaaaaaaaaaaaaaaa

SEQ ID NO: 9039 - RNA, 8787 nt, synthetic construct
  source 1..8787: mol_type = other RNA
aggaaataagagagaaaagaagagtaagaagaaatataagagccaccatggcccctaagaagaagcgtaaagtgagccggatgaaccacgaccaggagttcgacccccctaaggtgtaccctcccgtccccgccgagaagagaaagcccatccgggtcctgagcctgttcgatggcatcgccaccggtctgctggtgctgaaggacctgggcatccaggtggataggtacattgcctccgaggtgtgcgaggactccatcaccgtgggaatggtgcgtcatcagggcaagatcatgtacgtgggcgacgtgcggagcgtgacacagaagcatatccaggagtggggccctttcgacctggtgatcggcggcagcccttgcaatgacctgagcatcgtgaacccagcccggaagggcctgtacgagggaaccggcagactgttcttcgagttttacagactgctgcacgacgcccggcctaaggaaggcgacgaccggcccttcttttggctgttcgagaatgtggtggccatgggagtcagcgacaagcgggatattagccggttcctggagagcaaccccgtgatgatcgatgccaaggaagtgagcgccgcccaccgggccagatacttctggggcaatctgcctggcatgaacagacccctggccagcaccgtgaacgacaagctggagctgcaggagtgcctggagcacggccggatcgccaagttcagcaaggtgagaaccatcaccacccgaagcaacagcatcaaacaaggcaaggaccagcactttcctgtgttcatgaacgagaaggaggacatcctgtggtgtaccgagatggagagagtgttcgggttcccagtccactacacagatgtcagcaacatgtctagactggccagacagagactgctgggaagaagctggtccgtccctgtgatcagacacctgttcgcccctctgaaggagtacttcgcctgcgtgagcagcggcaacagcaacgccaacagccggggccccagcttctctagcggcctggtgccactgtccctgagagggagccacatgggccccatggagatctacaaaaccgtgagcgcctggaagcggcagcctgtgcgcgtgctgagcctgtttcggaatatcgataaagtcctgaaaagcctgggattcctggagagcggctctggctccggcggtggcaccctgaagtacgtggaggatgtgacaaacgtggtcagacgggatgtggagaagtggggccccttcgatctggtgtacggcagcacccaacccctgggcagctcttgtgaccggtgccctggctggtacatgtttcagttccaccggatcctgcagtacgccctgccgagacaggagtcccagcggccattcttttggattttcatggacaacttgctgctgaccgaggatgaccaggaaactaccactcggttcctgcagaccgaagccgtgaccctgcaggacgtgagaggccgggactaccagaacgccatgcgggtgtggtccaacatccctggactgaaaagcaagcacgcacctctgacccctaaagaagaggagtacctgcaggcccaggtgcggagcagaagcaagctggacgcccctaaggtggatctgctggtgaagaattgcctcctgcccctgagagagtacttcaagtatttcagccagaatagtctgcccctgggaggcagcggcggcggcagcaaggtgcccgtgaccttcggcgacctggccatctacttcagccaggaggagtgggagtggctgagccccatccagaaggacctgtacgaggacgtgatgctggagaactaccagaacctggtgagcctgggcctgagcttcaggaggcccaacgtgatcaccctgctggagaagggcaaggccccctggatggtggagcccgtgaggaagaggaggggcgtggacagcggcagcaagtgcggcggcccaagcagcggcgcccctcctcccagcggcggcaggcggcccaagcagcggcgcccctcctcccagcggcggcagcccagccggctccccaacctctaccgaggagggcacctctgagtccgccacccccgagagcggccctggcacctccaccgagcccagcgagggcagcgcacccggcagccctgccggcagccccacctccacagaggagggaaccagcaccgagcccagcgaaggcagcgccccaggcaccagcaccgagcctagtgagcaggagattaaacggatcaacaagatcagaagaagacttgtgaaagacagcaacaccaagaaggccggcaagacaggccccatgaaaaccctgctggttagagtgatgacacccgatctgagagagcggctggaaaacctgagaaagaagcctgaaaatatcccccagcccatcagcaatacatctagagccaacctgaataagctgctgaccgattacaccgaaatgaagaaggcgatcctgcatgtgtactgggaagagttccagaaggaccctgtgggcctgatgagccgggtggcccagcctgccagcaagaagatcgatcagaacaagctgaaacctgagatggacgagaagggcaacctgaccaccgccggctttgcctgctctcagtgtggccagcccctgttcgtgtacaagctggagcaggtgtctgagaagggcaaggcttacaccaactacttcggacggtgcaatgtggccgagcacgaaaagctgatcctgctggcccagctgaagcccgagaaggatagcgacgaagccgtgacatatagcctgggaaagtttgggcagagggccctggatttctacagcattcatgtgaccaaggagtccacccaccccgtgaagcccctggcccagatcgccggaaacagatacgcctccggacctgtgggaaaggccctgagcgacgcatgtatgggcacaatcgcctccttcctgtctaagtaccaggacatcatcatcgaacaccagaaggtggtgaagggcaaccagaagagactggagagcctgcgggagctggccggcaaggaaaacctggaataccctagcgtgaccctgccacctcagcctcacaccaaggagggcgttgatgcctacaacgaagtgatcgcccgggtgcgaatgtgggtgaacctgaacctgtggcagaagctgaagctaagcagagatgatgccaagcctctgctgagactgaagggattcccttcctttcctctggtcgagagacaggccaacgaagtggactggtgggacatggtgtgtaacgtgaagaagctgatcaacgagaaaaaggaggatggcaaggtgttttggcagaatctggctggctacaagagacaggaagccctgagaccatacctgagcagcgaggaagatcggaagaagggaaagaaattcgctcggtaccagctgggcgacctgctgctgcacctggaaaagaagcacggcgaggactggggaaaggtgtacgacgaggcctgggagcggattgacaagaaagtggaaggcctgagcaagcacatcaagctggaagaggaacggagaagcgaggacgcccagagcaaggccgccctgaccgactggctgcgggctaaggccagcttcgtgatcgagggcctgaaggaggccgacaaggacgagttctgcagatgcgagctgaagctgcagaagtggtacggggacctgcggggaaagcccttcgccatcgaagccgagaacagcatcctggacatcagcggcttcagcaagcagtacaactgtgccttcatctggcagaaggacggcgtgaagaagctgaacctgtacctgatcatcaactacttcaagggcggcaagctgcggttcaagaagatcaaacctgaagccttcgaagccaacagattctacaccgtgatcaacaaaaagagcggcgagatcgtgcccatggaggtgaacttcaacttcgacgaccccaacctgatcatcctgcctctggcctttggcaagagacagggcagagaattcatctggaacgacctgctgtccctggaaaccggcagcctgaagctggccaacggaagagtgatcgagaagacactgtacaacagaagaacccggcaggatgagcctgccctgttcgtggccctgaccttcgagcggcgggaggtcctggactcctccaatatcaaaccaatgaacctgatcggcgtggcaagaggcgaaaacatccccgccgtgatcgccctgaccgaccccgagggctgcccactgagccggtttaaggatagcctgggaaacccaacccacatcctgagaatcggcgagagctataaggagaagcagcggaccatccaggccaagaaggaggtggagcagcggagagccggcggctacagccggaagtacgccagcaaagccaagaatctggcagacgatatggtgagaaacaccgctagagatctgctgtactacgccgtgacccaggatgccatgctgatcttcgccaacctgagccggggcttcggccggcagggcaagcggaccttcatggccgagagacagtacacacggatggaggactggctgaccgccaagctggcctacgagggcctgagcaagacctacctgtccaagacactggcccagtacacctccaagacatgcagcaactgtgggtttaccatcaccagcgccgactacgacagggtgctggagaagctgaagaagacagcaacaggctggatgaccacaattaacggcaaggagctgaaggtggagggccagattacctactacaacagatacaagagacagaacgtagtcaaggacctgtccgtcgagctggatagactgagcgaagaatctgtgaacaacgacatctcctcctggacaaagggcagaagcggagaagctctgagcctcctgaagaaaagattctcccatagacccgtgcaggagaagttcgtgtgcctgaactgcggcttcgagacacacgcagccgagcaagccgccctgaacatcgccagatcctggctgttcctgcggagccaggagtacaagaaataccagacaaacaagacaaccggcaacaccgataagagagccttcgtcgagacctggcagtccttttaccggaagaagcttaaggaggtgtggaaacctgccgtgcggtctggcggatctggcggaggctccaccagccccaagaaaaagagaaaagtctaagctgccttctgcggggcttgccttctggccatgcccttcttctctcccttgcacctgtacctcttggtctttgaataaagcctgagtaggaaggctagcaaaaaaaaaaaaaaaaaaaaaaaaaaaaaaaaaaaaaaaaaaaaaaaaaaaaaaaaaaaaaaaaaaaaaaaaaaaaaaaagcccagccggctccccaacctctaccgaggagggcacctctgagtccgccacccccgagagcggccctggcacctccaccgagcccagcgagggcagcgcacccggcagccctgccggcagccccacctccacagaggagggaaccagcaccgagcccagcgaaggcagcgccccaggcaccagcaccgagcctagtgagcaggagattaaacggatcaacaagatcagaagaagacttgtgaaagacagcaacaccaagaaggccggcaagacaggccccatgaaaaccctgctggttagagtgatgacacccgatctgagagagcggctggaaaacctgagaaagaagcctgaaaatatcccccagcccatcagcaatacatctagagccaacctgaataagctgctgaccgattacaccgaaatgaagaaggcgatcctgcatgtgtactgggaagagttccagaaggaccctgtgggcctgatgagccgggtggcccagcctgccagcaagaagatcgatcagaacaagctgaaacctgagatggacgagaagggcaacctgaccaccgccggctttgcctgctctcagtgtggccagcccctgttcgtgtacaagctggagcaggtgtctgagaagggcaaggcttacaccaactacttcggacggtgcaatgtggccgagcacgaaaagctgatcctgctggcccagctgaagcccgagaaggatagcgacgaagccgtgacatatagcctgggaaagtttgggcagagggccctggatttctacagcattcatgtgaccaaggagtccacccaccccgtgaagcccctggcccagatcgccggaaacagatacgcctccggacctgtgggaaaggccctgagcgacgcatgtatgggcacaatcgcctccttcctgtctaagtaccaggacatcatcatcgaacaccagaaggtggtgaagggcaaccagaagagactggagagcctgcgggagctggccggcaaggaaaacctggaataccctagcgtgaccctgccacctcagcctcacaccaaggagggcgttgatgcctacaacgaagtgatcgcccgggtgcgaatgtgggtgaacctgaacctgtggcagaagctgaagctaagcagagatgatgccaagcctctgctgagactgaagggattcccttcctttcctctggtcgagagacaggccaacgaagtggactggtgggacatggtgtgtaacgtgaagaagctgatcaacgagaaaaaggaggatggcaaggtgttttggcagaatctggctggctacaagagacaggaagccctgagaccatacctgagcagcgaggaagatcggaagaagggaaagaaattcgctcggtaccagctgggcgacctgctgctgcacctggaaaagaagcacggcgaggactggggaaaggtgtacgacgaggcctgggagcggattgacaagaaagtggaaggcctgagcaagcacatcaagctggaagaggaacggagaagcgaggacgcccagagcaaggccgccctgaccgactggctgcgggctaaggccagcttcgtgatcgagggcctgaaggaggccgacaaggacgagttctgcagatgcgagctgaagctgcagaagtggtacggggacctgcggggaaagcccttcgccatcgaagccgagaacagcatcctggacatcagcggcttcagcaagcagtacaactgtgccttcatctggcagaaggacggcgtgaagaagctgaacctgtacctgatcatcaactacttcaagggcggcaagctgcggttcaagaagatcaaacctgaagccttcgaagccaacagattctacaccgtgatcaacaaaaagagcggcgagatcgtgcccatggaggtgaacttcaacttcgacgaccccaacctgatcatcctgcctctggcctttggcaagagacagggcagagaattcatctggaacgacctgctgtccctggaaaccggcagcctgaagctggccaacggaagagtgatcgagaagacactgtacaacagaagaacccggcaggatgagcctgccctgttcgtggccctgaccttcgagcggcgggaggtcctggactcctccaatatcaaaccaatgaacctgatcggcgtggcaagaggcgaaaacatccccgccgtgatcgccctgaccgaccccgagggctgcccactgagccggtttaaggatagcctgggaaacccaacccacatcctgagaatcggcgagagctataaggagaagcagcggaccatccaggccaagaaggaggtggagcagcggagagccggcggctacagccggaagtacgccagcaaagccaagaatctggcagacgatatggtgagaaacaccgctagagatctgctgtactacgccgtgacccaggatgccatgctgatcttcgccaacctgagccggggcttcggccggcagggcaagcggaccttcatggccgagagacagtacacacggatggaggactggctgaccgccaagctggcctacgagggcctgagcaagacctacctgtccaagacactggcccagtacacctccaagacatgcagcaactgtgggtttaccatcaccagcgccgactacgacagggtgctggagaagctgaagaagacagcaacaggctggatgaccacaattaacggcaaggagctgaaggtggagggccagattacctactacaacagatacaagagacagaacgtagtcaaggacctgtccgtcgagctggatagactgagcgaagaatctgtgaacaacgacatctcctcctggacaaagggcagaagcggagaagctctgagcctcctgaagaaaagattctcccatagacccgtgcaggagaagttcgtgtgcctgaactgcggcttcgagacacacgcagccgagcaagccgccctgaacatcgccagatcctggctgttcctgcggagccaggagtacaagaaataccagacaaacaagacaaccggcaacaccgataagagagccttcgtcgagacctggcagtccttttaccggaagaagcttaaggaggtgtggaaacctgccgtgcggtctggcggatctggcggaggctccaccagccccaagaaaaagagaaaagtctaagctgccttctgcggggcttgccttctggccatgcccttcttctctcccttgcacctgtacctcttggtctttgaataaagcctgagtaggaaggctagcaaaaaaaaaaaaaaaaaaaaaaaaaaaaaaaaaaaaaaaaaaaaaaaaaaaaaaaaaaaaaaaaaaaaaaaaaaaaaaaa

SEQ ID NO: 9040 - RNA, 8787 nt, synthetic construct
  source 1..8787: mol_type = other RNA
aggaaataagagagaaaagaagagtaagaagaaatataagagccaccatggcccctaagaagaagcgtaaagtgagccggatgaaccacgaccaggagttcgacccccctaaggtgtaccctcccgtccccgccgagaagagaaagcccatccgggtcctgagcctgttcgatggcatcgccaccggtctgctggtgctgaaggacctgggcatccaggtggataggtacattgcctccgaggtgtgcgaggactccatcaccgtgggaatggtgcgtcatcagggcaagatcatgtacgtgggcgacgtgcggagcgtgacacagaagcatatccaggagtggggccctttcgacctggtgatcggcggcagcccttgcaatgacctgagcatcgtgaacccagcccggaagggcctgtacgagggaaccggcagactgttcttcgagttttacagactgctgcacgacgcccggcctaaggaaggcgacgaccggcccttcttttggctgttcgagaatgtggtggccatgggagtcagcgacaagcgggatattagccggttcctggagagcaaccccgtgatgatcgatgccaaggaagtgagcgccgcccaccgggccagatacttctggggcaatctgcctggcatgaacagacccctggccagcaccgtgaacgacaagctggagctgcaggagtgcctggagcacggccggatcgccaagttcagcaaggtgagaaccatcaccacccgaagcaacagcatcaaacaaggcaaggaccagcactttcctgtgttcatgaacgagaaggaggacatcctgtggtgtaccgagatggagagagtgttcgggttcccagtccactacacagatgtcagcaacatgtctagactggccagacagagactgctgggaagaagctggtccgtccctgtgatcagacacctgttcgcccctctgaaggagtacttcgcctgcgtgagcagcggcaacagcaacgccaacagccggggccccagcttctctagcggcctggtgccactgtccctgagagggagccacatgggccccatggagatctacaaaaccgtgagcgcctggaagcggcagcctgtgcgcgtgctgagcctgtttcggaatatcgataaagtcctgaaaagcctgggattcctggagagcggctctggctccggcggtggcaccctgaagtacgtggaggatgtgacaaacgtggtcagacgggatgtggagaagtggggccccttcgatctggtgtacggcagcacccaacccctgggcagctcttgtgaccggtgccctggctggtacatgtttcagttccaccggatcctgcagtacgccctgccgagacaggagtcccagcggccattcttttggattttcatggacaacttgctgctgaccgaggatgaccaggaaactaccactcggttcctgcagaccgaagccgtgaccctgcaggacgtgagaggccgggactaccagaacgccatgcgggtgtggtccaacatccctggactgaaaagcaagcacgcacctctgacccctaaagaagaggagtacctgcaggcccaggtgcggagcagaagcaagctggacgcccctaaggtggatctgctggtgaagaattgcctcctgcccctgagagagtacttcaagtatttcagccagaatagtctgcccctgggaggcagcggcggcggcatggccgccatgcccctgaaggccaggtaccaggagatggtgaccttcgaggacgtggccgtgcacttcaccaagaccgagtggaccggcctgagccccgcccagagggccctgtacaggagcgtgatgctggagaacttcggcaacctgaccgccctgggctaccccgtgcccaagcccgccctgatcagcctgctggagggcggcgacatggactggggcctggaggcccaggacgaccccggcggcccaagcagcggcgcccctcctcccagcggcggcaggcggcccaagcagcggcgcccctcctcccagcggcggcagcccagccggctccccaacctctaccgaggagggcacctctgagtccgccacccccgagagcggccctggcacctccaccgagcccagcgagggcagcgcacccggcagccctgccggcagccccacctccacagaggagggaaccagcaccgagcccagcgaaggcagcgccccaggcaccagcaccgagcctagtgagcaggagattaaacggatcaacaagatcagaagaagacttgtgaaagacagcaacaccaagaaggccggcaagacaggccccatgaaaaccctgctggttagagtgatgacacccgatctgagagagcggctggaaaacctgagaaagaagcctgaaaatatcccccagcccatcagcaatacatctagagccaacctgaataagctgctgaccgattacaccgaaatgaagaaggcgatcctgcatgtgtactgggaagagttccagaaggaccctgtgggcctgatgagccgggtggcccagcctgccagcaagaagatcgatcagaacaagctgaaacctgagatggacgagaagggcaacctgaccaccgccggctttgcctgctctcagtgtggccagcccctgttcgtgtacaagctggagcaggtgtctgagaagggcaaggcttacaccaactacttcggacggtgcaatgtggccgagcacgaaaagctgatcctgctggcccagctgaagcccgagaaggatagcgacgaagccgtgacatatagcctgggaaagtttgggcagagggccctggatttctacagcattcatgtgaccaaggagtccacccaccccgtgaagcccctggcccagatcgccggaaacagatacgcctccggacctgtgggaaaggccctgagcgacgcatgtatgggcacaatcgcctccttcctgtctaagtaccaggacatcatcatcgaacaccagaaggtggtgaagggcaaccagaagagactggagagcctgcgggagctggccggcaaggaaaacctggaataccctagcgtgaccctgccacctcagcctcacaccaaggagggcgttgatgcctacaacgaagtgatcgcccgggtgcgaatgtgggtgaacctgaacctgtggcagaagctgaagctaagcagagatgatgccaagcctctgctgagactgaagggattcccttcctttcctctggtcgagagacaggccaacgaagtggactggtgggacatggtgtgtaacgtgaagaagctgatcaacgagaaaaaggaggatggcaaggtgttttggcagaatctggctggctacaagagacaggaagccctgagaccatacctgagcagcgaggaagatcggaagaagggaaagaaattcgctcggtaccagctgggcgacctgctgctgcacctggaaaagaagcacggcgaggactggggaaaggtgtacgacgaggcctgggagcggattgacaagaaagtggaaggcctgagcaagcacatcaagctggaagaggaacggagaagcgaggacgcccagagcaaggccgccctgaccgactggctgcgggctaaggccagcttcgtgatcgagggcctgaaggaggccgacaaggacgagttctgcagatgcgagctgaagctgcagaagtggtacggggacctgcggggaaagcccttcgccatcgaagccgagaacagcatcctggacatcagcggcttcagcaagcagtacaactgtgccttcatctggcagaaggacggcgtgaagaagctgaacctgtacctgatcatcaactacttcaagggcggcaagctgcggttcaagaagatcaaacctgaagccttcgaagccaacagattctacaccgtgatcaacaaaaagagcggcgagatcgtgcccatggaggtgaacttcaacttcgacgaccccaacctgatcatcctgcctctggcctttggcaagagacagggcagagaattcatctggaacgacctgctgtccctggaaaccggcagcctgaagctggccaacggaagagtgatcgagaagacactgtacaacagaagaacccggcaggatgagcctgccctgttcgtggccctgaccttcgagcggcgggaggtcctggactcctccaatatcaaaccaatgaacctgatcggcgtggcaagaggcgaaaacatccccgccgtgatcgccctgaccgaccccgagggctgcccactgagccggtttaaggatagcctgggaaacccaacccacatcctgagaatcggcgagagctataaggagaagcagcggaccatccaggccaagaaggaggtggagcagcggagagccggcggctacagccggaagtacgccagcaaagccaagaatctggcagacgatatggtgagaaacaccgctagagatctgctgtactacgccgtgacccaggatgccatgctgatcttcgccaacctgagccggggcttcggccggcagggcaagcggaccttcatggccgagagacagtacacacggatggaggactggctgaccgccaagctggcctacgagggcctgagcaagacctacctgtccaagacactggcccagtacacctccaagacatgcagcaactgtgggtttaccatcaccagcgccgactacgacagggtgctggagaagctgaagaagacagcaacaggctggatgaccacaattaacggcaaggagctgaaggtggagggccagattacctactacaacagatacaagagacagaacgtagtcaaggacctgtccgtcgagctggatagactgagcgaagaatctgtgaacaacgacatctcctcctggacaaagggcagaagcggagaagctctgagcctcctgaagaaaagattctcccatagacccgtgcaggagaagttcgtgtgcctgaactgcggcttcgagacacacgcagccgagcaagccgccctgaacatcgccagatcctggctgttcctgcggagccaggagtacaagaaataccagacaaacaagacaaccggcaacaccgataagagagccttcgtcgagacctggcagtccttttaccggaagaagcttaaggaggtgtggaaacctgccgtgcggtctggcggatctggcggaggctccaccagccccaagaaaaagagaaaagtctaagctgccttctgcggggcttgccttctggccatgcccttcttctctcccttgcacctgtacctcttggtctttgaataaagcctgagtaggaaggctagcaaaaaaaaaaaaaaaaaaaaaaaaaaaaaaaaaaaaaaaaaaaaaaaaaaaaaaaaaaaaaaaaaaaaaaaaaaaaaaaagcccagccggctccccaacctctaccgaggagggcacctctgagtccgccacccccgagagcggccctggcacctccaccgagcccagcgagggcagcgcacccggcagccctgccggcagccccacctccacagaggagggaaccagcaccgagcccagcgaaggcagcgccccaggcaccagcaccgagcctagtgagcaggagattaaacggatcaacaagatcagaagaagacttgtgaaagacagcaacaccaagaaggccggcaagacaggccccatgaaaaccctgctggttagagtgatgacacccgatctgagagagcggctggaaaacctgagaaagaagcctgaaaatatcccccagcccatcagcaatacatctagagccaacctgaataagctgctgaccgattacaccgaaatgaagaaggcgatcctgcatgtgtactgggaagagttccagaaggaccctgtgggcctgatgagccgggtggcccagcctgccagcaagaagatcgatcagaacaagctgaaacctgagatggacgagaagggcaacctgaccaccgccggctttgcctgctctcagtgtggccagcccctgttcgtgtacaagctggagcaggtgtctgagaagggcaaggcttacaccaactacttcggacggtgcaatgtggccgagcacgaaaagctgatcctgctggcccagctgaagcccgagaaggatagcgacgaagccgtgacatatagcctgggaaagtttgggcagagggccctggatttctacagcattcatgtgaccaaggagtccacccaccccgtgaagcccctggcccagatcgccggaaacagatacgcctccggacctgtgggaaaggccctgagcgacgcatgtatgggcacaatcgcctccttcctgtctaagtaccaggacatcatcatcgaacaccagaaggtggtgaagggcaaccagaagagactggagagcctgcgggagctggccggcaaggaaaacctggaataccctagcgtgaccctgccacctcagcctcacaccaaggagggcgttgatgcctacaacgaagtgatcgcccgggtgcgaatgtgggtgaacctgaacctgtggcagaagctgaagctaagcagagatgatgccaagcctctgctgagactgaagggattcccttcctttcctctggtcgagagacaggccaacgaagtggactggtgggacatggtgtgtaacgtgaagaagctgatcaacgagaaaaaggaggatggcaaggtgttttggcagaatctggctggctacaagagacaggaagccctgagaccatacctgagcagcgaggaagatcggaagaagggaaagaaattcgctcggtaccagctgggcgacctgctgctgcacctggaaaagaagcacggcgaggactggggaaaggtgtacgacgaggcctgggagcggattgacaagaaagtggaaggcctgagcaagcacatcaagctggaagaggaacggagaagcgaggacgcccagagcaaggccgccctgaccgactggctgcgggctaaggccagcttcgtgatcgagggcctgaaggaggccgacaaggacgagttctgcagatgcgagctgaagctgcagaagtggtacggggacctgcggggaaagcccttcgccatcgaagccgagaacagcatcctggacatcagcggcttcagcaagcagtacaactgtgccttcatctggcagaaggacggcgtgaagaagctgaacctgtacctgatcatcaactacttcaagggcggcaagctgcggttcaagaagatcaaacctgaagccttcgaagccaacagattctacaccgtgatcaacaaaaagagcggcgagatcgtgcccatggaggtgaacttcaacttcgacgaccccaacctgatcatcctgcctctggcctttggcaagagacagggcagagaattcatctggaacgacctgctgtccctggaaaccggcagcctgaagctggccaacggaagagtgatcgagaagacactgtacaacagaagaacccggcaggatgagcctgccctgttcgtggccctgaccttcgagcggcgggaggtcctggactcctccaatatcaaaccaatgaacctgatcggcgtggcaagaggcgaaaacatccccgccgtgatcgccctgaccgaccccgagggctgcccactgagccggtttaaggatagcctgggaaacccaacccacatcctgagaatcggcgagagctataaggagaagcagcggaccatccaggccaagaaggaggtggagcagcggagagccggcggctacagccggaagtacgccagcaaagccaagaatctggcagacgatatggtgagaaacaccgctagagatctgctgtactacgccgtgacccaggatgccatgctgatcttcgccaacctgagccggggcttcggccggcagggcaagcggaccttcatggccgagagacagtacacacggatggaggactggctgaccgccaagctggcctacgagggcctgagcaagacctacctgtccaagacactggcccagtacacctccaagacatgcagcaactgtgggtttaccatcaccagcgccgactacgacagggtgctggagaagctgaagaagacagcaacaggctggatgaccacaattaacggcaaggagctgaaggtggagggccagattacctactacaacagatacaagagacagaacgtagtcaaggacctgtccgtcgagctggatagactgagcgaagaatctgtgaacaacgacatctcctcctggacaaagggcagaagcggagaagctctgagcctcctgaagaaaagattctcccatagacccgtgcaggagaagttcgtgtgcctgaactgcggcttcgagacacacgcagccgagcaagccgccctgaacatcgccagatcctggctgttcctgcggagccaggagtacaagaaataccagacaaacaagacaaccggcaacaccgataagagagccttcgtcgagacctggcagtccttttaccggaagaagcttaaggaggtgtggaaacctgccgtgcggtctggcggatctggcggaggctccaccagccccaagaaaaagagaaaagtctaagctgccttctgcggggcttgccttctggccatgcccttcttctctcccttgcacctgtacctcttggtctttgaataaagcctgagtaggaaggctagcaaaaaaaaaaaaaaaaaaaaaaaaaaaaaaaaaaaaaaaaaaaaaaaaaaaaaaaaaaaaaaaaaaaaaaaaaaaaaaaa

SEQ ID NO: 9041 - RNA, 8787 nt, synthetic construct
  source 1..8787: mol_type = other RNA
aggaaataagagagaaaagaagagtaagaagaaatataagagccaccatggcccctaagaagaagcgtaaagtgagccggatgaaccacgaccaggagttcgacccccctaaggtgtaccctcccgtccccgccgagaagagaaagcccatccgggtcctgagcctgttcgatggcatcgccaccggtctgctggtgctgaaggacctgggcatccaggtggataggtacattgcctccgaggtgtgcgaggactccatcaccgtgggaatggtgcgtcatcagggcaagatcatgtacgtgggcgacgtgcggagcgtgacacagaagcatatccaggagtggggccctttcgacctggtgatcggcggcagcccttgcaatgacctgagcatcgtgaacccagcccggaagggcctgtacgagggaaccggcagactgttcttcgagttttacagactgctgcacgacgcccggcctaaggaaggcgacgaccggcccttcttttggctgttcgagaatgtggtggccatgggagtcagcgacaagcgggatattagccggttcctggagagcaaccccgtgatgatcgatgccaaggaagtgagcgccgcccaccgggccagatacttctggggcaatctgcctggcatgaacagacccctggccagcaccgtgaacgacaagctggagctgcaggagtgcctggagcacggccggatcgccaagttcagcaaggtgagaaccatcaccacccgaagcaacagcatcaaacaaggcaaggaccagcactttcctgtgttcatgaacgagaaggaggacatcctgtggtgtaccgagatggagagagtgttcgggttcccagtccactacacagatgtcagcaacatgtctagactggccagacagagactgctgggaagaagctggtccgtccctgtgatcagacacctgttcgcccctctgaaggagtacttcgcctgcgtgagcagcggcaacagcaacgccaacagccggggccccagcttctctagcggcctggtgccactgtccctgagagggagccacatgggccccatggagatctacaaaaccgtgagcgcctggaagcggcagcctgtgcgcgtgctgagcctgtttcggaatatcgataaagtcctgaaaagcctgggattcctggagagcggctctggctccggcggtggcaccctgaagtacgtggaggatgtgacaaacgtggtcagacgggatgtggagaagtggggccccttcgatctggtgtacggcagcacccaacccctgggcagctcttgtgaccggtgccctggctggtacatgtttcagttccaccggatcctgcagtacgccctgccgagacaggagtcccagcggccattcttttggattttcatggacaacttgctgctgaccgaggatgaccaggaaactaccactcggttcctgcagaccgaagccgtgaccctgcaggacgtgagaggccgggactaccagaacgccatgcgggtgtggtccaacatccctggactgaaaagcaagcacgcacctctgacccctaaagaagaggagtacctgcaggcccaggtgcggagcagaagcaagctggacgcccctaaggtggatctgctggtgaagaattgcctcctgcccctgagagagtacttcaagtatttcagccagaatagtctgcccctgggaggcagcggcggcggccaggccgaggtgaccttcgaggacgtggccgtgctgctgagcagggaggagtggggcaggctgggccccgtgcagaagggcctgtacagggacgtgatgctggagacctacaggaacctggtgagcctgggcgccggccccgccggccccaagcccgaggtgatcacccagctggagaggggcgacgagccctgggtgcccgacgtgcagggcagggagcagcccaccatcgacggcagcgccggcggcccaagcagcggcgcccctcctcccagcggcggcaggcggcccaagcagcggcgcccctcctcccagcggcggcagcccagccggctccccaacctctaccgaggagggcacctctgagtccgccacccccgagagcggccctggcacctccaccgagcccagcgagggcagcgcacccggcagccctgccggcagccccacctccacagaggagggaaccagcaccgagcccagcgaaggcagcgccccaggcaccagcaccgagcctagtgagcaggagattaaacggatcaacaagatcagaagaagacttgtgaaagacagcaacaccaagaaggccggcaagacaggccccatgaaaaccctgctggttagagtgatgacacccgatctgagagagcggctggaaaacctgagaaagaagcctgaaaatatcccccagcccatcagcaatacatctagagccaacctgaataagctgctgaccgattacaccgaaatgaagaaggcgatcctgcatgtgtactgggaagagttccagaaggaccctgtgggcctgatgagccgggtggcccagcctgccagcaagaagatcgatcagaacaagctgaaacctgagatggacgagaagggcaacctgaccaccgccggctttgcctgctctcagtgtggccagcccctgttcgtgtacaagctggagcaggtgtctgagaagggcaaggcttacaccaactacttcggacggtgcaatgtggccgagcacgaaaagctgatcctgctggcccagctgaagcccgagaaggatagcgacgaagccgtgacatatagcctgggaaagtttgggcagagggccctggatttctacagcattcatgtgaccaaggagtccacccaccccgtgaagcccctggcccagatcgccggaaacagatacgcctccggacctgtgggaaaggccctgagcgacgcatgtatgggcacaatcgcctccttcctgtctaagtaccaggacatcatcatcgaacaccagaaggtggtgaagggcaaccagaagagactggagagcctgcgggagctggccggcaaggaaaacctggaataccctagcgtgaccctgccacctcagcctcacaccaaggagggcgttgatgcctacaacgaagtgatcgcccgggtgcgaatgtgggtgaacctgaacctgtggcagaagctgaagctaagcagagatgatgccaagcctctgctgagactgaagggattcccttcctttcctctggtcgagagacaggccaacgaagtggactggtgggacatggtgtgtaacgtgaagaagctgatcaacgagaaaaaggaggatggcaaggtgttttggcagaatctggctggctacaagagacaggaagccctgagaccatacctgagcagcgaggaagatcggaagaagggaaagaaattcgctcggtaccagctgggcgacctgctgctgcacctggaaaagaagcacggcgaggactggggaaaggtgtacgacgaggcctgggagcggattgacaagaaagtggaaggcctgagcaagcacatcaagctggaagaggaacggagaagcgaggacgcccagagcaaggccgccctgaccgactggctgcgggctaaggccagcttcgtgatcgagggcctgaaggaggccgacaaggacgagttctgcagatgcgagctgaagctgcagaagtggtacggggacctgcggggaaagcccttcgccatcgaagccgagaacagcatcctggacatcagcggcttcagcaagcagtacaactgtgccttcatctggcagaaggacggcgtgaagaagctgaacctgtacctgatcatcaactacttcaagggcggcaagctgcggttcaagaagatcaaacctgaagccttcgaagccaacagattctacaccgtgatcaacaaaaagagcggcgagatcgtgcccatggaggtgaacttcaacttcgacgaccccaacctgatcatcctgcctctggcctttggcaagagacagggcagagaattcatctggaacgacctgctgtccctggaaaccggcagcctgaagctggccaacggaagagtgatcgagaagacactgtacaacagaagaacccggcaggatgagcctgccctgttcgtggccctgaccttcgagcggcgggaggtcctggactcctccaatatcaaaccaatgaacctgatcggcgtggcaagaggcgaaaacatccccgccgtgatcgccctgaccgaccccgagggctgcccactgagccggtttaaggatagcctgggaaacccaacccacatcctgagaatcggcgagagctataaggagaagcagcggaccatccaggccaagaaggaggtggagcagcggagagccggcggctacagccggaagtacgccagcaaagccaagaatctggcagacgatatggtgagaaacaccgctagagatctgctgtactacgccgtgacccaggatgccatgctgatcttcgccaacctgagccggggcttcggccggcagggcaagcggaccttcatggccgagagacagtacacacggatggaggactggctgaccgccaagctggcctacgagggcctgagcaagacctacctgtccaagacactggcccagtacacctccaagacatgcagcaactgtgggtttaccatcaccagcgccgactacgacagggtgctggagaagctgaagaagacagcaacaggctggatgaccacaattaacggcaaggagctgaaggtggagggccagattacctactacaacagatacaagagacagaacgtagtcaaggacctgtccgtcgagctggatagactgagcgaagaatctgtgaacaacgacatctcctcctggacaaagggcagaagcggagaagctctgagcctcctgaagaaaagattctcccatagacccgtgcaggagaagttcgtgtgcctgaactgcggcttcgagacacacgcagccgagcaagccgccctgaacatcgccagatcctggctgttcctgcggagccaggagtacaagaaataccagacaaacaagacaaccggcaacaccgataagagagccttcgtcgagacctggcagtccttttaccggaagaagcttaaggaggtgtggaaacctgccgtgcggtctggcggatctggcggaggctccaccagccccaagaaaaagagaaaagtctaagctgccttctgcggggcttgccttctggccatgcccttcttctctcccttgcacctgtacctcttggtctttgaataaagcctgagtaggaaggctagcaaaaaaaaaaaaaaaaaaaaaaaaaaaaaaaaaaaaaaaaaaaaaaaaaaaaaaaaaaaaaaaaaaaaaaaaaaaaaaaagcccagccggctccccaacctctaccgaggagggcacctctgagtccgccacccccgagagcggccctggcacctccaccgagcccagcgagggcagcgcacccggcagccctgccggcagccccacctccacagaggagggaaccagcaccgagcccagcgaaggcagcgccccaggcaccagcaccgagcctagtgagcaggagattaaacggatcaacaagatcagaagaagacttgtgaaagacagcaacaccaagaaggccggcaagacaggccccatgaaaaccctgctggttagagtgatgacacccgatctgagagagcggctggaaaacctgagaaagaagcctgaaaatatcccccagcccatcagcaatacatctagagccaacctgaataagctgctgaccgattacaccgaaatgaagaaggcgatcctgcatgtgtactgggaagagttccagaaggaccctgtgggcctgatgagccgggtggcccagcctgccagcaagaagatcgatcagaacaagctgaaacctgagatggacgagaagggcaacctgaccaccgccggctttgcctgctctcagtgtggccagcccctgttcgtgtacaagctggagcaggtgtctgagaagggcaaggcttacaccaactacttcggacggtgcaatgtggccgagcacgaaaagctgatcctgctggcccagctgaagcccgagaaggatagcgacgaagccgtgacatatagcctgggaaagtttgggcagagggccctggatttctacagcattcatgtgaccaaggagtccacccaccccgtgaagcccctggcccagatcgccggaaacagatacgcctccggacctgtgggaaaggccctgagcgacgcatgtatgggcacaatcgcctccttcctgtctaagtaccaggacatcatcatcgaacaccagaaggtggtgaagggcaaccagaagagactggagagcctgcgggagctggccggcaaggaaaacctggaataccctagcgtgaccctgccacctcagcctcacaccaaggagggcgttgatgcctacaacgaagtgatcgcccgggtgcgaatgtgggtgaacctgaacctgtggcagaagctgaagctaagcagagatgatgccaagcctctgctgagactgaagggattcccttcctttcctctggtcgagagacaggccaacgaagtggactggtgggacatggtgtgtaacgtgaagaagctgatcaacgagaaaaaggaggatggcaaggtgttttggcagaatctggctggctacaagagacaggaagccctgagaccatacctgagcagcgaggaagatcggaagaagggaaagaaattcgctcggtaccagctgggcgacctgctgctgcacctggaaaagaagcacggcgaggactggggaaaggtgtacgacgaggcctgggagcggattgacaagaaagtggaaggcctgagcaagcacatcaagctggaagaggaacggagaagcgaggacgcccagagcaaggccgccctgaccgactggctgcgggctaaggccagcttcgtgatcgagggcctgaaggaggccgacaaggacgagttctgcagatgcgagctgaagctgcagaagtggtacggggacctgcggggaaagcccttcgccatcgaagccgagaacagcatcctggacatcagcggcttcagcaagcagtacaactgtgccttcatctggcagaaggacggcgtgaagaagctgaacctgtacctgatcatcaactacttcaagggcggcaagctgcggttcaagaagatcaaacctgaagccttcgaagccaacagattctacaccgtgatcaacaaaaagagcggcgagatcgtgcccatggaggtgaacttcaacttcgacgaccccaacctgatcatcctgcctctggcctttggcaagagacagggcagagaattcatctggaacgacctgctgtccctggaaaccggcagcctgaagctggccaacggaagagtgatcgagaagacactgtacaacagaagaacccggcaggatgagcctgccctgttcgtggccctgaccttcgagcggcgggaggtcctggactcctccaatatcaaaccaatgaacctgatcggcgtggcaagaggcgaaaacatccccgccgtgatcgccctgaccgaccccgagggctgcccactgagccggtttaaggatagcctgggaaacccaacccacatcctgagaatcggcgagagctataaggagaagcagcggaccatccaggccaagaaggaggtggagcagcggagagccggcggctacagccggaagtacgccagcaaagccaagaatctggcagacgatatggtgagaaacaccgctagagatctgctgtactacgccgtgacccaggatgccatgctgatcttcgccaacctgagccggggcttcggccggcagggcaagcggaccttcatggccgagagacagtacacacggatggaggactggctgaccgccaagctggcctacgagggcctgagcaagacctacctgtccaagacactggcccagtacacctccaagacatgcagcaactgtgggtttaccatcaccagcgccgactacgacagggtgctggagaagctgaagaagacagcaacaggctggatgaccacaattaacggcaaggagctgaaggtggagggccagattacctactacaacagatacaagagacagaacgtagtcaaggacctgtccgtcgagctggatagactgagcgaagaatctgtgaacaacgacatctcctcctggacaaagggcagaagcggagaagctctgagcctcctgaagaaaagattctcccatagacccgtgcaggagaagttcgtgtgcctgaactgcggcttcgagacacacgcagccgagcaagccgccctgaacatcgccagatcctggctgttcctgcggagccaggagtacaagaaataccagacaaacaagacaaccggcaacaccgataagagagccttcgtcgagacctggcagtccttttaccggaagaagcttaaggaggtgtggaaacctgccgtgcggtctggcggatctggcggaggctccaccagccccaagaaaaagagaaaagtctaagctgccttctgcggggcttgccttctggccatgcccttcttctctcccttgcacctgtacctcttggtctttgaataaagcctgagtaggaaggctagcaaaaaaaaaaaaaaaaaaaaaaaaaaaaaaaaaaaaaaaaaaaaaaaaaaaaaaaaaaaaaaaaaaaaaaaaaaaaaaaa

SEQ ID NO: 9042 - RNA, 8787 nt, synthetic construct
  source 1..8787: mol_type = other RNA
aggaaataagagagaaaagaagagtaagaagaaatataagagccaccatggcccctaagaagaagcgtaaagtgagccggatgaaccacgaccaggagttcgacccccctaaggtgtaccctcccgtccccgccgagaagagaaagcccatccgggtcctgagcctgttcgatggcatcgccaccggtctgctggtgctgaaggacctgggcatccaggtggataggtacattgcctccgaggtgtgcgaggactccatcaccgtgggaatggtgcgtcatcagggcaagatcatgtacgtgggcgacgtgcggagcgtgacacagaagcatatccaggagtggggccctttcgacctggtgatcggcggcagcccttgcaatgacctgagcatcgtgaacccagcccggaagggcctgtacgagggaaccggcagactgttcttcgagttttacagactgctgcacgacgcccggcctaaggaaggcgacgaccggcccttcttttggctgttcgagaatgtggtggccatgggagtcagcgacaagcgggatattagccggttcctggagagcaaccccgtgatgatcgatgccaaggaagtgagcgccgcccaccgggccagatacttctggggcaatctgcctggcatgaacagacccctggccagcaccgtgaacgacaagctggagctgcaggagtgcctggagcacggccggatcgccaagttcagcaaggtgagaaccatcaccacccgaagcaacagcatcaaacaaggcaaggaccagcactttcctgtgttcatgaacgagaaggaggacatcctgtggtgtaccgagatggagagagtgttcgggttcccagtccactacacagatgtcagcaacatgtctagactggccagacagagactgctgggaagaagctggtccgtccctgtgatcagacacctgttcgcccctctgaaggagtacttcgcctgcgtgagcagcggcaacagcaacgccaacagccggggccccagcttctctagcggcctggtgccactgtccctgagagggagccacatgggccccatggagatctacaaaaccgtgagcgcctggaagcggcagcctgtgcgcgtgctgagcctgtttcggaatatcgataaagtcctgaaaagcctgggattcctggagagcggctctggctccggcggtggcaccctgaagtacgtggaggatgtgacaaacgtggtcagacgggatgtggagaagtggggccccttcgatctggtgtacggcagcacccaacccctgggcagctcttgtgaccggtgccctggctggtacatgtttcagttccaccggatcctgcagtacgccctgccgagacaggagtcccagcggccattcttttggattttcatggacaacttgctgctgaccgaggatgaccaggaaactaccactcggttcctgcagaccgaagccgtgaccctgcaggacgtgagaggccgggactaccagaacgccatgcgggtgtggtccaacatccctggactgaaaagcaagcacgcacctctgacccctaaagaagaggagtacctgcaggcccaggtgcggagcagaagcaagctggacgcccctaaggtggatctgctggtgaagaattgcctcctgcccctgagagagtacttcaagtatttcagccagaatagtctgcccctgggaggcagcggcggcggcgcccacggcagcgtgatcttcagcgacgtgagcatcgccttcagccaggaggagtgggagtacctggacctggagcagagggacctgtacagggacgtgatgctggagaactacagcaacctggtgagcctgggctgcttcatcagcaagcccaacgtgatcagcctgctggagcagggcaaggagccctggaaggtggtgaggaaggagaggaggtaccccgacatgggcatcaggtacgagggcggcccaagcagcggcgcccctcctcccagcggcggcaggcggcccaagcagcggcgcccctcctcccagcggcggcagcccagccggctccccaacctctaccgaggagggcacctctgagtccgccacccccgagagcggccctggcacctccaccgagcccagcgagggcagcgcacccggcagccctgccggcagccccacctccacagaggagggaaccagcaccgagcccagcgaaggcagcgccccaggcaccagcaccgagcctagtgagcaggagattaaacggatcaacaagatcagaagaagacttgtgaaagacagcaacaccaagaaggccggcaagacaggccccatgaaaaccctgctggttagagtgatgacacccgatctgagagagcggctggaaaacctgagaaagaagcctgaaaatatcccccagcccatcagcaatacatctagagccaacctgaataagctgctgaccgattacaccgaaatgaagaaggcgatcctgcatgtgtactgggaagagttccagaaggaccctgtgggcctgatgagccgggtggcccagcctgccagcaagaagatcgatcagaacaagctgaaacctgagatggacgagaagggcaacctgaccaccgccggctttgcctgctctcagtgtggccagcccctgttcgtgtacaagctggagcaggtgtctgagaagggcaaggcttacaccaactacttcggacggtgcaatgtggccgagcacgaaaagctgatcctgctggcccagctgaagcccgagaaggatagcgacgaagccgtgacatatagcctgggaaagtttgggcagagggccctggatttctacagcattcatgtgaccaaggagtccacccaccccgtgaagcccctggcccagatcgccggaaacagatacgcctccggacctgtgggaaaggccctgagcgacgcatgtatgggcacaatcgcctccttcctgtctaagtaccaggacatcatcatcgaacaccagaaggtggtgaagggcaaccagaagagactggagagcctgcgggagctggccggcaaggaaaacctggaataccctagcgtgaccctgccacctcagcctcacaccaaggagggcgttgatgcctacaacgaagtgatcgcccgggtgcgaatgtgggtgaacctgaacctgtggcagaagctgaagctaagcagagatgatgccaagcctctgctgagactgaagggattcccttcctttcctctggtcgagagacaggccaacgaagtggactggtgggacatggtgtgtaacgtgaagaagctgatcaacgagaaaaaggaggatggcaaggtgttttggcagaatctggctggctacaagagacaggaagccctgagaccatacctgagcagcgaggaagatcggaagaagggaaagaaattcgctcggtaccagctgggcgacctgctgctgcacctggaaaagaagcacggcgaggactggggaaaggtgtacgacgaggcctgggagcggattgacaagaaagtggaaggcctgagcaagcacatcaagctggaagaggaacggagaagcgaggacgcccagagcaaggccgccctgaccgactggctgcgggctaaggccagcttcgtgatcgagggcctgaaggaggccgacaaggacgagttctgcagatgcgagctgaagctgcagaagtggtacggggacctgcggggaaagcccttcgccatcgaagccgagaacagcatcctggacatcagcggcttcagcaagcagtacaactgtgccttcatctggcagaaggacggcgtgaagaagctgaacctgtacctgatcatcaactacttcaagggcggcaagctgcggttcaagaagatcaaacctgaagccttcgaagccaacagattctacaccgtgatcaacaaaaagagcggcgagatcgtgcccatggaggtgaacttcaacttcgacgaccccaacctgatcatcctgcctctggcctttggcaagagacagggcagagaattcatctggaacgacctgctgtccctggaaaccggcagcctgaagctggccaacggaagagtgatcgagaagacactgtacaacagaagaacccggcaggatgagcctgccctgttcgtggccctgaccttcgagcggcgggaggtcctggactcctccaatatcaaaccaatgaacctgatcggcgtggcaagaggcgaaaacatccccgccgtgatcgccctgaccgaccccgagggctgcccactgagccggtttaaggatagcctgggaaacccaacccacatcctgagaatcggcgagagctataaggagaagcagcggaccatccaggccaagaaggaggtggagcagcggagagccggcggctacagccggaagtacgccagcaaagccaagaatctggcagacgatatggtgagaaacaccgctagagatctgctgtactacgccgtgacccaggatgccatgctgatcttcgccaacctgagccggggcttcggccggcagggcaagcggaccttcatggccgagagacagtacacacggatggaggactggctgaccgccaagctggcctacgagggcctgagcaagacctacctgtccaagacactggcccagtacacctccaagacatgcagcaactgtgggtttaccatcaccagcgccgactacgacagggtgctggagaagctgaagaagacagcaacaggctggatgaccacaattaacggcaaggagctgaaggtggagggccagattacctactacaacagatacaagagacagaacgtagtcaaggacctgtccgtcgagctggatagactgagcgaagaatctgtgaacaacgacatctcctcctggacaaagggcagaagcggagaagctctgagcctcctgaagaaaagattctcccatagacccgtgcaggagaagttcgtgtgcctgaactgcggcttcgagacacacgcagccgagcaagccgccctgaacatcgccagatcctggctgttcctgcggagccaggagtacaagaaataccagacaaacaagacaaccggcaacaccgataagagagccttcgtcgagacctggcagtccttttaccggaagaagcttaaggaggtgtggaaacctgccgtgcggtctggcggatctggcggaggctccaccagccccaagaaaaagagaaaagtctaagctgccttctgcggggcttgccttctggccatgcccttcttctctcccttgcacctgtacctcttggtctttgaataaagcctgagtaggaaggctagcaaaaaaaaaaaaaaaaaaaaaaaaaaaaaaaaaaaaaaaaaaaaaaaaaaaaaaaaaaaaaaaaaaaaaaaaaaaaaaaagcccagccggctccccaacctctaccgaggagggcacctctgagtccgccacccccgagagcggccctggcacctccaccgagcccagcgagggcagcgcacccggcagccctgccggcagccccacctccacagaggagggaaccagcaccgagcccagcgaaggcagcgccccaggcaccagcaccgagcctagtgagcaggagattaaacggatcaacaagatcagaagaagacttgtgaaagacagcaacaccaagaaggccggcaagacaggccccatgaaaaccctgctggttagagtgatgacacccgatctgagagagcggctggaaaacctgagaaagaagcctgaaaatatcccccagcccatcagcaatacatctagagccaacctgaataagctgctgaccgattacaccgaaatgaagaaggcgatcctgcatgtgtactgggaagagttccagaaggaccctgtgggcctgatgagccgggtggcccagcctgccagcaagaagatcgatcagaacaagctgaaacctgagatggacgagaagggcaacctgaccaccgccggctttgcctgctctcagtgtggccagcccctgttcgtgtacaagctggagcaggtgtctgagaagggcaaggcttacaccaactacttcggacggtgcaatgtggccgagcacgaaaagctgatcctgctggcccagctgaagcccgagaaggatagcgacgaagccgtgacatatagcctgggaaagtttgggcagagggccctggatttctacagcattcatgtgaccaaggagtccacccaccccgtgaagcccctggcccagatcgccggaaacagatacgcctccggacctgtgggaaaggccctgagcgacgcatgtatgggcacaatcgcctccttcctgtctaagtaccaggacatcatcatcgaacaccagaaggtggtgaagggcaaccagaagagactggagagcctgcgggagctggccggcaaggaaaacctggaataccctagcgtgaccctgccacctcagcctcacaccaaggagggcgttgatgcctacaacgaagtgatcgcccgggtgcgaatgtgggtgaacctgaacctgtggcagaagctgaagctaagcagagatgatgccaagcctctgctgagactgaagggattcccttcctttcctctggtcgagagacaggccaacgaagtggactggtgggacatggtgtgtaacgtgaagaagctgatcaacgagaaaaaggaggatggcaaggtgttttggcagaatctggctggctacaagagacaggaagccctgagaccatacctgagcagcgaggaagatcggaagaagggaaagaaattcgctcggtaccagctgggcgacctgctgctgcacctggaaaagaagcacggcgaggactggggaaaggtgtacgacgaggcctgggagcggattgacaagaaagtggaaggcctgagcaagcacatcaagctggaagaggaacggagaagcgaggacgcccagagcaaggccgccctgaccgactggctgcgggctaaggccagcttcgtgatcgagggcctgaaggaggccgacaaggacgagttctgcagatgcgagctgaagctgcagaagtggtacggggacctgcggggaaagcccttcgccatcgaagccgagaacagcatcctggacatcagcggcttcagcaagcagtacaactgtgccttcatctggcagaaggacggcgtgaagaagctgaacctgtacctgatcatcaactacttcaagggcggcaagctgcggttcaagaagatcaaacctgaagccttcgaagccaacagattctacaccgtgatcaacaaaaagagcggcgagatcgtgcccatggaggtgaacttcaacttcgacgaccccaacctgatcatcctgcctctggcctttggcaagagacagggcagagaattcatctggaacgacctgctgtccctggaaaccggcagcctgaagctggccaacggaagagtgatcgagaagacactgtacaacagaagaacccggcaggatgagcctgccctgttcgtggccctgaccttcgagcggcgggaggtcctggactcctccaatatcaaaccaatgaacctgatcggcgtggcaagaggcgaaaacatccccgccgtgatcgccctgaccgaccccgagggctgcccactgagccggtttaaggatagcctgggaaacccaacccacatcctgagaatcggcgagagctataaggagaagcagcggaccatccaggccaagaaggaggtggagcagcggagagccggcggctacagccggaagtacgccagcaaagccaagaatctggcagacgatatggtgagaaacaccgctagagatctgctgtactacgccgtgacccaggatgccatgctgatcttcgccaacctgagccggggcttcggccggcagggcaagcggaccttcatggccgagagacagtacacacggatggaggactggctgaccgccaagctggcctacgagggcctgagcaagacctacctgtccaagacactggcccagtacacctccaagacatgcagcaactgtgggtttaccatcaccagcgccgactacgacagggtgctggagaagctgaagaagacagcaacaggctggatgaccacaattaacggcaaggagctgaaggtggagggccagattacctactacaacagatacaagagacagaacgtagtcaaggacctgtccgtcgagctggatagactgagcgaagaatctgtgaacaacgacatctcctcctggacaaagggcagaagcggagaagctctgagcctcctgaagaaaagattctcccatagacccgtgcaggagaagttcgtgtgcctgaactgcggcttcgagacacacgcagccgagcaagccgccctgaacatcgccagatcctggctgttcctgcggagccaggagtacaagaaataccagacaaacaagacaaccggcaacaccgataagagagccttcgtcgagacctggcagtccttttaccggaagaagcttaaggaggtgtggaaacctgccgtgcggtctggcggatctggcggaggctccaccagccccaagaaaaagagaaaagtctaagctgccttctgcggggcttgccttctggccatgcccttcttctctcccttgcacctgtacctcttggtctttgaataaagcctgagtaggaaggctagcaaaaaaaaaaaaaaaaaaaaaaaaaaaaaaaaaaaaaaaaaaaaaaaaaaaaaaaaaaaaaaaaaaaaaaaaaaaaaaaa

SEQ ID NO: 9043 - RNA, 8787 nt, synthetic construct
  source 1..8787: mol_type = other RNA
aggaaataagagagaaaagaagagtaagaagaaatataagagccaccatggcccctaagaagaagcgtaaagtgagccggatgaaccacgaccaggagttcgacccccctaaggtgtaccctcccgtccccgccgagaagagaaagcccatccgggtcctgagcctgttcgatggcatcgccaccggtctgctggtgctgaaggacctgggcatccaggtggataggtacattgcctccgaggtgtgcgaggactccatcaccgtgggaatggtgcgtcatcagggcaagatcatgtacgtgggcgacgtgcggagcgtgacacagaagcatatccaggagtggggccctttcgacctggtgatcggcggcagcccttgcaatgacctgagcatcgtgaacccagcccggaagggcctgtacgagggaaccggcagactgttcttcgagttttacagactgctgcacgacgcccggcctaaggaaggcgacgaccggcccttcttttggctgttcgagaatgtggtggccatgggagtcagcgacaagcgggatattagccggttcctggagagcaaccccgtgatgatcgatgccaaggaagtgagcgccgcccaccgggccagatacttctggggcaatctgcctggcatgaacagacccctggccagcaccgtgaacgacaagctggagctgcaggagtgcctggagcacggccggatcgccaagttcagcaaggtgagaaccatcaccacccgaagcaacagcatcaaacaaggcaaggaccagcactttcctgtgttcatgaacgagaaggaggacatcctgtggtgtaccgagatggagagagtgttcgggttcccagtccactacacagatgtcagcaacatgtctagactggccagacagagactgctgggaagaagctggtccgtccctgtgatcagacacctgttcgcccctctgaaggagtacttcgcctgcgtgagcagcggcaacagcaacgccaacagccggggccccagcttctctagcggcctggtgccactgtccctgagagggagccacatgggccccatggagatctacaaaaccgtgagcgcctggaagcggcagcctgtgcgcgtgctgagcctgtttcggaatatcgataaagtcctgaaaagcctgggattcctggagagcggctctggctccggcggtggcaccctgaagtacgtggaggatgtgacaaacgtggtcagacgggatgtggagaagtggggccccttcgatctggtgtacggcagcacccaacccctgggcagctcttgtgaccggtgccctggctggtacatgtttcagttccaccggatcctgcagtacgccctgccgagacaggagtcccagcggccattcttttggattttcatggacaacttgctgctgaccgaggatgaccaggaaactaccactcggttcctgcagaccgaagccgtgaccctgcaggacgtgagaggccgggactaccagaacgccatgcgggtgtggtccaacatccctggactgaaaagcaagcacgcacctctgacccctaaagaagaggagtacctgcaggcccaggtgcggagcagaagcaagctggacgcccctaaggtggatctgctggtgaagaattgcctcctgcccctgagagagtacttcaagtatttcagccagaatagtctgcccctgggaggcagcggcggcggcaggcccggcgccgtgagcttcgccgacgtggccgtgtacttcagccccgaggagtggggctgcctgaggcccgcccagagggccctgtacagggacgtgatgagggagacctacggccacctgggcgccctgggcttcgccggcagcaagcccgccctgatcagctggctggagaggaagaaggaggtgtggagccccgaggccgaggaccccgaggacggcgccaggcaccccggcagcggcggcggcccaagcagcggcgcccctcctcccagcggcggcaggcggcccaagcagcggcgcccctcctcccagcggcggcagcccagccggctccccaacctctaccgaggagggcacctctgagtccgccacccccgagagcggccctggcacctccaccgagcccagcgagggcagcgcacccggcagccctgccggcagccccacctccacagaggagggaaccagcaccgagcccagcgaaggcagcgccccaggcaccagcaccgagcctagtgagcaggagattaaacggatcaacaagatcagaagaagacttgtgaaagacagcaacaccaagaaggccggcaagacaggccccatgaaaaccctgctggttagagtgatgacacccgatctgagagagcggctggaaaacctgagaaagaagcctgaaaatatcccccagcccatcagcaatacatctagagccaacctgaataagctgctgaccgattacaccgaaatgaagaaggcgatcctgcatgtgtactgggaagagttccagaaggaccctgtgggcctgatgagccgggtggcccagcctgccagcaagaagatcgatcagaacaagctgaaacctgagatggacgagaagggcaacctgaccaccgccggctttgcctgctctcagtgtggccagcccctgttcgtgtacaagctggagcaggtgtctgagaagggcaaggcttacaccaactacttcggacggtgcaatgtggccgagcacgaaaagctgatcctgctggcccagctgaagcccgagaaggatagcgacgaagccgtgacatatagcctgggaaagtttgggcagagggccctggatttctacagcattcatgtgaccaaggagtccacccaccccgtgaagcccctggcccagatcgccggaaacagatacgcctccggacctgtgggaaaggccctgagcgacgcatgtatgggcacaatcgcctccttcctgtctaagtaccaggacatcatcatcgaacaccagaaggtggtgaagggcaaccagaagagactggagagcctgcgggagctggccggcaaggaaaacctggaataccctagcgtgaccctgccacctcagcctcacaccaaggagggcgttgatgcctacaacgaagtgatcgcccgggtgcgaatgtgggtgaacctgaacctgtggcagaagctgaagctaagcagagatgatgccaagcctctgctgagactgaagggattcccttcctttcctctggtcgagagacaggccaacgaagtggactggtgggacatggtgtgtaacgtgaagaagctgatcaacgagaaaaaggaggatggcaaggtgttttggcagaatctggctggctacaagagacaggaagccctgagaccatacctgagcagcgaggaagatcggaagaagggaaagaaattcgctcggtaccagctgggcgacctgctgctgcacctggaaaagaagcacggcgaggactggggaaaggtgtacgacgaggcctgggagcggattgacaagaaagtggaaggcctgagcaagcacatcaagctggaagaggaacggagaagcgaggacgcccagagcaaggccgccctgaccgactggctgcgggctaaggccagcttcgtgatcgagggcctgaaggaggccgacaaggacgagttctgcagatgcgagctgaagctgcagaagtggtacggggacctgcggggaaagcccttcgccatcgaagccgagaacagcatcctggacatcagcggcttcagcaagcagtacaactgtgccttcatctggcagaaggacggcgtgaagaagctgaacctgtacctgatcatcaactacttcaagggcggcaagctgcggttcaagaagatcaaacctgaagccttcgaagccaacagattctacaccgtgatcaacaaaaagagcggcgagatcgtgcccatggaggtgaacttcaacttcgacgaccccaacctgatcatcctgcctctggcctttggcaagagacagggcagagaattcatctggaacgacctgctgtccctggaaaccggcagcctgaagctggccaacggaagagtgatcgagaagacactgtacaacagaagaacccggcaggatgagcctgccctgttcgtggccctgaccttcgagcggcgggaggtcctggactcctccaatatcaaaccaatgaacctgatcggcgtggcaagaggcgaaaacatccccgccgtgatcgccctgaccgaccccgagggctgcccactgagccggtttaaggatagcctgggaaacccaacccacatcctgagaatcggcgagagctataaggagaagcagcggaccatccaggccaagaaggaggtggagcagcggagagccggcggctacagccggaagtacgccagcaaagccaagaatctggcagacgatatggtgagaaacaccgctagagatctgctgtactacgccgtgacccaggatgccatgctgatcttcgccaacctgagccggggcttcggccggcagggcaagcggaccttcatggccgagagacagtacacacggatggaggactggctgaccgccaagctggcctacgagggcctgagcaagacctacctgtccaagacactggcccagtacacctccaagacatgcagcaactgtgggtttaccatcaccagcgccgactacgacagggtgctggagaagctgaagaagacagcaacaggctggatgaccacaattaacggcaaggagctgaaggtggagggccagattacctactacaacagatacaagagacagaacgtagtcaaggacctgtccgtcgagctggatagactgagcgaagaatctgtgaacaacgacatctcctcctggacaaagggcagaagcggagaagctctgagcctcctgaagaaaagattctcccatagacccgtgcaggagaagttcgtgtgcctgaactgcggcttcgagacacacgcagccgagcaagccgccctgaacatcgccagatcctggctgttcctgcggagccaggagtacaagaaataccagacaaacaagacaaccggcaacaccgataagagagccttcgtcgagacctggcagtccttttaccggaagaagcttaaggaggtgtggaaacctgccgtgcggtctggcggatctggcggaggctccaccagccccaagaaaaagagaaaagtctaagctgccttctgcggggcttgccttctggccatgcccttcttctctcccttgcacctgtacctcttggtctttgaataaagcctgagtaggaaggctagcaaaaaaaaaaaaaaaaaaaaaaaaaaaaaaaaaaaaaaaaaaaaaaaaaaaaaaaaaaaaaaaaaaaaaaaaaaaaaaaagcccagccggctccccaacctctaccgaggagggcacctctgagtccgccacccccgagagcggccctggcacctccaccgagcccagcgagggcagcgcacccggcagccctgccggcagccccacctccacagaggagggaaccagcaccgagcccagcgaaggcagcgccccaggcaccagcaccgagcctagtgagcaggagattaaacggatcaacaagatcagaagaagacttgtgaaagacagcaacaccaagaaggccggcaagacaggccccatgaaaaccctgctggttagagtgatgacacccgatctgagagagcggctggaaaacctgagaaagaagcctgaaaatatcccccagcccatcagcaatacatctagagccaacctgaataagctgctgaccgattacaccgaaatgaagaaggcgatcctgcatgtgtactgggaagagttccagaaggaccctgtgggcctgatgagccgggtggcccagcctgccagcaagaagatcgatcagaacaagctgaaacctgagatggacgagaagggcaacctgaccaccgccggctttgcctgctctcagtgtggccagcccctgttcgtgtacaagctggagcaggtgtctgagaagggcaaggcttacaccaactacttcggacggtgcaatgtggccgagcacgaaaagctgatcctgctggcccagctgaagcccgagaaggatagcgacgaagccgtgacatatagcctgggaaagtttgggcagagggccctggatttctacagcattcatgtgaccaaggagtccacccaccccgtgaagcccctggcccagatcgccggaaacagatacgcctccggacctgtgggaaaggccctgagcgacgcatgtatgggcacaatcgcctccttcctgtctaagtaccaggacatcatcatcgaacaccagaaggtggtgaagggcaaccagaagagactggagagcctgcgggagctggccggcaaggaaaacctggaataccctagcgtgaccctgccacctcagcctcacaccaaggagggcgttgatgcctacaacgaagtgatcgcccgggtgcgaatgtgggtgaacctgaacctgtggcagaagctgaagctaagcagagatgatgccaagcctctgctgagactgaagggattcccttcctttcctctggtcgagagacaggccaacgaagtggactggtgggacatggtgtgtaacgtgaagaagctgatcaacgagaaaaaggaggatggcaaggtgttttggcagaatctggctggctacaagagacaggaagccctgagaccatacctgagcagcgaggaagatcggaagaagggaaagaaattcgctcggtaccagctgggcgacctgctgctgcacctggaaaagaagcacggcgaggactggggaaaggtgtacgacgaggcctgggagcggattgacaagaaagtggaaggcctgagcaagcacatcaagctggaagaggaacggagaagcgaggacgcccagagcaaggccgccctgaccgactggctgcgggctaaggccagcttcgtgatcgagggcctgaaggaggccgacaaggacgagttctgcagatgcgagctgaagctgcagaagtggtacggggacctgcggggaaagcccttcgccatcgaagccgagaacagcatcctggacatcagcggcttcagcaagcagtacaactgtgccttcatctggcagaaggacggcgtgaagaagctgaacctgtacctgatcatcaactacttcaagggcggcaagctgcggttcaagaagatcaaacctgaagccttcgaagccaacagattctacaccgtgatcaacaaaaagagcggcgagatcgtgcccatggaggtgaacttcaacttcgacgaccccaacctgatcatcctgcctctggcctttggcaagagacagggcagagaattcatctggaacgacctgctgtccctggaaaccggcagcctgaagctggccaacggaagagtgatcgagaagacactgtacaacagaagaacccggcaggatgagcctgccctgttcgtggccctgaccttcgagcggcgggaggtcctggactcctccaatatcaaaccaatgaacctgatcggcgtggcaagaggcgaaaacatccccgccgtgatcgccctgaccgaccccgagggctgcccactgagccggtttaaggatagcctgggaaacccaacccacatcctgagaatcggcgagagctataaggagaagcagcggaccatccaggccaagaaggaggtggagcagcggagagccggcggctacagccggaagtacgccagcaaagccaagaatctggcagacgatatggtgagaaacaccgctagagatctgctgtactacgccgtgacccaggatgccatgctgatcttcgccaacctgagccggggcttcggccggcagggcaagcggaccttcatggccgagagacagtacacacggatggaggactggctgaccgccaagctggcctacgagggcctgagcaagacctacctgtccaagacactggcccagtacacctccaagacatgcagcaactgtgggtttaccatcaccagcgccgactacgacagggtgctggagaagctgaagaagacagcaacaggctggatgaccacaattaacggcaaggagctgaaggtggagggccagattacctactacaacagatacaagagacagaacgtagtcaaggacctgtccgtcgagctggatagactgagcgaagaatctgtgaacaacgacatctcctcctggacaaagggcagaagcggagaagctctgagcctcctgaagaaaagattctcccatagacccgtgcaggagaagttcgtgtgcctgaactgcggcttcgagacacacgcagccgagcaagccgccctgaacatcgccagatcctggctgttcctgcggagccaggagtacaagaaataccagacaaacaagacaaccggcaacaccgataagagagccttcgtcgagacctggcagtccttttaccggaagaagcttaaggaggtgtggaaacctgccgtgcggtctggcggatctggcggaggctccaccagccccaagaaaaagagaaaagtctaagctgccttctgcggggcttgccttctggccatgcccttcttctctcccttgcacctgtacctcttggtctttgaataaagcctgagtaggaaggctagcaaaaaaaaaaaaaaaaaaaaaaaaaaaaaaaaaaaaaaaaaaaaaaaaaaaaaaaaaaaaaaaaaaaaaaaaaaaaaaaa

SEQ ID NO: 9044 - RNA, 8787 nt, synthetic construct
  source 1..8787: mol_type = other RNA
aggaaataagagagaaaagaagagtaagaagaaatataagagccaccatggcccctaagaagaagcgtaaagtgagccggatgaaccacgaccaggagttcgacccccctaaggtgtaccctcccgtccccgccgagaagagaaagcccatccgggtcctgagcctgttcgatggcatcgccaccggtctgctggtgctgaaggacctgggcatccaggtggataggtacattgcctccgaggtgtgcgaggactccatcaccgtgggaatggtgcgtcatcagggcaagatcatgtacgtgggcgacgtgcggagcgtgacacagaagcatatccaggagtggggccctttcgacctggtgatcggcggcagcccttgcaatgacctgagcatcgtgaacccagcccggaagggcctgtacgagggaaccggcagactgttcttcgagttttacagactgctgcacgacgcccggcctaaggaaggcgacgaccggcccttcttttggctgttcgagaatgtggtggccatgggagtcagcgacaagcgggatattagccggttcctggagagcaaccccgtgatgatcgatgccaaggaagtgagcgccgcccaccgggccagatacttctggggcaatctgcctggcatgaacagacccctggccagcaccgtgaacgacaagctggagctgcaggagtgcctggagcacggccggatcgccaagttcagcaaggtgagaaccatcaccacccgaagcaacagcatcaaacaaggcaaggaccagcactttcctgtgttcatgaacgagaaggaggacatcctgtggtgtaccgagatggagagagtgttcgggttcccagtccactacacagatgtcagcaacatgtctagactggccagacagagactgctgggaagaagctggtccgtccctgtgatcagacacctgttcgcccctctgaaggagtacttcgcctgcgtgagcagcggcaacagcaacgccaacagccggggccccagcttctctagcggcctggtgccactgtccctgagagggagccacatgggccccatggagatctacaaaaccgtgagcgcctggaagcggcagcctgtgcgcgtgctgagcctgtttcggaatatcgataaagtcctgaaaagcctgggattcctggagagcggctctggctccggcggtggcaccctgaagtacgtggaggatgtgacaaacgtggtcagacgggatgtggagaagtggggccccttcgatctggtgtacggcagcacccaacccctgggcagctcttgtgaccggtgccctggctggtacatgtttcagttccaccggatcctgcagtacgccctgccgagacaggagtcccagcggccattcttttggattttcatggacaacttgctgctgaccgaggatgaccaggaaactaccactcggttcctgcagaccgaagccgtgaccctgcaggacgtgagaggccgggactaccagaacgccatgcgggtgtggtccaacatccctggactgaaaagcaagcacgcacctctgacccctaaagaagaggagtacctgcaggcccaggtgcggagcagaagcaagctggacgcccctaaggtggatctgctggtgaagaattgcctcctgcccctgagagagtacttcaagtatttcagccagaatagtctgcccctgggaggcagcggcggcggccaggccgaggtgaccttcgaggacgtggccgtgctgttcagcagggaggagtggggcaggctgggccccgcccagaggggcctgtacagggacgtgatgctggagacctacaggaacctggtgagcctgggcgccggccccgccggccccaagcccggcgtgatcacccagctggagaggggcgacgagccctgggtgctggacgcccagggcgccgagggcaaggagaggctgagggtgagcggcggcccaagcagcggcgcccctcctcccagcggcggcaggcggcccaagcagcggcgcccctcctcccagcggcggcagcccagccggctccccaacctctaccgaggagggcacctctgagtccgccacccccgagagcggccctggcacctccaccgagcccagcgagggcagcgcacccggcagccctgccggcagccccacctccacagaggagggaaccagcaccgagcccagcgaaggcagcgccccaggcaccagcaccgagcctagtgagcaggagattaaacggatcaacaagatcagaagaagacttgtgaaagacagcaacaccaagaaggccggcaagacaggccccatgaaaaccctgctggttagagtgatgacacccgatctgagagagcggctggaaaacctgagaaagaagcctgaaaatatcccccagcccatcagcaatacatctagagccaacctgaataagctgctgaccgattacaccgaaatgaagaaggcgatcctgcatgtgtactgggaagagttccagaaggaccctgtgggcctgatgagccgggtggcccagcctgccagcaagaagatcgatcagaacaagctgaaacctgagatggacgagaagggcaacctgaccaccgccggctttgcctgctctcagtgtggccagcccctgttcgtgtacaagctggagcaggtgtctgagaagggcaaggcttacaccaactacttcggacggtgcaatgtggccgagcacgaaaagctgatcctgctggcccagctgaagcccgagaaggatagcgacgaagccgtgacatatagcctgggaaagtttgggcagagggccctggatttctacagcattcatgtgaccaaggagtccacccaccccgtgaagcccctggcccagatcgccggaaacagatacgcctccggacctgtgggaaaggccctgagcgacgcatgtatgggcacaatcgcctccttcctgtctaagtaccaggacatcatcatcgaacaccagaaggtggtgaagggcaaccagaagagactggagagcctgcgggagctggccggcaaggaaaacctggaataccctagcgtgaccctgccacctcagcctcacaccaaggagggcgttgatgcctacaacgaagtgatcgcccgggtgcgaatgtgggtgaacctgaacctgtggcagaagctgaagctaagcagagatgatgccaagcctctgctgagactgaagggattcccttcctttcctctggtcgagagacaggccaacgaagtggactggtgggacatggtgtgtaacgtgaagaagctgatcaacgagaaaaaggaggatggcaaggtgttttggcagaatctggctggctacaagagacaggaagccctgagaccatacctgagcagcgaggaagatcggaagaagggaaagaaattcgctcggtaccagctgggcgacctgctgctgcacctggaaaagaagcacggcgaggactggggaaaggtgtacgacgaggcctgggagcggattgacaagaaagtggaaggcctgagcaagcacatcaagctggaagaggaacggagaagcgaggacgcccagagcaaggccgccctgaccgactggctgcgggctaaggccagcttcgtgatcgagggcctgaaggaggccgacaaggacgagttctgcagatgcgagctgaagctgcagaagtggtacggggacctgcggggaaagcccttcgccatcgaagccgagaacagcatcctggacatcagcggcttcagcaagcagtacaactgtgccttcatctggcagaaggacggcgtgaagaagctgaacctgtacctgatcatcaactacttcaagggcggcaagctgcggttcaagaagatcaaacctgaagccttcgaagccaacagattctacaccgtgatcaacaaaaagagcggcgagatcgtgcccatggaggtgaacttcaacttcgacgaccccaacctgatcatcctgcctctggcctttggcaagagacagggcagagaattcatctggaacgacctgctgtccctggaaaccggcagcctgaagctggccaacggaagagtgatcgagaagacactgtacaacagaagaacccggcaggatgagcctgccctgttcgtggccctgaccttcgagcggcgggaggtcctggactcctccaatatcaaaccaatgaacctgatcggcgtggcaagaggcgaaaacatccccgccgtgatcgccctgaccgaccccgagggctgcccactgagccggtttaaggatagcctgggaaacccaacccacatcctgagaatcggcgagagctataaggagaagcagcggaccatccaggccaagaaggaggtggagcagcggagagccggcggctacagccggaagtacgccagcaaagccaagaatctggcagacgatatggtgagaaacaccgctagagatctgctgtactacgccgtgacccaggatgccatgctgatcttcgccaacctgagccggggcttcggccggcagggcaagcggaccttcatggccgagagacagtacacacggatggaggactggctgaccgccaagctggcctacgagggcctgagcaagacctacctgtccaagacactggcccagtacacctccaagacatgcagcaactgtgggtttaccatcaccagcgccgactacgacagggtgctggagaagctgaagaagacagcaacaggctggatgaccacaattaacggcaaggagctgaaggtggagggccagattacctactacaacagatacaagagacagaacgtagtcaaggacctgtccgtcgagctggatagactgagcgaagaatctgtgaacaacgacatctcctcctggacaaagggcagaagcggagaagctctgagcctcctgaagaaaagattctcccatagacccgtgcaggagaagttcgtgtgcctgaactgcggcttcgagacacacgcagccgagcaagccgccctgaacatcgccagatcctggctgttcctgcggagccaggagtacaagaaataccagacaaacaagacaaccggcaacaccgataagagagccttcgtcgagacctggcagtccttttaccggaagaagcttaaggaggtgtggaaacctgccgtgcggtctggcggatctggcggaggctccaccagccccaagaaaaagagaaaagtctaagctgccttctgcggggcttgccttctggccatgcccttcttctctcccttgcacctgtacctcttggtctttgaataaagcctgagtaggaaggctagcaaaaaaaaaaaaaaaaaaaaaaaaaaaaaaaaaaaaaaaaaaaaaaaaaaaaaaaaaaaaaaaaaaaaaaaaaaaaaaaagcccagccggctccccaacctctaccgaggagggcacctctgagtccgccacccccgagagcggccctggcacctccaccgagcccagcgagggcagcgcacccggcagccctgccggcagccccacctccacagaggagggaaccagcaccgagcccagcgaaggcagcgccccaggcaccagcaccgagcctagtgagcaggagattaaacggatcaacaagatcagaagaagacttgtgaaagacagcaacaccaagaaggccggcaagacaggccccatgaaaaccctgctggttagagtgatgacacccgatctgagagagcggctggaaaacctgagaaagaagcctgaaaatatcccccagcccatcagcaatacatctagagccaacctgaataagctgctgaccgattacaccgaaatgaagaaggcgatcctgcatgtgtactgggaagagttccagaaggaccctgtgggcctgatgagccgggtggcccagcctgccagcaagaagatcgatcagaacaagctgaaacctgagatggacgagaagggcaacctgaccaccgccggctttgcctgctctcagtgtggccagcccctgttcgtgtacaagctggagcaggtgtctgagaagggcaaggcttacaccaactacttcggacggtgcaatgtggccgagcacgaaaagctgatcctgctggcccagctgaagcccgagaaggatagcgacgaagccgtgacatatagcctgggaaagtttgggcagagggccctggatttctacagcattcatgtgaccaaggagtccacccaccccgtgaagcccctggcccagatcgccggaaacagatacgcctccggacctgtgggaaaggccctgagcgacgcatgtatgggcacaatcgcctccttcctgtctaagtaccaggacatcatcatcgaacaccagaaggtggtgaagggcaaccagaagagactggagagcctgcgggagctggccggcaaggaaaacctggaataccctagcgtgaccctgccacctcagcctcacaccaaggagggcgttgatgcctacaacgaagtgatcgcccgggtgcgaatgtgggtgaacctgaacctgtggcagaagctgaagctaagcagagatgatgccaagcctctgctgagactgaagggattcccttcctttcctctggtcgagagacaggccaacgaagtggactggtgggacatggtgtgtaacgtgaagaagctgatcaacgagaaaaaggaggatggcaaggtgttttggcagaatctggctggctacaagagacaggaagccctgagaccatacctgagcagcgaggaagatcggaagaagggaaagaaattcgctcggtaccagctgggcgacctgctgctgcacctggaaaagaagcacggcgaggactggggaaaggtgtacgacgaggcctgggagcggattgacaagaaagtggaaggcctgagcaagcacatcaagctggaagaggaacggagaagcgaggacgcccagagcaaggccgccctgaccgactggctgcgggctaaggccagcttcgtgatcgagggcctgaaggaggccgacaaggacgagttctgcagatgcgagctgaagctgcagaagtggtacggggacctgcggggaaagcccttcgccatcgaagccgagaacagcatcctggacatcagcggcttcagcaagcagtacaactgtgccttcatctggcagaaggacggcgtgaagaagctgaacctgtacctgatcatcaactacttcaagggcggcaagctgcggttcaagaagatcaaacctgaagccttcgaagccaacagattctacaccgtgatcaacaaaaagagcggcgagatcgtgcccatggaggtgaacttcaacttcgacgaccccaacctgatcatcctgcctctggcctttggcaagagacagggcagagaattcatctggaacgacctgctgtccctggaaaccggcagcctgaagctggccaacggaagagtgatcgagaagacactgtacaacagaagaacccggcaggatgagcctgccctgttcgtggccctgaccttcgagcggcgggaggtcctggactcctccaatatcaaaccaatgaacctgatcggcgtggcaagaggcgaaaacatccccgccgtgatcgccctgaccgaccccgagggctgcccactgagccggtttaaggatagcctgggaaacccaacccacatcctgagaatcggcgagagctataaggagaagcagcggaccatccaggccaagaaggaggtggagcagcggagagccggcggctacagccggaagtacgccagcaaagccaagaatctggcagacgatatggtgagaaacaccgctagagatctgctgtactacgccgtgacccaggatgccatgctgatcttcgccaacctgagccggggcttcggccggcagggcaagcggaccttcatggccgagagacagtacacacggatggaggactggctgaccgccaagctggcctacgagggcctgagcaagacctacctgtccaagacactggcccagtacacctccaagacatgcagcaactgtgggtttaccatcaccagcgccgactacgacagggtgctggagaagctgaagaagacagcaacaggctggatgaccacaattaacggcaaggagctgaaggtggagggccagattacctactacaacagatacaagagacagaacgtagtcaaggacctgtccgtcgagctggatagactgagcgaagaatctgtgaacaacgacatctcctcctggacaaagggcagaagcggagaagctctgagcctcctgaagaaaagattctcccatagacccgtgcaggagaagttcgtgtgcctgaactgcggcttcgagacacacgcagccgagcaagccgccctgaacatcgccagatcctggctgttcctgcggagccaggagtacaagaaataccagacaaacaagacaaccggcaacaccgataagagagccttcgtcgagacctggcagtccttttaccggaagaagcttaaggaggtgtggaaacctgccgtgcggtctggcggatctggcggaggctccaccagccccaagaaaaagagaaaagtctaagctgccttctgcggggcttgccttctggccatgcccttcttctctcccttgcacctgtacctcttggtctttgaataaagcctgagtaggaaggctagcaaaaaaaaaaaaaaaaaaaaaaaaaaaaaaaaaaaaaaaaaaaaaaaaaaaaaaaaaaaaaaaaaaaaaaaaaaaaaaaa

SEQ ID NO: 9045 - RNA, 8787 nt, synthetic construct
  source 1..8787: mol_type = other RNA
aggaaataagagagaaaagaagagtaagaagaaatataagagccaccatggcccctaagaagaagcgtaaagtgagccggatgaaccacgaccaggagttcgacccccctaaggtgtaccctcccgtccccgccgagaagagaaagcccatccgggtcctgagcctgttcgatggcatcgccaccggtctgctggtgctgaaggacctgggcatccaggtggataggtacattgcctccgaggtgtgcgaggactccatcaccgtgggaatggtgcgtcatcagggcaagatcatgtacgtgggcgacgtgcggagcgtgacacagaagcatatccaggagtggggccctttcgacctggtgatcggcggcagcccttgcaatgacctgagcatcgtgaacccagcccggaagggcctgtacgagggaaccggcagactgttcttcgagttttacagactgctgcacgacgcccggcctaaggaaggcgacgaccggcccttcttttggctgttcgagaatgtggtggccatgggagtcagcgacaagcgggatattagccggttcctggagagcaaccccgtgatgatcgatgccaaggaagtgagcgccgcccaccgggccagatacttctggggcaatctgcctggcatgaacagacccctggccagcaccgtgaacgacaagctggagctgcaggagtgcctggagcacggccggatcgccaagttcagcaaggtgagaaccatcaccacccgaagcaacagcatcaaacaaggcaaggaccagcactttcctgtgttcatgaacgagaaggaggacatcctgtggtgtaccgagatggagagagtgttcgggttcccagtccactacacagatgtcagcaacatgtctagactggccagacagagactgctgggaagaagctggtccgtccctgtgatcagacacctgttcgcccctctgaaggagtacttcgcctgcgtgagcagcggcaacagcaacgccaacagccggggccccagcttctctagcggcctggtgccactgtccctgagagggagccacatgggccccatggagatctacaaaaccgtgagcgcctggaagcggcagcctgtgcgcgtgctgagcctgtttcggaatatcgataaagtcctgaaaagcctgggattcctggagagcggctctggctccggcggtggcaccctgaagtacgtggaggatgtgacaaacgtggtcagacgggatgtggagaagtggggccccttcgatctggtgtacggcagcacccaacccctgggcagctcttgtgaccggtgccctggctggtacatgtttcagttccaccggatcctgcagtacgccctgccgagacaggagtcccagcggccattcttttggattttcatggacaacttgctgctgaccgaggatgaccaggaaactaccactcggttcctgcagaccgaagccgtgaccctgcaggacgtgagaggccgggactaccagaacgccatgcgggtgtggtccaacatccctggactgaaaagcaagcacgcacctctgacccctaaagaagaggagtacctgcaggcccaggtgcggagcagaagcaagctggacgcccctaaggtggatctgctggtgaagaattgcctcctgcccctgagagagtacttcaagtatttcagccagaatagtctgcccctgggaggcagcggcggcggcagccagggccccgtgagcttcgaggacgtggccgtggacttcacccaggaggagtggcagcagctggaccccgcccagaggaccctgtacagggacgtgatgctggagaactacagccacctggtgagcgtgggctaccccgtgagcaagcccggcgtgatcagcaagctggagcagggcgaggagccctggatcatgaagagggacatcagcaactggatctaccccgacagggagaccaggggcggcccaagcagcggcgcccctcctcccagcggcggcaggcggcccaagcagcggcgcccctcctcccagcggcggcagcccagccggctccccaacctctaccgaggagggcacctctgagtccgccacccccgagagcggccctggcacctccaccgagcccagcgagggcagcgcacccggcagccctgccggcagccccacctccacagaggagggaaccagcaccgagcccagcgaaggcagcgccccaggcaccagcaccgagcctagtgagcaggagattaaacggatcaacaagatcagaagaagacttgtgaaagacagcaacaccaagaaggccggcaagacaggccccatgaaaaccctgctggttagagtgatgacacccgatctgagagagcggctggaaaacctgagaaagaagcctgaaaatatcccccagcccatcagcaatacatctagagccaacctgaataagctgctgaccgattacaccgaaatgaagaaggcgatcctgcatgtgtactgggaagagttccagaaggaccctgtgggcctgatgagccgggtggcccagcctgccagcaagaagatcgatcagaacaagctgaaacctgagatggacgagaagggcaacctgaccaccgccggctttgcctgctctcagtgtggccagcccctgttcgtgtacaagctggagcaggtgtctgagaagggcaaggcttacaccaactacttcggacggtgcaatgtggccgagcacgaaaagctgatcctgctggcccagctgaagcccgagaaggatagcgacgaagccgtgacatatagcctgggaaagtttgggcagagggccctggatttctacagcattcatgtgaccaaggagtccacccaccccgtgaagcccctggcccagatcgccggaaacagatacgcctccggacctgtgggaaaggccctgagcgacgcatgtatgggcacaatcgcctccttcctgtctaagtaccaggacatcatcatcgaacaccagaaggtggtgaagggcaaccagaagagactggagagcctgcgggagctggccggcaaggaaaacctggaataccctagcgtgaccctgccacctcagcctcacaccaaggagggcgttgatgcctacaacgaagtgatcgcccgggtgcgaatgtgggtgaacctgaacctgtggcagaagctgaagctaagcagagatgatgccaagcctctgctgagactgaagggattcccttcctttcctctggtcgagagacaggccaacgaagtggactggtgggacatggtgtgtaacgtgaagaagctgatcaacgagaaaaaggaggatggcaaggtgttttggcagaatctggctggctacaagagacaggaagccctgagaccatacctgagcagcgaggaagatcggaagaagggaaagaaattcgctcggtaccagctgggcgacctgctgctgcacctggaaaagaagcacggcgaggactggggaaaggtgtacgacgaggcctgggagcggattgacaagaaagtggaaggcctgagcaagcacatcaagctggaagaggaacggagaagcgaggacgcccagagcaaggccgccctgaccgactggctgcgggctaaggccagcttcgtgatcgagggcctgaaggaggccgacaaggacgagttctgcagatgcgagctgaagctgcagaagtggtacggggacctgcggggaaagcccttcgccatcgaagccgagaacagcatcctggacatcagcggcttcagcaagcagtacaactgtgccttcatctggcagaaggacggcgtgaagaagctgaacctgtacctgatcatcaactacttcaagggcggcaagctgcggttcaagaagatcaaacctgaagccttcgaagccaacagattctacaccgtgatcaacaaaaagagcggcgagatcgtgcccatggaggtgaacttcaacttcgacgaccccaacctgatcatcctgcctctggcctttggcaagagacagggcagagaattcatctggaacgacctgctgtccctggaaaccggcagcctgaagctggccaacggaagagtgatcgagaagacactgtacaacagaagaacccggcaggatgagcctgccctgttcgtggccctgaccttcgagcggcgggaggtcctggactcctccaatatcaaaccaatgaacctgatcggcgtggcaagaggcgaaaacatccccgccgtgatcgccctgaccgaccccgagggctgcccactgagccggtttaaggatagcctgggaaacccaacccacatcctgagaatcggcgagagctataaggagaagcagcggaccatccaggccaagaaggaggtggagcagcggagagccggcggctacagccggaagtacgccagcaaagccaagaatctggcagacgatatggtgagaaacaccgctagagatctgctgtactacgccgtgacccaggatgccatgctgatcttcgccaacctgagccggggcttcggccggcagggcaagcggaccttcatggccgagagacagtacacacggatggaggactggctgaccgccaagctggcctacgagggcctgagcaagacctacctgtccaagacactggcccagtacacctccaagacatgcagcaactgtgggtttaccatcaccagcgccgactacgacagggtgctggagaagctgaagaagacagcaacaggctggatgaccacaattaacggcaaggagctgaaggtggagggccagattacctactacaacagatacaagagacagaacgtagtcaaggacctgtccgtcgagctggatagactgagcgaagaatctgtgaacaacgacatctcctcctggacaaagggcagaagcggagaagctctgagcctcctgaagaaaagattctcccatagacccgtgcaggagaagttcgtgtgcctgaactgcggcttcgagacacacgcagccgagcaagccgccctgaacatcgccagatcctggctgttcctgcggagccaggagtacaagaaataccagacaaacaagacaaccggcaacaccgataagagagccttcgtcgagacctggcagtccttttaccggaagaagcttaaggaggtgtggaaacctgccgtgcggtctggcggatctggcggaggctccaccagccccaagaaaaagagaaaagtctaagctgccttctgcggggcttgccttctggccatgcccttcttctctcccttgcacctgtacctcttggtctttgaataaagcctgagtaggaaggctagcaaaaaaaaaaaaaaaaaaaaaaaaaaaaaaaaaaaaaaaaaaaaaaaaaaaaaaaaaaaaaaaaaaaaaaaaaaaaaaaagcccagccggctccccaacctctaccgaggagggcacctctgagtccgccacccccgagagcggccctggcacctccaccgagcccagcgagggcagcgcacccggcagccctgccggcagccccacctccacagaggagggaaccagcaccgagcccagcgaaggcagcgccccaggcaccagcaccgagcctagtgagcaggagattaaacggatcaacaagatcagaagaagacttgtgaaagacagcaacaccaagaaggccggcaagacaggccccatgaaaaccctgctggttagagtgatgacacccgatctgagagagcggctggaaaacctgagaaagaagcctgaaaatatcccccagcccatcagcaatacatctagagccaacctgaataagctgctgaccgattacaccgaaatgaagaaggcgatcctgcatgtgtactgggaagagttccagaaggaccctgtgggcctgatgagccgggtggcccagcctgccagcaagaagatcgatcagaacaagctgaaacctgagatggacgagaagggcaacctgaccaccgccggctttgcctgctctcagtgtggccagcccctgttcgtgtacaagctggagcaggtgtctgagaagggcaaggcttacaccaactacttcggacggtgcaatgtggccgagcacgaaaagctgatcctgctggcccagctgaagcccgagaaggatagcgacgaagccgtgacatatagcctgggaaagtttgggcagagggccctggatttctacagcattcatgtgaccaaggagtccacccaccccgtgaagcccctggcccagatcgccggaaacagatacgcctccggacctgtgggaaaggccctgagcgacgcatgtatgggcacaatcgcctccttcctgtctaagtaccaggacatcatcatcgaacaccagaaggtggtgaagggcaaccagaagagactggagagcctgcgggagctggccggcaaggaaaacctggaataccctagcgtgaccctgccacctcagcctcacaccaaggagggcgttgatgcctacaacgaagtgatcgcccgggtgcgaatgtgggtgaacctgaacctgtggcagaagctgaagctaagcagagatgatgccaagcctctgctgagactgaagggattcccttcctttcctctggtcgagagacaggccaacgaagtggactggtgggacatggtgtgtaacgtgaagaagctgatcaacgagaaaaaggaggatggcaaggtgttttggcagaatctggctggctacaagagacaggaagccctgagaccatacctgagcagcgaggaagatcggaagaagggaaagaaattcgctcggtaccagctgggcgacctgctgctgcacctggaaaagaagcacggcgaggactggggaaaggtgtacgacgaggcctgggagcggattgacaagaaagtggaaggcctgagcaagcacatcaagctggaagaggaacggagaagcgaggacgcccagagcaaggccgccctgaccgactggctgcgggctaaggccagcttcgtgatcgagggcctgaaggaggccgacaaggacgagttctgcagatgcgagctgaagctgcagaagtggtacggggacctgcggggaaagcccttcgccatcgaagccgagaacagcatcctggacatcagcggcttcagcaagcagtacaactgtgccttcatctggcagaaggacggcgtgaagaagctgaacctgtacctgatcatcaactacttcaagggcggcaagctgcggttcaagaagatcaaacctgaagccttcgaagccaacagattctacaccgtgatcaacaaaaagagcggcgagatcgtgcccatggaggtgaacttcaacttcgacgaccccaacctgatcatcctgcctctggcctttggcaagagacagggcagagaattcatctggaacgacctgctgtccctggaaaccggcagcctgaagctggccaacggaagagtgatcgagaagacactgtacaacagaagaacccggcaggatgagcctgccctgttcgtggccctgaccttcgagcggcgggaggtcctggactcctccaatatcaaaccaatgaacctgatcggcgtggcaagaggcgaaaacatccccgccgtgatcgccctgaccgaccccgagggctgcccactgagccggtttaaggatagcctgggaaacccaacccacatcctgagaatcggcgagagctataaggagaagcagcggaccatccaggccaagaaggaggtggagcagcggagagccggcggctacagccggaagtacgccagcaaagccaagaatctggcagacgatatggtgagaaacaccgctagagatctgctgtactacgccgtgacccaggatgccatgctgatcttcgccaacctgagccggggcttcggccggcagggcaagcggaccttcatggccgagagacagtacacacggatggaggactggctgaccgccaagctggcctacgagggcctgagcaagacctacctgtccaagacactggcccagtacacctccaagacatgcagcaactgtgggtttaccatcaccagcgccgactacgacagggtgctggagaagctgaagaagacagcaacaggctggatgaccacaattaacggcaaggagctgaaggtggagggccagattacctactacaacagatacaagagacagaacgtagtcaaggacctgtccgtcgagctggatagactgagcgaagaatctgtgaacaacgacatctcctcctggacaaagggcagaagcggagaagctctgagcctcctgaagaaaagattctcccatagacccgtgcaggagaagttcgtgtgcctgaactgcggcttcgagacacacgcagccgagcaagccgccctgaacatcgccagatcctggctgttcctgcggagccaggagtacaagaaataccagacaaacaagacaaccggcaacaccgataagagagccttcgtcgagacctggcagtccttttaccggaagaagcttaaggaggtgtggaaacctgccgtgcggtctggcggatctggcggaggctccaccagccccaagaaaaagagaaaagtctaagctgccttctgcggggcttgccttctggccatgcccttcttctctcccttgcacctgtacctcttggtctttgaataaagcctgagtaggaaggctagcaaaaaaaaaaaaaaaaaaaaaaaaaaaaaaaaaaaaaaaaaaaaaaaaaaaaaaaaaaaaaaaaaaaaaaaaaaaaaaaa

SEQ ID NO: 9046 - RNA, 8787 nt, synthetic construct
  source 1..8787: mol_type = other RNA
aggaaataagagagaaaagaagagtaagaagaaatataagagccaccatggcccctaagaagaagcgtaaagtgagccggatgaaccacgaccaggagttcgacccccctaaggtgtaccctcccgtccccgccgagaagagaaagcccatccgggtcctgagcctgttcgatggcatcgccaccggtctgctggtgctgaaggacctgggcatccaggtggataggtacattgcctccgaggtgtgcgaggactccatcaccgtgggaatggtgcgtcatcagggcaagatcatgtacgtgggcgacgtgcggagcgtgacacagaagcatatccaggagtggggccctttcgacctggtgatcggcggcagcccttgcaatgacctgagcatcgtgaacccagcccggaagggcctgtacgagggaaccggcagactgttcttcgagttttacagactgctgcacgacgcccggcctaaggaaggcgacgaccggcccttcttttggctgttcgagaatgtggtggccatgggagtcagcgacaagcgggatattagccggttcctggagagcaaccccgtgatgatcgatgccaaggaagtgagcgccgcccaccgggccagatacttctggggcaatctgcctggcatgaacagacccctggccagcaccgtgaacgacaagctggagctgcaggagtgcctggagcacggccggatcgccaagttcagcaaggtgagaaccatcaccacccgaagcaacagcatcaaacaaggcaaggaccagcactttcctgtgttcatgaacgagaaggaggacatcctgtggtgtaccgagatggagagagtgttcgggttcccagtccactacacagatgtcagcaacatgtctagactggccagacagagactgctgggaagaagctggtccgtccctgtgatcagacacctgttcgcccctctgaaggagtacttcgcctgcgtgagcagcggcaacagcaacgccaacagccggggccccagcttctctagcggcctggtgccactgtccctgagagggagccacatgggccccatggagatctacaaaaccgtgagcgcctggaagcggcagcctgtgcgcgtgctgagcctgtttcggaatatcgataaagtcctgaaaagcctgggattcctggagagcggctctggctccggcggtggcaccctgaagtacgtggaggatgtgacaaacgtggtcagacgggatgtggagaagtggggccccttcgatctggtgtacggcagcacccaacccctgggcagctcttgtgaccggtgccctggctggtacatgtttcagttccaccggatcctgcagtacgccctgccgagacaggagtcccagcggccattcttttggattttcatggacaacttgctgctgaccgaggatgaccaggaaactaccactcggttcctgcagaccgaagccgtgaccctgcaggacgtgagaggccgggactaccagaacgccatgcgggtgtggtccaacatccctggactgaaaagcaagcacgcacctctgacccctaaagaagaggagtacctgcaggcccaggtgcggagcagaagcaagctggacgcccctaaggtggatctgctggtgaagaattgcctcctgcccctgagagagtacttcaagtatttcagccagaatagtctgcccctgggaggcagcggcggcggcagccagggcctggtgaccttcggcgacgtggccatcgacttcagccaggaggagtgggagtggctgagccccatccagaggaacctgtacaggaaggtgatgctggagaactacaggaacctggccagcctgggcctgtgcgtgagcaagcccgacgtgatcagcctgctggagcagggcaaggagccctggaccgtgaagaggaagatgaccagggccggctgccccgacctgaaggccgtgggcggcccaagcagcggcgcccctcctcccagcggcggcaggcggcccaagcagcggcgcccctcctcccagcggcggcagcccagccggctccccaacctctaccgaggagggcacctctgagtccgccacccccgagagcggccctggcacctccaccgagcccagcgagggcagcgcacccggcagccctgccggcagccccacctccacagaggagggaaccagcaccgagcccagcgaaggcagcgccccaggcaccagcaccgagcctagtgagcaggagattaaacggatcaacaagatcagaagaagacttgtgaaagacagcaacaccaagaaggccggcaagacaggccccatgaaaaccctgctggttagagtgatgacacccgatctgagagagcggctggaaaacctgagaaagaagcctgaaaatatcccccagcccatcagcaatacatctagagccaacctgaataagctgctgaccgattacaccgaaatgaagaaggcgatcctgcatgtgtactgggaagagttccagaaggaccctgtgggcctgatgagccgggtggcccagcctgccagcaagaagatcgatcagaacaagctgaaacctgagatggacgagaagggcaacctgaccaccgccggctttgcctgctctcagtgtggccagcccctgttcgtgtacaagctggagcaggtgtctgagaagggcaaggcttacaccaactacttcggacggtgcaatgtggccgagcacgaaaagctgatcctgctggcccagctgaagcccgagaaggatagcgacgaagccgtgacatatagcctgggaaagtttgggcagagggccctggatttctacagcattcatgtgaccaaggagtccacccaccccgtgaagcccctggcccagatcgccggaaacagatacgcctccggacctgtgggaaaggccctgagcgacgcatgtatgggcacaatcgcctccttcctgtctaagtaccaggacatcatcatcgaacaccagaaggtggtgaagggcaaccagaagagactggagagcctgcgggagctggccggcaaggaaaacctggaataccctagcgtgaccctgccacctcagcctcacaccaaggagggcgttgatgcctacaacgaagtgatcgcccgggtgcgaatgtgggtgaacctgaacctgtggcagaagctgaagctaagcagagatgatgccaagcctctgctgagactgaagggattcccttcctttcctctggtcgagagacaggccaacgaagtggactggtgggacatggtgtgtaacgtgaagaagctgatcaacgagaaaaaggaggatggcaaggtgttttggcagaatctggctggctacaagagacaggaagccctgagaccatacctgagcagcgaggaagatcggaagaagggaaagaaattcgctcggtaccagctgggcgacctgctgctgcacctggaaaagaagcacggcgaggactggggaaaggtgtacgacgaggcctgggagcggattgacaagaaagtggaaggcctgagcaagcacatcaagctggaagaggaacggagaagcgaggacgcccagagcaaggccgccctgaccgactggctgcgggctaaggccagcttcgtgatcgagggcctgaaggaggccgacaaggacgagttctgcagatgcgagctgaagctgcagaagtggtacggggacctgcggggaaagcccttcgccatcgaagccgagaacagcatcctggacatcagcggcttcagcaagcagtacaactgtgccttcatctggcagaaggacggcgtgaagaagctgaacctgtacctgatcatcaactacttcaagggcggcaagctgcggttcaagaagatcaaacctgaagccttcgaagccaacagattctacaccgtgatcaacaaaaagagcggcgagatcgtgcccatggaggtgaacttcaacttcgacgaccccaacctgatcatcctgcctctggcctttggcaagagacagggcagagaattcatctggaacgacctgctgtccctggaaaccggcagcctgaagctggccaacggaagagtgatcgagaagacactgtacaacagaagaacccggcaggatgagcctgccctgttcgtggccctgaccttcgagcggcgggaggtcctggactcctccaatatcaaaccaatgaacctgatcggcgtggcaagaggcgaaaacatccccgccgtgatcgccctgaccgaccccgagggctgcccactgagccggtttaaggatagcctgggaaacccaacccacatcctgagaatcggcgagagctataaggagaagcagcggaccatccaggccaagaaggaggtggagcagcggagagccggcggctacagccggaagtacgccagcaaagccaagaatctggcagacgatatggtgagaaacaccgctagagatctgctgtactacgccgtgacccaggatgccatgctgatcttcgccaacctgagccggggcttcggccggcagggcaagcggaccttcatggccgagagacagtacacacggatggaggactggctgaccgccaagctggcctacgagggcctgagcaagacctacctgtccaagacactggcccagtacacctccaagacatgcagcaactgtgggtttaccatcaccagcgccgactacgacagggtgctggagaagctgaagaagacagcaacaggctggatgaccacaattaacggcaaggagctgaaggtggagggccagattacctactacaacagatacaagagacagaacgtagtcaaggacctgtccgtcgagctggatagactgagcgaagaatctgtgaacaacgacatctcctcctggacaaagggcagaagcggagaagctctgagcctcctgaagaaaagattctcccatagacccgtgcaggagaagttcgtgtgcctgaactgcggcttcgagacacacgcagccgagcaagccgccctgaacatcgccagatcctggctgttcctgcggagccaggagtacaagaaataccagacaaacaagacaaccggcaacaccgataagagagccttcgtcgagacctggcagtccttttaccggaagaagcttaaggaggtgtggaaacctgccgtgcggtctggcggatctggcggaggctccaccagccccaagaaaaagagaaaagtctaagctgccttctgcggggcttgccttctggccatgcccttcttctctcccttgcacctgtacctcttggtctttgaataaagcctgagtaggaaggctagcaaaaaaaaaaaaaaaaaaaaaaaaaaaaaaaaaaaaaaaaaaaaaaaaaaaaaaaaaaaaaaaaaaaaaaaaaaaaaaaagcccagccggctccccaacctctaccgaggagggcacctctgagtccgccacccccgagagcggccctggcacctccaccgagcccagcgagggcagcgcacccggcagccctgccggcagccccacctccacagaggagggaaccagcaccgagcccagcgaaggcagcgccccaggcaccagcaccgagcctagtgagcaggagattaaacggatcaacaagatcagaagaagacttgtgaaagacagcaacaccaagaaggccggcaagacaggccccatgaaaaccctgctggttagagtgatgacacccgatctgagagagcggctggaaaacctgagaaagaagcctgaaaatatcccccagcccatcagcaatacatctagagccaacctgaataagctgctgaccgattacaccgaaatgaagaaggcgatcctgcatgtgtactgggaagagttccagaaggaccctgtgggcctgatgagccgggtggcccagcctgccagcaagaagatcgatcagaacaagctgaaacctgagatggacgagaagggcaacctgaccaccgccggctttgcctgctctcagtgtggccagcccctgttcgtgtacaagctggagcaggtgtctgagaagggcaaggcttacaccaactacttcggacggtgcaatgtggccgagcacgaaaagctgatcctgctggcccagctgaagcccgagaaggatagcgacgaagccgtgacatatagcctgggaaagtttgggcagagggccctggatttctacagcattcatgtgaccaaggagtccacccaccccgtgaagcccctggcccagatcgccggaaacagatacgcctccggacctgtgggaaaggccctgagcgacgcatgtatgggcacaatcgcctccttcctgtctaagtaccaggacatcatcatcgaacaccagaaggtggtgaagggcaaccagaagagactggagagcctgcgggagctggccggcaaggaaaacctggaataccctagcgtgaccctgccacctcagcctcacaccaaggagggcgttgatgcctacaacgaagtgatcgcccgggtgcgaatgtgggtgaacctgaacctgtggcagaagctgaagctaagcagagatgatgccaagcctctgctgagactgaagggattcccttcctttcctctggtcgagagacaggccaacgaagtggactggtgggacatggtgtgtaacgtgaagaagctgatcaacgagaaaaaggaggatggcaaggtgttttggcagaatctggctggctacaagagacaggaagccctgagaccatacctgagcagcgaggaagatcggaagaagggaaagaaattcgctcggtaccagctgggcgacctgctgctgcacctggaaaagaagcacggcgaggactggggaaaggtgtacgacgaggcctgggagcggattgacaagaaagtggaaggcctgagcaagcacatcaagctggaagaggaacggagaagcgaggacgcccagagcaaggccgccctgaccgactggctgcgggctaaggccagcttcgtgatcgagggcctgaaggaggccgacaaggacgagttctgcagatgcgagctgaagctgcagaagtggtacggggacctgcggggaaagcccttcgccatcgaagccgagaacagcatcctggacatcagcggcttcagcaagcagtacaactgtgccttcatctggcagaaggacggcgtgaagaagctgaacctgtacctgatcatcaactacttcaagggcggcaagctgcggttcaagaagatcaaacctgaagccttcgaagccaacagattctacaccgtgatcaacaaaaagagcggcgagatcgtgcccatggaggtgaacttcaacttcgacgaccccaacctgatcatcctgcctctggcctttggcaagagacagggcagagaattcatctggaacgacctgctgtccctggaaaccggcagcctgaagctggccaacggaagagtgatcgagaagacactgtacaacagaagaacccggcaggatgagcctgccctgttcgtggccctgaccttcgagcggcgggaggtcctggactcctccaatatcaaaccaatgaacctgatcggcgtggcaagaggcgaaaacatccccgccgtgatcgccctgaccgaccccgagggctgcccactgagccggtttaaggatagcctgggaaacccaacccacatcctgagaatcggcgagagctataaggagaagcagcggaccatccaggccaagaaggaggtggagcagcggagagccggcggctacagccggaagtacgccagcaaagccaagaatctggcagacgatatggtgagaaacaccgctagagatctgctgtactacgccgtgacccaggatgccatgctgatcttcgccaacctgagccggggcttcggccggcagggcaagcggaccttcatggccgagagacagtacacacggatggaggactggctgaccgccaagctggcctacgagggcctgagcaagacctacctgtccaagacactggcccagtacacctccaagacatgcagcaactgtgggtttaccatcaccagcgccgactacgacagggtgctggagaagctgaagaagacagcaacaggctggatgaccacaattaacggcaaggagctgaaggtggagggccagattacctactacaacagatacaagagacagaacgtagtcaaggacctgtccgtcgagctggatagactgagcgaagaatctgtgaacaacgacatctcctcctggacaaagggcagaagcggagaagctctgagcctcctgaagaaaagattctcccatagacccgtgcaggagaagttcgtgtgcctgaactgcggcttcgagacacacgcagccgagcaagccgccctgaacatcgccagatcctggctgttcctgcggagccaggagtacaagaaataccagacaaacaagacaaccggcaacaccgataagagagccttcgtcgagacctggcagtccttttaccggaagaagcttaaggaggtgtggaaacctgccgtgcggtctggcggatctggcggaggctccaccagccccaagaaaaagagaaaagtctaagctgccttctgcggggcttgccttctggccatgcccttcttctctcccttgcacctgtacctcttggtctttgaataaagcctgagtaggaaggctagcaaaaaaaaaaaaaaaaaaaaaaaaaaaaaaaaaaaaaaaaaaaaaaaaaaaaaaaaaaaaaaaaaaaaaaaaaaaaaaaa

SEQ ID NO: 9047 - RNA, 8787 nt, synthetic construct
  source 1..8787: mol_type = other RNA
aggaaataagagagaaaagaagagtaagaagaaatataagagccaccatggcccctaagaagaagcgtaaagtgagccggatgaaccacgaccaggagttcgacccccctaaggtgtaccctcccgtccccgccgagaagagaaagcccatccgggtcctgagcctgttcgatggcatcgccaccggtctgctggtgctgaaggacctgggcatccaggtggataggtacattgcctccgaggtgtgcgaggactccatcaccgtgggaatggtgcgtcatcagggcaagatcatgtacgtgggcgacgtgcggagcgtgacacagaagcatatccaggagtggggccctttcgacctggtgatcggcggcagcccttgcaatgacctgagcatcgtgaacccagcccggaagggcctgtacgagggaaccggcagactgttcttcgagttttacagactgctgcacgacgcccggcctaaggaaggcgacgaccggcccttcttttggctgttcgagaatgtggtggccatgggagtcagcgacaagcgggatattagccggttcctggagagcaaccccgtgatgatcgatgccaaggaagtgagcgccgcccaccgggccagatacttctggggcaatctgcctggcatgaacagacccctggccagcaccgtgaacgacaagctggagctgcaggagtgcctggagcacggccggatcgccaagttcagcaaggtgagaaccatcaccacccgaagcaacagcatcaaacaaggcaaggaccagcactttcctgtgttcatgaacgagaaggaggacatcctgtggtgtaccgagatggagagagtgttcgggttcccagtccactacacagatgtcagcaacatgtctagactggccagacagagactgctgggaagaagctggtccgtccctgtgatcagacacctgttcgcccctctgaaggagtacttcgcctgcgtgagcagcggcaacagcaacgccaacagccggggccccagcttctctagcggcctggtgccactgtccctgagagggagccacatgggccccatggagatctacaaaaccgtgagcgcctggaagcggcagcctgtgcgcgtgctgagcctgtttcggaatatcgataaagtcctgaaaagcctgggattcctggagagcggctctggctccggcggtggcaccctgaagtacgtggaggatgtgacaaacgtggtcagacgggatgtggagaagtggggccccttcgatctggtgtacggcagcacccaacccctgggcagctcttgtgaccggtgccctggctggtacatgtttcagttccaccggatcctgcagtacgccctgccgagacaggagtcccagcggccattcttttggattttcatggacaacttgctgctgaccgaggatgaccaggaaactaccactcggttcctgcagaccgaagccgtgaccctgcaggacgtgagaggccgggactaccagaacgccatgcgggtgtggtccaacatccctggactgaaaagcaagcacgcacctctgacccctaaagaagaggagtacctgcaggcccaggtgcggagcagaagcaagctggacgcccctaaggtggatctgctggtgaagaattgcctcctgcccctgagagagtacttcaagtatttcagccagaatagtctgcccctgggaggcagcggcggcggcagccaggagctgctgaccttcaaggacatcagcgtggacttcacccaggaggagtggggccagctggcccccgcccacaggaacctgtacagggaggtgatgctggagaactacggcaacctggtgagcgtggccggctgccagctgagcaagcccagcgtgatcagccagctggagaagggcgaggagccctggatgaccgagaaggagggccccggcgaccccagcagcgacctgaagagcggcggcccaagcagcggcgcccctcctcccagcggcggcaggcggcccaagcagcggcgcccctcctcccagcggcggcagcccagccggctccccaacctctaccgaggagggcacctctgagtccgccacccccgagagcggccctggcacctccaccgagcccagcgagggcagcgcacccggcagccctgccggcagccccacctccacagaggagggaaccagcaccgagcccagcgaaggcagcgccccaggcaccagcaccgagcctagtgagcaggagattaaacggatcaacaagatcagaagaagacttgtgaaagacagcaacaccaagaaggccggcaagacaggccccatgaaaaccctgctggttagagtgatgacacccgatctgagagagcggctggaaaacctgagaaagaagcctgaaaatatcccccagcccatcagcaatacatctagagccaacctgaataagctgctgaccgattacaccgaaatgaagaaggcgatcctgcatgtgtactgggaagagttccagaaggaccctgtgggcctgatgagccgggtggcccagcctgccagcaagaagatcgatcagaacaagctgaaacctgagatggacgagaagggcaacctgaccaccgccggctttgcctgctctcagtgtggccagcccctgttcgtgtacaagctggagcaggtgtctgagaagggcaaggcttacaccaactacttcggacggtgcaatgtggccgagcacgaaaagctgatcctgctggcccagctgaagcccgagaaggatagcgacgaagccgtgacatatagcctgggaaagtttgggcagagggccctggatttctacagcattcatgtgaccaaggagtccacccaccccgtgaagcccctggcccagatcgccggaaacagatacgcctccggacctgtgggaaaggccctgagcgacgcatgtatgggcacaatcgcctccttcctgtctaagtaccaggacatcatcatcgaacaccagaaggtggtgaagggcaaccagaagagactggagagcctgcgggagctggccggcaaggaaaacctggaataccctagcgtgaccctgccacctcagcctcacaccaaggagggcgttgatgcctacaacgaagtgatcgcccgggtgcgaatgtgggtgaacctgaacctgtggcagaagctgaagctaagcagagatgatgccaagcctctgctgagactgaagggattcccttcctttcctctggtcgagagacaggccaacgaagtggactggtgggacatggtgtgtaacgtgaagaagctgatcaacgagaaaaaggaggatggcaaggtgttttggcagaatctggctggctacaagagacaggaagccctgagaccatacctgagcagcgaggaagatcggaagaagggaaagaaattcgctcggtaccagctgggcgacctgctgctgcacctggaaaagaagcacggcgaggactggggaaaggtgtacgacgaggcctgggagcggattgacaagaaagtggaaggcctgagcaagcacatcaagctggaagaggaacggagaagcgaggacgcccagagcaaggccgccctgaccgactggctgcgggctaaggccagcttcgtgatcgagggcctgaaggaggccgacaaggacgagttctgcagatgcgagctgaagctgcagaagtggtacggggacctgcggggaaagcccttcgccatcgaagccgagaacagcatcctggacatcagcggcttcagcaagcagtacaactgtgccttcatctggcagaaggacggcgtgaagaagctgaacctgtacctgatcatcaactacttcaagggcggcaagctgcggttcaagaagatcaaacctgaagccttcgaagccaacagattctacaccgtgatcaacaaaaagagcggcgagatcgtgcccatggaggtgaacttcaacttcgacgaccccaacctgatcatcctgcctctggcctttggcaagagacagggcagagaattcatctggaacgacctgctgtccctggaaaccggcagcctgaagctggccaacggaagagtgatcgagaagacactgtacaacagaagaacccggcaggatgagcctgccctgttcgtggccctgaccttcgagcggcgggaggtcctggactcctccaatatcaaaccaatgaacctgatcggcgtggcaagaggcgaaaacatccccgccgtgatcgccctgaccgaccccgagggctgcccactgagccggtttaaggatagcctgggaaacccaacccacatcctgagaatcggcgagagctataaggagaagcagcggaccatccaggccaagaaggaggtggagcagcggagagccggcggctacagccggaagtacgccagcaaagccaagaatctggcagacgatatggtgagaaacaccgctagagatctgctgtactacgccgtgacccaggatgccatgctgatcttcgccaacctgagccggggcttcggccggcagggcaagcggaccttcatggccgagagacagtacacacggatggaggactggctgaccgccaagctggcctacgagggcctgagcaagacctacctgtccaagacactggcccagtacacctccaagacatgcagcaactgtgggtttaccatcaccagcgccgactacgacagggtgctggagaagctgaagaagacagcaacaggctggatgaccacaattaacggcaaggagctgaaggtggagggccagattacctactacaacagatacaagagacagaacgtagtcaaggacctgtccgtcgagctggatagactgagcgaagaatctgtgaacaacgacatctcctcctggacaaagggcagaagcggagaagctctgagcctcctgaagaaaagattctcccatagacccgtgcaggagaagttcgtgtgcctgaactgcggcttcgagacacacgcagccgagcaagccgccctgaacatcgccagatcctggctgttcctgcggagccaggagtacaagaaataccagacaaacaagacaaccggcaacaccgataagagagccttcgtcgagacctggcagtccttttaccggaagaagcttaaggaggtgtggaaacctgccgtgcggtctggcggatctggcggaggctccaccagccccaagaaaaagagaaaagtctaagctgccttctgcggggcttgccttctggccatgcccttcttctctcccttgcacctgtacctcttggtctttgaataaagcctgagtaggaaggctagcaaaaaaaaaaaaaaaaaaaaaaaaaaaaaaaaaaaaaaaaaaaaaaaaaaaaaaaaaaaaaaaaaaaaaaaaaaaaaaaagcccagccggctccccaacctctaccgaggagggcacctctgagtccgccacccccgagagcggccctggcacctccaccgagcccagcgagggcagcgcacccggcagccctgccggcagccccacctccacagaggagggaaccagcaccgagcccagcgaaggcagcgccccaggcaccagcaccgagcctagtgagcaggagattaaacggatcaacaagatcagaagaagacttgtgaaagacagcaacaccaagaaggccggcaagacaggccccatgaaaaccctgctggttagagtgatgacacccgatctgagagagcggctggaaaacctgagaaagaagcctgaaaatatcccccagcccatcagcaatacatctagagccaacctgaataagctgctgaccgattacaccgaaatgaagaaggcgatcctgcatgtgtactgggaagagttccagaaggaccctgtgggcctgatgagccgggtggcccagcctgccagcaagaagatcgatcagaacaagctgaaacctgagatggacgagaagggcaacctgaccaccgccggctttgcctgctctcagtgtggccagcccctgttcgtgtacaagctggagcaggtgtctgagaagggcaaggcttacaccaactacttcggacggtgcaatgtggccgagcacgaaaagctgatcctgctggcccagctgaagcccgagaaggatagcgacgaagccgtgacatatagcctgggaaagtttgggcagagggccctggatttctacagcattcatgtgaccaaggagtccacccaccccgtgaagcccctggcccagatcgccggaaacagatacgcctccggacctgtgggaaaggccctgagcgacgcatgtatgggcacaatcgcctccttcctgtctaagtaccaggacatcatcatcgaacaccagaaggtggtgaagggcaaccagaagagactggagagcctgcgggagctggccggcaaggaaaacctggaataccctagcgtgaccctgccacctcagcctcacaccaaggagggcgttgatgcctacaacgaagtgatcgcccgggtgcgaatgtgggtgaacctgaacctgtggcagaagctgaagctaagcagagatgatgccaagcctctgctgagactgaagggattcccttcctttcctctggtcgagagacaggccaacgaagtggactggtgggacatggtgtgtaacgtgaagaagctgatcaacgagaaaaaggaggatggcaaggtgttttggcagaatctggctggctacaagagacaggaagccctgagaccatacctgagcagcgaggaagatcggaagaagggaaagaaattcgctcggtaccagctgggcgacctgctgctgcacctggaaaagaagcacggcgaggactggggaaaggtgtacgacgaggcctgggagcggattgacaagaaagtggaaggcctgagcaagcacatcaagctggaagaggaacggagaagcgaggacgcccagagcaaggccgccctgaccgactggctgcgggctaaggccagcttcgtgatcgagggcctgaaggaggccgacaaggacgagttctgcagatgcgagctgaagctgcagaagtggtacggggacctgcggggaaagcccttcgccatcgaagccgagaacagcatcctggacatcagcggcttcagcaagcagtacaactgtgccttcatctggcagaaggacggcgtgaagaagctgaacctgtacctgatcatcaactacttcaagggcggcaagctgcggttcaagaagatcaaacctgaagccttcgaagccaacagattctacaccgtgatcaacaaaaagagcggcgagatcgtgcccatggaggtgaacttcaacttcgacgaccccaacctgatcatcctgcctctggcctttggcaagagacagggcagagaattcatctggaacgacctgctgtccctggaaaccggcagcctgaagctggccaacggaagagtgatcgagaagacactgtacaacagaagaacccggcaggatgagcctgccctgttcgtggccctgaccttcgagcggcgggaggtcctggactcctccaatatcaaaccaatgaacctgatcggcgtggcaagaggcgaaaacatccccgccgtgatcgccctgaccgaccccgagggctgcccactgagccggtttaaggatagcctgggaaacccaacccacatcctgagaatcggcgagagctataaggagaagcagcggaccatccaggccaagaaggaggtggagcagcggagagccggcggctacagccggaagtacgccagcaaagccaagaatctggcagacgatatggtgagaaacaccgctagagatctgctgtactacgccgtgacccaggatgccatgctgatcttcgccaacctgagccggggcttcggccggcagggcaagcggaccttcatggccgagagacagtacacacggatggaggactggctgaccgccaagctggcctacgagggcctgagcaagacctacctgtccaagacactggcccagtacacctccaagacatgcagcaactgtgggtttaccatcaccagcgccgactacgacagggtgctggagaagctgaagaagacagcaacaggctggatgaccacaattaacggcaaggagctgaaggtggagggccagattacctactacaacagatacaagagacagaacgtagtcaaggacctgtccgtcgagctggatagactgagcgaagaatctgtgaacaacgacatctcctcctggacaaagggcagaagcggagaagctctgagcctcctgaagaaaagattctcccatagacccgtgcaggagaagttcgtgtgcctgaactgcggcttcgagacacacgcagccgagcaagccgccctgaacatcgccagatcctggctgttcctgcggagccaggagtacaagaaataccagacaaacaagacaaccggcaacaccgataagagagccttcgtcgagacctggcagtccttttaccggaagaagcttaaggaggtgtggaaacctgccgtgcggtctggcggatctggcggaggctccaccagccccaagaaaaagagaaaagtctaagctgccttctgcggggcttgccttctggccatgcccttcttctctcccttgcacctgtacctcttggtctttgaataaagcctgagtaggaaggctagcaaaaaaaaaaaaaaaaaaaaaaaaaaaaaaaaaaaaaaaaaaaaaaaaaaaaaaaaaaaaaaaaaaaaaaaaaaaaaaaa

SEQ ID NO: 9048 - RNA, 8787 nt, synthetic construct
  source 1..8787: mol_type = other RNA
aggaaataagagagaaaagaagagtaagaagaaatataagagccaccatggcccctaagaagaagcgtaaagtgagccggatgaaccacgaccaggagttcgacccccctaaggtgtaccctcccgtccccgccgagaagagaaagcccatccgggtcctgagcctgttcgatggcatcgccaccggtctgctggtgctgaaggacctgggcatccaggtggataggtacattgcctccgaggtgtgcgaggactccatcaccgtgggaatggtgcgtcatcagggcaagatcatgtacgtgggcgacgtgcggagcgtgacacagaagcatatccaggagtggggccctttcgacctggtgatcggcggcagcccttgcaatgacctgagcatcgtgaacccagcccggaagggcctgtacgagggaaccggcagactgttcttcgagttttacagactgctgcacgacgcccggcctaaggaaggcgacgaccggcccttcttttggctgttcgagaatgtggtggccatgggagtcagcgacaagcgggatattagccggttcctggagagcaaccccgtgatgatcgatgccaaggaagtgagcgccgcccaccgggccagatacttctggggcaatctgcctggcatgaacagacccctggccagcaccgtgaacgacaagctggagctgcaggagtgcctggagcacggccggatcgccaagttcagcaaggtgagaaccatcaccacccgaagcaacagcatcaaacaaggcaaggaccagcactttcctgtgttcatgaacgagaaggaggacatcctgtggtgtaccgagatggagagagtgttcgggttcccagtccactacacagatgtcagcaacatgtctagactggccagacagagactgctgggaagaagctggtccgtccctgtgatcagacacctgttcgcccctctgaaggagtacttcgcctgcgtgagcagcggcaacagcaacgccaacagccggggccccagcttctctagcggcctggtgccactgtccctgagagggagccacatgggccccatggagatctacaaaaccgtgagcgcctggaagcggcagcctgtgcgcgtgctgagcctgtttcggaatatcgataaagtcctgaaaagcctgggattcctggagagcggctctggctccggcggtggcaccctgaagtacgtggaggatgtgacaaacgtggtcagacgggatgtggagaagtggggccccttcgatctggtgtacggcagcacccaacccctgggcagctcttgtgaccggtgccctggctggtacatgtttcagttccaccggatcctgcagtacgccctgccgagacaggagtcccagcggccattcttttggattttcatggacaacttgctgctgaccgaggatgaccaggaaactaccactcggttcctgcagaccgaagccgtgaccctgcaggacgtgagaggccgggactaccagaacgccatgcgggtgtggtccaacatccctggactgaaaagcaagcacgcacctctgacccctaaagaagaggagtacctgcaggcccaggtgcggagcagaagcaagctggacgcccctaaggtggatctgctggtgaagaattgcctcctgcccctgagagagtacttcaagtatttcagccagaatagtctgcccctgggaggcagcggcggcggcatgcccggcccccccggcagcctggagatggaccccctgaccttcagggacgtggccatcgagttcagcctggaggagtggcagtgcctggacaccgcccagcagaacctgtacaggaacgtgatgctggagaactacaagaacctggccttcctgggcatcgccgtgagcaagcccgacctgatcaccaggctggagaaggagaaggagccctggaagatgaagaggcacaggatggtggacggcggcccaagcagcggcgcccctcctcccagcggcggcaggcggcccaagcagcggcgcccctcctcccagcggcggcagcccagccggctccccaacctctaccgaggagggcacctctgagtccgccacccccgagagcggccctggcacctccaccgagcccagcgagggcagcgcacccggcagccctgccggcagccccacctccacagaggagggaaccagcaccgagcccagcgaaggcagcgccccaggcaccagcaccgagcctagtgagcaggagattaaacggatcaacaagatcagaagaagacttgtgaaagacagcaacaccaagaaggccggcaagacaggccccatgaaaaccctgctggttagagtgatgacacccgatctgagagagcggctggaaaacctgagaaagaagcctgaaaatatcccccagcccatcagcaatacatctagagccaacctgaataagctgctgaccgattacaccgaaatgaagaaggcgatcctgcatgtgtactgggaagagttccagaaggaccctgtgggcctgatgagccgggtggcccagcctgccagcaagaagatcgatcagaacaagctgaaacctgagatggacgagaagggcaacctgaccaccgccggctttgcctgctctcagtgtggccagcccctgttcgtgtacaagctggagcaggtgtctgagaagggcaaggcttacaccaactacttcggacggtgcaatgtggccgagcacgaaaagctgatcctgctggcccagctgaagcccgagaaggatagcgacgaagccgtgacatatagcctgggaaagtttgggcagagggccctggatttctacagcattcatgtgaccaaggagtccacccaccccgtgaagcccctggcccagatcgccggaaacagatacgcctccggacctgtgggaaaggccctgagcgacgcatgtatgggcacaatcgcctccttcctgtctaagtaccaggacatcatcatcgaacaccagaaggtggtgaagggcaaccagaagagactggagagcctgcgggagctggccggcaaggaaaacctggaataccctagcgtgaccctgccacctcagcctcacaccaaggagggcgttgatgcctacaacgaagtgatcgcccgggtgcgaatgtgggtgaacctgaacctgtggcagaagctgaagctaagcagagatgatgccaagcctctgctgagactgaagggattcccttcctttcctctggtcgagagacaggccaacgaagtggactggtgggacatggtgtgtaacgtgaagaagctgatcaacgagaaaaaggaggatggcaaggtgttttggcagaatctggctggctacaagagacaggaagccctgagaccatacctgagcagcgaggaagatcggaagaagggaaagaaattcgctcggtaccagctgggcgacctgctgctgcacctggaaaagaagcacggcgaggactggggaaaggtgtacgacgaggcctgggagcggattgacaagaaagtggaaggcctgagcaagcacatcaagctggaagaggaacggagaagcgaggacgcccagagcaaggccgccctgaccgactggctgcgggctaaggccagcttcgtgatcgagggcctgaaggaggccgacaaggacgagttctgcagatgcgagctgaagctgcagaagtggtacggggacctgcggggaaagcccttcgccatcgaagccgagaacagcatcctggacatcagcggcttcagcaagcagtacaactgtgccttcatctggcagaaggacggcgtgaagaagctgaacctgtacctgatcatcaactacttcaagggcggcaagctgcggttcaagaagatcaaacctgaagccttcgaagccaacagattctacaccgtgatcaacaaaaagagcggcgagatcgtgcccatggaggtgaacttcaacttcgacgaccccaacctgatcatcctgcctctggcctttggcaagagacagggcagagaattcatctggaacgacctgctgtccctggaaaccggcagcctgaagctggccaacggaagagtgatcgagaagacactgtacaacagaagaacccggcaggatgagcctgccctgttcgtggccctgaccttcgagcggcgggaggtcctggactcctccaatatcaaaccaatgaacctgatcggcgtggcaagaggcgaaaacatccccgccgtgatcgccctgaccgaccccgagggctgcccactgagccggtttaaggatagcctgggaaacccaacccacatcctgagaatcggcgagagctataaggagaagcagcggaccatccaggccaagaaggaggtggagcagcggagagccggcggctacagccggaagtacgccagcaaagccaagaatctggcagacgatatggtgagaaacaccgctagagatctgctgtactacgccgtgacccaggatgccatgctgatcttcgccaacctgagccggggcttcggccggcagggcaagcggaccttcatggccgagagacagtacacacggatggaggactggctgaccgccaagctggcctacgagggcctgagcaagacctacctgtccaagacactggcccagtacacctccaagacatgcagcaactgtgggtttaccatcaccagcgccgactacgacagggtgctggagaagctgaagaagacagcaacaggctggatgaccacaattaacggcaaggagctgaaggtggagggccagattacctactacaacagatacaagagacagaacgtagtcaaggacctgtccgtcgagctggatagactgagcgaagaatctgtgaacaacgacatctcctcctggacaaagggcagaagcggagaagctctgagcctcctgaagaaaagattctcccatagacccgtgcaggagaagttcgtgtgcctgaactgcggcttcgagacacacgcagccgagcaagccgccctgaacatcgccagatcctggctgttcctgcggagccaggagtacaagaaataccagacaaacaagacaaccggcaacaccgataagagagccttcgtcgagacctggcagtccttttaccggaagaagcttaaggaggtgtggaaacctgccgtgcggtctggcggatctggcggaggctccaccagccccaagaaaaagagaaaagtctaagctgccttctgcggggcttgccttctggccatgcccttcttctctcccttgcacctgtacctcttggtctttgaataaagcctgagtaggaaggctagcaaaaaaaaaaaaaaaaaaaaaaaaaaaaaaaaaaaaaaaaaaaaaaaaaaaaaaaaaaaaaaaaaaaaaaaaaaaaaaaagcccagccggctccccaacctctaccgaggagggcacctctgagtccgccacccccgagagcggccctggcacctccaccgagcccagcgagggcagcgcacccggcagccctgccggcagccccacctccacagaggagggaaccagcaccgagcccagcgaaggcagcgccccaggcaccagcaccgagcctagtgagcaggagattaaacggatcaacaagatcagaagaagacttgtgaaagacagcaacaccaagaaggccggcaagacaggccccatgaaaaccctgctggttagagtgatgacacccgatctgagagagcggctggaaaacctgagaaagaagcctgaaaatatcccccagcccatcagcaatacatctagagccaacctgaataagctgctgaccgattacaccgaaatgaagaaggcgatcctgcatgtgtactgggaagagttccagaaggaccctgtgggcctgatgagccgggtggcccagcctgccagcaagaagatcgatcagaacaagctgaaacctgagatggacgagaagggcaacctgaccaccgccggctttgcctgctctcagtgtggccagcccctgttcgtgtacaagctggagcaggtgtctgagaagggcaaggcttacaccaactacttcggacggtgcaatgtggccgagcacgaaaagctgatcctgctggcccagctgaagcccgagaaggatagcgacgaagccgtgacatatagcctgggaaagtttgggcagagggccctggatttctacagcattcatgtgaccaaggagtccacccaccccgtgaagcccctggcccagatcgccggaaacagatacgcctccggacctgtgggaaaggccctgagcgacgcatgtatgggcacaatcgcctccttcctgtctaagtaccaggacatcatcatcgaacaccagaaggtggtgaagggcaaccagaagagactggagagcctgcgggagctggccggcaaggaaaacctggaataccctagcgtgaccctgccacctcagcctcacaccaaggagggcgttgatgcctacaacgaagtgatcgcccgggtgcgaatgtgggtgaacctgaacctgtggcagaagctgaagctaagcagagatgatgccaagcctctgctgagactgaagggattcccttcctttcctctggtcgagagacaggccaacgaagtggactggtgggacatggtgtgtaacgtgaagaagctgatcaacgagaaaaaggaggatggcaaggtgttttggcagaatctggctggctacaagagacaggaagccctgagaccatacctgagcagcgaggaagatcggaagaagggaaagaaattcgctcggtaccagctgggcgacctgctgctgcacctggaaaagaagcacggcgaggactggggaaaggtgtacgacgaggcctgggagcggattgacaagaaagtggaaggcctgagcaagcacatcaagctggaagaggaacggagaagcgaggacgcccagagcaaggccgccctgaccgactggctgcgggctaaggccagcttcgtgatcgagggcctgaaggaggccgacaaggacgagttctgcagatgcgagctgaagctgcagaagtggtacggggacctgcggggaaagcccttcgccatcgaagccgagaacagcatcctggacatcagcggcttcagcaagcagtacaactgtgccttcatctggcagaaggacggcgtgaagaagctgaacctgtacctgatcatcaactacttcaagggcggcaagctgcggttcaagaagatcaaacctgaagccttcgaagccaacagattctacaccgtgatcaacaaaaagagcggcgagatcgtgcccatggaggtgaacttcaacttcgacgaccccaacctgatcatcctgcctctggcctttggcaagagacagggcagagaattcatctggaacgacctgctgtccctggaaaccggcagcctgaagctggccaacggaagagtgatcgagaagacactgtacaacagaagaacccggcaggatgagcctgccctgttcgtggccctgaccttcgagcggcgggaggtcctggactcctccaatatcaaaccaatgaacctgatcggcgtggcaagaggcgaaaacatccccgccgtgatcgccctgaccgaccccgagggctgcccactgagccggtttaaggatagcctgggaaacccaacccacatcctgagaatcggcgagagctataaggagaagcagcggaccatccaggccaagaaggaggtggagcagcggagagccggcggctacagccggaagtacgccagcaaagccaagaatctggcagacgatatggtgagaaacaccgctagagatctgctgtactacgccgtgacccaggatgccatgctgatcttcgccaacctgagccggggcttcggccggcagggcaagcggaccttcatggccgagagacagtacacacggatggaggactggctgaccgccaagctggcctacgagggcctgagcaagacctacctgtccaagacactggcccagtacacctccaagacatgcagcaactgtgggtttaccatcaccagcgccgactacgacagggtgctggagaagctgaagaagacagcaacaggctggatgaccacaattaacggcaaggagctgaaggtggagggccagattacctactacaacagatacaagagacagaacgtagtcaaggacctgtccgtcgagctggatagactgagcgaagaatctgtgaacaacgacatctcctcctggacaaagggcagaagcggagaagctctgagcctcctgaagaaaagattctcccatagacccgtgcaggagaagttcgtgtgcctgaactgcggcttcgagacacacgcagccgagcaagccgccctgaacatcgccagatcctggctgttcctgcggagccaggagtacaagaaataccagacaaacaagacaaccggcaacaccgataagagagccttcgtcgagacctggcagtccttttaccggaagaagcttaaggaggtgtggaaacctgccgtgcggtctggcggatctggcggaggctccaccagccccaagaaaaagagaaaagtctaagctgccttctgcggggcttgccttctggccatgcccttcttctctcccttgcacctgtacctcttggtctttgaataaagcctgagtaggaaggctagcaaaaaaaaaaaaaaaaaaaaaaaaaaaaaaaaaaaaaaaaaaaaaaaaaaaaaaaaaaaaaaaaaaaaaaaaaaaaaaaa

SEQ ID NO: 9049 - RNA, 8787 nt, synthetic construct
  source 1..8787: mol_type = other RNA
aggaaataagagagaaaagaagagtaagaagaaatataagagccaccatggcccctaagaagaagcgtaaagtgagccggatgaaccacgaccaggagttcgacccccctaaggtgtaccctcccgtccccgccgagaagagaaagcccatccgggtcctgagcctgttcgatggcatcgccaccggtctgctggtgctgaaggacctgggcatccaggtggataggtacattgcctccgaggtgtgcgaggactccatcaccgtgggaatggtgcgtcatcagggcaagatcatgtacgtgggcgacgtgcggagcgtgacacagaagcatatccaggagtggggccctttcgacctggtgatcggcggcagcccttgcaatgacctgagcatcgtgaacccagcccggaagggcctgtacgagggaaccggcagactgttcttcgagttttacagactgctgcacgacgcccggcctaaggaaggcgacgaccggcccttcttttggctgttcgagaatgtggtggccatgggagtcagcgacaagcgggatattagccggttcctggagagcaaccccgtgatgatcgatgccaaggaagtgagcgccgcccaccgggccagatacttctggggcaatctgcctggcatgaacagacccctggccagcaccgtgaacgacaagctggagctgcaggagtgcctggagcacggccggatcgccaagttcagcaaggtgagaaccatcaccacccgaagcaacagcatcaaacaaggcaaggaccagcactttcctgtgttcatgaacgagaaggaggacatcctgtggtgtaccgagatggagagagtgttcgggttcccagtccactacacagatgtcagcaacatgtctagactggccagacagagactgctgggaagaagctggtccgtccctgtgatcagacacctgttcgcccctctgaaggagtacttcgcctgcgtgagcagcggcaacagcaacgccaacagccggggccccagcttctctagcggcctggtgccactgtccctgagagggagccacatgggccccatggagatctacaaaaccgtgagcgcctggaagcggcagcctgtgcgcgtgctgagcctgtttcggaatatcgataaagtcctgaaaagcctgggattcctggagagcggctctggctccggcggtggcaccctgaagtacgtggaggatgtgacaaacgtggtcagacgggatgtggagaagtggggccccttcgatctggtgtacggcagcacccaacccctgggcagctcttgtgaccggtgccctggctggtacatgtttcagttccaccggatcctgcagtacgccctgccgagacaggagtcccagcggccattcttttggattttcatggacaacttgctgctgaccgaggatgaccaggaaactaccactcggttcctgcagaccgaagccgtgaccctgcaggacgtgagaggccgggactaccagaacgccatgcgggtgtggtccaacatccctggactgaaaagcaagcacgcacctctgacccctaaagaagaggagtacctgcaggcccaggtgcggagcagaagcaagctggacgcccctaaggtggatctgctggtgaagaattgcctcctgcccctgagagagtacttcaagtatttcagccagaatagtctgcccctgggaggcagcggcggcggcaacgccgtgacctacaacgacgtgcacgtggacttcacccaggaggagtgggccctgatggaccccagccagaggaacctgtacaaggacgtgatggtggagacctacatgaacctgaccgccatcggctacaactgggaggacctggaggtggaggagcactgccagaacagcctgaagcacggcaggcacaagaggccccacaccaccgagaagagctgcgagtacatgggctgcggcaagggcggcccaagcagcggcgcccctcctcccagcggcggcaggcggcccaagcagcggcgcccctcctcccagcggcggcagcccagccggctccccaacctctaccgaggagggcacctctgagtccgccacccccgagagcggccctggcacctccaccgagcccagcgagggcagcgcacccggcagccctgccggcagccccacctccacagaggagggaaccagcaccgagcccagcgaaggcagcgccccaggcaccagcaccgagcctagtgagcaggagattaaacggatcaacaagatcagaagaagacttgtgaaagacagcaacaccaagaaggccggcaagacaggccccatgaaaaccctgctggttagagtgatgacacccgatctgagagagcggctggaaaacctgagaaagaagcctgaaaatatcccccagcccatcagcaatacatctagagccaacctgaataagctgctgaccgattacaccgaaatgaagaaggcgatcctgcatgtgtactgggaagagttccagaaggaccctgtgggcctgatgagccgggtggcccagcctgccagcaagaagatcgatcagaacaagctgaaacctgagatggacgagaagggcaacctgaccaccgccggctttgcctgctctcagtgtggccagcccctgttcgtgtacaagctggagcaggtgtctgagaagggcaaggcttacaccaactacttcggacggtgcaatgtggccgagcacgaaaagctgatcctgctggcccagctgaagcccgagaaggatagcgacgaagccgtgacatatagcctgggaaagtttgggcagagggccctggatttctacagcattcatgtgaccaaggagtccacccaccccgtgaagcccctggcccagatcgccggaaacagatacgcctccggacctgtgggaaaggccctgagcgacgcatgtatgggcacaatcgcctccttcctgtctaagtaccaggacatcatcatcgaacaccagaaggtggtgaagggcaaccagaagagactggagagcctgcgggagctggccggcaaggaaaacctggaataccctagcgtgaccctgccacctcagcctcacaccaaggagggcgttgatgcctacaacgaagtgatcgcccgggtgcgaatgtgggtgaacctgaacctgtggcagaagctgaagctaagcagagatgatgccaagcctctgctgagactgaagggattcccttcctttcctctggtcgagagacaggccaacgaagtggactggtgggacatggtgtgtaacgtgaagaagctgatcaacgagaaaaaggaggatggcaaggtgttttggcagaatctggctggctacaagagacaggaagccctgagaccatacctgagcagcgaggaagatcggaagaagggaaagaaattcgctcggtaccagctgggcgacctgctgctgcacctggaaaagaagcacggcgaggactggggaaaggtgtacgacgaggcctgggagcggattgacaagaaagtggaaggcctgagcaagcacatcaagctggaagaggaacggagaagcgaggacgcccagagcaaggccgccctgaccgactggctgcgggctaaggccagcttcgtgatcgagggcctgaaggaggccgacaaggacgagttctgcagatgcgagctgaagctgcagaagtggtacggggacctgcggggaaagcccttcgccatcgaagccgagaacagcatcctggacatcagcggcttcagcaagcagtacaactgtgccttcatctggcagaaggacggcgtgaagaagctgaacctgtacctgatcatcaactacttcaagggcggcaagctgcggttcaagaagatcaaacctgaagccttcgaagccaacagattctacaccgtgatcaacaaaaagagcggcgagatcgtgcccatggaggtgaacttcaacttcgacgaccccaacctgatcatcctgcctctggcctttggcaagagacagggcagagaattcatctggaacgacctgctgtccctggaaaccggcagcctgaagctggccaacggaagagtgatcgagaagacactgtacaacagaagaacccggcaggatgagcctgccctgttcgtggccctgaccttcgagcggcgggaggtcctggactcctccaatatcaaaccaatgaacctgatcggcgtggcaagaggcgaaaacatccccgccgtgatcgccctgaccgaccccgagggctgcccactgagccggtttaaggatagcctgggaaacccaacccacatcctgagaatcggcgagagctataaggagaagcagcggaccatccaggccaagaaggaggtggagcagcggagagccggcggctacagccggaagtacgccagcaaagccaagaatctggcagacgatatggtgagaaacaccgctagagatctgctgtactacgccgtgacccaggatgccatgctgatcttcgccaacctgagccggggcttcggccggcagggcaagcggaccttcatggccgagagacagtacacacggatggaggactggctgaccgccaagctggcctacgagggcctgagcaagacctacctgtccaagacactggcccagtacacctccaagacatgcagcaactgtgggtttaccatcaccagcgccgactacgacagggtgctggagaagctgaagaagacagcaacaggctggatgaccacaattaacggcaaggagctgaaggtggagggccagattacctactacaacagatacaagagacagaacgtagtcaaggacctgtccgtcgagctggatagactgagcgaagaatctgtgaacaacgacatctcctcctggacaaagggcagaagcggagaagctctgagcctcctgaagaaaagattctcccatagacccgtgcaggagaagttcgtgtgcctgaactgcggcttcgagacacacgcagccgagcaagccgccctgaacatcgccagatcctggctgttcctgcggagccaggagtacaagaaataccagacaaacaagacaaccggcaacaccgataagagagccttcgtcgagacctggcagtccttttaccggaagaagcttaaggaggtgtggaaacctgccgtgcggtctggcggatctggcggaggctccaccagccccaagaaaaagagaaaagtctaagctgccttctgcggggcttgccttctggccatgcccttcttctctcccttgcacctgtacctcttggtctttgaataaagcctgagtaggaaggctagcaaaaaaaaaaaaaaaaaaaaaaaaaaaaaaaaaaaaaaaaaaaaaaaaaaaaaaaaaaaaaaaaaaaaaaaaaaaaaaaagcccagccggctccccaacctctaccgaggagggcacctctgagtccgccacccccgagagcggccctggcacctccaccgagcccagcgagggcagcgcacccggcagccctgccggcagccccacctccacagaggagggaaccagcaccgagcccagcgaaggcagcgccccaggcaccagcaccgagcctagtgagcaggagattaaacggatcaacaagatcagaagaagacttgtgaaagacagcaacaccaagaaggccggcaagacaggccccatgaaaaccctgctggttagagtgatgacacccgatctgagagagcggctggaaaacctgagaaagaagcctgaaaatatcccccagcccatcagcaatacatctagagccaacctgaataagctgctgaccgattacaccgaaatgaagaaggcgatcctgcatgtgtactgggaagagttccagaaggaccctgtgggcctgatgagccgggtggcccagcctgccagcaagaagatcgatcagaacaagctgaaacctgagatggacgagaagggcaacctgaccaccgccggctttgcctgctctcagtgtggccagcccctgttcgtgtacaagctggagcaggtgtctgagaagggcaaggcttacaccaactacttcggacggtgcaatgtggccgagcacgaaaagctgatcctgctggcccagctgaagcccgagaaggatagcgacgaagccgtgacatatagcctgggaaagtttgggcagagggccctggatttctacagcattcatgtgaccaaggagtccacccaccccgtgaagcccctggcccagatcgccggaaacagatacgcctccggacctgtgggaaaggccctgagcgacgcatgtatgggcacaatcgcctccttcctgtctaagtaccaggacatcatcatcgaacaccagaaggtggtgaagggcaaccagaagagactggagagcctgcgggagctggccggcaaggaaaacctggaataccctagcgtgaccctgccacctcagcctcacaccaaggagggcgttgatgcctacaacgaagtgatcgcccgggtgcgaatgtgggtgaacctgaacctgtggcagaagctgaagctaagcagagatgatgccaagcctctgctgagactgaagggattcccttcctttcctctggtcgagagacaggccaacgaagtggactggtgggacatggtgtgtaacgtgaagaagctgatcaacgagaaaaaggaggatggcaaggtgttttggcagaatctggctggctacaagagacaggaagccctgagaccatacctgagcagcgaggaagatcggaagaagggaaagaaattcgctcggtaccagctgggcgacctgctgctgcacctggaaaagaagcacggcgaggactggggaaaggtgtacgacgaggcctgggagcggattgacaagaaagtggaaggcctgagcaagcacatcaagctggaagaggaacggagaagcgaggacgcccagagcaaggccgccctgaccgactggctgcgggctaaggccagcttcgtgatcgagggcctgaaggaggccgacaaggacgagttctgcagatgcgagctgaagctgcagaagtggtacggggacctgcggggaaagcccttcgccatcgaagccgagaacagcatcctggacatcagcggcttcagcaagcagtacaactgtgccttcatctggcagaaggacggcgtgaagaagctgaacctgtacctgatcatcaactacttcaagggcggcaagctgcggttcaagaagatcaaacctgaagccttcgaagccaacagattctacaccgtgatcaacaaaaagagcggcgagatcgtgcccatggaggtgaacttcaacttcgacgaccccaacctgatcatcctgcctctggcctttggcaagagacagggcagagaattcatctggaacgacctgctgtccctggaaaccggcagcctgaagctggccaacggaagagtgatcgagaagacactgtacaacagaagaacccggcaggatgagcctgccctgttcgtggccctgaccttcgagcggcgggaggtcctggactcctccaatatcaaaccaatgaacctgatcggcgtggcaagaggcgaaaacatccccgccgtgatcgccctgaccgaccccgagggctgcccactgagccggtttaaggatagcctgggaaacccaacccacatcctgagaatcggcgagagctataaggagaagcagcggaccatccaggccaagaaggaggtggagcagcggagagccggcggctacagccggaagtacgccagcaaagccaagaatctggcagacgatatggtgagaaacaccgctagagatctgctgtactacgccgtgacccaggatgccatgctgatcttcgccaacctgagccggggcttcggccggcagggcaagcggaccttcatggccgagagacagtacacacggatggaggactggctgaccgccaagctggcctacgagggcctgagcaagacctacctgtccaagacactggcccagtacacctccaagacatgcagcaactgtgggtttaccatcaccagcgccgactacgacagggtgctggagaagctgaagaagacagcaacaggctggatgaccacaattaacggcaaggagctgaaggtggagggccagattacctactacaacagatacaagagacagaacgtagtcaaggacctgtccgtcgagctggatagactgagcgaagaatctgtgaacaacgacatctcctcctggacaaagggcagaagcggagaagctctgagcctcctgaagaaaagattctcccatagacccgtgcaggagaagttcgtgtgcctgaactgcggcttcgagacacacgcagccgagcaagccgccctgaacatcgccagatcctggctgttcctgcggagccaggagtacaagaaataccagacaaacaagacaaccggcaacaccgataagagagccttcgtcgagacctggcagtccttttaccggaagaagcttaaggaggtgtggaaacctgccgtgcggtctggcggatctggcggaggctccaccagccccaagaaaaagagaaaagtctaagctgccttctgcggggcttgccttctggccatgcccttcttctctcccttgcacctgtacctcttggtctttgaataaagcctgagtaggaaggctagcaaaaaaaaaaaaaaaaaaaaaaaaaaaaaaaaaaaaaaaaaaaaaaaaaaaaaaaaaaaaaaaaaaaaaaaaaaaaaaaa

SEQ ID NO: 9050 - RNA, 8787 nt, synthetic construct
  source 1..8787: mol_type = other RNA
aggaaataagagagaaaagaagagtaagaagaaatataagagccaccatggcccctaagaagaagcgtaaagtgagccggatgaaccacgaccaggagttcgacccccctaaggtgtaccctcccgtccccgccgagaagagaaagcccatccgggtcctgagcctgttcgatggcatcgccaccggtctgctggtgctgaaggacctgggcatccaggtggataggtacattgcctccgaggtgtgcgaggactccatcaccgtgggaatggtgcgtcatcagggcaagatcatgtacgtgggcgacgtgcggagcgtgacacagaagcatatccaggagtggggccctttcgacctggtgatcggcggcagcccttgcaatgacctgagcatcgtgaacccagcccggaagggcctgtacgagggaaccggcagactgttcttcgagttttacagactgctgcacgacgcccggcctaaggaaggcgacgaccggcccttcttttggctgttcgagaatgtggtggccatgggagtcagcgacaagcgggatattagccggttcctggagagcaaccccgtgatgatcgatgccaaggaagtgagcgccgcccaccgggccagatacttctggggcaatctgcctggcatgaacagacccctggccagcaccgtgaacgacaagctggagctgcaggagtgcctggagcacggccggatcgccaagttcagcaaggtgagaaccatcaccacccgaagcaacagcatcaaacaaggcaaggaccagcactttcctgtgttcatgaacgagaaggaggacatcctgtggtgtaccgagatggagagagtgttcgggttcccagtccactacacagatgtcagcaacatgtctagactggccagacagagactgctgggaagaagctggtccgtccctgtgatcagacacctgttcgcccctctgaaggagtacttcgcctgcgtgagcagcggcaacagcaacgccaacagccggggccccagcttctctagcggcctggtgccactgtccctgagagggagccacatgggccccatggagatctacaaaaccgtgagcgcctggaagcggcagcctgtgcgcgtgctgagcctgtttcggaatatcgataaagtcctgaaaagcctgggattcctggagagcggctctggctccggcggtggcaccctgaagtacgtggaggatgtgacaaacgtggtcagacgggatgtggagaagtggggccccttcgatctggtgtacggcagcacccaacccctgggcagctcttgtgaccggtgccctggctggtacatgtttcagttccaccggatcctgcagtacgccctgccgagacaggagtcccagcggccattcttttggattttcatggacaacttgctgctgaccgaggatgaccaggaaactaccactcggttcctgcagaccgaagccgtgaccctgcaggacgtgagaggccgggactaccagaacgccatgcgggtgtggtccaacatccctggactgaaaagcaagcacgcacctctgacccctaaagaagaggagtacctgcaggcccaggtgcggagcagaagcaagctggacgcccctaaggtggatctgctggtgaagaattgcctcctgcccctgagagagtacttcaagtatttcagccagaatagtctgcccctgggaggcagcggcggcggcagccaggagcccgtgaccttcgaggacgtggccgtgtacttcacccagaaccagtgggccagcctggaccccacccagagggccctgtacagggaggtgatgctggagaactacgccaacatcaccagcctggccgccttccccttccccaagcccgacctgatcctgcagctggagaggggcgaggccaggtggggcctggacccctggatcgccatcgagggcgaggccctgggcggcgtgggcggcccaagcagcggcgcccctcctcccagcggcggcaggcggcccaagcagcggcgcccctcctcccagcggcggcagcccagccggctccccaacctctaccgaggagggcacctctgagtccgccacccccgagagcggccctggcacctccaccgagcccagcgagggcagcgcacccggcagccctgccggcagccccacctccacagaggagggaaccagcaccgagcccagcgaaggcagcgccccaggcaccagcaccgagcctagtgagcaggagattaaacggatcaacaagatcagaagaagacttgtgaaagacagcaacaccaagaaggccggcaagacaggccccatgaaaaccctgctggttagagtgatgacacccgatctgagagagcggctggaaaacctgagaaagaagcctgaaaatatcccccagcccatcagcaatacatctagagccaacctgaataagctgctgaccgattacaccgaaatgaagaaggcgatcctgcatgtgtactgggaagagttccagaaggaccctgtgggcctgatgagccgggtggcccagcctgccagcaagaagatcgatcagaacaagctgaaacctgagatggacgagaagggcaacctgaccaccgccggctttgcctgctctcagtgtggccagcccctgttcgtgtacaagctggagcaggtgtctgagaagggcaaggcttacaccaactacttcggacggtgcaatgtggccgagcacgaaaagctgatcctgctggcccagctgaagcccgagaaggatagcgacgaagccgtgacatatagcctgggaaagtttgggcagagggccctggatttctacagcattcatgtgaccaaggagtccacccaccccgtgaagcccctggcccagatcgccggaaacagatacgcctccggacctgtgggaaaggccctgagcgacgcatgtatgggcacaatcgcctccttcctgtctaagtaccaggacatcatcatcgaacaccagaaggtggtgaagggcaaccagaagagactggagagcctgcgggagctggccggcaaggaaaacctggaataccctagcgtgaccctgccacctcagcctcacaccaaggagggcgttgatgcctacaacgaagtgatcgcccgggtgcgaatgtgggtgaacctgaacctgtggcagaagctgaagctaagcagagatgatgccaagcctctgctgagactgaagggattcccttcctttcctctggtcgagagacaggccaacgaagtggactggtgggacatggtgtgtaacgtgaagaagctgatcaacgagaaaaaggaggatggcaaggtgttttggcagaatctggctggctacaagagacaggaagccctgagaccatacctgagcagcgaggaagatcggaagaagggaaagaaattcgctcggtaccagctgggcgacctgctgctgcacctggaaaagaagcacggcgaggactggggaaaggtgtacgacgaggcctgggagcggattgacaagaaagtggaaggcctgagcaagcacatcaagctggaagaggaacggagaagcgaggacgcccagagcaaggccgccctgaccgactggctgcgggctaaggccagcttcgtgatcgagggcctgaaggaggccgacaaggacgagttctgcagatgcgagctgaagctgcagaagtggtacggggacctgcggggaaagcccttcgccatcgaagccgagaacagcatcctggacatcagcggcttcagcaagcagtacaactgtgccttcatctggcagaaggacggcgtgaagaagctgaacctgtacctgatcatcaactacttcaagggcggcaagctgcggttcaagaagatcaaacctgaagccttcgaagccaacagattctacaccgtgatcaacaaaaagagcggcgagatcgtgcccatggaggtgaacttcaacttcgacgaccccaacctgatcatcctgcctctggcctttggcaagagacagggcagagaattcatctggaacgacctgctgtccctggaaaccggcagcctgaagctggccaacggaagagtgatcgagaagacactgtacaacagaagaacccggcaggatgagcctgccctgttcgtggccctgaccttcgagcggcgggaggtcctggactcctccaatatcaaaccaatgaacctgatcggcgtggcaagaggcgaaaacatccccgccgtgatcgccctgaccgaccccgagggctgcccactgagccggtttaaggatagcctgggaaacccaacccacatcctgagaatcggcgagagctataaggagaagcagcggaccatccaggccaagaaggaggtggagcagcggagagccggcggctacagccggaagtacgccagcaaagccaagaatctggcagacgatatggtgagaaacaccgctagagatctgctgtactacgccgtgacccaggatgccatgctgatcttcgccaacctgagccggggcttcggccggcagggcaagcggaccttcatggccgagagacagtacacacggatggaggactggctgaccgccaagctggcctacgagggcctgagcaagacctacctgtccaagacactggcccagtacacctccaagacatgcagcaactgtgggtttaccatcaccagcgccgactacgacagggtgctggagaagctgaagaagacagcaacaggctggatgaccacaattaacggcaaggagctgaaggtggagggccagattacctactacaacagatacaagagacagaacgtagtcaaggacctgtccgtcgagctggatagactgagcgaagaatctgtgaacaacgacatctcctcctggacaaagggcagaagcggagaagctctgagcctcctgaagaaaagattctcccatagacccgtgcaggagaagttcgtgtgcctgaactgcggcttcgagacacacgcagccgagcaagccgccctgaacatcgccagatcctggctgttcctgcggagccaggagtacaagaaataccagacaaacaagacaaccggcaacaccgataagagagccttcgtcgagacctggcagtccttttaccggaagaagcttaaggaggtgtggaaacctgccgtgcggtctggcggatctggcggaggctccaccagccccaagaaaaagagaaaagtctaagctgccttctgcggggcttgccttctggccatgcccttcttctctcccttgcacctgtacctcttggtctttgaataaagcctgagtaggaaggctagcaaaaaaaaaaaaaaaaaaaaaaaaaaaaaaaaaaaaaaaaaaaaaaaaaaaaaaaaaaaaaaaaaaaaaaaaaaaaaaaagcccagccggctccccaacctctaccgaggagggcacctctgagtccgccacccccgagagcggccctggcacctccaccgagcccagcgagggcagcgcacccggcagccctgccggcagccccacctccacagaggagggaaccagcaccgagcccagcgaaggcagcgccccaggcaccagcaccgagcctagtgagcaggagattaaacggatcaacaagatcagaagaagacttgtgaaagacagcaacaccaagaaggccggcaagacaggccccatgaaaaccctgctggttagagtgatgacacccgatctgagagagcggctggaaaacctgagaaagaagcctgaaaatatcccccagcccatcagcaatacatctagagccaacctgaataagctgctgaccgattacaccgaaatgaagaaggcgatcctgcatgtgtactgggaagagttccagaaggaccctgtgggcctgatgagccgggtggcccagcctgccagcaagaagatcgatcagaacaagctgaaacctgagatggacgagaagggcaacctgaccaccgccggctttgcctgctctcagtgtggccagcccctgttcgtgtacaagctggagcaggtgtctgagaagggcaaggcttacaccaactacttcggacggtgcaatgtggccgagcacgaaaagctgatcctgctggcccagctgaagcccgagaaggatagcgacgaagccgtgacatatagcctgggaaagtttgggcagagggccctggatttctacagcattcatgtgaccaaggagtccacccaccccgtgaagcccctggcccagatcgccggaaacagatacgcctccggacctgtgggaaaggccctgagcgacgcatgtatgggcacaatcgcctccttcctgtctaagtaccaggacatcatcatcgaacaccagaaggtggtgaagggcaaccagaagagactggagagcctgcgggagctggccggcaaggaaaacctggaataccctagcgtgaccctgccacctcagcctcacaccaaggagggcgttgatgcctacaacgaagtgatcgcccgggtgcgaatgtgggtgaacctgaacctgtggcagaagctgaagctaagcagagatgatgccaagcctctgctgagactgaagggattcccttcctttcctctggtcgagagacaggccaacgaagtggactggtgggacatggtgtgtaacgtgaagaagctgatcaacgagaaaaaggaggatggcaaggtgttttggcagaatctggctggctacaagagacaggaagccctgagaccatacctgagcagcgaggaagatcggaagaagggaaagaaattcgctcggtaccagctgggcgacctgctgctgcacctggaaaagaagcacggcgaggactggggaaaggtgtacgacgaggcctgggagcggattgacaagaaagtggaaggcctgagcaagcacatcaagctggaagaggaacggagaagcgaggacgcccagagcaaggccgccctgaccgactggctgcgggctaaggccagcttcgtgatcgagggcctgaaggaggccgacaaggacgagttctgcagatgcgagctgaagctgcagaagtggtacggggacctgcggggaaagcccttcgccatcgaagccgagaacagcatcctggacatcagcggcttcagcaagcagtacaactgtgccttcatctggcagaaggacggcgtgaagaagctgaacctgtacctgatcatcaactacttcaagggcggcaagctgcggttcaagaagatcaaacctgaagccttcgaagccaacagattctacaccgtgatcaacaaaaagagcggcgagatcgtgcccatggaggtgaacttcaacttcgacgaccccaacctgatcatcctgcctctggcctttggcaagagacagggcagagaattcatctggaacgacctgctgtccctggaaaccggcagcctgaagctggccaacggaagagtgatcgagaagacactgtacaacagaagaacccggcaggatgagcctgccctgttcgtggccctgaccttcgagcggcgggaggtcctggactcctccaatatcaaaccaatgaacctgatcggcgtggcaagaggcgaaaacatccccgccgtgatcgccctgaccgaccccgagggctgcccactgagccggtttaaggatagcctgggaaacccaacccacatcctgagaatcggcgagagctataaggagaagcagcggaccatccaggccaagaaggaggtggagcagcggagagccggcggctacagccggaagtacgccagcaaagccaagaatctggcagacgatatggtgagaaacaccgctagagatctgctgtactacgccgtgacccaggatgccatgctgatcttcgccaacctgagccggggcttcggccggcagggcaagcggaccttcatggccgagagacagtacacacggatggaggactggctgaccgccaagctggcctacgagggcctgagcaagacctacctgtccaagacactggcccagtacacctccaagacatgcagcaactgtgggtttaccatcaccagcgccgactacgacagggtgctggagaagctgaagaagacagcaacaggctggatgaccacaattaacggcaaggagctgaaggtggagggccagattacctactacaacagatacaagagacagaacgtagtcaaggacctgtccgtcgagctggatagactgagcgaagaatctgtgaacaacgacatctcctcctggacaaagggcagaagcggagaagctctgagcctcctgaagaaaagattctcccatagacccgtgcaggagaagttcgtgtgcctgaactgcggcttcgagacacacgcagccgagcaagccgccctgaacatcgccagatcctggctgttcctgcggagccaggagtacaagaaataccagacaaacaagacaaccggcaacaccgataagagagccttcgtcgagacctggcagtccttttaccggaagaagcttaaggaggtgtggaaacctgccgtgcggtctggcggatctggcggaggctccaccagccccaagaaaaagagaaaagtctaagctgccttctgcggggcttgccttctggccatgcccttcttctctcccttgcacctgtacctcttggtctttgaataaagcctgagtaggaaggctagcaaaaaaaaaaaaaaaaaaaaaaaaaaaaaaaaaaaaaaaaaaaaaaaaaaaaaaaaaaaaaaaaaaaaaaaaaaaaaaaa

SEQ ID NO: 9051 - RNA, 8787 nt, synthetic construct
  source 1..8787: mol_type = other RNA
aggaaataagagagaaaagaagagtaagaagaaatataagagccaccatggcccctaagaagaagcgtaaagtgagccggatgaaccacgaccaggagttcgacccccctaaggtgtaccctcccgtccccgccgagaagagaaagcccatccgggtcctgagcctgttcgatggcatcgccaccggtctgctggtgctgaaggacctgggcatccaggtggataggtacattgcctccgaggtgtgcgaggactccatcaccgtgggaatggtgcgtcatcagggcaagatcatgtacgtgggcgacgtgcggagcgtgacacagaagcatatccaggagtggggccctttcgacctggtgatcggcggcagcccttgcaatgacctgagcatcgtgaacccagcccggaagggcctgtacgagggaaccggcagactgttcttcgagttttacagactgctgcacgacgcccggcctaaggaaggcgacgaccggcccttcttttggctgttcgagaatgtggtggccatgggagtcagcgacaagcgggatattagccggttcctggagagcaaccccgtgatgatcgatgccaaggaagtgagcgccgcccaccgggccagatacttctggggcaatctgcctggcatgaacagacccctggccagcaccgtgaacgacaagctggagctgcaggagtgcctggagcacggccggatcgccaagttcagcaaggtgagaaccatcaccacccgaagcaacagcatcaaacaaggcaaggaccagcactttcctgtgttcatgaacgagaaggaggacatcctgtggtgtaccgagatggagagagtgttcgggttcccagtccactacacagatgtcagcaacatgtctagactggccagacagagactgctgggaagaagctggtccgtccctgtgatcagacacctgttcgcccctctgaaggagtacttcgcctgcgtgagcagcggcaacagcaacgccaacagccggggccccagcttctctagcggcctggtgccactgtccctgagagggagccacatgggccccatggagatctacaaaaccgtgagcgcctggaagcggcagcctgtgcgcgtgctgagcctgtttcggaatatcgataaagtcctgaaaagcctgggattcctggagagcggctctggctccggcggtggcaccctgaagtacgtggaggatgtgacaaacgtggtcagacgggatgtggagaagtggggccccttcgatctggtgtacggcagcacccaacccctgggcagctcttgtgaccggtgccctggctggtacatgtttcagttccaccggatcctgcagtacgccctgccgagacaggagtcccagcggccattcttttggattttcatggacaacttgctgctgaccgaggatgaccaggaaactaccactcggttcctgcagaccgaagccgtgaccctgcaggacgtgagaggccgggactaccagaacgccatgcgggtgtggtccaacatccctggactgaaaagcaagcacgcacctctgacccctaaagaagaggagtacctgcaggcccaggtgcggagcagaagcaagctggacgcccctaaggtggatctgctggtgaagaattgcctcctgcccctgagagagtacttcaagtatttcagccagaatagtctgcccctgggaggcagcggcggcggcgccagggtgagcgtgatgttcagcgacgtgagcatcgccttcagcagggaggagtgggagtacctggacctgagccagagggacctgtacaaggacgtgatgatggagaactacaggaacgtggccagcctgggctacttcatcagcaagcccgacgtgatcagcctgctggagcagggcaaggagccctggaaggtggtgaggaggaggaggaggaaccccgacctggagaccaaggacgagggcggcccaagcagcggcgcccctcctcccagcggcggcaggcggcccaagcagcggcgcccctcctcccagcggcggcagcccagccggctccccaacctctaccgaggagggcacctctgagtccgccacccccgagagcggccctggcacctccaccgagcccagcgagggcagcgcacccggcagccctgccggcagccccacctccacagaggagggaaccagcaccgagcccagcgaaggcagcgccccaggcaccagcaccgagcctagtgagcaggagattaaacggatcaacaagatcagaagaagacttgtgaaagacagcaacaccaagaaggccggcaagacaggccccatgaaaaccctgctggttagagtgatgacacccgatctgagagagcggctggaaaacctgagaaagaagcctgaaaatatcccccagcccatcagcaatacatctagagccaacctgaataagctgctgaccgattacaccgaaatgaagaaggcgatcctgcatgtgtactgggaagagttccagaaggaccctgtgggcctgatgagccgggtggcccagcctgccagcaagaagatcgatcagaacaagctgaaacctgagatggacgagaagggcaacctgaccaccgccggctttgcctgctctcagtgtggccagcccctgttcgtgtacaagctggagcaggtgtctgagaagggcaaggcttacaccaactacttcggacggtgcaatgtggccgagcacgaaaagctgatcctgctggcccagctgaagcccgagaaggatagcgacgaagccgtgacatatagcctgggaaagtttgggcagagggccctggatttctacagcattcatgtgaccaaggagtccacccaccccgtgaagcccctggcccagatcgccggaaacagatacgcctccggacctgtgggaaaggccctgagcgacgcatgtatgggcacaatcgcctccttcctgtctaagtaccaggacatcatcatcgaacaccagaaggtggtgaagggcaaccagaagagactggagagcctgcgggagctggccggcaaggaaaacctggaataccctagcgtgaccctgccacctcagcctcacaccaaggagggcgttgatgcctacaacgaagtgatcgcccgggtgcgaatgtgggtgaacctgaacctgtggcagaagctgaagctaagcagagatgatgccaagcctctgctgagactgaagggattcccttcctttcctctggtcgagagacaggccaacgaagtggactggtgggacatggtgtgtaacgtgaagaagctgatcaacgagaaaaaggaggatggcaaggtgttttggcagaatctggctggctacaagagacaggaagccctgagaccatacctgagcagcgaggaagatcggaagaagggaaagaaattcgctcggtaccagctgggcgacctgctgctgcacctggaaaagaagcacggcgaggactggggaaaggtgtacgacgaggcctgggagcggattgacaagaaagtggaaggcctgagcaagcacatcaagctggaagaggaacggagaagcgaggacgcccagagcaaggccgccctgaccgactggctgcgggctaaggccagcttcgtgatcgagggcctgaaggaggccgacaaggacgagttctgcagatgcgagctgaagctgcagaagtggtacggggacctgcggggaaagcccttcgccatcgaagccgagaacagcatcctggacatcagcggcttcagcaagcagtacaactgtgccttcatctggcagaaggacggcgtgaagaagctgaacctgtacctgatcatcaactacttcaagggcggcaagctgcggttcaagaagatcaaacctgaagccttcgaagccaacagattctacaccgtgatcaacaaaaagagcggcgagatcgtgcccatggaggtgaacttcaacttcgacgaccccaacctgatcatcctgcctctggcctttggcaagagacagggcagagaattcatctggaacgacctgctgtccctggaaaccggcagcctgaagctggccaacggaagagtgatcgagaagacactgtacaacagaagaacccggcaggatgagcctgccctgttcgtggccctgaccttcgagcggcgggaggtcctggactcctccaatatcaaaccaatgaacctgatcggcgtggcaagaggcgaaaacatccccgccgtgatcgccctgaccgaccccgagggctgcccactgagccggtttaaggatagcctgggaaacccaacccacatcctgagaatcggcgagagctataaggagaagcagcggaccatccaggccaagaaggaggtggagcagcggagagccggcggctacagccggaagtacgccagcaaagccaagaatctggcagacgatatggtgagaaacaccgctagagatctgctgtactacgccgtgacccaggatgccatgctgatcttcgccaacctgagccggggcttcggccggcagggcaagcggaccttcatggccgagagacagtacacacggatggaggactggctgaccgccaagctggcctacgagggcctgagcaagacctacctgtccaagacactggcccagtacacctccaagacatgcagcaactgtgggtttaccatcaccagcgccgactacgacagggtgctggagaagctgaagaagacagcaacaggctggatgaccacaattaacggcaaggagctgaaggtggagggccagattacctactacaacagatacaagagacagaacgtagtcaaggacctgtccgtcgagctggatagactgagcgaagaatctgtgaacaacgacatctcctcctggacaaagggcagaagcggagaagctctgagcctcctgaagaaaagattctcccatagacccgtgcaggagaagttcgtgtgcctgaactgcggcttcgagacacacgcagccgagcaagccgccctgaacatcgccagatcctggctgttcctgcggagccaggagtacaagaaataccagacaaacaagacaaccggcaacaccgataagagagccttcgtcgagacctggcagtccttttaccggaagaagcttaaggaggtgtggaaacctgccgtgcggtctggcggatctggcggaggctccaccagccccaagaaaaagagaaaagtctaagctgccttctgcggggcttgccttctggccatgcccttcttctctcccttgcacctgtacctcttggtctttgaataaagcctgagtaggaaggctagcaaaaaaaaaaaaaaaaaaaaaaaaaaaaaaaaaaaaaaaaaaaaaaaaaaaaaaaaaaaaaaaaaaaaaaaaaaaaaaaagcccagccggctccccaacctctaccgaggagggcacctctgagtccgccacccccgagagcggccctggcacctccaccgagcccagcgagggcagcgcacccggcagccctgccggcagccccacctccacagaggagggaaccagcaccgagcccagcgaaggcagcgccccaggcaccagcaccgagcctagtgagcaggagattaaacggatcaacaagatcagaagaagacttgtgaaagacagcaacaccaagaaggccggcaagacaggccccatgaaaaccctgctggttagagtgatgacacccgatctgagagagcggctggaaaacctgagaaagaagcctgaaaatatcccccagcccatcagcaatacatctagagccaacctgaataagctgctgaccgattacaccgaaatgaagaaggcgatcctgcatgtgtactgggaagagttccagaaggaccctgtgggcctgatgagccgggtggcccagcctgccagcaagaagatcgatcagaacaagctgaaacctgagatggacgagaagggcaacctgaccaccgccggctttgcctgctctcagtgtggccagcccctgttcgtgtacaagctggagcaggtgtctgagaagggcaaggcttacaccaactacttcggacggtgcaatgtggccgagcacgaaaagctgatcctgctggcccagctgaagcccgagaaggatagcgacgaagccgtgacatatagcctgggaaagtttgggcagagggccctggatttctacagcattcatgtgaccaaggagtccacccaccccgtgaagcccctggcccagatcgccggaaacagatacgcctccggacctgtgggaaaggccctgagcgacgcatgtatgggcacaatcgcctccttcctgtctaagtaccaggacatcatcatcgaacaccagaaggtggtgaagggcaaccagaagagactggagagcctgcgggagctggccggcaaggaaaacctggaataccctagcgtgaccctgccacctcagcctcacaccaaggagggcgttgatgcctacaacgaagtgatcgcccgggtgcgaatgtgggtgaacctgaacctgtggcagaagctgaagctaagcagagatgatgccaagcctctgctgagactgaagggattcccttcctttcctctggtcgagagacaggccaacgaagtggactggtgggacatggtgtgtaacgtgaagaagctgatcaacgagaaaaaggaggatggcaaggtgttttggcagaatctggctggctacaagagacaggaagccctgagaccatacctgagcagcgaggaagatcggaagaagggaaagaaattcgctcggtaccagctgggcgacctgctgctgcacctggaaaagaagcacggcgaggactggggaaaggtgtacgacgaggcctgggagcggattgacaagaaagtggaaggcctgagcaagcacatcaagctggaagaggaacggagaagcgaggacgcccagagcaaggccgccctgaccgactggctgcgggctaaggccagcttcgtgatcgagggcctgaaggaggccgacaaggacgagttctgcagatgcgagctgaagctgcagaagtggtacggggacctgcggggaaagcccttcgccatcgaagccgagaacagcatcctggacatcagcggcttcagcaagcagtacaactgtgccttcatctggcagaaggacggcgtgaagaagctgaacctgtacctgatcatcaactacttcaagggcggcaagctgcggttcaagaagatcaaacctgaagccttcgaagccaacagattctacaccgtgatcaacaaaaagagcggcgagatcgtgcccatggaggtgaacttcaacttcgacgaccccaacctgatcatcctgcctctggcctttggcaagagacagggcagagaattcatctggaacgacctgctgtccctggaaaccggcagcctgaagctggccaacggaagagtgatcgagaagacactgtacaacagaagaacccggcaggatgagcctgccctgttcgtggccctgaccttcgagcggcgggaggtcctggactcctccaatatcaaaccaatgaacctgatcggcgtggcaagaggcgaaaacatccccgccgtgatcgccctgaccgaccccgagggctgcccactgagccggtttaaggatagcctgggaaacccaacccacatcctgagaatcggcgagagctataaggagaagcagcggaccatccaggccaagaaggaggtggagcagcggagagccggcggctacagccggaagtacgccagcaaagccaagaatctggcagacgatatggtgagaaacaccgctagagatctgctgtactacgccgtgacccaggatgccatgctgatcttcgccaacctgagccggggcttcggccggcagggcaagcggaccttcatggccgagagacagtacacacggatggaggactggctgaccgccaagctggcctacgagggcctgagcaagacctacctgtccaagacactggcccagtacacctccaagacatgcagcaactgtgggtttaccatcaccagcgccgactacgacagggtgctggagaagctgaagaagacagcaacaggctggatgaccacaattaacggcaaggagctgaaggtggagggccagattacctactacaacagatacaagagacagaacgtagtcaaggacctgtccgtcgagctggatagactgagcgaagaatctgtgaacaacgacatctcctcctggacaaagggcagaagcggagaagctctgagcctcctgaagaaaagattctcccatagacccgtgcaggagaagttcgtgtgcctgaactgcggcttcgagacacacgcagccgagcaagccgccctgaacatcgccagatcctggctgttcctgcggagccaggagtacaagaaataccagacaaacaagacaaccggcaacaccgataagagagccttcgtcgagacctggcagtccttttaccggaagaagcttaaggaggtgtggaaacctgccgtgcggtctggcggatctggcggaggctccaccagccccaagaaaaagagaaaagtctaagctgccttctgcggggcttgccttctggccatgcccttcttctctcccttgcacctgtacctcttggtctttgaataaagcctgagtaggaaggctagcaaaaaaaaaaaaaaaaaaaaaaaaaaaaaaaaaaaaaaaaaaaaaaaaaaaaaaaaaaaaaaaaaaaaaaaaaaaaaaaa

SEQ ID NO: 9052 - RNA, 8787 nt, synthetic construct
  source 1..8787: mol_type = other RNA
aggaaataagagagaaaagaagagtaagaagaaatataagagccaccatggcccctaagaagaagcgtaaagtgagccggatgaaccacgaccaggagttcgacccccctaaggtgtaccctcccgtccccgccgagaagagaaagcccatccgggtcctgagcctgttcgatggcatcgccaccggtctgctggtgctgaaggacctgggcatccaggtggataggtacattgcctccgaggtgtgcgaggactccatcaccgtgggaatggtgcgtcatcagggcaagatcatgtacgtgggcgacgtgcggagcgtgacacagaagcatatccaggagtggggccctttcgacctggtgatcggcggcagcccttgcaatgacctgagcatcgtgaacccagcccggaagggcctgtacgagggaaccggcagactgttcttcgagttttacagactgctgcacgacgcccggcctaaggaaggcgacgaccggcccttcttttggctgttcgagaatgtggtggccatgggagtcagcgacaagcgggatattagccggttcctggagagcaaccccgtgatgatcgatgccaaggaagtgagcgccgcccaccgggccagatacttctggggcaatctgcctggcatgaacagacccctggccagcaccgtgaacgacaagctggagctgcaggagtgcctggagcacggccggatcgccaagttcagcaaggtgagaaccatcaccacccgaagcaacagcatcaaacaaggcaaggaccagcactttcctgtgttcatgaacgagaaggaggacatcctgtggtgtaccgagatggagagagtgttcgggttcccagtccactacacagatgtcagcaacatgtctagactggccagacagagactgctgggaagaagctggtccgtccctgtgatcagacacctgttcgcccctctgaaggagtacttcgcctgcgtgagcagcggcaacagcaacgccaacagccggggccccagcttctctagcggcctggtgccactgtccctgagagggagccacatgggccccatggagatctacaaaaccgtgagcgcctggaagcggcagcctgtgcgcgtgctgagcctgtttcggaatatcgataaagtcctgaaaagcctgggattcctggagagcggctctggctccggcggtggcaccctgaagtacgtggaggatgtgacaaacgtggtcagacgggatgtggagaagtggggccccttcgatctggtgtacggcagcacccaacccctgggcagctcttgtgaccggtgccctggctggtacatgtttcagttccaccggatcctgcagtacgccctgccgagacaggagtcccagcggccattcttttggattttcatggacaacttgctgctgaccgaggatgaccaggaaactaccactcggttcctgcagaccgaagccgtgaccctgcaggacgtgagaggccgggactaccagaacgccatgcgggtgtggtccaacatccctggactgaaaagcaagcacgcacctctgacccctaaagaagaggagtacctgcaggcccaggtgcggagcagaagcaagctggacgcccctaaggtggatctgctggtgaagaattgcctcctgcccctgagagagtacttcaagtatttcagccagaatagtctgcccctgggaggcagcggcggcggcaagcccctggccgtgaggttcgccgacgtggccgtgtacttcagccccgaggagtggggctacctgaggcccgcccagagggccctgtacagggacgtgatgcaggagacctacggccacctgggcgccctgggcttccccggccccaagcccgccctgatcagctggatggagcaggagagcgaggcctggagccccgccgcccaggaccccgaggagggcgagaacctgggcggcgccctgggcggcccaagcagcggcgcccctcctcccagcggcggcaggcggcccaagcagcggcgcccctcctcccagcggcggcagcccagccggctccccaacctctaccgaggagggcacctctgagtccgccacccccgagagcggccctggcacctccaccgagcccagcgagggcagcgcacccggcagccctgccggcagccccacctccacagaggagggaaccagcaccgagcccagcgaaggcagcgccccaggcaccagcaccgagcctagtgagcaggagattaaacggatcaacaagatcagaagaagacttgtgaaagacagcaacaccaagaaggccggcaagacaggccccatgaaaaccctgctggttagagtgatgacacccgatctgagagagcggctggaaaacctgagaaagaagcctgaaaatatcccccagcccatcagcaatacatctagagccaacctgaataagctgctgaccgattacaccgaaatgaagaaggcgatcctgcatgtgtactgggaagagttccagaaggaccctgtgggcctgatgagccgggtggcccagcctgccagcaagaagatcgatcagaacaagctgaaacctgagatggacgagaagggcaacctgaccaccgccggctttgcctgctctcagtgtggccagcccctgttcgtgtacaagctggagcaggtgtctgagaagggcaaggcttacaccaactacttcggacggtgcaatgtggccgagcacgaaaagctgatcctgctggcccagctgaagcccgagaaggatagcgacgaagccgtgacatatagcctgggaaagtttgggcagagggccctggatttctacagcattcatgtgaccaaggagtccacccaccccgtgaagcccctggcccagatcgccggaaacagatacgcctccggacctgtgggaaaggccctgagcgacgcatgtatgggcacaatcgcctccttcctgtctaagtaccaggacatcatcatcgaacaccagaaggtggtgaagggcaaccagaagagactggagagcctgcgggagctggccggcaaggaaaacctggaataccctagcgtgaccctgccacctcagcctcacaccaaggagggcgttgatgcctacaacgaagtgatcgcccgggtgcgaatgtgggtgaacctgaacctgtggcagaagctgaagctaagcagagatgatgccaagcctctgctgagactgaagggattcccttcctttcctctggtcgagagacaggccaacgaagtggactggtgggacatggtgtgtaacgtgaagaagctgatcaacgagaaaaaggaggatggcaaggtgttttggcagaatctggctggctacaagagacaggaagccctgagaccatacctgagcagcgaggaagatcggaagaagggaaagaaattcgctcggtaccagctgggcgacctgctgctgcacctggaaaagaagcacggcgaggactggggaaaggtgtacgacgaggcctgggagcggattgacaagaaagtggaaggcctgagcaagcacatcaagctggaagaggaacggagaagcgaggacgcccagagcaaggccgccctgaccgactggctgcgggctaaggccagcttcgtgatcgagggcctgaaggaggccgacaaggacgagttctgcagatgcgagctgaagctgcagaagtggtacggggacctgcggggaaagcccttcgccatcgaagccgagaacagcatcctggacatcagcggcttcagcaagcagtacaactgtgccttcatctggcagaaggacggcgtgaagaagctgaacctgtacctgatcatcaactacttcaagggcggcaagctgcggttcaagaagatcaaacctgaagccttcgaagccaacagattctacaccgtgatcaacaaaaagagcggcgagatcgtgcccatggaggtgaacttcaacttcgacgaccccaacctgatcatcctgcctctggcctttggcaagagacagggcagagaattcatctggaacgacctgctgtccctggaaaccggcagcctgaagctggccaacggaagagtgatcgagaagacactgtacaacagaagaacccggcaggatgagcctgccctgttcgtggccctgaccttcgagcggcgggaggtcctggactcctccaatatcaaaccaatgaacctgatcggcgtggcaagaggcgaaaacatccccgccgtgatcgccctgaccgaccccgagggctgcccactgagccggtttaaggatagcctgggaaacccaacccacatcctgagaatcggcgagagctataaggagaagcagcggaccatccaggccaagaaggaggtggagcagcggagagccggcggctacagccggaagtacgccagcaaagccaagaatctggcagacgatatggtgagaaacaccgctagagatctgctgtactacgccgtgacccaggatgccatgctgatcttcgccaacctgagccggggcttcggccggcagggcaagcggaccttcatggccgagagacagtacacacggatggaggactggctgaccgccaagctggcctacgagggcctgagcaagacctacctgtccaagacactggcccagtacacctccaagacatgcagcaactgtgggtttaccatcaccagcgccgactacgacagggtgctggagaagctgaagaagacagcaacaggctggatgaccacaattaacggcaaggagctgaaggtggagggccagattacctactacaacagatacaagagacagaacgtagtcaaggacctgtccgtcgagctggatagactgagcgaagaatctgtgaacaacgacatctcctcctggacaaagggcagaagcggagaagctctgagcctcctgaagaaaagattctcccatagacccgtgcaggagaagttcgtgtgcctgaactgcggcttcgagacacacgcagccgagcaagccgccctgaacatcgccagatcctggctgttcctgcggagccaggagtacaagaaataccagacaaacaagacaaccggcaacaccgataagagagccttcgtcgagacctggcagtccttttaccggaagaagcttaaggaggtgtggaaacctgccgtgcggtctggcggatctggcggaggctccaccagccccaagaaaaagagaaaagtctaagctgccttctgcggggcttgccttctggccatgcccttcttctctcccttgcacctgtacctcttggtctttgaataaagcctgagtaggaaggctagcaaaaaaaaaaaaaaaaaaaaaaaaaaaaaaaaaaaaaaaaaaaaaaaaaaaaaaaaaaaaaaaaaaaaaaaaaaaaaaaagcccagccggctccccaacctctaccgaggagggcacctctgagtccgccacccccgagagcggccctggcacctccaccgagcccagcgagggcagcgcacccggcagccctgccggcagccccacctccacagaggagggaaccagcaccgagcccagcgaaggcagcgccccaggcaccagcaccgagcctagtgagcaggagattaaacggatcaacaagatcagaagaagacttgtgaaagacagcaacaccaagaaggccggcaagacaggccccatgaaaaccctgctggttagagtgatgacacccgatctgagagagcggctggaaaacctgagaaagaagcctgaaaatatcccccagcccatcagcaatacatctagagccaacctgaataagctgctgaccgattacaccgaaatgaagaaggcgatcctgcatgtgtactgggaagagttccagaaggaccctgtgggcctgatgagccgggtggcccagcctgccagcaagaagatcgatcagaacaagctgaaacctgagatggacgagaagggcaacctgaccaccgccggctttgcctgctctcagtgtggccagcccctgttcgtgtacaagctggagcaggtgtctgagaagggcaaggcttacaccaactacttcggacggtgcaatgtggccgagcacgaaaagctgatcctgctggcccagctgaagcccgagaaggatagcgacgaagccgtgacatatagcctgggaaagtttgggcagagggccctggatttctacagcattcatgtgaccaaggagtccacccaccccgtgaagcccctggcccagatcgccggaaacagatacgcctccggacctgtgggaaaggccctgagcgacgcatgtatgggcacaatcgcctccttcctgtctaagtaccaggacatcatcatcgaacaccagaaggtggtgaagggcaaccagaagagactggagagcctgcgggagctggccggcaaggaaaacctggaataccctagcgtgaccctgccacctcagcctcacaccaaggagggcgttgatgcctacaacgaagtgatcgcccgggtgcgaatgtgggtgaacctgaacctgtggcagaagctgaagctaagcagagatgatgccaagcctctgctgagactgaagggattcccttcctttcctctggtcgagagacaggccaacgaagtggactggtgggacatggtgtgtaacgtgaagaagctgatcaacgagaaaaaggaggatggcaaggtgttttggcagaatctggctggctacaagagacaggaagccctgagaccatacctgagcagcgaggaagatcggaagaagggaaagaaattcgctcggtaccagctgggcgacctgctgctgcacctggaaaagaagcacggcgaggactggggaaaggtgtacgacgaggcctgggagcggattgacaagaaagtggaaggcctgagcaagcacatcaagctggaagaggaacggagaagcgaggacgcccagagcaaggccgccctgaccgactggctgcgggctaaggccagcttcgtgatcgagggcctgaaggaggccgacaaggacgagttctgcagatgcgagctgaagctgcagaagtggtacggggacctgcggggaaagcccttcgccatcgaagccgagaacagcatcctggacatcagcggcttcagcaagcagtacaactgtgccttcatctggcagaaggacggcgtgaagaagctgaacctgtacctgatcatcaactacttcaagggcggcaagctgcggttcaagaagatcaaacctgaagccttcgaagccaacagattctacaccgtgatcaacaaaaagagcggcgagatcgtgcccatggaggtgaacttcaacttcgacgaccccaacctgatcatcctgcctctggcctttggcaagagacagggcagagaattcatctggaacgacctgctgtccctggaaaccggcagcctgaagctggccaacggaagagtgatcgagaagacactgtacaacagaagaacccggcaggatgagcctgccctgttcgtggccctgaccttcgagcggcgggaggtcctggactcctccaatatcaaaccaatgaacctgatcggcgtggcaagaggcgaaaacatccccgccgtgatcgccctgaccgaccccgagggctgcccactgagccggtttaaggatagcctgggaaacccaacccacatcctgagaatcggcgagagctataaggagaagcagcggaccatccaggccaagaaggaggtggagcagcggagagccggcggctacagccggaagtacgccagcaaagccaagaatctggcagacgatatggtgagaaacaccgctagagatctgctgtactacgccgtgacccaggatgccatgctgatcttcgccaacctgagccggggcttcggccggcagggcaagcggaccttcatggccgagagacagtacacacggatggaggactggctgaccgccaagctggcctacgagggcctgagcaagacctacctgtccaagacactggcccagtacacctccaagacatgcagcaactgtgggtttaccatcaccagcgccgactacgacagggtgctggagaagctgaagaagacagcaacaggctggatgaccacaattaacggcaaggagctgaaggtggagggccagattacctactacaacagatacaagagacagaacgtagtcaaggacctgtccgtcgagctggatagactgagcgaagaatctgtgaacaacgacatctcctcctggacaaagggcagaagcggagaagctctgagcctcctgaagaaaagattctcccatagacccgtgcaggagaagttcgtgtgcctgaactgcggcttcgagacacacgcagccgagcaagccgccctgaacatcgccagatcctggctgttcctgcggagccaggagtacaagaaataccagacaaacaagacaaccggcaacaccgataagagagccttcgtcgagacctggcagtccttttaccggaagaagcttaaggaggtgtggaaacctgccgtgcggtctggcggatctggcggaggctccaccagccccaagaaaaagagaaaagtctaagctgccttctgcggggcttgccttctggccatgcccttcttctctcccttgcacctgtacctcttggtctttgaataaagcctgagtaggaaggctagcaaaaaaaaaaaaaaaaaaaaaaaaaaaaaaaaaaaaaaaaaaaaaaaaaaaaaaaaaaaaaaaaaaaaaaaaaaaaaaaa

SEQ ID NO: 9053 - RNA, 8787 nt, synthetic construct
  source 1..8787: mol_type = other RNA
aggaaataagagagaaaagaagagtaagaagaaatataagagccaccatggcccctaagaagaagcgtaaagtgagccggatgaaccacgaccaggagttcgacccccctaaggtgtaccctcccgtccccgccgagaagagaaagcccatccgggtcctgagcctgttcgatggcatcgccaccggtctgctggtgctgaaggacctgggcatccaggtggataggtacattgcctccgaggtgtgcgaggactccatcaccgtgggaatggtgcgtcatcagggcaagatcatgtacgtgggcgacgtgcggagcgtgacacagaagcatatccaggagtggggccctttcgacctggtgatcggcggcagcccttgcaatgacctgagcatcgtgaacccagcccggaagggcctgtacgagggaaccggcagactgttcttcgagttttacagactgctgcacgacgcccggcctaaggaaggcgacgaccggcccttcttttggctgttcgagaatgtggtggccatgggagtcagcgacaagcgggatattagccggttcctggagagcaaccccgtgatgatcgatgccaaggaagtgagcgccgcccaccgggccagatacttctggggcaatctgcctggcatgaacagacccctggccagcaccgtgaacgacaagctggagctgcaggagtgcctggagcacggccggatcgccaagttcagcaaggtgagaaccatcaccacccgaagcaacagcatcaaacaaggcaaggaccagcactttcctgtgttcatgaacgagaaggaggacatcctgtggtgtaccgagatggagagagtgttcgggttcccagtccactacacagatgtcagcaacatgtctagactggccagacagagactgctgggaagaagctggtccgtccctgtgatcagacacctgttcgcccctctgaaggagtacttcgcctgcgtgagcagcggcaacagcaacgccaacagccggggccccagcttctctagcggcctggtgccactgtccctgagagggagccacatgggccccatggagatctacaaaaccgtgagcgcctggaagcggcagcctgtgcgcgtgctgagcctgtttcggaatatcgataaagtcctgaaaagcctgggattcctggagagcggctctggctccggcggtggcaccctgaagtacgtggaggatgtgacaaacgtggtcagacgggatgtggagaagtggggccccttcgatctggtgtacggcagcacccaacccctgggcagctcttgtgaccggtgccctggctggtacatgtttcagttccaccggatcctgcagtacgccctgccgagacaggagtcccagcggccattcttttggattttcatggacaacttgctgctgaccgaggatgaccaggaaactaccactcggttcctgcagaccgaagccgtgaccctgcaggacgtgagaggccgggactaccagaacgccatgcgggtgtggtccaacatccctggactgaaaagcaagcacgcacctctgacccctaaagaagaggagtacctgcaggcccaggtgcggagcagaagcaagctggacgcccctaaggtggatctgctggtgaagaattgcctcctgcccctgagagagtacttcaagtatttcagccagaatagtctgcccctgggaggcagcggcggcggcatggccttcgaggacgtggccgtgtacttcagccaggaggagtggggcctgctggacaccacccagagggccctgtacaggcacgtgatgctggagaacttcaccctggtgaccagcctgggcctgagcaccagcaggccccacgtggtgatccagctggagaggggcgaggagccctgggtgcccagcggcaccgacaccaccctgagcaggaccacctacaggaggaggaaccccggcagcggcggcccaagcagcggcgcccctcctcccagcggcggcaggcggcccaagcagcggcgcccctcctcccagcggcggcagcccagccggctccccaacctctaccgaggagggcacctctgagtccgccacccccgagagcggccctggcacctccaccgagcccagcgagggcagcgcacccggcagccctgccggcagccccacctccacagaggagggaaccagcaccgagcccagcgaaggcagcgccccaggcaccagcaccgagcctagtgagcaggagattaaacggatcaacaagatcagaagaagacttgtgaaagacagcaacaccaagaaggccggcaagacaggccccatgaaaaccctgctggttagagtgatgacacccgatctgagagagcggctggaaaacctgagaaagaagcctgaaaatatcccccagcccatcagcaatacatctagagccaacctgaataagctgctgaccgattacaccgaaatgaagaaggcgatcctgcatgtgtactgggaagagttccagaaggaccctgtgggcctgatgagccgggtggcccagcctgccagcaagaagatcgatcagaacaagctgaaacctgagatggacgagaagggcaacctgaccaccgccggctttgcctgctctcagtgtggccagcccctgttcgtgtacaagctggagcaggtgtctgagaagggcaaggcttacaccaactacttcggacggtgcaatgtggccgagcacgaaaagctgatcctgctggcccagctgaagcccgagaaggatagcgacgaagccgtgacatatagcctgggaaagtttgggcagagggccctggatttctacagcattcatgtgaccaaggagtccacccaccccgtgaagcccctggcccagatcgccggaaacagatacgcctccggacctgtgggaaaggccctgagcgacgcatgtatgggcacaatcgcctccttcctgtctaagtaccaggacatcatcatcgaacaccagaaggtggtgaagggcaaccagaagagactggagagcctgcgggagctggccggcaaggaaaacctggaataccctagcgtgaccctgccacctcagcctcacaccaaggagggcgttgatgcctacaacgaagtgatcgcccgggtgcgaatgtgggtgaacctgaacctgtggcagaagctgaagctaagcagagatgatgccaagcctctgctgagactgaagggattcccttcctttcctctggtcgagagacaggccaacgaagtggactggtgggacatggtgtgtaacgtgaagaagctgatcaacgagaaaaaggaggatggcaaggtgttttggcagaatctggctggctacaagagacaggaagccctgagaccatacctgagcagcgaggaagatcggaagaagggaaagaaattcgctcggtaccagctgggcgacctgctgctgcacctggaaaagaagcacggcgaggactggggaaaggtgtacgacgaggcctgggagcggattgacaagaaagtggaaggcctgagcaagcacatcaagctggaagaggaacggagaagcgaggacgcccagagcaaggccgccctgaccgactggctgcgggctaaggccagcttcgtgatcgagggcctgaaggaggccgacaaggacgagttctgcagatgcgagctgaagctgcagaagtggtacggggacctgcggggaaagcccttcgccatcgaagccgagaacagcatcctggacatcagcggcttcagcaagcagtacaactgtgccttcatctggcagaaggacggcgtgaagaagctgaacctgtacctgatcatcaactacttcaagggcggcaagctgcggttcaagaagatcaaacctgaagccttcgaagccaacagattctacaccgtgatcaacaaaaagagcggcgagatcgtgcccatggaggtgaacttcaacttcgacgaccccaacctgatcatcctgcctctggcctttggcaagagacagggcagagaattcatctggaacgacctgctgtccctggaaaccggcagcctgaagctggccaacggaagagtgatcgagaagacactgtacaacagaagaacccggcaggatgagcctgccctgttcgtggccctgaccttcgagcggcgggaggtcctggactcctccaatatcaaaccaatgaacctgatcggcgtggcaagaggcgaaaacatccccgccgtgatcgccctgaccgaccccgagggctgcccactgagccggtttaaggatagcctgggaaacccaacccacatcctgagaatcggcgagagctataaggagaagcagcggaccatccaggccaagaaggaggtggagcagcggagagccggcggctacagccggaagtacgccagcaaagccaagaatctggcagacgatatggtgagaaacaccgctagagatctgctgtactacgccgtgacccaggatgccatgctgatcttcgccaacctgagccggggcttcggccggcagggcaagcggaccttcatggccgagagacagtacacacggatggaggactggctgaccgccaagctggcctacgagggcctgagcaagacctacctgtccaagacactggcccagtacacctccaagacatgcagcaactgtgggtttaccatcaccagcgccgactacgacagggtgctggagaagctgaagaagacagcaacaggctggatgaccacaattaacggcaaggagctgaaggtggagggccagattacctactacaacagatacaagagacagaacgtagtcaaggacctgtccgtcgagctggatagactgagcgaagaatctgtgaacaacgacatctcctcctggacaaagggcagaagcggagaagctctgagcctcctgaagaaaagattctcccatagacccgtgcaggagaagttcgtgtgcctgaactgcggcttcgagacacacgcagccgagcaagccgccctgaacatcgccagatcctggctgttcctgcggagccaggagtacaagaaataccagacaaacaagacaaccggcaacaccgataagagagccttcgtcgagacctggcagtccttttaccggaagaagcttaaggaggtgtggaaacctgccgtgcggtctggcggatctggcggaggctccaccagccccaagaaaaagagaaaagtctaagctgccttctgcggggcttgccttctggccatgcccttcttctctcccttgcacctgtacctcttggtctttgaataaagcctgagtaggaaggctagcaaaaaaaaaaaaaaaaaaaaaaaaaaaaaaaaaaaaaaaaaaaaaaaaaaaaaaaaaaaaaaaaaaaaaaaaaaaaaaaagcccagccggctccccaacctctaccgaggagggcacctctgagtccgccacccccgagagcggccctggcacctccaccgagcccagcgagggcagcgcacccggcagccctgccggcagccccacctccacagaggagggaaccagcaccgagcccagcgaaggcagcgccccaggcaccagcaccgagcctagtgagcaggagattaaacggatcaacaagatcagaagaagacttgtgaaagacagcaacaccaagaaggccggcaagacaggccccatgaaaaccctgctggttagagtgatgacacccgatctgagagagcggctggaaaacctgagaaagaagcctgaaaatatcccccagcccatcagcaatacatctagagccaacctgaataagctgctgaccgattacaccgaaatgaagaaggcgatcctgcatgtgtactgggaagagttccagaaggaccctgtgggcctgatgagccgggtggcccagcctgccagcaagaagatcgatcagaacaagctgaaacctgagatggacgagaagggcaacctgaccaccgccggctttgcctgctctcagtgtggccagcccctgttcgtgtacaagctggagcaggtgtctgagaagggcaaggcttacaccaactacttcggacggtgcaatgtggccgagcacgaaaagctgatcctgctggcccagctgaagcccgagaaggatagcgacgaagccgtgacatatagcctgggaaagtttgggcagagggccctggatttctacagcattcatgtgaccaaggagtccacccaccccgtgaagcccctggcccagatcgccggaaacagatacgcctccggacctgtgggaaaggccctgagcgacgcatgtatgggcacaatcgcctccttcctgtctaagtaccaggacatcatcatcgaacaccagaaggtggtgaagggcaaccagaagagactggagagcctgcgggagctggccggcaaggaaaacctggaataccctagcgtgaccctgccacctcagcctcacaccaaggagggcgttgatgcctacaacgaagtgatcgcccgggtgcgaatgtgggtgaacctgaacctgtggcagaagctgaagctaagcagagatgatgccaagcctctgctgagactgaagggattcccttcctttcctctggtcgagagacaggccaacgaagtggactggtgggacatggtgtgtaacgtgaagaagctgatcaacgagaaaaaggaggatggcaaggtgttttggcagaatctggctggctacaagagacaggaagccctgagaccatacctgagcagcgaggaagatcggaagaagggaaagaaattcgctcggtaccagctgggcgacctgctgctgcacctggaaaagaagcacggcgaggactggggaaaggtgtacgacgaggcctgggagcggattgacaagaaagtggaaggcctgagcaagcacatcaagctggaagaggaacggagaagcgaggacgcccagagcaaggccgccctgaccgactggctgcgggctaaggccagcttcgtgatcgagggcctgaaggaggccgacaaggacgagttctgcagatgcgagctgaagctgcagaagtggtacggggacctgcggggaaagcccttcgccatcgaagccgagaacagcatcctggacatcagcggcttcagcaagcagtacaactgtgccttcatctggcagaaggacggcgtgaagaagctgaacctgtacctgatcatcaactacttcaagggcggcaagctgcggttcaagaagatcaaacctgaagccttcgaagccaacagattctacaccgtgatcaacaaaaagagcggcgagatcgtgcccatggaggtgaacttcaacttcgacgaccccaacctgatcatcctgcctctggcctttggcaagagacagggcagagaattcatctggaacgacctgctgtccctggaaaccggcagcctgaagctggccaacggaagagtgatcgagaagacactgtacaacagaagaacccggcaggatgagcctgccctgttcgtggccctgaccttcgagcggcgggaggtcctggactcctccaatatcaaaccaatgaacctgatcggcgtggcaagaggcgaaaacatccccgccgtgatcgccctgaccgaccccgagggctgcccactgagccggtttaaggatagcctgggaaacccaacccacatcctgagaatcggcgagagctataaggagaagcagcggaccatccaggccaagaaggaggtggagcagcggagagccggcggctacagccggaagtacgccagcaaagccaagaatctggcagacgatatggtgagaaacaccgctagagatctgctgtactacgccgtgacccaggatgccatgctgatcttcgccaacctgagccggggcttcggccggcagggcaagcggaccttcatggccgagagacagtacacacggatggaggactggctgaccgccaagctggcctacgagggcctgagcaagacctacctgtccaagacactggcccagtacacctccaagacatgcagcaactgtgggtttaccatcaccagcgccgactacgacagggtgctggagaagctgaagaagacagcaacaggctggatgaccacaattaacggcaaggagctgaaggtggagggccagattacctactacaacagatacaagagacagaacgtagtcaaggacctgtccgtcgagctggatagactgagcgaagaatctgtgaacaacgacatctcctcctggacaaagggcagaagcggagaagctctgagcctcctgaagaaaagattctcccatagacccgtgcaggagaagttcgtgtgcctgaactgcggcttcgagacacacgcagccgagcaagccgccctgaacatcgccagatcctggctgttcctgcggagccaggagtacaagaaataccagacaaacaagacaaccggcaacaccgataagagagccttcgtcgagacctggcagtccttttaccggaagaagcttaaggaggtgtggaaacctgccgtgcggtctggcggatctggcggaggctccaccagccccaagaaaaagagaaaagtctaagctgccttctgcggggcttgccttctggccatgcccttcttctctcccttgcacctgtacctcttggtctttgaataaagcctgagtaggaaggctagcaaaaaaaaaaaaaaaaaaaaaaaaaaaaaaaaaaaaaaaaaaaaaaaaaaaaaaaaaaaaaaaaaaaaaaaaaaaaaaaa

SEQ ID NO: 9054 - RNA, 8787 nt, synthetic construct
  source 1..8787: mol_type = other RNA
aggaaataagagagaaaagaagagtaagaagaaatataagagccaccatggcccctaagaagaagcgtaaagtgagccggatgaaccacgaccaggagttcgacccccctaaggtgtaccctcccgtccccgccgagaagagaaagcccatccgggtcctgagcctgttcgatggcatcgccaccggtctgctggtgctgaaggacctgggcatccaggtggataggtacattgcctccgaggtgtgcgaggactccatcaccgtgggaatggtgcgtcatcagggcaagatcatgtacgtgggcgacgtgcggagcgtgacacagaagcatatccaggagtggggccctttcgacctggtgatcggcggcagcccttgcaatgacctgagcatcgtgaacccagcccggaagggcctgtacgagggaaccggcagactgttcttcgagttttacagactgctgcacgacgcccggcctaaggaaggcgacgaccggcccttcttttggctgttcgagaatgtggtggccatgggagtcagcgacaagcgggatattagccggttcctggagagcaaccccgtgatgatcgatgccaaggaagtgagcgccgcccaccgggccagatacttctggggcaatctgcctggcatgaacagacccctggccagcaccgtgaacgacaagctggagctgcaggagtgcctggagcacggccggatcgccaagttcagcaaggtgagaaccatcaccacccgaagcaacagcatcaaacaaggcaaggaccagcactttcctgtgttcatgaacgagaaggaggacatcctgtggtgtaccgagatggagagagtgttcgggttcccagtccactacacagatgtcagcaacatgtctagactggccagacagagactgctgggaagaagctggtccgtccctgtgatcagacacctgttcgcccctctgaaggagtacttcgcctgcgtgagcagcggcaacagcaacgccaacagccggggccccagcttctctagcggcctggtgccactgtccctgagagggagccacatgggccccatggagatctacaaaaccgtgagcgcctggaagcggcagcctgtgcgcgtgctgagcctgtttcggaatatcgataaagtcctgaaaagcctgggattcctggagagcggctctggctccggcggtggcaccctgaagtacgtggaggatgtgacaaacgtggtcagacgggatgtggagaagtggggccccttcgatctggtgtacggcagcacccaacccctgggcagctcttgtgaccggtgccctggctggtacatgtttcagttccaccggatcctgcagtacgccctgccgagacaggagtcccagcggccattcttttggattttcatggacaacttgctgctgaccgaggatgaccaggaaactaccactcggttcctgcagaccgaagccgtgaccctgcaggacgtgagaggccgggactaccagaacgccatgcgggtgtggtccaacatccctggactgaaaagcaagcacgcacctctgacccctaaagaagaggagtacctgcaggcccaggtgcggagcagaagcaagctggacgcccctaaggtggatctgctggtgaagaattgcctcctgcccctgagagagtacttcaagtatttcagccagaatagtctgcccctgggaggcagcggcggcggcgccctggtgaccttcgaggacgtggccgtgaggttcacccaggaggagtgggccctgctggaccccagccagaagatcctgtacagggacgtgatgagggagacctacaggaacctgaccagcgtgggcatcaactgggagtgctgggacctggaggcctgcttcaggagcctgggcaggaacctgagggtgcaggtggtgaagaggaagtgcgagctgaccaacagcggcccctgcgccgagggcggcccaagcagcggcgcccctcctcccagcggcggcaggcggcccaagcagcggcgcccctcctcccagcggcggcagcccagccggctccccaacctctaccgaggagggcacctctgagtccgccacccccgagagcggccctggcacctccaccgagcccagcgagggcagcgcacccggcagccctgccggcagccccacctccacagaggagggaaccagcaccgagcccagcgaaggcagcgccccaggcaccagcaccgagcctagtgagcaggagattaaacggatcaacaagatcagaagaagacttgtgaaagacagcaacaccaagaaggccggcaagacaggccccatgaaaaccctgctggttagagtgatgacacccgatctgagagagcggctggaaaacctgagaaagaagcctgaaaatatcccccagcccatcagcaatacatctagagccaacctgaataagctgctgaccgattacaccgaaatgaagaaggcgatcctgcatgtgtactgggaagagttccagaaggaccctgtgggcctgatgagccgggtggcccagcctgccagcaagaagatcgatcagaacaagctgaaacctgagatggacgagaagggcaacctgaccaccgccggctttgcctgctctcagtgtggccagcccctgttcgtgtacaagctggagcaggtgtctgagaagggcaaggcttacaccaactacttcggacggtgcaatgtggccgagcacgaaaagctgatcctgctggcccagctgaagcccgagaaggatagcgacgaagccgtgacatatagcctgggaaagtttgggcagagggccctggatttctacagcattcatgtgaccaaggagtccacccaccccgtgaagcccctggcccagatcgccggaaacagatacgcctccggacctgtgggaaaggccctgagcgacgcatgtatgggcacaatcgcctccttcctgtctaagtaccaggacatcatcatcgaacaccagaaggtggtgaagggcaaccagaagagactggagagcctgcgggagctggccggcaaggaaaacctggaataccctagcgtgaccctgccacctcagcctcacaccaaggagggcgttgatgcctacaacgaagtgatcgcccgggtgcgaatgtgggtgaacctgaacctgtggcagaagctgaagctaagcagagatgatgccaagcctctgctgagactgaagggattcccttcctttcctctggtcgagagacaggccaacgaagtggactggtgggacatggtgtgtaacgtgaagaagctgatcaacgagaaaaaggaggatggcaaggtgttttggcagaatctggctggctacaagagacaggaagccctgagaccatacctgagcagcgaggaagatcggaagaagggaaagaaattcgctcggtaccagctgggcgacctgctgctgcacctggaaaagaagcacggcgaggactggggaaaggtgtacgacgaggcctgggagcggattgacaagaaagtggaaggcctgagcaagcacatcaagctggaagaggaacggagaagcgaggacgcccagagcaaggccgccctgaccgactggctgcgggctaaggccagcttcgtgatcgagggcctgaaggaggccgacaaggacgagttctgcagatgcgagctgaagctgcagaagtggtacggggacctgcggggaaagcccttcgccatcgaagccgagaacagcatcctggacatcagcggcttcagcaagcagtacaactgtgccttcatctggcagaaggacggcgtgaagaagctgaacctgtacctgatcatcaactacttcaagggcggcaagctgcggttcaagaagatcaaacctgaagccttcgaagccaacagattctacaccgtgatcaacaaaaagagcggcgagatcgtgcccatggaggtgaacttcaacttcgacgaccccaacctgatcatcctgcctctggcctttggcaagagacagggcagagaattcatctggaacgacctgctgtccctggaaaccggcagcctgaagctggccaacggaagagtgatcgagaagacactgtacaacagaagaacccggcaggatgagcctgccctgttcgtggccctgaccttcgagcggcgggaggtcctggactcctccaatatcaaaccaatgaacctgatcggcgtggcaagaggcgaaaacatccccgccgtgatcgccctgaccgaccccgagggctgcccactgagccggtttaaggatagcctgggaaacccaacccacatcctgagaatcggcgagagctataaggagaagcagcggaccatccaggccaagaaggaggtggagcagcggagagccggcggctacagccggaagtacgccagcaaagccaagaatctggcagacgatatggtgagaaacaccgctagagatctgctgtactacgccgtgacccaggatgccatgctgatcttcgccaacctgagccggggcttcggccggcagggcaagcggaccttcatggccgagagacagtacacacggatggaggactggctgaccgccaagctggcctacgagggcctgagcaagacctacctgtccaagacactggcccagtacacctccaagacatgcagcaactgtgggtttaccatcaccagcgccgactacgacagggtgctggagaagctgaagaagacagcaacaggctggatgaccacaattaacggcaaggagctgaaggtggagggccagattacctactacaacagatacaagagacagaacgtagtcaaggacctgtccgtcgagctggatagactgagcgaagaatctgtgaacaacgacatctcctcctggacaaagggcagaagcggagaagctctgagcctcctgaagaaaagattctcccatagacccgtgcaggagaagttcgtgtgcctgaactgcggcttcgagacacacgcagccgagcaagccgccctgaacatcgccagatcctggctgttcctgcggagccaggagtacaagaaataccagacaaacaagacaaccggcaacaccgataagagagccttcgtcgagacctggcagtccttttaccggaagaagcttaaggaggtgtggaaacctgccgtgcggtctggcggatctggcggaggctccaccagccccaagaaaaagagaaaagtctaagctgccttctgcggggcttgccttctggccatgcccttcttctctcccttgcacctgtacctcttggtctttgaataaagcctgagtaggaaggctagcaaaaaaaaaaaaaaaaaaaaaaaaaaaaaaaaaaaaaaaaaaaaaaaaaaaaaaaaaaaaaaaaaaaaaaaaaaaaaaaagcccagccggctccccaacctctaccgaggagggcacctctgagtccgccacccccgagagcggccctggcacctccaccgagcccagcgagggcagcgcacccggcagccctgccggcagccccacctccacagaggagggaaccagcaccgagcccagcgaaggcagcgccccaggcaccagcaccgagcctagtgagcaggagattaaacggatcaacaagatcagaagaagacttgtgaaagacagcaacaccaagaaggccggcaagacaggccccatgaaaaccctgctggttagagtgatgacacccgatctgagagagcggctggaaaacctgagaaagaagcctgaaaatatcccccagcccatcagcaatacatctagagccaacctgaataagctgctgaccgattacaccgaaatgaagaaggcgatcctgcatgtgtactgggaagagttccagaaggaccctgtgggcctgatgagccgggtggcccagcctgccagcaagaagatcgatcagaacaagctgaaacctgagatggacgagaagggcaacctgaccaccgccggctttgcctgctctcagtgtggccagcccctgttcgtgtacaagctggagcaggtgtctgagaagggcaaggcttacaccaactacttcggacggtgcaatgtggccgagcacgaaaagctgatcctgctggcccagctgaagcccgagaaggatagcgacgaagccgtgacatatagcctgggaaagtttgggcagagggccctggatttctacagcattcatgtgaccaaggagtccacccaccccgtgaagcccctggcccagatcgccggaaacagatacgcctccggacctgtgggaaaggccctgagcgacgcatgtatgggcacaatcgcctccttcctgtctaagtaccaggacatcatcatcgaacaccagaaggtggtgaagggcaaccagaagagactggagagcctgcgggagctggccggcaaggaaaacctggaataccctagcgtgaccctgccacctcagcctcacaccaaggagggcgttgatgcctacaacgaagtgatcgcccgggtgcgaatgtgggtgaacctgaacctgtggcagaagctgaagctaagcagagatgatgccaagcctctgctgagactgaagggattcccttcctttcctctggtcgagagacaggccaacgaagtggactggtgggacatggtgtgtaacgtgaagaagctgatcaacgagaaaaaggaggatggcaaggtgttttggcagaatctggctggctacaagagacaggaagccctgagaccatacctgagcagcgaggaagatcggaagaagggaaagaaattcgctcggtaccagctgggcgacctgctgctgcacctggaaaagaagcacggcgaggactggggaaaggtgtacgacgaggcctgggagcggattgacaagaaagtggaaggcctgagcaagcacatcaagctggaagaggaacggagaagcgaggacgcccagagcaaggccgccctgaccgactggctgcgggctaaggccagcttcgtgatcgagggcctgaaggaggccgacaaggacgagttctgcagatgcgagctgaagctgcagaagtggtacggggacctgcggggaaagcccttcgccatcgaagccgagaacagcatcctggacatcagcggcttcagcaagcagtacaactgtgccttcatctggcagaaggacggcgtgaagaagctgaacctgtacctgatcatcaactacttcaagggcggcaagctgcggttcaagaagatcaaacctgaagccttcgaagccaacagattctacaccgtgatcaacaaaaagagcggcgagatcgtgcccatggaggtgaacttcaacttcgacgaccccaacctgatcatcctgcctctggcctttggcaagagacagggcagagaattcatctggaacgacctgctgtccctggaaaccggcagcctgaagctggccaacggaagagtgatcgagaagacactgtacaacagaagaacccggcaggatgagcctgccctgttcgtggccctgaccttcgagcggcgggaggtcctggactcctccaatatcaaaccaatgaacctgatcggcgtggcaagaggcgaaaacatccccgccgtgatcgccctgaccgaccccgagggctgcccactgagccggtttaaggatagcctgggaaacccaacccacatcctgagaatcggcgagagctataaggagaagcagcggaccatccaggccaagaaggaggtggagcagcggagagccggcggctacagccggaagtacgccagcaaagccaagaatctggcagacgatatggtgagaaacaccgctagagatctgctgtactacgccgtgacccaggatgccatgctgatcttcgccaacctgagccggggcttcggccggcagggcaagcggaccttcatggccgagagacagtacacacggatggaggactggctgaccgccaagctggcctacgagggcctgagcaagacctacctgtccaagacactggcccagtacacctccaagacatgcagcaactgtgggtttaccatcaccagcgccgactacgacagggtgctggagaagctgaagaagacagcaacaggctggatgaccacaattaacggcaaggagctgaaggtggagggccagattacctactacaacagatacaagagacagaacgtagtcaaggacctgtccgtcgagctggatagactgagcgaagaatctgtgaacaacgacatctcctcctggacaaagggcagaagcggagaagctctgagcctcctgaagaaaagattctcccatagacccgtgcaggagaagttcgtgtgcctgaactgcggcttcgagacacacgcagccgagcaagccgccctgaacatcgccagatcctggctgttcctgcggagccaggagtacaagaaataccagacaaacaagacaaccggcaacaccgataagagagccttcgtcgagacctggcagtccttttaccggaagaagcttaaggaggtgtggaaacctgccgtgcggtctggcggatctggcggaggctccaccagccccaagaaaaagagaaaagtctaagctgccttctgcggggcttgccttctggccatgcccttcttctctcccttgcacctgtacctcttggtctttgaataaagcctgagtaggaaggctagcaaaaaaaaaaaaaaaaaaaaaaaaaaaaaaaaaaaaaaaaaaaaaaaaaaaaaaaaaaaaaaaaaaaaaaaaaaaaaaaa

SEQ ID NO: 9055 - RNA, 8787 nt, synthetic construct
  source 1..8787: mol_type = other RNA
aggaaataagagagaaaagaagagtaagaagaaatataagagccaccatggcccctaagaagaagcgtaaagtgagccggatgaaccacgaccaggagttcgacccccctaaggtgtaccctcccgtccccgccgagaagagaaagcccatccgggtcctgagcctgttcgatggcatcgccaccggtctgctggtgctgaaggacctgggcatccaggtggataggtacattgcctccgaggtgtgcgaggactccatcaccgtgggaatggtgcgtcatcagggcaagatcatgtacgtgggcgacgtgcggagcgtgacacagaagcatatccaggagtggggccctttcgacctggtgatcggcggcagcccttgcaatgacctgagcatcgtgaacccagcccggaagggcctgtacgagggaaccggcagactgttcttcgagttttacagactgctgcacgacgcccggcctaaggaaggcgacgaccggcccttcttttggctgttcgagaatgtggtggccatgggagtcagcgacaagcgggatattagccggttcctggagagcaaccccgtgatgatcgatgccaaggaagtgagcgccgcccaccgggccagatacttctggggcaatctgcctggcatgaacagacccctggccagcaccgtgaacgacaagctggagctgcaggagtgcctggagcacggccggatcgccaagttcagcaaggtgagaaccatcaccacccgaagcaacagcatcaaacaaggcaaggaccagcactttcctgtgttcatgaacgagaaggaggacatcctgtggtgtaccgagatggagagagtgttcgggttcccagtccactacacagatgtcagcaacatgtctagactggccagacagagactgctgggaagaagctggtccgtccctgtgatcagacacctgttcgcccctctgaaggagtacttcgcctgcgtgagcagcggcaacagcaacgccaacagccggggccccagcttctctagcggcctggtgccactgtccctgagagggagccacatgggccccatggagatctacaaaaccgtgagcgcctggaagcggcagcctgtgcgcgtgctgagcctgtttcggaatatcgataaagtcctgaaaagcctgggattcctggagagcggctctggctccggcggtggcaccctgaagtacgtggaggatgtgacaaacgtggtcagacgggatgtggagaagtggggccccttcgatctggtgtacggcagcacccaacccctgggcagctcttgtgaccggtgccctggctggtacatgtttcagttccaccggatcctgcagtacgccctgccgagacaggagtcccagcggccattcttttggattttcatggacaacttgctgctgaccgaggatgaccaggaaactaccactcggttcctgcagaccgaagccgtgaccctgcaggacgtgagaggccgggactaccagaacgccatgcgggtgtggtccaacatccctggactgaaaagcaagcacgcacctctgacccctaaagaagaggagtacctgcaggcccaggtgcggagcagaagcaagctggacgcccctaaggtggatctgctggtgaagaattgcctcctgcccctgagagagtacttcaagtatttcagccagaatagtctgcccctgggaggcagcggcggcggcgtgctgggcctggtgaccttcggcgacgtggccatcgacttcagcagggaggagtgggagtggctgaacagcgcccagaggaccctgcacagggacgtgatgctggagaactacaggaacctggtgagcctgggcctgtgcgtgagcaagcccgacatgatcagcagcctggagcagaggaaggagccctggatggtgaagaggaagctgaccaggggcaggtgccccgacctgaagaccatgggcggcccaagcagcggcgcccctcctcccagcggcggcaggcggcccaagcagcggcgcccctcctcccagcggcggcagcccagccggctccccaacctctaccgaggagggcacctctgagtccgccacccccgagagcggccctggcacctccaccgagcccagcgagggcagcgcacccggcagccctgccggcagccccacctccacagaggagggaaccagcaccgagcccagcgaaggcagcgccccaggcaccagcaccgagcctagtgagcaggagattaaacggatcaacaagatcagaagaagacttgtgaaagacagcaacaccaagaaggccggcaagacaggccccatgaaaaccctgctggttagagtgatgacacccgatctgagagagcggctggaaaacctgagaaagaagcctgaaaatatcccccagcccatcagcaatacatctagagccaacctgaataagctgctgaccgattacaccgaaatgaagaaggcgatcctgcatgtgtactgggaagagttccagaaggaccctgtgggcctgatgagccgggtggcccagcctgccagcaagaagatcgatcagaacaagctgaaacctgagatggacgagaagggcaacctgaccaccgccggctttgcctgctctcagtgtggccagcccctgttcgtgtacaagctggagcaggtgtctgagaagggcaaggcttacaccaactacttcggacggtgcaatgtggccgagcacgaaaagctgatcctgctggcccagctgaagcccgagaaggatagcgacgaagccgtgacatatagcctgggaaagtttgggcagagggccctggatttctacagcattcatgtgaccaaggagtccacccaccccgtgaagcccctggcccagatcgccggaaacagatacgcctccggacctgtgggaaaggccctgagcgacgcatgtatgggcacaatcgcctccttcctgtctaagtaccaggacatcatcatcgaacaccagaaggtggtgaagggcaaccagaagagactggagagcctgcgggagctggccggcaaggaaaacctggaataccctagcgtgaccctgccacctcagcctcacaccaaggagggcgttgatgcctacaacgaagtgatcgcccgggtgcgaatgtgggtgaacctgaacctgtggcagaagctgaagctaagcagagatgatgccaagcctctgctgagactgaagggattcccttcctttcctctggtcgagagacaggccaacgaagtggactggtgggacatggtgtgtaacgtgaagaagctgatcaacgagaaaaaggaggatggcaaggtgttttggcagaatctggctggctacaagagacaggaagccctgagaccatacctgagcagcgaggaagatcggaagaagggaaagaaattcgctcggtaccagctgggcgacctgctgctgcacctggaaaagaagcacggcgaggactggggaaaggtgtacgacgaggcctgggagcggattgacaagaaagtggaaggcctgagcaagcacatcaagctggaagaggaacggagaagcgaggacgcccagagcaaggccgccctgaccgactggctgcgggctaaggccagcttcgtgatcgagggcctgaaggaggccgacaaggacgagttctgcagatgcgagctgaagctgcagaagtggtacggggacctgcggggaaagcccttcgccatcgaagccgagaacagcatcctggacatcagcggcttcagcaagcagtacaactgtgccttcatctggcagaaggacggcgtgaagaagctgaacctgtacctgatcatcaactacttcaagggcggcaagctgcggttcaagaagatcaaacctgaagccttcgaagccaacagattctacaccgtgatcaacaaaaagagcggcgagatcgtgcccatggaggtgaacttcaacttcgacgaccccaacctgatcatcctgcctctggcctttggcaagagacagggcagagaattcatctggaacgacctgctgtccctggaaaccggcagcctgaagctggccaacggaagagtgatcgagaagacactgtacaacagaagaacccggcaggatgagcctgccctgttcgtggccctgaccttcgagcggcgggaggtcctggactcctccaatatcaaaccaatgaacctgatcggcgtggcaagaggcgaaaacatccccgccgtgatcgccctgaccgaccccgagggctgcccactgagccggtttaaggatagcctgggaaacccaacccacatcctgagaatcggcgagagctataaggagaagcagcggaccatccaggccaagaaggaggtggagcagcggagagccggcggctacagccggaagtacgccagcaaagccaagaatctggcagacgatatggtgagaaacaccgctagagatctgctgtactacgccgtgacccaggatgccatgctgatcttcgccaacctgagccggggcttcggccggcagggcaagcggaccttcatggccgagagacagtacacacggatggaggactggctgaccgccaagctggcctacgagggcctgagcaagacctacctgtccaagacactggcccagtacacctccaagacatgcagcaactgtgggtttaccatcaccagcgccgactacgacagggtgctggagaagctgaagaagacagcaacaggctggatgaccacaattaacggcaaggagctgaaggtggagggccagattacctactacaacagatacaagagacagaacgtagtcaaggacctgtccgtcgagctggatagactgagcgaagaatctgtgaacaacgacatctcctcctggacaaagggcagaagcggagaagctctgagcctcctgaagaaaagattctcccatagacccgtgcaggagaagttcgtgtgcctgaactgcggcttcgagacacacgcagccgagcaagccgccctgaacatcgccagatcctggctgttcctgcggagccaggagtacaagaaataccagacaaacaagacaaccggcaacaccgataagagagccttcgtcgagacctggcagtccttttaccggaagaagcttaaggaggtgtggaaacctgccgtgcggtctggcggatctggcggaggctccaccagccccaagaaaaagagaaaagtctaagctgccttctgcggggcttgccttctggccatgcccttcttctctcccttgcacctgtacctcttggtctttgaataaagcctgagtaggaaggctagcaaaaaaaaaaaaaaaaaaaaaaaaaaaaaaaaaaaaaaaaaaaaaaaaaaaaaaaaaaaaaaaaaaaaaaaaaaaaaaaagcccagccggctccccaacctctaccgaggagggcacctctgagtccgccacccccgagagcggccctggcacctccaccgagcccagcgagggcagcgcacccggcagccctgccggcagccccacctccacagaggagggaaccagcaccgagcccagcgaaggcagcgccccaggcaccagcaccgagcctagtgagcaggagattaaacggatcaacaagatcagaagaagacttgtgaaagacagcaacaccaagaaggccggcaagacaggccccatgaaaaccctgctggttagagtgatgacacccgatctgagagagcggctggaaaacctgagaaagaagcctgaaaatatcccccagcccatcagcaatacatctagagccaacctgaataagctgctgaccgattacaccgaaatgaagaaggcgatcctgcatgtgtactgggaagagttccagaaggaccctgtgggcctgatgagccgggtggcccagcctgccagcaagaagatcgatcagaacaagctgaaacctgagatggacgagaagggcaacctgaccaccgccggctttgcctgctctcagtgtggccagcccctgttcgtgtacaagctggagcaggtgtctgagaagggcaaggcttacaccaactacttcggacggtgcaatgtggccgagcacgaaaagctgatcctgctggcccagctgaagcccgagaaggatagcgacgaagccgtgacatatagcctgggaaagtttgggcagagggccctggatttctacagcattcatgtgaccaaggagtccacccaccccgtgaagcccctggcccagatcgccggaaacagatacgcctccggacctgtgggaaaggccctgagcgacgcatgtatgggcacaatcgcctccttcctgtctaagtaccaggacatcatcatcgaacaccagaaggtggtgaagggcaaccagaagagactggagagcctgcgggagctggccggcaaggaaaacctggaataccctagcgtgaccctgccacctcagcctcacaccaaggagggcgttgatgcctacaacgaagtgatcgcccgggtgcgaatgtgggtgaacctgaacctgtggcagaagctgaagctaagcagagatgatgccaagcctctgctgagactgaagggattcccttcctttcctctggtcgagagacaggccaacgaagtggactggtgggacatggtgtgtaacgtgaagaagctgatcaacgagaaaaaggaggatggcaaggtgttttggcagaatctggctggctacaagagacaggaagccctgagaccatacctgagcagcgaggaagatcggaagaagggaaagaaattcgctcggtaccagctgggcgacctgctgctgcacctggaaaagaagcacggcgaggactggggaaaggtgtacgacgaggcctgggagcggattgacaagaaagtggaaggcctgagcaagcacatcaagctggaagaggaacggagaagcgaggacgcccagagcaaggccgccctgaccgactggctgcgggctaaggccagcttcgtgatcgagggcctgaaggaggccgacaaggacgagttctgcagatgcgagctgaagctgcagaagtggtacggggacctgcggggaaagcccttcgccatcgaagccgagaacagcatcctggacatcagcggcttcagcaagcagtacaactgtgccttcatctggcagaaggacggcgtgaagaagctgaacctgtacctgatcatcaactacttcaagggcggcaagctgcggttcaagaagatcaaacctgaagccttcgaagccaacagattctacaccgtgatcaacaaaaagagcggcgagatcgtgcccatggaggtgaacttcaacttcgacgaccccaacctgatcatcctgcctctggcctttggcaagagacagggcagagaattcatctggaacgacctgctgtccctggaaaccggcagcctgaagctggccaacggaagagtgatcgagaagacactgtacaacagaagaacccggcaggatgagcctgccctgttcgtggccctgaccttcgagcggcgggaggtcctggactcctccaatatcaaaccaatgaacctgatcggcgtggcaagaggcgaaaacatccccgccgtgatcgccctgaccgaccccgagggctgcccactgagccggtttaaggatagcctgggaaacccaacccacatcctgagaatcggcgagagctataaggagaagcagcggaccatccaggccaagaaggaggtggagcagcggagagccggcggctacagccggaagtacgccagcaaagccaagaatctggcagacgatatggtgagaaacaccgctagagatctgctgtactacgccgtgacccaggatgccatgctgatcttcgccaacctgagccggggcttcggccggcagggcaagcggaccttcatggccgagagacagtacacacggatggaggactggctgaccgccaagctggcctacgagggcctgagcaagacctacctgtccaagacactggcccagtacacctccaagacatgcagcaactgtgggtttaccatcaccagcgccgactacgacagggtgctggagaagctgaagaagacagcaacaggctggatgaccacaattaacggcaaggagctgaaggtggagggccagattacctactacaacagatacaagagacagaacgtagtcaaggacctgtccgtcgagctggatagactgagcgaagaatctgtgaacaacgacatctcctcctggacaaagggcagaagcggagaagctctgagcctcctgaagaaaagattctcccatagacccgtgcaggagaagttcgtgtgcctgaactgcggcttcgagacacacgcagccgagcaagccgccctgaacatcgccagatcctggctgttcctgcggagccaggagtacaagaaataccagacaaacaagacaaccggcaacaccgataagagagccttcgtcgagacctggcagtccttttaccggaagaagcttaaggaggtgtggaaacctgccgtgcggtctggcggatctggcggaggctccaccagccccaagaaaaagagaaaagtctaagctgccttctgcggggcttgccttctggccatgcccttcttctctcccttgcacctgtacctcttggtctttgaataaagcctgagtaggaaggctagcaaaaaaaaaaaaaaaaaaaaaaaaaaaaaaaaaaaaaaaaaaaaaaaaaaaaaaaaaaaaaaaaaaaaaaaaaaaaaaaa

SEQ ID NO: 9056 - RNA, 8787 nt, synthetic construct
  source 1..8787: mol_type = other RNA
aggaaataagagagaaaagaagagtaagaagaaatataagagccaccatggcccctaagaagaagcgtaaagtgagccggatgaaccacgaccaggagttcgacccccctaaggtgtaccctcccgtccccgccgagaagagaaagcccatccgggtcctgagcctgttcgatggcatcgccaccggtctgctggtgctgaaggacctgggcatccaggtggataggtacattgcctccgaggtgtgcgaggactccatcaccgtgggaatggtgcgtcatcagggcaagatcatgtacgtgggcgacgtgcggagcgtgacacagaagcatatccaggagtggggccctttcgacctggtgatcggcggcagcccttgcaatgacctgagcatcgtgaacccagcccggaagggcctgtacgagggaaccggcagactgttcttcgagttttacagactgctgcacgacgcccggcctaaggaaggcgacgaccggcccttcttttggctgttcgagaatgtggtggccatgggagtcagcgacaagcgggatattagccggttcctggagagcaaccccgtgatgatcgatgccaaggaagtgagcgccgcccaccgggccagatacttctggggcaatctgcctggcatgaacagacccctggccagcaccgtgaacgacaagctggagctgcaggagtgcctggagcacggccggatcgccaagttcagcaaggtgagaaccatcaccacccgaagcaacagcatcaaacaaggcaaggaccagcactttcctgtgttcatgaacgagaaggaggacatcctgtggtgtaccgagatggagagagtgttcgggttcccagtccactacacagatgtcagcaacatgtctagactggccagacagagactgctgggaagaagctggtccgtccctgtgatcagacacctgttcgcccctctgaaggagtacttcgcctgcgtgagcagcggcaacagcaacgccaacagccggggccccagcttctctagcggcctggtgccactgtccctgagagggagccacatgggccccatggagatctacaaaaccgtgagcgcctggaagcggcagcctgtgcgcgtgctgagcctgtttcggaatatcgataaagtcctgaaaagcctgggattcctggagagcggctctggctccggcggtggcaccctgaagtacgtggaggatgtgacaaacgtggtcagacgggatgtggagaagtggggccccttcgatctggtgtacggcagcacccaacccctgggcagctcttgtgaccggtgccctggctggtacatgtttcagttccaccggatcctgcagtacgccctgccgagacaggagtcccagcggccattcttttggattttcatggacaacttgctgctgaccgaggatgaccaggaaactaccactcggttcctgcagaccgaagccgtgaccctgcaggacgtgagaggccgggactaccagaacgccatgcgggtgtggtccaacatccctggactgaaaagcaagcacgcacctctgacccctaaagaagaggagtacctgcaggcccaggtgcggagcagaagcaagctggacgcccctaaggtggatctgctggtgaagaattgcctcctgcccctgagagagtacttcaagtatttcagccagaatagtctgcccctgggaggcagcggcggcggcggcagcctggaggagggcaggagggccaccggcctgcccgccgcccaggtgcaggagcccgtgaccttcaaggacgtggccgtggacttcacccaggaggagtggggccagctggacctggtgcagaggaccctgtacagggacgtgatgctggagacctacggccacctgctgagcgtgggcaaccagatcgccaagcccgaggtgatcagcctgctggagcagggcgaggagccctggagcggcggcccaagcagcggcgcccctcctcccagcggcggcaggcggcccaagcagcggcgcccctcctcccagcggcggcagcccagccggctccccaacctctaccgaggagggcacctctgagtccgccacccccgagagcggccctggcacctccaccgagcccagcgagggcagcgcacccggcagccctgccggcagccccacctccacagaggagggaaccagcaccgagcccagcgaaggcagcgccccaggcaccagcaccgagcctagtgagcaggagattaaacggatcaacaagatcagaagaagacttgtgaaagacagcaacaccaagaaggccggcaagacaggccccatgaaaaccctgctggttagagtgatgacacccgatctgagagagcggctggaaaacctgagaaagaagcctgaaaatatcccccagcccatcagcaatacatctagagccaacctgaataagctgctgaccgattacaccgaaatgaagaaggcgatcctgcatgtgtactgggaagagttccagaaggaccctgtgggcctgatgagccgggtggcccagcctgccagcaagaagatcgatcagaacaagctgaaacctgagatggacgagaagggcaacctgaccaccgccggctttgcctgctctcagtgtggccagcccctgttcgtgtacaagctggagcaggtgtctgagaagggcaaggcttacaccaactacttcggacggtgcaatgtggccgagcacgaaaagctgatcctgctggcccagctgaagcccgagaaggatagcgacgaagccgtgacatatagcctgggaaagtttgggcagagggccctggatttctacagcattcatgtgaccaaggagtccacccaccccgtgaagcccctggcccagatcgccggaaacagatacgcctccggacctgtgggaaaggccctgagcgacgcatgtatgggcacaatcgcctccttcctgtctaagtaccaggacatcatcatcgaacaccagaaggtggtgaagggcaaccagaagagactggagagcctgcgggagctggccggcaaggaaaacctggaataccctagcgtgaccctgccacctcagcctcacaccaaggagggcgttgatgcctacaacgaagtgatcgcccgggtgcgaatgtgggtgaacctgaacctgtggcagaagctgaagctaagcagagatgatgccaagcctctgctgagactgaagggattcccttcctttcctctggtcgagagacaggccaacgaagtggactggtgggacatggtgtgtaacgtgaagaagctgatcaacgagaaaaaggaggatggcaaggtgttttggcagaatctggctggctacaagagacaggaagccctgagaccatacctgagcagcgaggaagatcggaagaagggaaagaaattcgctcggtaccagctgggcgacctgctgctgcacctggaaaagaagcacggcgaggactggggaaaggtgtacgacgaggcctgggagcggattgacaagaaagtggaaggcctgagcaagcacatcaagctggaagaggaacggagaagcgaggacgcccagagcaaggccgccctgaccgactggctgcgggctaaggccagcttcgtgatcgagggcctgaaggaggccgacaaggacgagttctgcagatgcgagctgaagctgcagaagtggtacggggacctgcggggaaagcccttcgccatcgaagccgagaacagcatcctggacatcagcggcttcagcaagcagtacaactgtgccttcatctggcagaaggacggcgtgaagaagctgaacctgtacctgatcatcaactacttcaagggcggcaagctgcggttcaagaagatcaaacctgaagccttcgaagccaacagattctacaccgtgatcaacaaaaagagcggcgagatcgtgcccatggaggtgaacttcaacttcgacgaccccaacctgatcatcctgcctctggcctttggcaagagacagggcagagaattcatctggaacgacctgctgtccctggaaaccggcagcctgaagctggccaacggaagagtgatcgagaagacactgtacaacagaagaacccggcaggatgagcctgccctgttcgtggccctgaccttcgagcggcgggaggtcctggactcctccaatatcaaaccaatgaacctgatcggcgtggcaagaggcgaaaacatccccgccgtgatcgccctgaccgaccccgagggctgcccactgagccggtttaaggatagcctgggaaacccaacccacatcctgagaatcggcgagagctataaggagaagcagcggaccatccaggccaagaaggaggtggagcagcggagagccggcggctacagccggaagtacgccagcaaagccaagaatctggcagacgatatggtgagaaacaccgctagagatctgctgtactacgccgtgacccaggatgccatgctgatcttcgccaacctgagccggggcttcggccggcagggcaagcggaccttcatggccgagagacagtacacacggatggaggactggctgaccgccaagctggcctacgagggcctgagcaagacctacctgtccaagacactggcccagtacacctccaagacatgcagcaactgtgggtttaccatcaccagcgccgactacgacagggtgctggagaagctgaagaagacagcaacaggctggatgaccacaattaacggcaaggagctgaaggtggagggccagattacctactacaacagatacaagagacagaacgtagtcaaggacctgtccgtcgagctggatagactgagcgaagaatctgtgaacaacgacatctcctcctggacaaagggcagaagcggagaagctctgagcctcctgaagaaaagattctcccatagacccgtgcaggagaagttcgtgtgcctgaactgcggcttcgagacacacgcagccgagcaagccgccctgaacatcgccagatcctggctgttcctgcggagccaggagtacaagaaataccagacaaacaagacaaccggcaacaccgataagagagccttcgtcgagacctggcagtccttttaccggaagaagcttaaggaggtgtggaaacctgccgtgcggtctggcggatctggcggaggctccaccagccccaagaaaaagagaaaagtctaagctgccttctgcggggcttgccttctggccatgcccttcttctctcccttgcacctgtacctcttggtctttgaataaagcctgagtaggaaggctagcaaaaaaaaaaaaaaaaaaaaaaaaaaaaaaaaaaaaaaaaaaaaaaaaaaaaaaaaaaaaaaaaaaaaaaaaaaaaaaaagcccagccggctccccaacctctaccgaggagggcacctctgagtccgccacccccgagagcggccctggcacctccaccgagcccagcgagggcagcgcacccggcagccctgccggcagccccacctccacagaggagggaaccagcaccgagcccagcgaaggcagcgccccaggcaccagcaccgagcctagtgagcaggagattaaacggatcaacaagatcagaagaagacttgtgaaagacagcaacaccaagaaggccggcaagacaggccccatgaaaaccctgctggttagagtgatgacacccgatctgagagagcggctggaaaacctgagaaagaagcctgaaaatatcccccagcccatcagcaatacatctagagccaacctgaataagctgctgaccgattacaccgaaatgaagaaggcgatcctgcatgtgtactgggaagagttccagaaggaccctgtgggcctgatgagccgggtggcccagcctgccagcaagaagatcgatcagaacaagctgaaacctgagatggacgagaagggcaacctgaccaccgccggctttgcctgctctcagtgtggccagcccctgttcgtgtacaagctggagcaggtgtctgagaagggcaaggcttacaccaactacttcggacggtgcaatgtggccgagcacgaaaagctgatcctgctggcccagctgaagcccgagaaggatagcgacgaagccgtgacatatagcctgggaaagtttgggcagagggccctggatttctacagcattcatgtgaccaaggagtccacccaccccgtgaagcccctggcccagatcgccggaaacagatacgcctccggacctgtgggaaaggccctgagcgacgcatgtatgggcacaatcgcctccttcctgtctaagtaccaggacatcatcatcgaacaccagaaggtggtgaagggcaaccagaagagactggagagcctgcgggagctggccggcaaggaaaacctggaataccctagcgtgaccctgccacctcagcctcacaccaaggagggcgttgatgcctacaacgaagtgatcgcccgggtgcgaatgtgggtgaacctgaacctgtggcagaagctgaagctaagcagagatgatgccaagcctctgctgagactgaagggattcccttcctttcctctggtcgagagacaggccaacgaagtggactggtgggacatggtgtgtaacgtgaagaagctgatcaacgagaaaaaggaggatggcaaggtgttttggcagaatctggctggctacaagagacaggaagccctgagaccatacctgagcagcgaggaagatcggaagaagggaaagaaattcgctcggtaccagctgggcgacctgctgctgcacctggaaaagaagcacggcgaggactggggaaaggtgtacgacgaggcctgggagcggattgacaagaaagtggaaggcctgagcaagcacatcaagctggaagaggaacggagaagcgaggacgcccagagcaaggccgccctgaccgactggctgcgggctaaggccagcttcgtgatcgagggcctgaaggaggccgacaaggacgagttctgcagatgcgagctgaagctgcagaagtggtacggggacctgcggggaaagcccttcgccatcgaagccgagaacagcatcctggacatcagcggcttcagcaagcagtacaactgtgccttcatctggcagaaggacggcgtgaagaagctgaacctgtacctgatcatcaactacttcaagggcggcaagctgcggttcaagaagatcaaacctgaagccttcgaagccaacagattctacaccgtgatcaacaaaaagagcggcgagatcgtgcccatggaggtgaacttcaacttcgacgaccccaacctgatcatcctgcctctggcctttggcaagagacagggcagagaattcatctggaacgacctgctgtccctggaaaccggcagcctgaagctggccaacggaagagtgatcgagaagacactgtacaacagaagaacccggcaggatgagcctgccctgttcgtggccctgaccttcgagcggcgggaggtcctggactcctccaatatcaaaccaatgaacctgatcggcgtggcaagaggcgaaaacatccccgccgtgatcgccctgaccgaccccgagggctgcccactgagccggtttaaggatagcctgggaaacccaacccacatcctgagaatcggcgagagctataaggagaagcagcggaccatccaggccaagaaggaggtggagcagcggagagccggcggctacagccggaagtacgccagcaaagccaagaatctggcagacgatatggtgagaaacaccgctagagatctgctgtactacgccgtgacccaggatgccatgctgatcttcgccaacctgagccggggcttcggccggcagggcaagcggaccttcatggccgagagacagtacacacggatggaggactggctgaccgccaagctggcctacgagggcctgagcaagacctacctgtccaagacactggcccagtacacctccaagacatgcagcaactgtgggtttaccatcaccagcgccgactacgacagggtgctggagaagctgaagaagacagcaacaggctggatgaccacaattaacggcaaggagctgaaggtggagggccagattacctactacaacagatacaagagacagaacgtagtcaaggacctgtccgtcgagctggatagactgagcgaagaatctgtgaacaacgacatctcctcctggacaaagggcagaagcggagaagctctgagcctcctgaagaaaagattctcccatagacccgtgcaggagaagttcgtgtgcctgaactgcggcttcgagacacacgcagccgagcaagccgccctgaacatcgccagatcctggctgttcctgcggagccaggagtacaagaaataccagacaaacaagacaaccggcaacaccgataagagagccttcgtcgagacctggcagtccttttaccggaagaagcttaaggaggtgtggaaacctgccgtgcggtctggcggatctggcggaggctccaccagccccaagaaaaagagaaaagtctaagctgccttctgcggggcttgccttctggccatgcccttcttctctcccttgcacctgtacctcttggtctttgaataaagcctgagtaggaaggctagcaaaaaaaaaaaaaaaaaaaaaaaaaaaaaaaaaaaaaaaaaaaaaaaaaaaaaaaaaaaaaaaaaaaaaaaaaaaaaaaa

SEQ ID NO: 9057 - RNA, 8787 nt, synthetic construct
  source 1..8787: mol_type = other RNA
aggaaataagagagaaaagaagagtaagaagaaatataagagccaccatggcccctaagaagaagcgtaaagtgagccggatgaaccacgaccaggagttcgacccccctaaggtgtaccctcccgtccccgccgagaagagaaagcccatccgggtcctgagcctgttcgatggcatcgccaccggtctgctggtgctgaaggacctgggcatccaggtggataggtacattgcctccgaggtgtgcgaggactccatcaccgtgggaatggtgcgtcatcagggcaagatcatgtacgtgggcgacgtgcggagcgtgacacagaagcatatccaggagtggggccctttcgacctggtgatcggcggcagcccttgcaatgacctgagcatcgtgaacccagcccggaagggcctgtacgagggaaccggcagactgttcttcgagttttacagactgctgcacgacgcccggcctaaggaaggcgacgaccggcccttcttttggctgttcgagaatgtggtggccatgggagtcagcgacaagcgggatattagccggttcctggagagcaaccccgtgatgatcgatgccaaggaagtgagcgccgcccaccgggccagatacttctggggcaatctgcctggcatgaacagacccctggccagcaccgtgaacgacaagctggagctgcaggagtgcctggagcacggccggatcgccaagttcagcaaggtgagaaccatcaccacccgaagcaacagcatcaaacaaggcaaggaccagcactttcctgtgttcatgaacgagaaggaggacatcctgtggtgtaccgagatggagagagtgttcgggttcccagtccactacacagatgtcagcaacatgtctagactggccagacagagactgctgggaagaagctggtccgtccctgtgatcagacacctgttcgcccctctgaaggagtacttcgcctgcgtgagcagcggcaacagcaacgccaacagccggggccccagcttctctagcggcctggtgccactgtccctgagagggagccacatgggccccatggagatctacaaaaccgtgagcgcctggaagcggcagcctgtgcgcgtgctgagcctgtttcggaatatcgataaagtcctgaaaagcctgggattcctggagagcggctctggctccggcggtggcaccctgaagtacgtggaggatgtgacaaacgtggtcagacgggatgtggagaagtggggccccttcgatctggtgtacggcagcacccaacccctgggcagctcttgtgaccggtgccctggctggtacatgtttcagttccaccggatcctgcagtacgccctgccgagacaggagtcccagcggccattcttttggattttcatggacaacttgctgctgaccgaggatgaccaggaaactaccactcggttcctgcagaccgaagccgtgaccctgcaggacgtgagaggccgggactaccagaacgccatgcgggtgtggtccaacatccctggactgaaaagcaagcacgcacctctgacccctaaagaagaggagtacctgcaggcccaggtgcggagcagaagcaagctggacgcccctaaggtggatctgctggtgaagaattgcctcctgcccctgagagagtacttcaagtatttcagccagaatagtctgcccctgggaggcagcggcggcggcagcaaggcccccgtgaccttcggcgacctggccatctacttcagccaggaggagtgggagtggctgagccccatccagaaggacctgtacgaggacgtgatgctggagaactacaggaacctggtgagcctgggcctgagcttcaggaggcccaacgtgatcaccctgctggagaagggcaaggccccctggatggtggagcccgtgaggaggaggagggcccccgagctgaccgaggccagcggcggcccaagcagcggcgcccctcctcccagcggcggcaggcggcccaagcagcggcgcccctcctcccagcggcggcagcccagccggctccccaacctctaccgaggagggcacctctgagtccgccacccccgagagcggccctggcacctccaccgagcccagcgagggcagcgcacccggcagccctgccggcagccccacctccacagaggagggaaccagcaccgagcccagcgaaggcagcgccccaggcaccagcaccgagcctagtgagcaggagattaaacggatcaacaagatcagaagaagacttgtgaaagacagcaacaccaagaaggccggcaagacaggccccatgaaaaccctgctggttagagtgatgacacccgatctgagagagcggctggaaaacctgagaaagaagcctgaaaatatcccccagcccatcagcaatacatctagagccaacctgaataagctgctgaccgattacaccgaaatgaagaaggcgatcctgcatgtgtactgggaagagttccagaaggaccctgtgggcctgatgagccgggtggcccagcctgccagcaagaagatcgatcagaacaagctgaaacctgagatggacgagaagggcaacctgaccaccgccggctttgcctgctctcagtgtggccagcccctgttcgtgtacaagctggagcaggtgtctgagaagggcaaggcttacaccaactacttcggacggtgcaatgtggccgagcacgaaaagctgatcctgctggcccagctgaagcccgagaaggatagcgacgaagccgtgacatatagcctgggaaagtttgggcagagggccctggatttctacagcattcatgtgaccaaggagtccacccaccccgtgaagcccctggcccagatcgccggaaacagatacgcctccggacctgtgggaaaggccctgagcgacgcatgtatgggcacaatcgcctccttcctgtctaagtaccaggacatcatcatcgaacaccagaaggtggtgaagggcaaccagaagagactggagagcctgcgggagctggccggcaaggaaaacctggaataccctagcgtgaccctgccacctcagcctcacaccaaggagggcgttgatgcctacaacgaagtgatcgcccgggtgcgaatgtgggtgaacctgaacctgtggcagaagctgaagctaagcagagatgatgccaagcctctgctgagactgaagggattcccttcctttcctctggtcgagagacaggccaacgaagtggactggtgggacatggtgtgtaacgtgaagaagctgatcaacgagaaaaaggaggatggcaaggtgttttggcagaatctggctggctacaagagacaggaagccctgagaccatacctgagcagcgaggaagatcggaagaagggaaagaaattcgctcggtaccagctgggcgacctgctgctgcacctggaaaagaagcacggcgaggactggggaaaggtgtacgacgaggcctgggagcggattgacaagaaagtggaaggcctgagcaagcacatcaagctggaagaggaacggagaagcgaggacgcccagagcaaggccgccctgaccgactggctgcgggctaaggccagcttcgtgatcgagggcctgaaggaggccgacaaggacgagttctgcagatgcgagctgaagctgcagaagtggtacggggacctgcggggaaagcccttcgccatcgaagccgagaacagcatcctggacatcagcggcttcagcaagcagtacaactgtgccttcatctggcagaaggacggcgtgaagaagctgaacctgtacctgatcatcaactacttcaagggcggcaagctgcggttcaagaagatcaaacctgaagccttcgaagccaacagattctacaccgtgatcaacaaaaagagcggcgagatcgtgcccatggaggtgaacttcaacttcgacgaccccaacctgatcatcctgcctctggcctttggcaagagacagggcagagaattcatctggaacgacctgctgtccctggaaaccggcagcctgaagctggccaacggaagagtgatcgagaagacactgtacaacagaagaacccggcaggatgagcctgccctgttcgtggccctgaccttcgagcggcgggaggtcctggactcctccaatatcaaaccaatgaacctgatcggcgtggcaagaggcgaaaacatccccgccgtgatcgccctgaccgaccccgagggctgcccactgagccggtttaaggatagcctgggaaacccaacccacatcctgagaatcggcgagagctataaggagaagcagcggaccatccaggccaagaaggaggtggagcagcggagagccggcggctacagccggaagtacgccagcaaagccaagaatctggcagacgatatggtgagaaacaccgctagagatctgctgtactacgccgtgacccaggatgccatgctgatcttcgccaacctgagccggggcttcggccggcagggcaagcggaccttcatggccgagagacagtacacacggatggaggactggctgaccgccaagctggcctacgagggcctgagcaagacctacctgtccaagacactggcccagtacacctccaagacatgcagcaactgtgggtttaccatcaccagcgccgactacgacagggtgctggagaagctgaagaagacagcaacaggctggatgaccacaattaacggcaaggagctgaaggtggagggccagattacctactacaacagatacaagagacagaacgtagtcaaggacctgtccgtcgagctggatagactgagcgaagaatctgtgaacaacgacatctcctcctggacaaagggcagaagcggagaagctctgagcctcctgaagaaaagattctcccatagacccgtgcaggagaagttcgtgtgcctgaactgcggcttcgagacacacgcagccgagcaagccgccctgaacatcgccagatcctggctgttcctgcggagccaggagtacaagaaataccagacaaacaagacaaccggcaacaccgataagagagccttcgtcgagacctggcagtccttttaccggaagaagcttaaggaggtgtggaaacctgccgtgcggtctggcggatctggcggaggctccaccagccccaagaaaaagagaaaagtctaagctgccttctgcggggcttgccttctggccatgcccttcttctctcccttgcacctgtacctcttggtctttgaataaagcctgagtaggaaggctagcaaaaaaaaaaaaaaaaaaaaaaaaaaaaaaaaaaaaaaaaaaaaaaaaaaaaaaaaaaaaaaaaaaaaaaaaaaaaaaaagcccagccggctccccaacctctaccgaggagggcacctctgagtccgccacccccgagagcggccctggcacctccaccgagcccagcgagggcagcgcacccggcagccctgccggcagccccacctccacagaggagggaaccagcaccgagcccagcgaaggcagcgccccaggcaccagcaccgagcctagtgagcaggagattaaacggatcaacaagatcagaagaagacttgtgaaagacagcaacaccaagaaggccggcaagacaggccccatgaaaaccctgctggttagagtgatgacacccgatctgagagagcggctggaaaacctgagaaagaagcctgaaaatatcccccagcccatcagcaatacatctagagccaacctgaataagctgctgaccgattacaccgaaatgaagaaggcgatcctgcatgtgtactgggaagagttccagaaggaccctgtgggcctgatgagccgggtggcccagcctgccagcaagaagatcgatcagaacaagctgaaacctgagatggacgagaagggcaacctgaccaccgccggctttgcctgctctcagtgtggccagcccctgttcgtgtacaagctggagcaggtgtctgagaagggcaaggcttacaccaactacttcggacggtgcaatgtggccgagcacgaaaagctgatcctgctggcccagctgaagcccgagaaggatagcgacgaagccgtgacatatagcctgggaaagtttgggcagagggccctggatttctacagcattcatgtgaccaaggagtccacccaccccgtgaagcccctggcccagatcgccggaaacagatacgcctccggacctgtgggaaaggccctgagcgacgcatgtatgggcacaatcgcctccttcctgtctaagtaccaggacatcatcatcgaacaccagaaggtggtgaagggcaaccagaagagactggagagcctgcgggagctggccggcaaggaaaacctggaataccctagcgtgaccctgccacctcagcctcacaccaaggagggcgttgatgcctacaacgaagtgatcgcccgggtgcgaatgtgggtgaacctgaacctgtggcagaagctgaagctaagcagagatgatgccaagcctctgctgagactgaagggattcccttcctttcctctggtcgagagacaggccaacgaagtggactggtgggacatggtgtgtaacgtgaagaagctgatcaacgagaaaaaggaggatggcaaggtgttttggcagaatctggctggctacaagagacaggaagccctgagaccatacctgagcagcgaggaagatcggaagaagggaaagaaattcgctcggtaccagctgggcgacctgctgctgcacctggaaaagaagcacggcgaggactggggaaaggtgtacgacgaggcctgggagcggattgacaagaaagtggaaggcctgagcaagcacatcaagctggaagaggaacggagaagcgaggacgcccagagcaaggccgccctgaccgactggctgcgggctaaggccagcttcgtgatcgagggcctgaaggaggccgacaaggacgagttctgcagatgcgagctgaagctgcagaagtggtacggggacctgcggggaaagcccttcgccatcgaagccgagaacagcatcctggacatcagcggcttcagcaagcagtacaactgtgccttcatctggcagaaggacggcgtgaagaagctgaacctgtacctgatcatcaactacttcaagggcggcaagctgcggttcaagaagatcaaacctgaagccttcgaagccaacagattctacaccgtgatcaacaaaaagagcggcgagatcgtgcccatggaggtgaacttcaacttcgacgaccccaacctgatcatcctgcctctggcctttggcaagagacagggcagagaattcatctggaacgacctgctgtccctggaaaccggcagcctgaagctggccaacggaagagtgatcgagaagacactgtacaacagaagaacccggcaggatgagcctgccctgttcgtggccctgaccttcgagcggcgggaggtcctggactcctccaatatcaaaccaatgaacctgatcggcgtggcaagaggcgaaaacatccccgccgtgatcgccctgaccgaccccgagggctgcccactgagccggtttaaggatagcctgggaaacccaacccacatcctgagaatcggcgagagctataaggagaagcagcggaccatccaggccaagaaggaggtggagcagcggagagccggcggctacagccggaagtacgccagcaaagccaagaatctggcagacgatatggtgagaaacaccgctagagatctgctgtactacgccgtgacccaggatgccatgctgatcttcgccaacctgagccggggcttcggccggcagggcaagcggaccttcatggccgagagacagtacacacggatggaggactggctgaccgccaagctggcctacgagggcctgagcaagacctacctgtccaagacactggcccagtacacctccaagacatgcagcaactgtgggtttaccatcaccagcgccgactacgacagggtgctggagaagctgaagaagacagcaacaggctggatgaccacaattaacggcaaggagctgaaggtggagggccagattacctactacaacagatacaagagacagaacgtagtcaaggacctgtccgtcgagctggatagactgagcgaagaatctgtgaacaacgacatctcctcctggacaaagggcagaagcggagaagctctgagcctcctgaagaaaagattctcccatagacccgtgcaggagaagttcgtgtgcctgaactgcggcttcgagacacacgcagccgagcaagccgccctgaacatcgccagatcctggctgttcctgcggagccaggagtacaagaaataccagacaaacaagacaaccggcaacaccgataagagagccttcgtcgagacctggcagtccttttaccggaagaagcttaaggaggtgtggaaacctgccgtgcggtctggcggatctggcggaggctccaccagccccaagaaaaagagaaaagtctaagctgccttctgcggggcttgccttctggccatgcccttcttctctcccttgcacctgtacctcttggtctttgaataaagcctgagtaggaaggctagcaaaaaaaaaaaaaaaaaaaaaaaaaaaaaaaaaaaaaaaaaaaaaaaaaaaaaaaaaaaaaaaaaaaaaaaaaaaaaaaa

SEQ ID NO: 9058 - RNA, 8787 nt, synthetic construct
  source 1..8787: mol_type = other RNA
aggaaataagagagaaaagaagagtaagaagaaatataagagccaccatggcccctaagaagaagcgtaaagtgagccggatgaaccacgaccaggagttcgacccccctaaggtgtaccctcccgtccccgccgagaagagaaagcccatccgggtcctgagcctgttcgatggcatcgccaccggtctgctggtgctgaaggacctgggcatccaggtggataggtacattgcctccgaggtgtgcgaggactccatcaccgtgggaatggtgcgtcatcagggcaagatcatgtacgtgggcgacgtgcggagcgtgacacagaagcatatccaggagtggggccctttcgacctggtgatcggcggcagcccttgcaatgacctgagcatcgtgaacccagcccggaagggcctgtacgagggaaccggcagactgttcttcgagttttacagactgctgcacgacgcccggcctaaggaaggcgacgaccggcccttcttttggctgttcgagaatgtggtggccatgggagtcagcgacaagcgggatattagccggttcctggagagcaaccccgtgatgatcgatgccaaggaagtgagcgccgcccaccgggccagatacttctggggcaatctgcctggcatgaacagacccctggccagcaccgtgaacgacaagctggagctgcaggagtgcctggagcacggccggatcgccaagttcagcaaggtgagaaccatcaccacccgaagcaacagcatcaaacaaggcaaggaccagcactttcctgtgttcatgaacgagaaggaggacatcctgtggtgtaccgagatggagagagtgttcgggttcccagtccactacacagatgtcagcaacatgtctagactggccagacagagactgctgggaagaagctggtccgtccctgtgatcagacacctgttcgcccctctgaaggagtacttcgcctgcgtgagcagcggcaacagcaacgccaacagccggggccccagcttctctagcggcctggtgccactgtccctgagagggagccacatgggccccatggagatctacaaaaccgtgagcgcctggaagcggcagcctgtgcgcgtgctgagcctgtttcggaatatcgataaagtcctgaaaagcctgggattcctggagagcggctctggctccggcggtggcaccctgaagtacgtggaggatgtgacaaacgtggtcagacgggatgtggagaagtggggccccttcgatctggtgtacggcagcacccaacccctgggcagctcttgtgaccggtgccctggctggtacatgtttcagttccaccggatcctgcagtacgccctgccgagacaggagtcccagcggccattcttttggattttcatggacaacttgctgctgaccgaggatgaccaggaaactaccactcggttcctgcagaccgaagccgtgaccctgcaggacgtgagaggccgggactaccagaacgccatgcgggtgtggtccaacatccctggactgaaaagcaagcacgcacctctgacccctaaagaagaggagtacctgcaggcccaggtgcggagcagaagcaagctggacgcccctaaggtggatctgctggtgaagaattgcctcctgcccctgagagagtacttcaagtatttcagccagaatagtctgcccctgggaggcagcggcggcggcccccagggcctggtgaccttcggcgacgtggccgtggacttcagccaggaggagtgggagtggctgaaccccaaccagaggaccctgtacaggaaggtgatgctggagaactacaagaacctggccagcctgggcctgtgcgtgagcaagcccgacgtgatcagcagcctggagcagggcaaggagccctggaccgtgaagaggaagatgaccagggcctggtgccccgacctgaagatcgtgggcggcccaagcagcggcgcccctcctcccagcggcggcaggcggcccaagcagcggcgcccctcctcccagcggcggcagcccagccggctccccaacctctaccgaggagggcacctctgagtccgccacccccgagagcggccctggcacctccaccgagcccagcgagggcagcgcacccggcagccctgccggcagccccacctccacagaggagggaaccagcaccgagcccagcgaaggcagcgccccaggcaccagcaccgagcctagtgagcaggagattaaacggatcaacaagatcagaagaagacttgtgaaagacagcaacaccaagaaggccggcaagacaggccccatgaaaaccctgctggttagagtgatgacacccgatctgagagagcggctggaaaacctgagaaagaagcctgaaaatatcccccagcccatcagcaatacatctagagccaacctgaataagctgctgaccgattacaccgaaatgaagaaggcgatcctgcatgtgtactgggaagagttccagaaggaccctgtgggcctgatgagccgggtggcccagcctgccagcaagaagatcgatcagaacaagctgaaacctgagatggacgagaagggcaacctgaccaccgccggctttgcctgctctcagtgtggccagcccctgttcgtgtacaagctggagcaggtgtctgagaagggcaaggcttacaccaactacttcggacggtgcaatgtggccgagcacgaaaagctgatcctgctggcccagctgaagcccgagaaggatagcgacgaagccgtgacatatagcctgggaaagtttgggcagagggccctggatttctacagcattcatgtgaccaaggagtccacccaccccgtgaagcccctggcccagatcgccggaaacagatacgcctccggacctgtgggaaaggccctgagcgacgcatgtatgggcacaatcgcctccttcctgtctaagtaccaggacatcatcatcgaacaccagaaggtggtgaagggcaaccagaagagactggagagcctgcgggagctggccggcaaggaaaacctggaataccctagcgtgaccctgccacctcagcctcacaccaaggagggcgttgatgcctacaacgaagtgatcgcccgggtgcgaatgtgggtgaacctgaacctgtggcagaagctgaagctaagcagagatgatgccaagcctctgctgagactgaagggattcccttcctttcctctggtcgagagacaggccaacgaagtggactggtgggacatggtgtgtaacgtgaagaagctgatcaacgagaaaaaggaggatggcaaggtgttttggcagaatctggctggctacaagagacaggaagccctgagaccatacctgagcagcgaggaagatcggaagaagggaaagaaattcgctcggtaccagctgggcgacctgctgctgcacctggaaaagaagcacggcgaggactggggaaaggtgtacgacgaggcctgggagcggattgacaagaaagtggaaggcctgagcaagcacatcaagctggaagaggaacggagaagcgaggacgcccagagcaaggccgccctgaccgactggctgcgggctaaggccagcttcgtgatcgagggcctgaaggaggccgacaaggacgagttctgcagatgcgagctgaagctgcagaagtggtacggggacctgcggggaaagcccttcgccatcgaagccgagaacagcatcctggacatcagcggcttcagcaagcagtacaactgtgccttcatctggcagaaggacggcgtgaagaagctgaacctgtacctgatcatcaactacttcaagggcggcaagctgcggttcaagaagatcaaacctgaagccttcgaagccaacagattctacaccgtgatcaacaaaaagagcggcgagatcgtgcccatggaggtgaacttcaacttcgacgaccccaacctgatcatcctgcctctggcctttggcaagagacagggcagagaattcatctggaacgacctgctgtccctggaaaccggcagcctgaagctggccaacggaagagtgatcgagaagacactgtacaacagaagaacccggcaggatgagcctgccctgttcgtggccctgaccttcgagcggcgggaggtcctggactcctccaatatcaaaccaatgaacctgatcggcgtggcaagaggcgaaaacatccccgccgtgatcgccctgaccgaccccgagggctgcccactgagccggtttaaggatagcctgggaaacccaacccacatcctgagaatcggcgagagctataaggagaagcagcggaccatccaggccaagaaggaggtggagcagcggagagccggcggctacagccggaagtacgccagcaaagccaagaatctggcagacgatatggtgagaaacaccgctagagatctgctgtactacgccgtgacccaggatgccatgctgatcttcgccaacctgagccggggcttcggccggcagggcaagcggaccttcatggccgagagacagtacacacggatggaggactggctgaccgccaagctggcctacgagggcctgagcaagacctacctgtccaagacactggcccagtacacctccaagacatgcagcaactgtgggtttaccatcaccagcgccgactacgacagggtgctggagaagctgaagaagacagcaacaggctggatgaccacaattaacggcaaggagctgaaggtggagggccagattacctactacaacagatacaagagacagaacgtagtcaaggacctgtccgtcgagctggatagactgagcgaagaatctgtgaacaacgacatctcctcctggacaaagggcagaagcggagaagctctgagcctcctgaagaaaagattctcccatagacccgtgcaggagaagttcgtgtgcctgaactgcggcttcgagacacacgcagccgagcaagccgccctgaacatcgccagatcctggctgttcctgcggagccaggagtacaagaaataccagacaaacaagacaaccggcaacaccgataagagagccttcgtcgagacctggcagtccttttaccggaagaagcttaaggaggtgtggaaacctgccgtgcggtctggcggatctggcggaggctccaccagccccaagaaaaagagaaaagtctaagctgccttctgcggggcttgccttctggccatgcccttcttctctcccttgcacctgtacctcttggtctttgaataaagcctgagtaggaaggctagcaaaaaaaaaaaaaaaaaaaaaaaaaaaaaaaaaaaaaaaaaaaaaaaaaaaaaaaaaaaaaaaaaaaaaaaaaaaaaaaagcccagccggctccccaacctctaccgaggagggcacctctgagtccgccacccccgagagcggccctggcacctccaccgagcccagcgagggcagcgcacccggcagccctgccggcagccccacctccacagaggagggaaccagcaccgagcccagcgaaggcagcgccccaggcaccagcaccgagcctagtgagcaggagattaaacggatcaacaagatcagaagaagacttgtgaaagacagcaacaccaagaaggccggcaagacaggccccatgaaaaccctgctggttagagtgatgacacccgatctgagagagcggctggaaaacctgagaaagaagcctgaaaatatcccccagcccatcagcaatacatctagagccaacctgaataagctgctgaccgattacaccgaaatgaagaaggcgatcctgcatgtgtactgggaagagttccagaaggaccctgtgggcctgatgagccgggtggcccagcctgccagcaagaagatcgatcagaacaagctgaaacctgagatggacgagaagggcaacctgaccaccgccggctttgcctgctctcagtgtggccagcccctgttcgtgtacaagctggagcaggtgtctgagaagggcaaggcttacaccaactacttcggacggtgcaatgtggccgagcacgaaaagctgatcctgctggcccagctgaagcccgagaaggatagcgacgaagccgtgacatatagcctgggaaagtttgggcagagggccctggatttctacagcattcatgtgaccaaggagtccacccaccccgtgaagcccctggcccagatcgccggaaacagatacgcctccggacctgtgggaaaggccctgagcgacgcatgtatgggcacaatcgcctccttcctgtctaagtaccaggacatcatcatcgaacaccagaaggtggtgaagggcaaccagaagagactggagagcctgcgggagctggccggcaaggaaaacctggaataccctagcgtgaccctgccacctcagcctcacaccaaggagggcgttgatgcctacaacgaagtgatcgcccgggtgcgaatgtgggtgaacctgaacctgtggcagaagctgaagctaagcagagatgatgccaagcctctgctgagactgaagggattcccttcctttcctctggtcgagagacaggccaacgaagtggactggtgggacatggtgtgtaacgtgaagaagctgatcaacgagaaaaaggaggatggcaaggtgttttggcagaatctggctggctacaagagacaggaagccctgagaccatacctgagcagcgaggaagatcggaagaagggaaagaaattcgctcggtaccagctgggcgacctgctgctgcacctggaaaagaagcacggcgaggactggggaaaggtgtacgacgaggcctgggagcggattgacaagaaagtggaaggcctgagcaagcacatcaagctggaagaggaacggagaagcgaggacgcccagagcaaggccgccctgaccgactggctgcgggctaaggccagcttcgtgatcgagggcctgaaggaggccgacaaggacgagttctgcagatgcgagctgaagctgcagaagtggtacggggacctgcggggaaagcccttcgccatcgaagccgagaacagcatcctggacatcagcggcttcagcaagcagtacaactgtgccttcatctggcagaaggacggcgtgaagaagctgaacctgtacctgatcatcaactacttcaagggcggcaagctgcggttcaagaagatcaaacctgaagccttcgaagccaacagattctacaccgtgatcaacaaaaagagcggcgagatcgtgcccatggaggtgaacttcaacttcgacgaccccaacctgatcatcctgcctctggcctttggcaagagacagggcagagaattcatctggaacgacctgctgtccctggaaaccggcagcctgaagctggccaacggaagagtgatcgagaagacactgtacaacagaagaacccggcaggatgagcctgccctgttcgtggccctgaccttcgagcggcgggaggtcctggactcctccaatatcaaaccaatgaacctgatcggcgtggcaagaggcgaaaacatccccgccgtgatcgccctgaccgaccccgagggctgcccactgagccggtttaaggatagcctgggaaacccaacccacatcctgagaatcggcgagagctataaggagaagcagcggaccatccaggccaagaaggaggtggagcagcggagagccggcggctacagccggaagtacgccagcaaagccaagaatctggcagacgatatggtgagaaacaccgctagagatctgctgtactacgccgtgacccaggatgccatgctgatcttcgccaacctgagccggggcttcggccggcagggcaagcggaccttcatggccgagagacagtacacacggatggaggactggctgaccgccaagctggcctacgagggcctgagcaagacctacctgtccaagacactggcccagtacacctccaagacatgcagcaactgtgggtttaccatcaccagcgccgactacgacagggtgctggagaagctgaagaagacagcaacaggctggatgaccacaattaacggcaaggagctgaaggtggagggccagattacctactacaacagatacaagagacagaacgtagtcaaggacctgtccgtcgagctggatagactgagcgaagaatctgtgaacaacgacatctcctcctggacaaagggcagaagcggagaagctctgagcctcctgaagaaaagattctcccatagacccgtgcaggagaagttcgtgtgcctgaactgcggcttcgagacacacgcagccgagcaagccgccctgaacatcgccagatcctggctgttcctgcggagccaggagtacaagaaataccagacaaacaagacaaccggcaacaccgataagagagccttcgtcgagacctggcagtccttttaccggaagaagcttaaggaggtgtggaaacctgccgtgcggtctggcggatctggcggaggctccaccagccccaagaaaaagagaaaagtctaagctgccttctgcggggcttgccttctggccatgcccttcttctctcccttgcacctgtacctcttggtctttgaataaagcctgagtaggaaggctagcaaaaaaaaaaaaaaaaaaaaaaaaaaaaaaaaaaaaaaaaaaaaaaaaaaaaaaaaaaaaaaaaaaaaaaaaaaaaaaaa

SEQ ID NO: 9059 - RNA, 8787 nt, synthetic construct
  source 1..8787: mol_type = other RNA
aggaaataagagagaaaagaagagtaagaagaaatataagagccaccatggcccctaagaagaagcgtaaagtgagccggatgaaccacgaccaggagttcgacccccctaaggtgtaccctcccgtccccgccgagaagagaaagcccatccgggtcctgagcctgttcgatggcatcgccaccggtctgctggtgctgaaggacctgggcatccaggtggataggtacattgcctccgaggtgtgcgaggactccatcaccgtgggaatggtgcgtcatcagggcaagatcatgtacgtgggcgacgtgcggagcgtgacacagaagcatatccaggagtggggccctttcgacctggtgatcggcggcagcccttgcaatgacctgagcatcgtgaacccagcccggaagggcctgtacgagggaaccggcagactgttcttcgagttttacagactgctgcacgacgcccggcctaaggaaggcgacgaccggcccttcttttggctgttcgagaatgtggtggccatgggagtcagcgacaagcgggatattagccggttcctggagagcaaccccgtgatgatcgatgccaaggaagtgagcgccgcccaccgggccagatacttctggggcaatctgcctggcatgaacagacccctggccagcaccgtgaacgacaagctggagctgcaggagtgcctggagcacggccggatcgccaagttcagcaaggtgagaaccatcaccacccgaagcaacagcatcaaacaaggcaaggaccagcactttcctgtgttcatgaacgagaaggaggacatcctgtggtgtaccgagatggagagagtgttcgggttcccagtccactacacagatgtcagcaacatgtctagactggccagacagagactgctgggaagaagctggtccgtccctgtgatcagacacctgttcgcccctctgaaggagtacttcgcctgcgtgagcagcggcaacagcaacgccaacagccggggccccagcttctctagcggcctggtgccactgtccctgagagggagccacatgggccccatggagatctacaaaaccgtgagcgcctggaagcggcagcctgtgcgcgtgctgagcctgtttcggaatatcgataaagtcctgaaaagcctgggattcctggagagcggctctggctccggcggtggcaccctgaagtacgtggaggatgtgacaaacgtggtcagacgggatgtggagaagtggggccccttcgatctggtgtacggcagcacccaacccctgggcagctcttgtgaccggtgccctggctggtacatgtttcagttccaccggatcctgcagtacgccctgccgagacaggagtcccagcggccattcttttggattttcatggacaacttgctgctgaccgaggatgaccaggaaactaccactcggttcctgcagaccgaagccgtgaccctgcaggacgtgagaggccgggactaccagaacgccatgcgggtgtggtccaacatccctggactgaaaagcaagcacgcacctctgacccctaaagaagaggagtacctgcaggcccaggtgcggagcagaagcaagctggacgcccctaaggtggatctgctggtgaagaattgcctcctgcccctgagagagtacttcaagtatttcagccagaatagtctgcccctgggaggcagcggcggcggcgccagggagagcgtggtgttcagcgacgtgagcatcgccttcagccaggaggagtgggcccacctggacctggagcagaaggacctgtacagggacgtgatgctggagaactacagcaacctggtgagcctggccggctgcttcgtgagcaagcccgacgtgatcagcctgctggagcagggcaaggagccctggaagatcgtgaggaagggcaggaggaggtaccccgacctggagaccaggggcggcccaagcagcggcgcccctcctcccagcggcggcaggcggcccaagcagcggcgcccctcctcccagcggcggcagcccagccggctccccaacctctaccgaggagggcacctctgagtccgccacccccgagagcggccctggcacctccaccgagcccagcgagggcagcgcacccggcagccctgccggcagccccacctccacagaggagggaaccagcaccgagcccagcgaaggcagcgccccaggcaccagcaccgagcctagtgagcaggagattaaacggatcaacaagatcagaagaagacttgtgaaagacagcaacaccaagaaggccggcaagacaggccccatgaaaaccctgctggttagagtgatgacacccgatctgagagagcggctggaaaacctgagaaagaagcctgaaaatatcccccagcccatcagcaatacatctagagccaacctgaataagctgctgaccgattacaccgaaatgaagaaggcgatcctgcatgtgtactgggaagagttccagaaggaccctgtgggcctgatgagccgggtggcccagcctgccagcaagaagatcgatcagaacaagctgaaacctgagatggacgagaagggcaacctgaccaccgccggctttgcctgctctcagtgtggccagcccctgttcgtgtacaagctggagcaggtgtctgagaagggcaaggcttacaccaactacttcggacggtgcaatgtggccgagcacgaaaagctgatcctgctggcccagctgaagcccgagaaggatagcgacgaagccgtgacatatagcctgggaaagtttgggcagagggccctggatttctacagcattcatgtgaccaaggagtccacccaccccgtgaagcccctggcccagatcgccggaaacagatacgcctccggacctgtgggaaaggccctgagcgacgcatgtatgggcacaatcgcctccttcctgtctaagtaccaggacatcatcatcgaacaccagaaggtggtgaagggcaaccagaagagactggagagcctgcgggagctggccggcaaggaaaacctggaataccctagcgtgaccctgccacctcagcctcacaccaaggagggcgttgatgcctacaacgaagtgatcgcccgggtgcgaatgtgggtgaacctgaacctgtggcagaagctgaagctaagcagagatgatgccaagcctctgctgagactgaagggattcccttcctttcctctggtcgagagacaggccaacgaagtggactggtgggacatggtgtgtaacgtgaagaagctgatcaacgagaaaaaggaggatggcaaggtgttttggcagaatctggctggctacaagagacaggaagccctgagaccatacctgagcagcgaggaagatcggaagaagggaaagaaattcgctcggtaccagctgggcgacctgctgctgcacctggaaaagaagcacggcgaggactggggaaaggtgtacgacgaggcctgggagcggattgacaagaaagtggaaggcctgagcaagcacatcaagctggaagaggaacggagaagcgaggacgcccagagcaaggccgccctgaccgactggctgcgggctaaggccagcttcgtgatcgagggcctgaaggaggccgacaaggacgagttctgcagatgcgagctgaagctgcagaagtggtacggggacctgcggggaaagcccttcgccatcgaagccgagaacagcatcctggacatcagcggcttcagcaagcagtacaactgtgccttcatctggcagaaggacggcgtgaagaagctgaacctgtacctgatcatcaactacttcaagggcggcaagctgcggttcaagaagatcaaacctgaagccttcgaagccaacagattctacaccgtgatcaacaaaaagagcggcgagatcgtgcccatggaggtgaacttcaacttcgacgaccccaacctgatcatcctgcctctggcctttggcaagagacagggcagagaattcatctggaacgacctgctgtccctggaaaccggcagcctgaagctggccaacggaagagtgatcgagaagacactgtacaacagaagaacccggcaggatgagcctgccctgttcgtggccctgaccttcgagcggcgggaggtcctggactcctccaatatcaaaccaatgaacctgatcggcgtggcaagaggcgaaaacatccccgccgtgatcgccctgaccgaccccgagggctgcccactgagccggtttaaggatagcctgggaaacccaacccacatcctgagaatcggcgagagctataaggagaagcagcggaccatccaggccaagaaggaggtggagcagcggagagccggcggctacagccggaagtacgccagcaaagccaagaatctggcagacgatatggtgagaaacaccgctagagatctgctgtactacgccgtgacccaggatgccatgctgatcttcgccaacctgagccggggcttcggccggcagggcaagcggaccttcatggccgagagacagtacacacggatggaggactggctgaccgccaagctggcctacgagggcctgagcaagacctacctgtccaagacactggcccagtacacctccaagacatgcagcaactgtgggtttaccatcaccagcgccgactacgacagggtgctggagaagctgaagaagacagcaacaggctggatgaccacaattaacggcaaggagctgaaggtggagggccagattacctactacaacagatacaagagacagaacgtagtcaaggacctgtccgtcgagctggatagactgagcgaagaatctgtgaacaacgacatctcctcctggacaaagggcagaagcggagaagctctgagcctcctgaagaaaagattctcccatagacccgtgcaggagaagttcgtgtgcctgaactgcggcttcgagacacacgcagccgagcaagccgccctgaacatcgccagatcctggctgttcctgcggagccaggagtacaagaaataccagacaaacaagacaaccggcaacaccgataagagagccttcgtcgagacctggcagtccttttaccggaagaagcttaaggaggtgtggaaacctgccgtgcggtctggcggatctggcggaggctccaccagccccaagaaaaagagaaaagtctaagctgccttctgcggggcttgccttctggccatgcccttcttctctcccttgcacctgtacctcttggtctttgaataaagcctgagtaggaaggctagcaaaaaaaaaaaaaaaaaaaaaaaaaaaaaaaaaaaaaaaaaaaaaaaaaaaaaaaaaaaaaaaaaaaaaaaaaaaaaaaagcccagccggctccccaacctctaccgaggagggcacctctgagtccgccacccccgagagcggccctggcacctccaccgagcccagcgagggcagcgcacccggcagccctgccggcagccccacctccacagaggagggaaccagcaccgagcccagcgaaggcagcgccccaggcaccagcaccgagcctagtgagcaggagattaaacggatcaacaagatcagaagaagacttgtgaaagacagcaacaccaagaaggccggcaagacaggccccatgaaaaccctgctggttagagtgatgacacccgatctgagagagcggctggaaaacctgagaaagaagcctgaaaatatcccccagcccatcagcaatacatctagagccaacctgaataagctgctgaccgattacaccgaaatgaagaaggcgatcctgcatgtgtactgggaagagttccagaaggaccctgtgggcctgatgagccgggtggcccagcctgccagcaagaagatcgatcagaacaagctgaaacctgagatggacgagaagggcaacctgaccaccgccggctttgcctgctctcagtgtggccagcccctgttcgtgtacaagctggagcaggtgtctgagaagggcaaggcttacaccaactacttcggacggtgcaatgtggccgagcacgaaaagctgatcctgctggcccagctgaagcccgagaaggatagcgacgaagccgtgacatatagcctgggaaagtttgggcagagggccctggatttctacagcattcatgtgaccaaggagtccacccaccccgtgaagcccctggcccagatcgccggaaacagatacgcctccggacctgtgggaaaggccctgagcgacgcatgtatgggcacaatcgcctccttcctgtctaagtaccaggacatcatcatcgaacaccagaaggtggtgaagggcaaccagaagagactggagagcctgcgggagctggccggcaaggaaaacctggaataccctagcgtgaccctgccacctcagcctcacaccaaggagggcgttgatgcctacaacgaagtgatcgcccgggtgcgaatgtgggtgaacctgaacctgtggcagaagctgaagctaagcagagatgatgccaagcctctgctgagactgaagggattcccttcctttcctctggtcgagagacaggccaacgaagtggactggtgggacatggtgtgtaacgtgaagaagctgatcaacgagaaaaaggaggatggcaaggtgttttggcagaatctggctggctacaagagacaggaagccctgagaccatacctgagcagcgaggaagatcggaagaagggaaagaaattcgctcggtaccagctgggcgacctgctgctgcacctggaaaagaagcacggcgaggactggggaaaggtgtacgacgaggcctgggagcggattgacaagaaagtggaaggcctgagcaagcacatcaagctggaagaggaacggagaagcgaggacgcccagagcaaggccgccctgaccgactggctgcgggctaaggccagcttcgtgatcgagggcctgaaggaggccgacaaggacgagttctgcagatgcgagctgaagctgcagaagtggtacggggacctgcggggaaagcccttcgccatcgaagccgagaacagcatcctggacatcagcggcttcagcaagcagtacaactgtgccttcatctggcagaaggacggcgtgaagaagctgaacctgtacctgatcatcaactacttcaagggcggcaagctgcggttcaagaagatcaaacctgaagccttcgaagccaacagattctacaccgtgatcaacaaaaagagcggcgagatcgtgcccatggaggtgaacttcaacttcgacgaccccaacctgatcatcctgcctctggcctttggcaagagacagggcagagaattcatctggaacgacctgctgtccctggaaaccggcagcctgaagctggccaacggaagagtgatcgagaagacactgtacaacagaagaacccggcaggatgagcctgccctgttcgtggccctgaccttcgagcggcgggaggtcctggactcctccaatatcaaaccaatgaacctgatcggcgtggcaagaggcgaaaacatccccgccgtgatcgccctgaccgaccccgagggctgcccactgagccggtttaaggatagcctgggaaacccaacccacatcctgagaatcggcgagagctataaggagaagcagcggaccatccaggccaagaaggaggtggagcagcggagagccggcggctacagccggaagtacgccagcaaagccaagaatctggcagacgatatggtgagaaacaccgctagagatctgctgtactacgccgtgacccaggatgccatgctgatcttcgccaacctgagccggggcttcggccggcagggcaagcggaccttcatggccgagagacagtacacacggatggaggactggctgaccgccaagctggcctacgagggcctgagcaagacctacctgtccaagacactggcccagtacacctccaagacatgcagcaactgtgggtttaccatcaccagcgccgactacgacagggtgctggagaagctgaagaagacagcaacaggctggatgaccacaattaacggcaaggagctgaaggtggagggccagattacctactacaacagatacaagagacagaacgtagtcaaggacctgtccgtcgagctggatagactgagcgaagaatctgtgaacaacgacatctcctcctggacaaagggcagaagcggagaagctctgagcctcctgaagaaaagattctcccatagacccgtgcaggagaagttcgtgtgcctgaactgcggcttcgagacacacgcagccgagcaagccgccctgaacatcgccagatcctggctgttcctgcggagccaggagtacaagaaataccagacaaacaagacaaccggcaacaccgataagagagccttcgtcgagacctggcagtccttttaccggaagaagcttaaggaggtgtggaaacctgccgtgcggtctggcggatctggcggaggctccaccagccccaagaaaaagagaaaagtctaagctgccttctgcggggcttgccttctggccatgcccttcttctctcccttgcacctgtacctcttggtctttgaataaagcctgagtaggaaggctagcaaaaaaaaaaaaaaaaaaaaaaaaaaaaaaaaaaaaaaaaaaaaaaaaaaaaaaaaaaaaaaaaaaaaaaaaaaaaaaaa

SEQ ID NO: 9060 - RNA, 8787 nt, synthetic construct
  source 1..8787: mol_type = other RNA
aggaaataagagagaaaagaagagtaagaagaaatataagagccaccatggcccctaagaagaagcgtaaagtgagccggatgaaccacgaccaggagttcgacccccctaaggtgtaccctcccgtccccgccgagaagagaaagcccatccgggtcctgagcctgttcgatggcatcgccaccggtctgctggtgctgaaggacctgggcatccaggtggataggtacattgcctccgaggtgtgcgaggactccatcaccgtgggaatggtgcgtcatcagggcaagatcatgtacgtgggcgacgtgcggagcgtgacacagaagcatatccaggagtggggccctttcgacctggtgatcggcggcagcccttgcaatgacctgagcatcgtgaacccagcccggaagggcctgtacgagggaaccggcagactgttcttcgagttttacagactgctgcacgacgcccggcctaaggaaggcgacgaccggcccttcttttggctgttcgagaatgtggtggccatgggagtcagcgacaagcgggatattagccggttcctggagagcaaccccgtgatgatcgatgccaaggaagtgagcgccgcccaccgggccagatacttctggggcaatctgcctggcatgaacagacccctggccagcaccgtgaacgacaagctggagctgcaggagtgcctggagcacggccggatcgccaagttcagcaaggtgagaaccatcaccacccgaagcaacagcatcaaacaaggcaaggaccagcactttcctgtgttcatgaacgagaaggaggacatcctgtggtgtaccgagatggagagagtgttcgggttcccagtccactacacagatgtcagcaacatgtctagactggccagacagagactgctgggaagaagctggtccgtccctgtgatcagacacctgttcgcccctctgaaggagtacttcgcctgcgtgagcagcggcaacagcaacgccaacagccggggccccagcttctctagcggcctggtgccactgtccctgagagggagccacatgggccccatggagatctacaaaaccgtgagcgcctggaagcggcagcctgtgcgcgtgctgagcctgtttcggaatatcgataaagtcctgaaaagcctgggattcctggagagcggctctggctccggcggtggcaccctgaagtacgtggaggatgtgacaaacgtggtcagacgggatgtggagaagtggggccccttcgatctggtgtacggcagcacccaacccctgggcagctcttgtgaccggtgccctggctggtacatgtttcagttccaccggatcctgcagtacgccctgccgagacaggagtcccagcggccattcttttggattttcatggacaacttgctgctgaccgaggatgaccaggaaactaccactcggttcctgcagaccgaagccgtgaccctgcaggacgtgagaggccgggactaccagaacgccatgcgggtgtggtccaacatccctggactgaaaagcaagcacgcacctctgacccctaaagaagaggagtacctgcaggcccaggtgcggagcagaagcaagctggacgcccctaaggtggatctgctggtgaagaattgcctcctgcccctgagagagtacttcaagtatttcagccagaatagtctgcccctgggaggcagcggcggcggcatgatcgagtaccagatccccgtgagcttcaaggacgtggtggtgggcttcacccaggaggagtggcaccagctgagccccgcccagagggccctgtacagggacgtgatgctggagacctacagcaacctggtgagcgtgggctacgagggcaccaagcccgacgtgatcctgaggctggagcaggaggaggccccctggatcggcgaggccgcctgccccggctgccactgctggggcaagggcggcccaagcagcggcgcccctcctcccagcggcggcaggcggcccaagcagcggcgcccctcctcccagcggcggcagcccagccggctccccaacctctaccgaggagggcacctctgagtccgccacccccgagagcggccctggcacctccaccgagcccagcgagggcagcgcacccggcagccctgccggcagccccacctccacagaggagggaaccagcaccgagcccagcgaaggcagcgccccaggcaccagcaccgagcctagtgagcaggagattaaacggatcaacaagatcagaagaagacttgtgaaagacagcaacaccaagaaggccggcaagacaggccccatgaaaaccctgctggttagagtgatgacacccgatctgagagagcggctggaaaacctgagaaagaagcctgaaaatatcccccagcccatcagcaatacatctagagccaacctgaataagctgctgaccgattacaccgaaatgaagaaggcgatcctgcatgtgtactgggaagagttccagaaggaccctgtgggcctgatgagccgggtggcccagcctgccagcaagaagatcgatcagaacaagctgaaacctgagatggacgagaagggcaacctgaccaccgccggctttgcctgctctcagtgtggccagcccctgttcgtgtacaagctggagcaggtgtctgagaagggcaaggcttacaccaactacttcggacggtgcaatgtggccgagcacgaaaagctgatcctgctggcccagctgaagcccgagaaggatagcgacgaagccgtgacatatagcctgggaaagtttgggcagagggccctggatttctacagcattcatgtgaccaaggagtccacccaccccgtgaagcccctggcccagatcgccggaaacagatacgcctccggacctgtgggaaaggccctgagcgacgcatgtatgggcacaatcgcctccttcctgtctaagtaccaggacatcatcatcgaacaccagaaggtggtgaagggcaaccagaagagactggagagcctgcgggagctggccggcaaggaaaacctggaataccctagcgtgaccctgccacctcagcctcacaccaaggagggcgttgatgcctacaacgaagtgatcgcccgggtgcgaatgtgggtgaacctgaacctgtggcagaagctgaagctaagcagagatgatgccaagcctctgctgagactgaagggattcccttcctttcctctggtcgagagacaggccaacgaagtggactggtgggacatggtgtgtaacgtgaagaagctgatcaacgagaaaaaggaggatggcaaggtgttttggcagaatctggctggctacaagagacaggaagccctgagaccatacctgagcagcgaggaagatcggaagaagggaaagaaattcgctcggtaccagctgggcgacctgctgctgcacctggaaaagaagcacggcgaggactggggaaaggtgtacgacgaggcctgggagcggattgacaagaaagtggaaggcctgagcaagcacatcaagctggaagaggaacggagaagcgaggacgcccagagcaaggccgccctgaccgactggctgcgggctaaggccagcttcgtgatcgagggcctgaaggaggccgacaaggacgagttctgcagatgcgagctgaagctgcagaagtggtacggggacctgcggggaaagcccttcgccatcgaagccgagaacagcatcctggacatcagcggcttcagcaagcagtacaactgtgccttcatctggcagaaggacggcgtgaagaagctgaacctgtacctgatcatcaactacttcaagggcggcaagctgcggttcaagaagatcaaacctgaagccttcgaagccaacagattctacaccgtgatcaacaaaaagagcggcgagatcgtgcccatggaggtgaacttcaacttcgacgaccccaacctgatcatcctgcctctggcctttggcaagagacagggcagagaattcatctggaacgacctgctgtccctggaaaccggcagcctgaagctggccaacggaagagtgatcgagaagacactgtacaacagaagaacccggcaggatgagcctgccctgttcgtggccctgaccttcgagcggcgggaggtcctggactcctccaatatcaaaccaatgaacctgatcggcgtggcaagaggcgaaaacatccccgccgtgatcgccctgaccgaccccgagggctgcccactgagccggtttaaggatagcctgggaaacccaacccacatcctgagaatcggcgagagctataaggagaagcagcggaccatccaggccaagaaggaggtggagcagcggagagccggcggctacagccggaagtacgccagcaaagccaagaatctggcagacgatatggtgagaaacaccgctagagatctgctgtactacgccgtgacccaggatgccatgctgatcttcgccaacctgagccggggcttcggccggcagggcaagcggaccttcatggccgagagacagtacacacggatggaggactggctgaccgccaagctggcctacgagggcctgagcaagacctacctgtccaagacactggcccagtacacctccaagacatgcagcaactgtgggtttaccatcaccagcgccgactacgacagggtgctggagaagctgaagaagacagcaacaggctggatgaccacaattaacggcaaggagctgaaggtggagggccagattacctactacaacagatacaagagacagaacgtagtcaaggacctgtccgtcgagctggatagactgagcgaagaatctgtgaacaacgacatctcctcctggacaaagggcagaagcggagaagctctgagcctcctgaagaaaagattctcccatagacccgtgcaggagaagttcgtgtgcctgaactgcggcttcgagacacacgcagccgagcaagccgccctgaacatcgccagatcctggctgttcctgcggagccaggagtacaagaaataccagacaaacaagacaaccggcaacaccgataagagagccttcgtcgagacctggcagtccttttaccggaagaagcttaaggaggtgtggaaacctgccgtgcggtctggcggatctggcggaggctccaccagccccaagaaaaagagaaaagtctaagctgccttctgcggggcttgccttctggccatgcccttcttctctcccttgcacctgtacctcttggtctttgaataaagcctgagtaggaaggctagcaaaaaaaaaaaaaaaaaaaaaaaaaaaaaaaaaaaaaaaaaaaaaaaaaaaaaaaaaaaaaaaaaaaaaaaaaaaaaaaagcccagccggctccccaacctctaccgaggagggcacctctgagtccgccacccccgagagcggccctggcacctccaccgagcccagcgagggcagcgcacccggcagccctgccggcagccccacctccacagaggagggaaccagcaccgagcccagcgaaggcagcgccccaggcaccagcaccgagcctagtgagcaggagattaaacggatcaacaagatcagaagaagacttgtgaaagacagcaacaccaagaaggccggcaagacaggccccatgaaaaccctgctggttagagtgatgacacccgatctgagagagcggctggaaaacctgagaaagaagcctgaaaatatcccccagcccatcagcaatacatctagagccaacctgaataagctgctgaccgattacaccgaaatgaagaaggcgatcctgcatgtgtactgggaagagttccagaaggaccctgtgggcctgatgagccgggtggcccagcctgccagcaagaagatcgatcagaacaagctgaaacctgagatggacgagaagggcaacctgaccaccgccggctttgcctgctctcagtgtggccagcccctgttcgtgtacaagctggagcaggtgtctgagaagggcaaggcttacaccaactacttcggacggtgcaatgtggccgagcacgaaaagctgatcctgctggcccagctgaagcccgagaaggatagcgacgaagccgtgacatatagcctgggaaagtttgggcagagggccctggatttctacagcattcatgtgaccaaggagtccacccaccccgtgaagcccctggcccagatcgccggaaacagatacgcctccggacctgtgggaaaggccctgagcgacgcatgtatgggcacaatcgcctccttcctgtctaagtaccaggacatcatcatcgaacaccagaaggtggtgaagggcaaccagaagagactggagagcctgcgggagctggccggcaaggaaaacctggaataccctagcgtgaccctgccacctcagcctcacaccaaggagggcgttgatgcctacaacgaagtgatcgcccgggtgcgaatgtgggtgaacctgaacctgtggcagaagctgaagctaagcagagatgatgccaagcctctgctgagactgaagggattcccttcctttcctctggtcgagagacaggccaacgaagtggactggtgggacatggtgtgtaacgtgaagaagctgatcaacgagaaaaaggaggatggcaaggtgttttggcagaatctggctggctacaagagacaggaagccctgagaccatacctgagcagcgaggaagatcggaagaagggaaagaaattcgctcggtaccagctgggcgacctgctgctgcacctggaaaagaagcacggcgaggactggggaaaggtgtacgacgaggcctgggagcggattgacaagaaagtggaaggcctgagcaagcacatcaagctggaagaggaacggagaagcgaggacgcccagagcaaggccgccctgaccgactggctgcgggctaaggccagcttcgtgatcgagggcctgaaggaggccgacaaggacgagttctgcagatgcgagctgaagctgcagaagtggtacggggacctgcggggaaagcccttcgccatcgaagccgagaacagcatcctggacatcagcggcttcagcaagcagtacaactgtgccttcatctggcagaaggacggcgtgaagaagctgaacctgtacctgatcatcaactacttcaagggcggcaagctgcggttcaagaagatcaaacctgaagccttcgaagccaacagattctacaccgtgatcaacaaaaagagcggcgagatcgtgcccatggaggtgaacttcaacttcgacgaccccaacctgatcatcctgcctctggcctttggcaagagacagggcagagaattcatctggaacgacctgctgtccctggaaaccggcagcctgaagctggccaacggaagagtgatcgagaagacactgtacaacagaagaacccggcaggatgagcctgccctgttcgtggccctgaccttcgagcggcgggaggtcctggactcctccaatatcaaaccaatgaacctgatcggcgtggcaagaggcgaaaacatccccgccgtgatcgccctgaccgaccccgagggctgcccactgagccggtttaaggatagcctgggaaacccaacccacatcctgagaatcggcgagagctataaggagaagcagcggaccatccaggccaagaaggaggtggagcagcggagagccggcggctacagccggaagtacgccagcaaagccaagaatctggcagacgatatggtgagaaacaccgctagagatctgctgtactacgccgtgacccaggatgccatgctgatcttcgccaacctgagccggggcttcggccggcagggcaagcggaccttcatggccgagagacagtacacacggatggaggactggctgaccgccaagctggcctacgagggcctgagcaagacctacctgtccaagacactggcccagtacacctccaagacatgcagcaactgtgggtttaccatcaccagcgccgactacgacagggtgctggagaagctgaagaagacagcaacaggctggatgaccacaattaacggcaaggagctgaaggtggagggccagattacctactacaacagatacaagagacagaacgtagtcaaggacctgtccgtcgagctggatagactgagcgaagaatctgtgaacaacgacatctcctcctggacaaagggcagaagcggagaagctctgagcctcctgaagaaaagattctcccatagacccgtgcaggagaagttcgtgtgcctgaactgcggcttcgagacacacgcagccgagcaagccgccctgaacatcgccagatcctggctgttcctgcggagccaggagtacaagaaataccagacaaacaagacaaccggcaacaccgataagagagccttcgtcgagacctggcagtccttttaccggaagaagcttaaggaggtgtggaaacctgccgtgcggtctggcggatctggcggaggctccaccagccccaagaaaaagagaaaagtctaagctgccttctgcggggcttgccttctggccatgcccttcttctctcccttgcacctgtacctcttggtctttgaataaagcctgagtaggaaggctagcaaaaaaaaaaaaaaaaaaaaaaaaaaaaaaaaaaaaaaaaaaaaaaaaaaaaaaaaaaaaaaaaaaaaaaaaaaaaaaaa

SEQ ID NO: 9061 - RNA, 8787 nt, synthetic construct
  source 1..8787: mol_type = other RNA
aggaaataagagagaaaagaagagtaagaagaaatataagagccaccatggcccctaagaagaagcgtaaagtgagccggatgaaccacgaccaggagttcgacccccctaaggtgtaccctcccgtccccgccgagaagagaaagcccatccgggtcctgagcctgttcgatggcatcgccaccggtctgctggtgctgaaggacctgggcatccaggtggataggtacattgcctccgaggtgtgcgaggactccatcaccgtgggaatggtgcgtcatcagggcaagatcatgtacgtgggcgacgtgcggagcgtgacacagaagcatatccaggagtggggccctttcgacctggtgatcggcggcagcccttgcaatgacctgagcatcgtgaacccagcccggaagggcctgtacgagggaaccggcagactgttcttcgagttttacagactgctgcacgacgcccggcctaaggaaggcgacgaccggcccttcttttggctgttcgagaatgtggtggccatgggagtcagcgacaagcgggatattagccggttcctggagagcaaccccgtgatgatcgatgccaaggaagtgagcgccgcccaccgggccagatacttctggggcaatctgcctggcatgaacagacccctggccagcaccgtgaacgacaagctggagctgcaggagtgcctggagcacggccggatcgccaagttcagcaaggtgagaaccatcaccacccgaagcaacagcatcaaacaaggcaaggaccagcactttcctgtgttcatgaacgagaaggaggacatcctgtggtgtaccgagatggagagagtgttcgggttcccagtccactacacagatgtcagcaacatgtctagactggccagacagagactgctgggaagaagctggtccgtccctgtgatcagacacctgttcgcccctctgaaggagtacttcgcctgcgtgagcagcggcaacagcaacgccaacagccggggccccagcttctctagcggcctggtgccactgtccctgagagggagccacatgggccccatggagatctacaaaaccgtgagcgcctggaagcggcagcctgtgcgcgtgctgagcctgtttcggaatatcgataaagtcctgaaaagcctgggattcctggagagcggctctggctccggcggtggcaccctgaagtacgtggaggatgtgacaaacgtggtcagacgggatgtggagaagtggggccccttcgatctggtgtacggcagcacccaacccctgggcagctcttgtgaccggtgccctggctggtacatgtttcagttccaccggatcctgcagtacgccctgccgagacaggagtcccagcggccattcttttggattttcatggacaacttgctgctgaccgaggatgaccaggaaactaccactcggttcctgcagaccgaagccgtgaccctgcaggacgtgagaggccgggactaccagaacgccatgcgggtgtggtccaacatccctggactgaaaagcaagcacgcacctctgacccctaaagaagaggagtacctgcaggcccaggtgcggagcagaagcaagctggacgcccctaaggtggatctgctggtgaagaattgcctcctgcccctgagagagtacttcaagtatttcagccagaatagtctgcccctgggaggcagcggcggcggcccccaggagagcgtgaccttcaaggacatcgccgtggacttcacccaggaggagtgggccctgctggacgccagccagaggaagctgtacagggacgtgatgctggagaacatcggccacctggtgagcgtgggctacagggtgtgcaagagcgacgtgatcagccagctgcagcagggcgtggagctgtggagggagggcaggggcttcccccagggcgtgatccccgacaggaagagcagcggcggcccaagcagcggcgcccctcctcccagcggcggcaggcggcccaagcagcggcgcccctcctcccagcggcggcagcccagccggctccccaacctctaccgaggagggcacctctgagtccgccacccccgagagcggccctggcacctccaccgagcccagcgagggcagcgcacccggcagccctgccggcagccccacctccacagaggagggaaccagcaccgagcccagcgaaggcagcgccccaggcaccagcaccgagcctagtgagcaggagattaaacggatcaacaagatcagaagaagacttgtgaaagacagcaacaccaagaaggccggcaagacaggccccatgaaaaccctgctggttagagtgatgacacccgatctgagagagcggctggaaaacctgagaaagaagcctgaaaatatcccccagcccatcagcaatacatctagagccaacctgaataagctgctgaccgattacaccgaaatgaagaaggcgatcctgcatgtgtactgggaagagttccagaaggaccctgtgggcctgatgagccgggtggcccagcctgccagcaagaagatcgatcagaacaagctgaaacctgagatggacgagaagggcaacctgaccaccgccggctttgcctgctctcagtgtggccagcccctgttcgtgtacaagctggagcaggtgtctgagaagggcaaggcttacaccaactacttcggacggtgcaatgtggccgagcacgaaaagctgatcctgctggcccagctgaagcccgagaaggatagcgacgaagccgtgacatatagcctgggaaagtttgggcagagggccctggatttctacagcattcatgtgaccaaggagtccacccaccccgtgaagcccctggcccagatcgccggaaacagatacgcctccggacctgtgggaaaggccctgagcgacgcatgtatgggcacaatcgcctccttcctgtctaagtaccaggacatcatcatcgaacaccagaaggtggtgaagggcaaccagaagagactggagagcctgcgggagctggccggcaaggaaaacctggaataccctagcgtgaccctgccacctcagcctcacaccaaggagggcgttgatgcctacaacgaagtgatcgcccgggtgcgaatgtgggtgaacctgaacctgtggcagaagctgaagctaagcagagatgatgccaagcctctgctgagactgaagggattcccttcctttcctctggtcgagagacaggccaacgaagtggactggtgggacatggtgtgtaacgtgaagaagctgatcaacgagaaaaaggaggatggcaaggtgttttggcagaatctggctggctacaagagacaggaagccctgagaccatacctgagcagcgaggaagatcggaagaagggaaagaaattcgctcggtaccagctgggcgacctgctgctgcacctggaaaagaagcacggcgaggactggggaaaggtgtacgacgaggcctgggagcggattgacaagaaagtggaaggcctgagcaagcacatcaagctggaagaggaacggagaagcgaggacgcccagagcaaggccgccctgaccgactggctgcgggctaaggccagcttcgtgatcgagggcctgaaggaggccgacaaggacgagttctgcagatgcgagctgaagctgcagaagtggtacggggacctgcggggaaagcccttcgccatcgaagccgagaacagcatcctggacatcagcggcttcagcaagcagtacaactgtgccttcatctggcagaaggacggcgtgaagaagctgaacctgtacctgatcatcaactacttcaagggcggcaagctgcggttcaagaagatcaaacctgaagccttcgaagccaacagattctacaccgtgatcaacaaaaagagcggcgagatcgtgcccatggaggtgaacttcaacttcgacgaccccaacctgatcatcctgcctctggcctttggcaagagacagggcagagaattcatctggaacgacctgctgtccctggaaaccggcagcctgaagctggccaacggaagagtgatcgagaagacactgtacaacagaagaacccggcaggatgagcctgccctgttcgtggccctgaccttcgagcggcgggaggtcctggactcctccaatatcaaaccaatgaacctgatcggcgtggcaagaggcgaaaacatccccgccgtgatcgccctgaccgaccccgagggctgcccactgagccggtttaaggatagcctgggaaacccaacccacatcctgagaatcggcgagagctataaggagaagcagcggaccatccaggccaagaaggaggtggagcagcggagagccggcggctacagccggaagtacgccagcaaagccaagaatctggcagacgatatggtgagaaacaccgctagagatctgctgtactacgccgtgacccaggatgccatgctgatcttcgccaacctgagccggggcttcggccggcagggcaagcggaccttcatggccgagagacagtacacacggatggaggactggctgaccgccaagctggcctacgagggcctgagcaagacctacctgtccaagacactggcccagtacacctccaagacatgcagcaactgtgggtttaccatcaccagcgccgactacgacagggtgctggagaagctgaagaagacagcaacaggctggatgaccacaattaacggcaaggagctgaaggtggagggccagattacctactacaacagatacaagagacagaacgtagtcaaggacctgtccgtcgagctggatagactgagcgaagaatctgtgaacaacgacatctcctcctggacaaagggcagaagcggagaagctctgagcctcctgaagaaaagattctcccatagacccgtgcaggagaagttcgtgtgcctgaactgcggcttcgagacacacgcagccgagcaagccgccctgaacatcgccagatcctggctgttcctgcggagccaggagtacaagaaataccagacaaacaagacaaccggcaacaccgataagagagccttcgtcgagacctggcagtccttttaccggaagaagcttaaggaggtgtggaaacctgccgtgcggtctggcggatctggcggaggctccaccagccccaagaaaaagagaaaagtctaagctgccttctgcggggcttgccttctggccatgcccttcttctctcccttgcacctgtacctcttggtctttgaataaagcctgagtaggaaggctagcaaaaaaaaaaaaaaaaaaaaaaaaaaaaaaaaaaaaaaaaaaaaaaaaaaaaaaaaaaaaaaaaaaaaaaaaaaaaaaaagcccagccggctccccaacctctaccgaggagggcacctctgagtccgccacccccgagagcggccctggcacctccaccgagcccagcgagggcagcgcacccggcagccctgccggcagccccacctccacagaggagggaaccagcaccgagcccagcgaaggcagcgccccaggcaccagcaccgagcctagtgagcaggagattaaacggatcaacaagatcagaagaagacttgtgaaagacagcaacaccaagaaggccggcaagacaggccccatgaaaaccctgctggttagagtgatgacacccgatctgagagagcggctggaaaacctgagaaagaagcctgaaaatatcccccagcccatcagcaatacatctagagccaacctgaataagctgctgaccgattacaccgaaatgaagaaggcgatcctgcatgtgtactgggaagagttccagaaggaccctgtgggcctgatgagccgggtggcccagcctgccagcaagaagatcgatcagaacaagctgaaacctgagatggacgagaagggcaacctgaccaccgccggctttgcctgctctcagtgtggccagcccctgttcgtgtacaagctggagcaggtgtctgagaagggcaaggcttacaccaactacttcggacggtgcaatgtggccgagcacgaaaagctgatcctgctggcccagctgaagcccgagaaggatagcgacgaagccgtgacatatagcctgggaaagtttgggcagagggccctggatttctacagcattcatgtgaccaaggagtccacccaccccgtgaagcccctggcccagatcgccggaaacagatacgcctccggacctgtgggaaaggccctgagcgacgcatgtatgggcacaatcgcctccttcctgtctaagtaccaggacatcatcatcgaacaccagaaggtggtgaagggcaaccagaagagactggagagcctgcgggagctggccggcaaggaaaacctggaataccctagcgtgaccctgccacctcagcctcacaccaaggagggcgttgatgcctacaacgaagtgatcgcccgggtgcgaatgtgggtgaacctgaacctgtggcagaagctgaagctaagcagagatgatgccaagcctctgctgagactgaagggattcccttcctttcctctggtcgagagacaggccaacgaagtggactggtgggacatggtgtgtaacgtgaagaagctgatcaacgagaaaaaggaggatggcaaggtgttttggcagaatctggctggctacaagagacaggaagccctgagaccatacctgagcagcgaggaagatcggaagaagggaaagaaattcgctcggtaccagctgggcgacctgctgctgcacctggaaaagaagcacggcgaggactggggaaaggtgtacgacgaggcctgggagcggattgacaagaaagtggaaggcctgagcaagcacatcaagctggaagaggaacggagaagcgaggacgcccagagcaaggccgccctgaccgactggctgcgggctaaggccagcttcgtgatcgagggcctgaaggaggccgacaaggacgagttctgcagatgcgagctgaagctgcagaagtggtacggggacctgcggggaaagcccttcgccatcgaagccgagaacagcatcctggacatcagcggcttcagcaagcagtacaactgtgccttcatctggcagaaggacggcgtgaagaagctgaacctgtacctgatcatcaactacttcaagggcggcaagctgcggttcaagaagatcaaacctgaagccttcgaagccaacagattctacaccgtgatcaacaaaaagagcggcgagatcgtgcccatggaggtgaacttcaacttcgacgaccccaacctgatcatcctgcctctggcctttggcaagagacagggcagagaattcatctggaacgacctgctgtccctggaaaccggcagcctgaagctggccaacggaagagtgatcgagaagacactgtacaacagaagaacccggcaggatgagcctgccctgttcgtggccctgaccttcgagcggcgggaggtcctggactcctccaatatcaaaccaatgaacctgatcggcgtggcaagaggcgaaaacatccccgccgtgatcgccctgaccgaccccgagggctgcccactgagccggtttaaggatagcctgggaaacccaacccacatcctgagaatcggcgagagctataaggagaagcagcggaccatccaggccaagaaggaggtggagcagcggagagccggcggctacagccggaagtacgccagcaaagccaagaatctggcagacgatatggtgagaaacaccgctagagatctgctgtactacgccgtgacccaggatgccatgctgatcttcgccaacctgagccggggcttcggccggcagggcaagcggaccttcatggccgagagacagtacacacggatggaggactggctgaccgccaagctggcctacgagggcctgagcaagacctacctgtccaagacactggcccagtacacctccaagacatgcagcaactgtgggtttaccatcaccagcgccgactacgacagggtgctggagaagctgaagaagacagcaacaggctggatgaccacaattaacggcaaggagctgaaggtggagggccagattacctactacaacagatacaagagacagaacgtagtcaaggacctgtccgtcgagctggatagactgagcgaagaatctgtgaacaacgacatctcctcctggacaaagggcagaagcggagaagctctgagcctcctgaagaaaagattctcccatagacccgtgcaggagaagttcgtgtgcctgaactgcggcttcgagacacacgcagccgagcaagccgccctgaacatcgccagatcctggctgttcctgcggagccaggagtacaagaaataccagacaaacaagacaaccggcaacaccgataagagagccttcgtcgagacctggcagtccttttaccggaagaagcttaaggaggtgtggaaacctgccgtgcggtctggcggatctggcggaggctccaccagccccaagaaaaagagaaaagtctaagctgccttctgcggggcttgccttctggccatgcccttcttctctcccttgcacctgtacctcttggtctttgaataaagcctgagtaggaaggctagcaaaaaaaaaaaaaaaaaaaaaaaaaaaaaaaaaaaaaaaaaaaaaaaaaaaaaaaaaaaaaaaaaaaaaaaaaaaaaaaa

SEQ ID NO: 9062 - RNA, 8787 nt, synthetic construct
  source 1..8787: mol_type = other RNA
aggaaataagagagaaaagaagagtaagaagaaatataagagccaccatggcccctaagaagaagcgtaaagtgagccggatgaaccacgaccaggagttcgacccccctaaggtgtaccctcccgtccccgccgagaagagaaagcccatccgggtcctgagcctgttcgatggcatcgccaccggtctgctggtgctgaaggacctgggcatccaggtggataggtacattgcctccgaggtgtgcgaggactccatcaccgtgggaatggtgcgtcatcagggcaagatcatgtacgtgggcgacgtgcggagcgtgacacagaagcatatccaggagtggggccctttcgacctggtgatcggcggcagcccttgcaatgacctgagcatcgtgaacccagcccggaagggcctgtacgagggaaccggcagactgttcttcgagttttacagactgctgcacgacgcccggcctaaggaaggcgacgaccggcccttcttttggctgttcgagaatgtggtggccatgggagtcagcgacaagcgggatattagccggttcctggagagcaaccccgtgatgatcgatgccaaggaagtgagcgccgcccaccgggccagatacttctggggcaatctgcctggcatgaacagacccctggccagcaccgtgaacgacaagctggagctgcaggagtgcctggagcacggccggatcgccaagttcagcaaggtgagaaccatcaccacccgaagcaacagcatcaaacaaggcaaggaccagcactttcctgtgttcatgaacgagaaggaggacatcctgtggtgtaccgagatggagagagtgttcgggttcccagtccactacacagatgtcagcaacatgtctagactggccagacagagactgctgggaagaagctggtccgtccctgtgatcagacacctgttcgcccctctgaaggagtacttcgcctgcgtgagcagcggcaacagcaacgccaacagccggggccccagcttctctagcggcctggtgccactgtccctgagagggagccacatgggccccatggagatctacaaaaccgtgagcgcctggaagcggcagcctgtgcgcgtgctgagcctgtttcggaatatcgataaagtcctgaaaagcctgggattcctggagagcggctctggctccggcggtggcaccctgaagtacgtggaggatgtgacaaacgtggtcagacgggatgtggagaagtggggccccttcgatctggtgtacggcagcacccaacccctgggcagctcttgtgaccggtgccctggctggtacatgtttcagttccaccggatcctgcagtacgccctgccgagacaggagtcccagcggccattcttttggattttcatggacaacttgctgctgaccgaggatgaccaggaaactaccactcggttcctgcagaccgaagccgtgaccctgcaggacgtgagaggccgggactaccagaacgccatgcgggtgtggtccaacatccctggactgaaaagcaagcacgcacctctgacccctaaagaagaggagtacctgcaggcccaggtgcggagcagaagcaagctggacgcccctaaggtggatctgctggtgaagaattgcctcctgcccctgagagagtacttcaagtatttcagccagaatagtctgcccctgggaggcagcggcggcggcatgaacgtggaggtggtgaaggtgatgccccaggacctggtgaccttcaaggacgtggccatcgacttcagccaggaggagtggcagtggatgaaccccgcccagaagaggctgtacaggagcatgatgctggagaactaccagagcctggtgagcctgggcctgtgcatcagcaagccctacgtgatcagcctgctggagcagggcagggagccctgggagatgaccagcgagatgaccaggggcggcccaagcagcggcgcccctcctcccagcggcggcaggcggcccaagcagcggcgcccctcctcccagcggcggcagcccagccggctccccaacctctaccgaggagggcacctctgagtccgccacccccgagagcggccctggcacctccaccgagcccagcgagggcagcgcacccggcagccctgccggcagccccacctccacagaggagggaaccagcaccgagcccagcgaaggcagcgccccaggcaccagcaccgagcctagtgagcaggagattaaacggatcaacaagatcagaagaagacttgtgaaagacagcaacaccaagaaggccggcaagacaggccccatgaaaaccctgctggttagagtgatgacacccgatctgagagagcggctggaaaacctgagaaagaagcctgaaaatatcccccagcccatcagcaatacatctagagccaacctgaataagctgctgaccgattacaccgaaatgaagaaggcgatcctgcatgtgtactgggaagagttccagaaggaccctgtgggcctgatgagccgggtggcccagcctgccagcaagaagatcgatcagaacaagctgaaacctgagatggacgagaagggcaacctgaccaccgccggctttgcctgctctcagtgtggccagcccctgttcgtgtacaagctggagcaggtgtctgagaagggcaaggcttacaccaactacttcggacggtgcaatgtggccgagcacgaaaagctgatcctgctggcccagctgaagcccgagaaggatagcgacgaagccgtgacatatagcctgggaaagtttgggcagagggccctggatttctacagcattcatgtgaccaaggagtccacccaccccgtgaagcccctggcccagatcgccggaaacagatacgcctccggacctgtgggaaaggccctgagcgacgcatgtatgggcacaatcgcctccttcctgtctaagtaccaggacatcatcatcgaacaccagaaggtggtgaagggcaaccagaagagactggagagcctgcgggagctggccggcaaggaaaacctggaataccctagcgtgaccctgccacctcagcctcacaccaaggagggcgttgatgcctacaacgaagtgatcgcccgggtgcgaatgtgggtgaacctgaacctgtggcagaagctgaagctaagcagagatgatgccaagcctctgctgagactgaagggattcccttcctttcctctggtcgagagacaggccaacgaagtggactggtgggacatggtgtgtaacgtgaagaagctgatcaacgagaaaaaggaggatggcaaggtgttttggcagaatctggctggctacaagagacaggaagccctgagaccatacctgagcagcgaggaagatcggaagaagggaaagaaattcgctcggtaccagctgggcgacctgctgctgcacctggaaaagaagcacggcgaggactggggaaaggtgtacgacgaggcctgggagcggattgacaagaaagtggaaggcctgagcaagcacatcaagctggaagaggaacggagaagcgaggacgcccagagcaaggccgccctgaccgactggctgcgggctaaggccagcttcgtgatcgagggcctgaaggaggccgacaaggacgagttctgcagatgcgagctgaagctgcagaagtggtacggggacctgcggggaaagcccttcgccatcgaagccgagaacagcatcctggacatcagcggcttcagcaagcagtacaactgtgccttcatctggcagaaggacggcgtgaagaagctgaacctgtacctgatcatcaactacttcaagggcggcaagctgcggttcaagaagatcaaacctgaagccttcgaagccaacagattctacaccgtgatcaacaaaaagagcggcgagatcgtgcccatggaggtgaacttcaacttcgacgaccccaacctgatcatcctgcctctggcctttggcaagagacagggcagagaattcatctggaacgacctgctgtccctggaaaccggcagcctgaagctggccaacggaagagtgatcgagaagacactgtacaacagaagaacccggcaggatgagcctgccctgttcgtggccctgaccttcgagcggcgggaggtcctggactcctccaatatcaaaccaatgaacctgatcggcgtggcaagaggcgaaaacatccccgccgtgatcgccctgaccgaccccgagggctgcccactgagccggtttaaggatagcctgggaaacccaacccacatcctgagaatcggcgagagctataaggagaagcagcggaccatccaggccaagaaggaggtggagcagcggagagccggcggctacagccggaagtacgccagcaaagccaagaatctggcagacgatatggtgagaaacaccgctagagatctgctgtactacgccgtgacccaggatgccatgctgatcttcgccaacctgagccggggcttcggccggcagggcaagcggaccttcatggccgagagacagtacacacggatggaggactggctgaccgccaagctggcctacgagggcctgagcaagacctacctgtccaagacactggcccagtacacctccaagacatgcagcaactgtgggtttaccatcaccagcgccgactacgacagggtgctggagaagctgaagaagacagcaacaggctggatgaccacaattaacggcaaggagctgaaggtggagggccagattacctactacaacagatacaagagacagaacgtagtcaaggacctgtccgtcgagctggatagactgagcgaagaatctgtgaacaacgacatctcctcctggacaaagggcagaagcggagaagctctgagcctcctgaagaaaagattctcccatagacccgtgcaggagaagttcgtgtgcctgaactgcggcttcgagacacacgcagccgagcaagccgccctgaacatcgccagatcctggctgttcctgcggagccaggagtacaagaaataccagacaaacaagacaaccggcaacaccgataagagagccttcgtcgagacctggcagtccttttaccggaagaagcttaaggaggtgtggaaacctgccgtgcggtctggcggatctggcggaggctccaccagccccaagaaaaagagaaaagtctaagctgccttctgcggggcttgccttctggccatgcccttcttctctcccttgcacctgtacctcttggtctttgaataaagcctgagtaggaaggctagcaaaaaaaaaaaaaaaaaaaaaaaaaaaaaaaaaaaaaaaaaaaaaaaaaaaaaaaaaaaaaaaaaaaaaaaaaaaaaaaagcccagccggctccccaacctctaccgaggagggcacctctgagtccgccacccccgagagcggccctggcacctccaccgagcccagcgagggcagcgcacccggcagccctgccggcagccccacctccacagaggagggaaccagcaccgagcccagcgaaggcagcgccccaggcaccagcaccgagcctagtgagcaggagattaaacggatcaacaagatcagaagaagacttgtgaaagacagcaacaccaagaaggccggcaagacaggccccatgaaaaccctgctggttagagtgatgacacccgatctgagagagcggctggaaaacctgagaaagaagcctgaaaatatcccccagcccatcagcaatacatctagagccaacctgaataagctgctgaccgattacaccgaaatgaagaaggcgatcctgcatgtgtactgggaagagttccagaaggaccctgtgggcctgatgagccgggtggcccagcctgccagcaagaagatcgatcagaacaagctgaaacctgagatggacgagaagggcaacctgaccaccgccggctttgcctgctctcagtgtggccagcccctgttcgtgtacaagctggagcaggtgtctgagaagggcaaggcttacaccaactacttcggacggtgcaatgtggccgagcacgaaaagctgatcctgctggcccagctgaagcccgagaaggatagcgacgaagccgtgacatatagcctgggaaagtttgggcagagggccctggatttctacagcattcatgtgaccaaggagtccacccaccccgtgaagcccctggcccagatcgccggaaacagatacgcctccggacctgtgggaaaggccctgagcgacgcatgtatgggcacaatcgcctccttcctgtctaagtaccaggacatcatcatcgaacaccagaaggtggtgaagggcaaccagaagagactggagagcctgcgggagctggccggcaaggaaaacctggaataccctagcgtgaccctgccacctcagcctcacaccaaggagggcgttgatgcctacaacgaagtgatcgcccgggtgcgaatgtgggtgaacctgaacctgtggcagaagctgaagctaagcagagatgatgccaagcctctgctgagactgaagggattcccttcctttcctctggtcgagagacaggccaacgaagtggactggtgggacatggtgtgtaacgtgaagaagctgatcaacgagaaaaaggaggatggcaaggtgttttggcagaatctggctggctacaagagacaggaagccctgagaccatacctgagcagcgaggaagatcggaagaagggaaagaaattcgctcggtaccagctgggcgacctgctgctgcacctggaaaagaagcacggcgaggactggggaaaggtgtacgacgaggcctgggagcggattgacaagaaagtggaaggcctgagcaagcacatcaagctggaagaggaacggagaagcgaggacgcccagagcaaggccgccctgaccgactggctgcgggctaaggccagcttcgtgatcgagggcctgaaggaggccgacaaggacgagttctgcagatgcgagctgaagctgcagaagtggtacggggacctgcggggaaagcccttcgccatcgaagccgagaacagcatcctggacatcagcggcttcagcaagcagtacaactgtgccttcatctggcagaaggacggcgtgaagaagctgaacctgtacctgatcatcaactacttcaagggcggcaagctgcggttcaagaagatcaaacctgaagccttcgaagccaacagattctacaccgtgatcaacaaaaagagcggcgagatcgtgcccatggaggtgaacttcaacttcgacgaccccaacctgatcatcctgcctctggcctttggcaagagacagggcagagaattcatctggaacgacctgctgtccctggaaaccggcagcctgaagctggccaacggaagagtgatcgagaagacactgtacaacagaagaacccggcaggatgagcctgccctgttcgtggccctgaccttcgagcggcgggaggtcctggactcctccaatatcaaaccaatgaacctgatcggcgtggcaagaggcgaaaacatccccgccgtgatcgccctgaccgaccccgagggctgcccactgagccggtttaaggatagcctgggaaacccaacccacatcctgagaatcggcgagagctataaggagaagcagcggaccatccaggccaagaaggaggtggagcagcggagagccggcggctacagccggaagtacgccagcaaagccaagaatctggcagacgatatggtgagaaacaccgctagagatctgctgtactacgccgtgacccaggatgccatgctgatcttcgccaacctgagccggggcttcggccggcagggcaagcggaccttcatggccgagagacagtacacacggatggaggactggctgaccgccaagctggcctacgagggcctgagcaagacctacctgtccaagacactggcccagtacacctccaagacatgcagcaactgtgggtttaccatcaccagcgccgactacgacagggtgctggagaagctgaagaagacagcaacaggctggatgaccacaattaacggcaaggagctgaaggtggagggccagattacctactacaacagatacaagagacagaacgtagtcaaggacctgtccgtcgagctggatagactgagcgaagaatctgtgaacaacgacatctcctcctggacaaagggcagaagcggagaagctctgagcctcctgaagaaaagattctcccatagacccgtgcaggagaagttcgtgtgcctgaactgcggcttcgagacacacgcagccgagcaagccgccctgaacatcgccagatcctggctgttcctgcggagccaggagtacaagaaataccagacaaacaagacaaccggcaacaccgataagagagccttcgtcgagacctggcagtccttttaccggaagaagcttaaggaggtgtggaaacctgccgtgcggtctggcggatctggcggaggctccaccagccccaagaaaaagagaaaagtctaagctgccttctgcggggcttgccttctggccatgcccttcttctctcccttgcacctgtacctcttggtctttgaataaagcctgagtaggaaggctagcaaaaaaaaaaaaaaaaaaaaaaaaaaaaaaaaaaaaaaaaaaaaaaaaaaaaaaaaaaaaaaaaaaaaaaaaaaaaaaaa

SEQ ID NO: 9063 - RNA, 8787 nt, synthetic construct
  source 1..8787: mol_type = other RNA
aggaaataagagagaaaagaagagtaagaagaaatataagagccaccatggcccctaagaagaagcgtaaagtgagccggatgaaccacgaccaggagttcgacccccctaaggtgtaccctcccgtccccgccgagaagagaaagcccatccgggtcctgagcctgttcgatggcatcgccaccggtctgctggtgctgaaggacctgggcatccaggtggataggtacattgcctccgaggtgtgcgaggactccatcaccgtgggaatggtgcgtcatcagggcaagatcatgtacgtgggcgacgtgcggagcgtgacacagaagcatatccaggagtggggccctttcgacctggtgatcggcggcagcccttgcaatgacctgagcatcgtgaacccagcccggaagggcctgtacgagggaaccggcagactgttcttcgagttttacagactgctgcacgacgcccggcctaaggaaggcgacgaccggcccttcttttggctgttcgagaatgtggtggccatgggagtcagcgacaagcgggatattagccggttcctggagagcaaccccgtgatgatcgatgccaaggaagtgagcgccgcccaccgggccagatacttctggggcaatctgcctggcatgaacagacccctggccagcaccgtgaacgacaagctggagctgcaggagtgcctggagcacggccggatcgccaagttcagcaaggtgagaaccatcaccacccgaagcaacagcatcaaacaaggcaaggaccagcactttcctgtgttcatgaacgagaaggaggacatcctgtggtgtaccgagatggagagagtgttcgggttcccagtccactacacagatgtcagcaacatgtctagactggccagacagagactgctgggaagaagctggtccgtccctgtgatcagacacctgttcgcccctctgaaggagtacttcgcctgcgtgagcagcggcaacagcaacgccaacagccggggccccagcttctctagcggcctggtgccactgtccctgagagggagccacatgggccccatggagatctacaaaaccgtgagcgcctggaagcggcagcctgtgcgcgtgctgagcctgtttcggaatatcgataaagtcctgaaaagcctgggattcctggagagcggctctggctccggcggtggcaccctgaagtacgtggaggatgtgacaaacgtggtcagacgggatgtggagaagtggggccccttcgatctggtgtacggcagcacccaacccctgggcagctcttgtgaccggtgccctggctggtacatgtttcagttccaccggatcctgcagtacgccctgccgagacaggagtcccagcggccattcttttggattttcatggacaacttgctgctgaccgaggatgaccaggaaactaccactcggttcctgcagaccgaagccgtgaccctgcaggacgtgagaggccgggactaccagaacgccatgcgggtgtggtccaacatccctggactgaaaagcaagcacgcacctctgacccctaaagaagaggagtacctgcaggcccaggtgcggagcagaagcaagctggacgcccctaaggtggatctgctggtgaagaattgcctcctgcccctgagagagtacttcaagtatttcagccagaatagtctgcccctgggaggcagcggcggcggcgcccacatggccttcagggacgtggccgtggacttcacccaggaggagtggatgctgctgagccccgcccagaggagcctgtacagggaggtgatgctggagaactacagcaacatggtgagcctgggcatccccttcagcaagcccaagctgatcacccagctggagcagggcaaggagacctggagggaggagaggaagtgcccccccgccacctgcagcgccgagccccagcccgagctgggcggcccaagcagcggcgcccctcctcccagcggcggcaggcggcccaagcagcggcgcccctcctcccagcggcggcagcccagccggctccccaacctctaccgaggagggcacctctgagtccgccacccccgagagcggccctggcacctccaccgagcccagcgagggcagcgcacccggcagccctgccggcagccccacctccacagaggagggaaccagcaccgagcccagcgaaggcagcgccccaggcaccagcaccgagcctagtgagcaggagattaaacggatcaacaagatcagaagaagacttgtgaaagacagcaacaccaagaaggccggcaagacaggccccatgaaaaccctgctggttagagtgatgacacccgatctgagagagcggctggaaaacctgagaaagaagcctgaaaatatcccccagcccatcagcaatacatctagagccaacctgaataagctgctgaccgattacaccgaaatgaagaaggcgatcctgcatgtgtactgggaagagttccagaaggaccctgtgggcctgatgagccgggtggcccagcctgccagcaagaagatcgatcagaacaagctgaaacctgagatggacgagaagggcaacctgaccaccgccggctttgcctgctctcagtgtggccagcccctgttcgtgtacaagctggagcaggtgtctgagaagggcaaggcttacaccaactacttcggacggtgcaatgtggccgagcacgaaaagctgatcctgctggcccagctgaagcccgagaaggatagcgacgaagccgtgacatatagcctgggaaagtttgggcagagggccctggatttctacagcattcatgtgaccaaggagtccacccaccccgtgaagcccctggcccagatcgccggaaacagatacgcctccggacctgtgggaaaggccctgagcgacgcatgtatgggcacaatcgcctccttcctgtctaagtaccaggacatcatcatcgaacaccagaaggtggtgaagggcaaccagaagagactggagagcctgcgggagctggccggcaaggaaaacctggaataccctagcgtgaccctgccacctcagcctcacaccaaggagggcgttgatgcctacaacgaagtgatcgcccgggtgcgaatgtgggtgaacctgaacctgtggcagaagctgaagctaagcagagatgatgccaagcctctgctgagactgaagggattcccttcctttcctctggtcgagagacaggccaacgaagtggactggtgggacatggtgtgtaacgtgaagaagctgatcaacgagaaaaaggaggatggcaaggtgttttggcagaatctggctggctacaagagacaggaagccctgagaccatacctgagcagcgaggaagatcggaagaagggaaagaaattcgctcggtaccagctgggcgacctgctgctgcacctggaaaagaagcacggcgaggactggggaaaggtgtacgacgaggcctgggagcggattgacaagaaagtggaaggcctgagcaagcacatcaagctggaagaggaacggagaagcgaggacgcccagagcaaggccgccctgaccgactggctgcgggctaaggccagcttcgtgatcgagggcctgaaggaggccgacaaggacgagttctgcagatgcgagctgaagctgcagaagtggtacggggacctgcggggaaagcccttcgccatcgaagccgagaacagcatcctggacatcagcggcttcagcaagcagtacaactgtgccttcatctggcagaaggacggcgtgaagaagctgaacctgtacctgatcatcaactacttcaagggcggcaagctgcggttcaagaagatcaaacctgaagccttcgaagccaacagattctacaccgtgatcaacaaaaagagcggcgagatcgtgcccatggaggtgaacttcaacttcgacgaccccaacctgatcatcctgcctctggcctttggcaagagacagggcagagaattcatctggaacgacctgctgtccctggaaaccggcagcctgaagctggccaacggaagagtgatcgagaagacactgtacaacagaagaacccggcaggatgagcctgccctgttcgtggccctgaccttcgagcggcgggaggtcctggactcctccaatatcaaaccaatgaacctgatcggcgtggcaagaggcgaaaacatccccgccgtgatcgccctgaccgaccccgagggctgcccactgagccggtttaaggatagcctgggaaacccaacccacatcctgagaatcggcgagagctataaggagaagcagcggaccatccaggccaagaaggaggtggagcagcggagagccggcggctacagccggaagtacgccagcaaagccaagaatctggcagacgatatggtgagaaacaccgctagagatctgctgtactacgccgtgacccaggatgccatgctgatcttcgccaacctgagccggggcttcggccggcagggcaagcggaccttcatggccgagagacagtacacacggatggaggactggctgaccgccaagctggcctacgagggcctgagcaagacctacctgtccaagacactggcccagtacacctccaagacatgcagcaactgtgggtttaccatcaccagcgccgactacgacagggtgctggagaagctgaagaagacagcaacaggctggatgaccacaattaacggcaaggagctgaaggtggagggccagattacctactacaacagatacaagagacagaacgtagtcaaggacctgtccgtcgagctggatagactgagcgaagaatctgtgaacaacgacatctcctcctggacaaagggcagaagcggagaagctctgagcctcctgaagaaaagattctcccatagacccgtgcaggagaagttcgtgtgcctgaactgcggcttcgagacacacgcagccgagcaagccgccctgaacatcgccagatcctggctgttcctgcggagccaggagtacaagaaataccagacaaacaagacaaccggcaacaccgataagagagccttcgtcgagacctggcagtccttttaccggaagaagcttaaggaggtgtggaaacctgccgtgcggtctggcggatctggcggaggctccaccagccccaagaaaaagagaaaagtctaagctgccttctgcggggcttgccttctggccatgcccttcttctctcccttgcacctgtacctcttggtctttgaataaagcctgagtaggaaggctagcaaaaaaaaaaaaaaaaaaaaaaaaaaaaaaaaaaaaaaaaaaaaaaaaaaaaaaaaaaaaaaaaaaaaaaaaaaaaaaaagcccagccggctccccaacctctaccgaggagggcacctctgagtccgccacccccgagagcggccctggcacctccaccgagcccagcgagggcagcgcacccggcagccctgccggcagccccacctccacagaggagggaaccagcaccgagcccagcgaaggcagcgccccaggcaccagcaccgagcctagtgagcaggagattaaacggatcaacaagatcagaagaagacttgtgaaagacagcaacaccaagaaggccggcaagacaggccccatgaaaaccctgctggttagagtgatgacacccgatctgagagagcggctggaaaacctgagaaagaagcctgaaaatatcccccagcccatcagcaatacatctagagccaacctgaataagctgctgaccgattacaccgaaatgaagaaggcgatcctgcatgtgtactgggaagagttccagaaggaccctgtgggcctgatgagccgggtggcccagcctgccagcaagaagatcgatcagaacaagctgaaacctgagatggacgagaagggcaacctgaccaccgccggctttgcctgctctcagtgtggccagcccctgttcgtgtacaagctggagcaggtgtctgagaagggcaaggcttacaccaactacttcggacggtgcaatgtggccgagcacgaaaagctgatcctgctggcccagctgaagcccgagaaggatagcgacgaagccgtgacatatagcctgggaaagtttgggcagagggccctggatttctacagcattcatgtgaccaaggagtccacccaccccgtgaagcccctggcccagatcgccggaaacagatacgcctccggacctgtgggaaaggccctgagcgacgcatgtatgggcacaatcgcctccttcctgtctaagtaccaggacatcatcatcgaacaccagaaggtggtgaagggcaaccagaagagactggagagcctgcgggagctggccggcaaggaaaacctggaataccctagcgtgaccctgccacctcagcctcacaccaaggagggcgttgatgcctacaacgaagtgatcgcccgggtgcgaatgtgggtgaacctgaacctgtggcagaagctgaagctaagcagagatgatgccaagcctctgctgagactgaagggattcccttcctttcctctggtcgagagacaggccaacgaagtggactggtgggacatggtgtgtaacgtgaagaagctgatcaacgagaaaaaggaggatggcaaggtgttttggcagaatctggctggctacaagagacaggaagccctgagaccatacctgagcagcgaggaagatcggaagaagggaaagaaattcgctcggtaccagctgggcgacctgctgctgcacctggaaaagaagcacggcgaggactggggaaaggtgtacgacgaggcctgggagcggattgacaagaaagtggaaggcctgagcaagcacatcaagctggaagaggaacggagaagcgaggacgcccagagcaaggccgccctgaccgactggctgcgggctaaggccagcttcgtgatcgagggcctgaaggaggccgacaaggacgagttctgcagatgcgagctgaagctgcagaagtggtacggggacctgcggggaaagcccttcgccatcgaagccgagaacagcatcctggacatcagcggcttcagcaagcagtacaactgtgccttcatctggcagaaggacggcgtgaagaagctgaacctgtacctgatcatcaactacttcaagggcggcaagctgcggttcaagaagatcaaacctgaagccttcgaagccaacagattctacaccgtgatcaacaaaaagagcggcgagatcgtgcccatggaggtgaacttcaacttcgacgaccccaacctgatcatcctgcctctggcctttggcaagagacagggcagagaattcatctggaacgacctgctgtccctggaaaccggcagcctgaagctggccaacggaagagtgatcgagaagacactgtacaacagaagaacccggcaggatgagcctgccctgttcgtggccctgaccttcgagcggcgggaggtcctggactcctccaatatcaaaccaatgaacctgatcggcgtggcaagaggcgaaaacatccccgccgtgatcgccctgaccgaccccgagggctgcccactgagccggtttaaggatagcctgggaaacccaacccacatcctgagaatcggcgagagctataaggagaagcagcggaccatccaggccaagaaggaggtggagcagcggagagccggcggctacagccggaagtacgccagcaaagccaagaatctggcagacgatatggtgagaaacaccgctagagatctgctgtactacgccgtgacccaggatgccatgctgatcttcgccaacctgagccggggcttcggccggcagggcaagcggaccttcatggccgagagacagtacacacggatggaggactggctgaccgccaagctggcctacgagggcctgagcaagacctacctgtccaagacactggcccagtacacctccaagacatgcagcaactgtgggtttaccatcaccagcgccgactacgacagggtgctggagaagctgaagaagacagcaacaggctggatgaccacaattaacggcaaggagctgaaggtggagggccagattacctactacaacagatacaagagacagaacgtagtcaaggacctgtccgtcgagctggatagactgagcgaagaatctgtgaacaacgacatctcctcctggacaaagggcagaagcggagaagctctgagcctcctgaagaaaagattctcccatagacccgtgcaggagaagttcgtgtgcctgaactgcggcttcgagacacacgcagccgagcaagccgccctgaacatcgccagatcctggctgttcctgcggagccaggagtacaagaaataccagacaaacaagacaaccggcaacaccgataagagagccttcgtcgagacctggcagtccttttaccggaagaagcttaaggaggtgtggaaacctgccgtgcggtctggcggatctggcggaggctccaccagccccaagaaaaagagaaaagtctaagctgccttctgcggggcttgccttctggccatgcccttcttctctcccttgcacctgtacctcttggtctttgaataaagcctgagtaggaaggctagcaaaaaaaaaaaaaaaaaaaaaaaaaaaaaaaaaaaaaaaaaaaaaaaaaaaaaaaaaaaaaaaaaaaaaaaaaaaaaaaa

SEQ ID NO: 9064 - RNA, 8787 nt, synthetic construct
  source 1..8787: mol_type = other RNA
aggaaataagagagaaaagaagagtaagaagaaatataagagccaccatggcccctaagaagaagcgtaaagtgagccggatgaaccacgaccaggagttcgacccccctaaggtgtaccctcccgtccccgccgagaagagaaagcccatccgggtcctgagcctgttcgatggcatcgccaccggtctgctggtgctgaaggacctgggcatccaggtggataggtacattgcctccgaggtgtgcgaggactccatcaccgtgggaatggtgcgtcatcagggcaagatcatgtacgtgggcgacgtgcggagcgtgacacagaagcatatccaggagtggggccctttcgacctggtgatcggcggcagcccttgcaatgacctgagcatcgtgaacccagcccggaagggcctgtacgagggaaccggcagactgttcttcgagttttacagactgctgcacgacgcccggcctaaggaaggcgacgaccggcccttcttttggctgttcgagaatgtggtggccatgggagtcagcgacaagcgggatattagccggttcctggagagcaaccccgtgatgatcgatgccaaggaagtgagcgccgcccaccgggccagatacttctggggcaatctgcctggcatgaacagacccctggccagcaccgtgaacgacaagctggagctgcaggagtgcctggagcacggccggatcgccaagttcagcaaggtgagaaccatcaccacccgaagcaacagcatcaaacaaggcaaggaccagcactttcctgtgttcatgaacgagaaggaggacatcctgtggtgtaccgagatggagagagtgttcgggttcccagtccactacacagatgtcagcaacatgtctagactggccagacagagactgctgggaagaagctggtccgtccctgtgatcagacacctgttcgcccctctgaaggagtacttcgcctgcgtgagcagcggcaacagcaacgccaacagccggggccccagcttctctagcggcctggtgccactgtccctgagagggagccacatgggccccatggagatctacaaaaccgtgagcgcctggaagcggcagcctgtgcgcgtgctgagcctgtttcggaatatcgataaagtcctgaaaagcctgggattcctggagagcggctctggctccggcggtggcaccctgaagtacgtggaggatgtgacaaacgtggtcagacgggatgtggagaagtggggccccttcgatctggtgtacggcagcacccaacccctgggcagctcttgtgaccggtgccctggctggtacatgtttcagttccaccggatcctgcagtacgccctgccgagacaggagtcccagcggccattcttttggattttcatggacaacttgctgctgaccgaggatgaccaggaaactaccactcggttcctgcagaccgaagccgtgaccctgcaggacgtgagaggccgggactaccagaacgccatgcgggtgtggtccaacatccctggactgaaaagcaagcacgcacctctgacccctaaagaagaggagtacctgcaggcccaggtgcggagcagaagcaagctggacgcccctaaggtggatctgctggtgaagaattgcctcctgcccctgagagagtacttcaagtatttcagccagaatagtctgcccctgggaggcagcggcggcggcttccagggcagcgtgaccttcagggacgtggccatcgacttcagccaggaggagtgggcctggctgcagcccgcccagagggacctgtacaggcacgtgatgctggagaactacggccacctggtgagcctgggcctgaacatcagcaagcccgacgtggtgagcctgctggagcagggcaaggagccctggctgggcaagggcgacgtgaggaccgacttcttccccgtgagcgagagcaacggcggcccaagcagcggcgcccctcctcccagcggcggcaggcggcccaagcagcggcgcccctcctcccagcggcggcagcccagccggctccccaacctctaccgaggagggcacctctgagtccgccacccccgagagcggccctggcacctccaccgagcccagcgagggcagcgcacccggcagccctgccggcagccccacctccacagaggagggaaccagcaccgagcccagcgaaggcagcgccccaggcaccagcaccgagcctagtgagcaggagattaaacggatcaacaagatcagaagaagacttgtgaaagacagcaacaccaagaaggccggcaagacaggccccatgaaaaccctgctggttagagtgatgacacccgatctgagagagcggctggaaaacctgagaaagaagcctgaaaatatcccccagcccatcagcaatacatctagagccaacctgaataagctgctgaccgattacaccgaaatgaagaaggcgatcctgcatgtgtactgggaagagttccagaaggaccctgtgggcctgatgagccgggtggcccagcctgccagcaagaagatcgatcagaacaagctgaaacctgagatggacgagaagggcaacctgaccaccgccggctttgcctgctctcagtgtggccagcccctgttcgtgtacaagctggagcaggtgtctgagaagggcaaggcttacaccaactacttcggacggtgcaatgtggccgagcacgaaaagctgatcctgctggcccagctgaagcccgagaaggatagcgacgaagccgtgacatatagcctgggaaagtttgggcagagggccctggatttctacagcattcatgtgaccaaggagtccacccaccccgtgaagcccctggcccagatcgccggaaacagatacgcctccggacctgtgggaaaggccctgagcgacgcatgtatgggcacaatcgcctccttcctgtctaagtaccaggacatcatcatcgaacaccagaaggtggtgaagggcaaccagaagagactggagagcctgcgggagctggccggcaaggaaaacctggaataccctagcgtgaccctgccacctcagcctcacaccaaggagggcgttgatgcctacaacgaagtgatcgcccgggtgcgaatgtgggtgaacctgaacctgtggcagaagctgaagctaagcagagatgatgccaagcctctgctgagactgaagggattcccttcctttcctctggtcgagagacaggccaacgaagtggactggtgggacatggtgtgtaacgtgaagaagctgatcaacgagaaaaaggaggatggcaaggtgttttggcagaatctggctggctacaagagacaggaagccctgagaccatacctgagcagcgaggaagatcggaagaagggaaagaaattcgctcggtaccagctgggcgacctgctgctgcacctggaaaagaagcacggcgaggactggggaaaggtgtacgacgaggcctgggagcggattgacaagaaagtggaaggcctgagcaagcacatcaagctggaagaggaacggagaagcgaggacgcccagagcaaggccgccctgaccgactggctgcgggctaaggccagcttcgtgatcgagggcctgaaggaggccgacaaggacgagttctgcagatgcgagctgaagctgcagaagtggtacggggacctgcggggaaagcccttcgccatcgaagccgagaacagcatcctggacatcagcggcttcagcaagcagtacaactgtgccttcatctggcagaaggacggcgtgaagaagctgaacctgtacctgatcatcaactacttcaagggcggcaagctgcggttcaagaagatcaaacctgaagccttcgaagccaacagattctacaccgtgatcaacaaaaagagcggcgagatcgtgcccatggaggtgaacttcaacttcgacgaccccaacctgatcatcctgcctctggcctttggcaagagacagggcagagaattcatctggaacgacctgctgtccctggaaaccggcagcctgaagctggccaacggaagagtgatcgagaagacactgtacaacagaagaacccggcaggatgagcctgccctgttcgtggccctgaccttcgagcggcgggaggtcctggactcctccaatatcaaaccaatgaacctgatcggcgtggcaagaggcgaaaacatccccgccgtgatcgccctgaccgaccccgagggctgcccactgagccggtttaaggatagcctgggaaacccaacccacatcctgagaatcggcgagagctataaggagaagcagcggaccatccaggccaagaaggaggtggagcagcggagagccggcggctacagccggaagtacgccagcaaagccaagaatctggcagacgatatggtgagaaacaccgctagagatctgctgtactacgccgtgacccaggatgccatgctgatcttcgccaacctgagccggggcttcggccggcagggcaagcggaccttcatggccgagagacagtacacacggatggaggactggctgaccgccaagctggcctacgagggcctgagcaagacctacctgtccaagacactggcccagtacacctccaagacatgcagcaactgtgggtttaccatcaccagcgccgactacgacagggtgctggagaagctgaagaagacagcaacaggctggatgaccacaattaacggcaaggagctgaaggtggagggccagattacctactacaacagatacaagagacagaacgtagtcaaggacctgtccgtcgagctggatagactgagcgaagaatctgtgaacaacgacatctcctcctggacaaagggcagaagcggagaagctctgagcctcctgaagaaaagattctcccatagacccgtgcaggagaagttcgtgtgcctgaactgcggcttcgagacacacgcagccgagcaagccgccctgaacatcgccagatcctggctgttcctgcggagccaggagtacaagaaataccagacaaacaagacaaccggcaacaccgataagagagccttcgtcgagacctggcagtccttttaccggaagaagcttaaggaggtgtggaaacctgccgtgcggtctggcggatctggcggaggctccaccagccccaagaaaaagagaaaagtctaagctgccttctgcggggcttgccttctggccatgcccttcttctctcccttgcacctgtacctcttggtctttgaataaagcctgagtaggaaggctagcaaaaaaaaaaaaaaaaaaaaaaaaaaaaaaaaaaaaaaaaaaaaaaaaaaaaaaaaaaaaaaaaaaaaaaaaaaaaaaaagcccagccggctccccaacctctaccgaggagggcacctctgagtccgccacccccgagagcggccctggcacctccaccgagcccagcgagggcagcgcacccggcagccctgccggcagccccacctccacagaggagggaaccagcaccgagcccagcgaaggcagcgccccaggcaccagcaccgagcctagtgagcaggagattaaacggatcaacaagatcagaagaagacttgtgaaagacagcaacaccaagaaggccggcaagacaggccccatgaaaaccctgctggttagagtgatgacacccgatctgagagagcggctggaaaacctgagaaagaagcctgaaaatatcccccagcccatcagcaatacatctagagccaacctgaataagctgctgaccgattacaccgaaatgaagaaggcgatcctgcatgtgtactgggaagagttccagaaggaccctgtgggcctgatgagccgggtggcccagcctgccagcaagaagatcgatcagaacaagctgaaacctgagatggacgagaagggcaacctgaccaccgccggctttgcctgctctcagtgtggccagcccctgttcgtgtacaagctggagcaggtgtctgagaagggcaaggcttacaccaactacttcggacggtgcaatgtggccgagcacgaaaagctgatcctgctggcccagctgaagcccgagaaggatagcgacgaagccgtgacatatagcctgggaaagtttgggcagagggccctggatttctacagcattcatgtgaccaaggagtccacccaccccgtgaagcccctggcccagatcgccggaaacagatacgcctccggacctgtgggaaaggccctgagcgacgcatgtatgggcacaatcgcctccttcctgtctaagtaccaggacatcatcatcgaacaccagaaggtggtgaagggcaaccagaagagactggagagcctgcgggagctggccggcaaggaaaacctggaataccctagcgtgaccctgccacctcagcctcacaccaaggagggcgttgatgcctacaacgaagtgatcgcccgggtgcgaatgtgggtgaacctgaacctgtggcagaagctgaagctaagcagagatgatgccaagcctctgctgagactgaagggattcccttcctttcctctggtcgagagacaggccaacgaagtggactggtgggacatggtgtgtaacgtgaagaagctgatcaacgagaaaaaggaggatggcaaggtgttttggcagaatctggctggctacaagagacaggaagccctgagaccatacctgagcagcgaggaagatcggaagaagggaaagaaattcgctcggtaccagctgggcgacctgctgctgcacctggaaaagaagcacggcgaggactggggaaaggtgtacgacgaggcctgggagcggattgacaagaaagtggaaggcctgagcaagcacatcaagctggaagaggaacggagaagcgaggacgcccagagcaaggccgccctgaccgactggctgcgggctaaggccagcttcgtgatcgagggcctgaaggaggccgacaaggacgagttctgcagatgcgagctgaagctgcagaagtggtacggggacctgcggggaaagcccttcgccatcgaagccgagaacagcatcctggacatcagcggcttcagcaagcagtacaactgtgccttcatctggcagaaggacggcgtgaagaagctgaacctgtacctgatcatcaactacttcaagggcggcaagctgcggttcaagaagatcaaacctgaagccttcgaagccaacagattctacaccgtgatcaacaaaaagagcggcgagatcgtgcccatggaggtgaacttcaacttcgacgaccccaacctgatcatcctgcctctggcctttggcaagagacagggcagagaattcatctggaacgacctgctgtccctggaaaccggcagcctgaagctggccaacggaagagtgatcgagaagacactgtacaacagaagaacccggcaggatgagcctgccctgttcgtggccctgaccttcgagcggcgggaggtcctggactcctccaatatcaaaccaatgaacctgatcggcgtggcaagaggcgaaaacatccccgccgtgatcgccctgaccgaccccgagggctgcccactgagccggtttaaggatagcctgggaaacccaacccacatcctgagaatcggcgagagctataaggagaagcagcggaccatccaggccaagaaggaggtggagcagcggagagccggcggctacagccggaagtacgccagcaaagccaagaatctggcagacgatatggtgagaaacaccgctagagatctgctgtactacgccgtgacccaggatgccatgctgatcttcgccaacctgagccggggcttcggccggcagggcaagcggaccttcatggccgagagacagtacacacggatggaggactggctgaccgccaagctggcctacgagggcctgagcaagacctacctgtccaagacactggcccagtacacctccaagacatgcagcaactgtgggtttaccatcaccagcgccgactacgacagggtgctggagaagctgaagaagacagcaacaggctggatgaccacaattaacggcaaggagctgaaggtggagggccagattacctactacaacagatacaagagacagaacgtagtcaaggacctgtccgtcgagctggatagactgagcgaagaatctgtgaacaacgacatctcctcctggacaaagggcagaagcggagaagctctgagcctcctgaagaaaagattctcccatagacccgtgcaggagaagttcgtgtgcctgaactgcggcttcgagacacacgcagccgagcaagccgccctgaacatcgccagatcctggctgttcctgcggagccaggagtacaagaaataccagacaaacaagacaaccggcaacaccgataagagagccttcgtcgagacctggcagtccttttaccggaagaagcttaaggaggtgtggaaacctgccgtgcggtctggcggatctggcggaggctccaccagccccaagaaaaagagaaaagtctaagctgccttctgcggggcttgccttctggccatgcccttcttctctcccttgcacctgtacctcttggtctttgaataaagcctgagtaggaaggctagcaaaaaaaaaaaaaaaaaaaaaaaaaaaaaaaaaaaaaaaaaaaaaaaaaaaaaaaaaaaaaaaaaaaaaaaaaaaaaaaa

SEQ ID NO: 9065 - RNA, 8787 nt, synthetic construct
  source 1..8787: mol_type = other RNA
aggaaataagagagaaaagaagagtaagaagaaatataagagccaccatggcccctaagaagaagcgtaaagtgagccggatgaaccacgaccaggagttcgacccccctaaggtgtaccctcccgtccccgccgagaagagaaagcccatccgggtcctgagcctgttcgatggcatcgccaccggtctgctggtgctgaaggacctgggcatccaggtggataggtacattgcctccgaggtgtgcgaggactccatcaccgtgggaatggtgcgtcatcagggcaagatcatgtacgtgggcgacgtgcggagcgtgacacagaagcatatccaggagtggggccctttcgacctggtgatcggcggcagcccttgcaatgacctgagcatcgtgaacccagcccggaagggcctgtacgagggaaccggcagactgttcttcgagttttacagactgctgcacgacgcccggcctaaggaaggcgacgaccggcccttcttttggctgttcgagaatgtggtggccatgggagtcagcgacaagcgggatattagccggttcctggagagcaaccccgtgatgatcgatgccaaggaagtgagcgccgcccaccgggccagatacttctggggcaatctgcctggcatgaacagacccctggccagcaccgtgaacgacaagctggagctgcaggagtgcctggagcacggccggatcgccaagttcagcaaggtgagaaccatcaccacccgaagcaacagcatcaaacaaggcaaggaccagcactttcctgtgttcatgaacgagaaggaggacatcctgtggtgtaccgagatggagagagtgttcgggttcccagtccactacacagatgtcagcaacatgtctagactggccagacagagactgctgggaagaagctggtccgtccctgtgatcagacacctgttcgcccctctgaaggagtacttcgcctgcgtgagcagcggcaacagcaacgccaacagccggggccccagcttctctagcggcctggtgccactgtccctgagagggagccacatgggccccatggagatctacaaaaccgtgagcgcctggaagcggcagcctgtgcgcgtgctgagcctgtttcggaatatcgataaagtcctgaaaagcctgggattcctggagagcggctctggctccggcggtggcaccctgaagtacgtggaggatgtgacaaacgtggtcagacgggatgtggagaagtggggccccttcgatctggtgtacggcagcacccaacccctgggcagctcttgtgaccggtgccctggctggtacatgtttcagttccaccggatcctgcagtacgccctgccgagacaggagtcccagcggccattcttttggattttcatggacaacttgctgctgaccgaggatgaccaggaaactaccactcggttcctgcagaccgaagccgtgaccctgcaggacgtgagaggccgggactaccagaacgccatgcgggtgtggtccaacatccctggactgaaaagcaagcacgcacctctgacccctaaagaagaggagtacctgcaggcccaggtgcggagcagaagcaagctggacgcccctaaggtggatctgctggtgaagaattgcctcctgcccctgagagagtacttcaagtatttcagccagaatagtctgcccctgggaggcagcggcggcggcgagcaggagagcgtgagcttcaaggacgtgaccatcgacttcagcagggaggagtggcagcagctggacttcgcccagaagagcctgtacagggacgtgatgctggagaactacttcaacctgatcagcgtgggctgccaggtgcccaagcccgaggtgatcttcaacctggagcaggtggagaacagctgcatgctgcacaggaagatcagcaggcagagctgcctggacggcgacatcggcggcggcccaagcagcggcgcccctcctcccagcggcggcaggcggcccaagcagcggcgcccctcctcccagcggcggcagcccagccggctccccaacctctaccgaggagggcacctctgagtccgccacccccgagagcggccctggcacctccaccgagcccagcgagggcagcgcacccggcagccctgccggcagccccacctccacagaggagggaaccagcaccgagcccagcgaaggcagcgccccaggcaccagcaccgagcctagtgagcaggagattaaacggatcaacaagatcagaagaagacttgtgaaagacagcaacaccaagaaggccggcaagacaggccccatgaaaaccctgctggttagagtgatgacacccgatctgagagagcggctggaaaacctgagaaagaagcctgaaaatatcccccagcccatcagcaatacatctagagccaacctgaataagctgctgaccgattacaccgaaatgaagaaggcgatcctgcatgtgtactgggaagagttccagaaggaccctgtgggcctgatgagccgggtggcccagcctgccagcaagaagatcgatcagaacaagctgaaacctgagatggacgagaagggcaacctgaccaccgccggctttgcctgctctcagtgtggccagcccctgttcgtgtacaagctggagcaggtgtctgagaagggcaaggcttacaccaactacttcggacggtgcaatgtggccgagcacgaaaagctgatcctgctggcccagctgaagcccgagaaggatagcgacgaagccgtgacatatagcctgggaaagtttgggcagagggccctggatttctacagcattcatgtgaccaaggagtccacccaccccgtgaagcccctggcccagatcgccggaaacagatacgcctccggacctgtgggaaaggccctgagcgacgcatgtatgggcacaatcgcctccttcctgtctaagtaccaggacatcatcatcgaacaccagaaggtggtgaagggcaaccagaagagactggagagcctgcgggagctggccggcaaggaaaacctggaataccctagcgtgaccctgccacctcagcctcacaccaaggagggcgttgatgcctacaacgaagtgatcgcccgggtgcgaatgtgggtgaacctgaacctgtggcagaagctgaagctaagcagagatgatgccaagcctctgctgagactgaagggattcccttcctttcctctggtcgagagacaggccaacgaagtggactggtgggacatggtgtgtaacgtgaagaagctgatcaacgagaaaaaggaggatggcaaggtgttttggcagaatctggctggctacaagagacaggaagccctgagaccatacctgagcagcgaggaagatcggaagaagggaaagaaattcgctcggtaccagctgggcgacctgctgctgcacctggaaaagaagcacggcgaggactggggaaaggtgtacgacgaggcctgggagcggattgacaagaaagtggaaggcctgagcaagcacatcaagctggaagaggaacggagaagcgaggacgcccagagcaaggccgccctgaccgactggctgcgggctaaggccagcttcgtgatcgagggcctgaaggaggccgacaaggacgagttctgcagatgcgagctgaagctgcagaagtggtacggggacctgcggggaaagcccttcgccatcgaagccgagaacagcatcctggacatcagcggcttcagcaagcagtacaactgtgccttcatctggcagaaggacggcgtgaagaagctgaacctgtacctgatcatcaactacttcaagggcggcaagctgcggttcaagaagatcaaacctgaagccttcgaagccaacagattctacaccgtgatcaacaaaaagagcggcgagatcgtgcccatggaggtgaacttcaacttcgacgaccccaacctgatcatcctgcctctggcctttggcaagagacagggcagagaattcatctggaacgacctgctgtccctggaaaccggcagcctgaagctggccaacggaagagtgatcgagaagacactgtacaacagaagaacccggcaggatgagcctgccctgttcgtggccctgaccttcgagcggcgggaggtcctggactcctccaatatcaaaccaatgaacctgatcggcgtggcaagaggcgaaaacatccccgccgtgatcgccctgaccgaccccgagggctgcccactgagccggtttaaggatagcctgggaaacccaacccacatcctgagaatcggcgagagctataaggagaagcagcggaccatccaggccaagaaggaggtggagcagcggagagccggcggctacagccggaagtacgccagcaaagccaagaatctggcagacgatatggtgagaaacaccgctagagatctgctgtactacgccgtgacccaggatgccatgctgatcttcgccaacctgagccggggcttcggccggcagggcaagcggaccttcatggccgagagacagtacacacggatggaggactggctgaccgccaagctggcctacgagggcctgagcaagacctacctgtccaagacactggcccagtacacctccaagacatgcagcaactgtgggtttaccatcaccagcgccgactacgacagggtgctggagaagctgaagaagacagcaacaggctggatgaccacaattaacggcaaggagctgaaggtggagggccagattacctactacaacagatacaagagacagaacgtagtcaaggacctgtccgtcgagctggatagactgagcgaagaatctgtgaacaacgacatctcctcctggacaaagggcagaagcggagaagctctgagcctcctgaagaaaagattctcccatagacccgtgcaggagaagttcgtgtgcctgaactgcggcttcgagacacacgcagccgagcaagccgccctgaacatcgccagatcctggctgttcctgcggagccaggagtacaagaaataccagacaaacaagacaaccggcaacaccgataagagagccttcgtcgagacctggcagtccttttaccggaagaagcttaaggaggtgtggaaacctgccgtgcggtctggcggatctggcggaggctccaccagccccaagaaaaagagaaaagtctaagctgccttctgcggggcttgccttctggccatgcccttcttctctcccttgcacctgtacctcttggtctttgaataaagcctgagtaggaaggctagcaaaaaaaaaaaaaaaaaaaaaaaaaaaaaaaaaaaaaaaaaaaaaaaaaaaaaaaaaaaaaaaaaaaaaaaaaaaaaaaagcccagccggctccccaacctctaccgaggagggcacctctgagtccgccacccccgagagcggccctggcacctccaccgagcccagcgagggcagcgcacccggcagccctgccggcagccccacctccacagaggagggaaccagcaccgagcccagcgaaggcagcgccccaggcaccagcaccgagcctagtgagcaggagattaaacggatcaacaagatcagaagaagacttgtgaaagacagcaacaccaagaaggccggcaagacaggccccatgaaaaccctgctggttagagtgatgacacccgatctgagagagcggctggaaaacctgagaaagaagcctgaaaatatcccccagcccatcagcaatacatctagagccaacctgaataagctgctgaccgattacaccgaaatgaagaaggcgatcctgcatgtgtactgggaagagttccagaaggaccctgtgggcctgatgagccgggtggcccagcctgccagcaagaagatcgatcagaacaagctgaaacctgagatggacgagaagggcaacctgaccaccgccggctttgcctgctctcagtgtggccagcccctgttcgtgtacaagctggagcaggtgtctgagaagggcaaggcttacaccaactacttcggacggtgcaatgtggccgagcacgaaaagctgatcctgctggcccagctgaagcccgagaaggatagcgacgaagccgtgacatatagcctgggaaagtttgggcagagggccctggatttctacagcattcatgtgaccaaggagtccacccaccccgtgaagcccctggcccagatcgccggaaacagatacgcctccggacctgtgggaaaggccctgagcgacgcatgtatgggcacaatcgcctccttcctgtctaagtaccaggacatcatcatcgaacaccagaaggtggtgaagggcaaccagaagagactggagagcctgcgggagctggccggcaaggaaaacctggaataccctagcgtgaccctgccacctcagcctcacaccaaggagggcgttgatgcctacaacgaagtgatcgcccgggtgcgaatgtgggtgaacctgaacctgtggcagaagctgaagctaagcagagatgatgccaagcctctgctgagactgaagggattcccttcctttcctctggtcgagagacaggccaacgaagtggactggtgggacatggtgtgtaacgtgaagaagctgatcaacgagaaaaaggaggatggcaaggtgttttggcagaatctggctggctacaagagacaggaagccctgagaccatacctgagcagcgaggaagatcggaagaagggaaagaaattcgctcggtaccagctgggcgacctgctgctgcacctggaaaagaagcacggcgaggactggggaaaggtgtacgacgaggcctgggagcggattgacaagaaagtggaaggcctgagcaagcacatcaagctggaagaggaacggagaagcgaggacgcccagagcaaggccgccctgaccgactggctgcgggctaaggccagcttcgtgatcgagggcctgaaggaggccgacaaggacgagttctgcagatgcgagctgaagctgcagaagtggtacggggacctgcggggaaagcccttcgccatcgaagccgagaacagcatcctggacatcagcggcttcagcaagcagtacaactgtgccttcatctggcagaaggacggcgtgaagaagctgaacctgtacctgatcatcaactacttcaagggcggcaagctgcggttcaagaagatcaaacctgaagccttcgaagccaacagattctacaccgtgatcaacaaaaagagcggcgagatcgtgcccatggaggtgaacttcaacttcgacgaccccaacctgatcatcctgcctctggcctttggcaagagacagggcagagaattcatctggaacgacctgctgtccctggaaaccggcagcctgaagctggccaacggaagagtgatcgagaagacactgtacaacagaagaacccggcaggatgagcctgccctgttcgtggccctgaccttcgagcggcgggaggtcctggactcctccaatatcaaaccaatgaacctgatcggcgtggcaagaggcgaaaacatccccgccgtgatcgccctgaccgaccccgagggctgcccactgagccggtttaaggatagcctgggaaacccaacccacatcctgagaatcggcgagagctataaggagaagcagcggaccatccaggccaagaaggaggtggagcagcggagagccggcggctacagccggaagtacgccagcaaagccaagaatctggcagacgatatggtgagaaacaccgctagagatctgctgtactacgccgtgacccaggatgccatgctgatcttcgccaacctgagccggggcttcggccggcagggcaagcggaccttcatggccgagagacagtacacacggatggaggactggctgaccgccaagctggcctacgagggcctgagcaagacctacctgtccaagacactggcccagtacacctccaagacatgcagcaactgtgggtttaccatcaccagcgccgactacgacagggtgctggagaagctgaagaagacagcaacaggctggatgaccacaattaacggcaaggagctgaaggtggagggccagattacctactacaacagatacaagagacagaacgtagtcaaggacctgtccgtcgagctggatagactgagcgaagaatctgtgaacaacgacatctcctcctggacaaagggcagaagcggagaagctctgagcctcctgaagaaaagattctcccatagacccgtgcaggagaagttcgtgtgcctgaactgcggcttcgagacacacgcagccgagcaagccgccctgaacatcgccagatcctggctgttcctgcggagccaggagtacaagaaataccagacaaacaagacaaccggcaacaccgataagagagccttcgtcgagacctggcagtccttttaccggaagaagcttaaggaggtgtggaaacctgccgtgcggtctggcggatctggcggaggctccaccagccccaagaaaaagagaaaagtctaagctgccttctgcggggcttgccttctggccatgcccttcttctctcccttgcacctgtacctcttggtctttgaataaagcctgagtaggaaggctagcaaaaaaaaaaaaaaaaaaaaaaaaaaaaaaaaaaaaaaaaaaaaaaaaaaaaaaaaaaaaaaaaaaaaaaaaaaaaaaaa

SEQ ID NO: 9066 - RNA, 8787 nt, synthetic construct
  source 1..8787: mol_type = other RNA
aggaaataagagagaaaagaagagtaagaagaaatataagagccaccatggcccctaagaagaagcgtaaagtgagccggatgaaccacgaccaggagttcgacccccctaaggtgtaccctcccgtccccgccgagaagagaaagcccatccgggtcctgagcctgttcgatggcatcgccaccggtctgctggtgctgaaggacctgggcatccaggtggataggtacattgcctccgaggtgtgcgaggactccatcaccgtgggaatggtgcgtcatcagggcaagatcatgtacgtgggcgacgtgcggagcgtgacacagaagcatatccaggagtggggccctttcgacctggtgatcggcggcagcccttgcaatgacctgagcatcgtgaacccagcccggaagggcctgtacgagggaaccggcagactgttcttcgagttttacagactgctgcacgacgcccggcctaaggaaggcgacgaccggcccttcttttggctgttcgagaatgtggtggccatgggagtcagcgacaagcgggatattagccggttcctggagagcaaccccgtgatgatcgatgccaaggaagtgagcgccgcccaccgggccagatacttctggggcaatctgcctggcatgaacagacccctggccagcaccgtgaacgacaagctggagctgcaggagtgcctggagcacggccggatcgccaagttcagcaaggtgagaaccatcaccacccgaagcaacagcatcaaacaaggcaaggaccagcactttcctgtgttcatgaacgagaaggaggacatcctgtggtgtaccgagatggagagagtgttcgggttcccagtccactacacagatgtcagcaacatgtctagactggccagacagagactgctgggaagaagctggtccgtccctgtgatcagacacctgttcgcccctctgaaggagtacttcgcctgcgtgagcagcggcaacagcaacgccaacagccggggccccagcttctctagcggcctggtgccactgtccctgagagggagccacatgggccccatggagatctacaaaaccgtgagcgcctggaagcggcagcctgtgcgcgtgctgagcctgtttcggaatatcgataaagtcctgaaaagcctgggattcctggagagcggctctggctccggcggtggcaccctgaagtacgtggaggatgtgacaaacgtggtcagacgggatgtggagaagtggggccccttcgatctggtgtacggcagcacccaacccctgggcagctcttgtgaccggtgccctggctggtacatgtttcagttccaccggatcctgcagtacgccctgccgagacaggagtcccagcggccattcttttggattttcatggacaacttgctgctgaccgaggatgaccaggaaactaccactcggttcctgcagaccgaagccgtgaccctgcaggacgtgagaggccgggactaccagaacgccatgcgggtgtggtccaacatccctggactgaaaagcaagcacgcacctctgacccctaaagaagaggagtacctgcaggcccaggtgcggagcagaagcaagctggacgcccctaaggtggatctgctggtgaagaattgcctcctgcccctgagagagtacttcaagtatttcagccagaatagtctgcccctgggaggcagcggcggcggcatggccgccggccagcccgaggccaggccccaggtgagcctgaccttcgaggacgtggccgtgctgttcaccagggacgagtggaggaagctggcccccagccagaggaacctgtacagggacgtgatgctggagaactacaggaacctggtgagcctgggcctgcccttcaccaagcccaaggtgatcagcctgctgcagcagggcgaggacccctggaaggtggagaaggactgcttcggcggcggcccaagcagcggcgcccctcctcccagcggcggcaggcggcccaagcagcggcgcccctcctcccagcggcggcagcccagccggctccccaacctctaccgaggagggcacctctgagtccgccacccccgagagcggccctggcacctccaccgagcccagcgagggcagcgcacccggcagccctgccggcagccccacctccacagaggagggaaccagcaccgagcccagcgaaggcagcgccccaggcaccagcaccgagcctagtgagcaggagattaaacggatcaacaagatcagaagaagacttgtgaaagacagcaacaccaagaaggccggcaagacaggccccatgaaaaccctgctggttagagtgatgacacccgatctgagagagcggctggaaaacctgagaaagaagcctgaaaatatcccccagcccatcagcaatacatctagagccaacctgaataagctgctgaccgattacaccgaaatgaagaaggcgatcctgcatgtgtactgggaagagttccagaaggaccctgtgggcctgatgagccgggtggcccagcctgccagcaagaagatcgatcagaacaagctgaaacctgagatggacgagaagggcaacctgaccaccgccggctttgcctgctctcagtgtggccagcccctgttcgtgtacaagctggagcaggtgtctgagaagggcaaggcttacaccaactacttcggacggtgcaatgtggccgagcacgaaaagctgatcctgctggcccagctgaagcccgagaaggatagcgacgaagccgtgacatatagcctgggaaagtttgggcagagggccctggatttctacagcattcatgtgaccaaggagtccacccaccccgtgaagcccctggcccagatcgccggaaacagatacgcctccggacctgtgggaaaggccctgagcgacgcatgtatgggcacaatcgcctccttcctgtctaagtaccaggacatcatcatcgaacaccagaaggtggtgaagggcaaccagaagagactggagagcctgcgggagctggccggcaaggaaaacctggaataccctagcgtgaccctgccacctcagcctcacaccaaggagggcgttgatgcctacaacgaagtgatcgcccgggtgcgaatgtgggtgaacctgaacctgtggcagaagctgaagctaagcagagatgatgccaagcctctgctgagactgaagggattcccttcctttcctctggtcgagagacaggccaacgaagtggactggtgggacatggtgtgtaacgtgaagaagctgatcaacgagaaaaaggaggatggcaaggtgttttggcagaatctggctggctacaagagacaggaagccctgagaccatacctgagcagcgaggaagatcggaagaagggaaagaaattcgctcggtaccagctgggcgacctgctgctgcacctggaaaagaagcacggcgaggactggggaaaggtgtacgacgaggcctgggagcggattgacaagaaagtggaaggcctgagcaagcacatcaagctggaagaggaacggagaagcgaggacgcccagagcaaggccgccctgaccgactggctgcgggctaaggccagcttcgtgatcgagggcctgaaggaggccgacaaggacgagttctgcagatgcgagctgaagctgcagaagtggtacggggacctgcggggaaagcccttcgccatcgaagccgagaacagcatcctggacatcagcggcttcagcaagcagtacaactgtgccttcatctggcagaaggacggcgtgaagaagctgaacctgtacctgatcatcaactacttcaagggcggcaagctgcggttcaagaagatcaaacctgaagccttcgaagccaacagattctacaccgtgatcaacaaaaagagcggcgagatcgtgcccatggaggtgaacttcaacttcgacgaccccaacctgatcatcctgcctctggcctttggcaagagacagggcagagaattcatctggaacgacctgctgtccctggaaaccggcagcctgaagctggccaacggaagagtgatcgagaagacactgtacaacagaagaacccggcaggatgagcctgccctgttcgtggccctgaccttcgagcggcgggaggtcctggactcctccaatatcaaaccaatgaacctgatcggcgtggcaagaggcgaaaacatccccgccgtgatcgccctgaccgaccccgagggctgcccactgagccggtttaaggatagcctgggaaacccaacccacatcctgagaatcggcgagagctataaggagaagcagcggaccatccaggccaagaaggaggtggagcagcggagagccggcggctacagccggaagtacgccagcaaagccaagaatctggcagacgatatggtgagaaacaccgctagagatctgctgtactacgccgtgacccaggatgccatgctgatcttcgccaacctgagccggggcttcggccggcagggcaagcggaccttcatggccgagagacagtacacacggatggaggactggctgaccgccaagctggcctacgagggcctgagcaagacctacctgtccaagacactggcccagtacacctccaagacatgcagcaactgtgggtttaccatcaccagcgccgactacgacagggtgctggagaagctgaagaagacagcaacaggctggatgaccacaattaacggcaaggagctgaaggtggagggccagattacctactacaacagatacaagagacagaacgtagtcaaggacctgtccgtcgagctggatagactgagcgaagaatctgtgaacaacgacatctcctcctggacaaagggcagaagcggagaagctctgagcctcctgaagaaaagattctcccatagacccgtgcaggagaagttcgtgtgcctgaactgcggcttcgagacacacgcagccgagcaagccgccctgaacatcgccagatcctggctgttcctgcggagccaggagtacaagaaataccagacaaacaagacaaccggcaacaccgataagagagccttcgtcgagacctggcagtccttttaccggaagaagcttaaggaggtgtggaaacctgccgtgcggtctggcggatctggcggaggctccaccagccccaagaaaaagagaaaagtctaagctgccttctgcggggcttgccttctggccatgcccttcttctctcccttgcacctgtacctcttggtctttgaataaagcctgagtaggaaggctagcaaaaaaaaaaaaaaaaaaaaaaaaaaaaaaaaaaaaaaaaaaaaaaaaaaaaaaaaaaaaaaaaaaaaaaaaaaaaaaaagcccagccggctccccaacctctaccgaggagggcacctctgagtccgccacccccgagagcggccctggcacctccaccgagcccagcgagggcagcgcacccggcagccctgccggcagccccacctccacagaggagggaaccagcaccgagcccagcgaaggcagcgccccaggcaccagcaccgagcctagtgagcaggagattaaacggatcaacaagatcagaagaagacttgtgaaagacagcaacaccaagaaggccggcaagacaggccccatgaaaaccctgctggttagagtgatgacacccgatctgagagagcggctggaaaacctgagaaagaagcctgaaaatatcccccagcccatcagcaatacatctagagccaacctgaataagctgctgaccgattacaccgaaatgaagaaggcgatcctgcatgtgtactgggaagagttccagaaggaccctgtgggcctgatgagccgggtggcccagcctgccagcaagaagatcgatcagaacaagctgaaacctgagatggacgagaagggcaacctgaccaccgccggctttgcctgctctcagtgtggccagcccctgttcgtgtacaagctggagcaggtgtctgagaagggcaaggcttacaccaactacttcggacggtgcaatgtggccgagcacgaaaagctgatcctgctggcccagctgaagcccgagaaggatagcgacgaagccgtgacatatagcctgggaaagtttgggcagagggccctggatttctacagcattcatgtgaccaaggagtccacccaccccgtgaagcccctggcccagatcgccggaaacagatacgcctccggacctgtgggaaaggccctgagcgacgcatgtatgggcacaatcgcctccttcctgtctaagtaccaggacatcatcatcgaacaccagaaggtggtgaagggcaaccagaagagactggagagcctgcgggagctggccggcaaggaaaacctggaataccctagcgtgaccctgccacctcagcctcacaccaaggagggcgttgatgcctacaacgaagtgatcgcccgggtgcgaatgtgggtgaacctgaacctgtggcagaagctgaagctaagcagagatgatgccaagcctctgctgagactgaagggattcccttcctttcctctggtcgagagacaggccaacgaagtggactggtgggacatggtgtgtaacgtgaagaagctgatcaacgagaaaaaggaggatggcaaggtgttttggcagaatctggctggctacaagagacaggaagccctgagaccatacctgagcagcgaggaagatcggaagaagggaaagaaattcgctcggtaccagctgggcgacctgctgctgcacctggaaaagaagcacggcgaggactggggaaaggtgtacgacgaggcctgggagcggattgacaagaaagtggaaggcctgagcaagcacatcaagctggaagaggaacggagaagcgaggacgcccagagcaaggccgccctgaccgactggctgcgggctaaggccagcttcgtgatcgagggcctgaaggaggccgacaaggacgagttctgcagatgcgagctgaagctgcagaagtggtacggggacctgcggggaaagcccttcgccatcgaagccgagaacagcatcctggacatcagcggcttcagcaagcagtacaactgtgccttcatctggcagaaggacggcgtgaagaagctgaacctgtacctgatcatcaactacttcaagggcggcaagctgcggttcaagaagatcaaacctgaagccttcgaagccaacagattctacaccgtgatcaacaaaaagagcggcgagatcgtgcccatggaggtgaacttcaacttcgacgaccccaacctgatcatcctgcctctggcctttggcaagagacagggcagagaattcatctggaacgacctgctgtccctggaaaccggcagcctgaagctggccaacggaagagtgatcgagaagacactgtacaacagaagaacccggcaggatgagcctgccctgttcgtggccctgaccttcgagcggcgggaggtcctggactcctccaatatcaaaccaatgaacctgatcggcgtggcaagaggcgaaaacatccccgccgtgatcgccctgaccgaccccgagggctgcccactgagccggtttaaggatagcctgggaaacccaacccacatcctgagaatcggcgagagctataaggagaagcagcggaccatccaggccaagaaggaggtggagcagcggagagccggcggctacagccggaagtacgccagcaaagccaagaatctggcagacgatatggtgagaaacaccgctagagatctgctgtactacgccgtgacccaggatgccatgctgatcttcgccaacctgagccggggcttcggccggcagggcaagcggaccttcatggccgagagacagtacacacggatggaggactggctgaccgccaagctggcctacgagggcctgagcaagacctacctgtccaagacactggcccagtacacctccaagacatgcagcaactgtgggtttaccatcaccagcgccgactacgacagggtgctggagaagctgaagaagacagcaacaggctggatgaccacaattaacggcaaggagctgaaggtggagggccagattacctactacaacagatacaagagacagaacgtagtcaaggacctgtccgtcgagctggatagactgagcgaagaatctgtgaacaacgacatctcctcctggacaaagggcagaagcggagaagctctgagcctcctgaagaaaagattctcccatagacccgtgcaggagaagttcgtgtgcctgaactgcggcttcgagacacacgcagccgagcaagccgccctgaacatcgccagatcctggctgttcctgcggagccaggagtacaagaaataccagacaaacaagacaaccggcaacaccgataagagagccttcgtcgagacctggcagtccttttaccggaagaagcttaaggaggtgtggaaacctgccgtgcggtctggcggatctggcggaggctccaccagccccaagaaaaagagaaaagtctaagctgccttctgcggggcttgccttctggccatgcccttcttctctcccttgcacctgtacctcttggtctttgaataaagcctgagtaggaaggctagcaaaaaaaaaaaaaaaaaaaaaaaaaaaaaaaaaaaaaaaaaaaaaaaaaaaaaaaaaaaaaaaaaaaaaaaaaaaaaaaa

SEQ ID NO: 9067 - RNA, 8787 nt, synthetic construct
  source 1..8787: mol_type = other RNA
aggaaataagagagaaaagaagagtaagaagaaatataagagccaccatggcccctaagaagaagcgtaaagtgagccggatgaaccacgaccaggagttcgacccccctaaggtgtaccctcccgtccccgccgagaagagaaagcccatccgggtcctgagcctgttcgatggcatcgccaccggtctgctggtgctgaaggacctgggcatccaggtggataggtacattgcctccgaggtgtgcgaggactccatcaccgtgggaatggtgcgtcatcagggcaagatcatgtacgtgggcgacgtgcggagcgtgacacagaagcatatccaggagtggggccctttcgacctggtgatcggcggcagcccttgcaatgacctgagcatcgtgaacccagcccggaagggcctgtacgagggaaccggcagactgttcttcgagttttacagactgctgcacgacgcccggcctaaggaaggcgacgaccggcccttcttttggctgttcgagaatgtggtggccatgggagtcagcgacaagcgggatattagccggttcctggagagcaaccccgtgatgatcgatgccaaggaagtgagcgccgcccaccgggccagatacttctggggcaatctgcctggcatgaacagacccctggccagcaccgtgaacgacaagctggagctgcaggagtgcctggagcacggccggatcgccaagttcagcaaggtgagaaccatcaccacccgaagcaacagcatcaaacaaggcaaggaccagcactttcctgtgttcatgaacgagaaggaggacatcctgtggtgtaccgagatggagagagtgttcgggttcccagtccactacacagatgtcagcaacatgtctagactggccagacagagactgctgggaagaagctggtccgtccctgtgatcagacacctgttcgcccctctgaaggagtacttcgcctgcgtgagcagcggcaacagcaacgccaacagccggggccccagcttctctagcggcctggtgccactgtccctgagagggagccacatgggccccatggagatctacaaaaccgtgagcgcctggaagcggcagcctgtgcgcgtgctgagcctgtttcggaatatcgataaagtcctgaaaagcctgggattcctggagagcggctctggctccggcggtggcaccctgaagtacgtggaggatgtgacaaacgtggtcagacgggatgtggagaagtggggccccttcgatctggtgtacggcagcacccaacccctgggcagctcttgtgaccggtgccctggctggtacatgtttcagttccaccggatcctgcagtacgccctgccgagacaggagtcccagcggccattcttttggattttcatggacaacttgctgctgaccgaggatgaccaggaaactaccactcggttcctgcagaccgaagccgtgaccctgcaggacgtgagaggccgggactaccagaacgccatgcgggtgtggtccaacatccctggactgaaaagcaagcacgcacctctgacccctaaagaagaggagtacctgcaggcccaggtgcggagcagaagcaagctggacgcccctaaggtggatctgctggtgaagaattgcctcctgcccctgagagagtacttcaagtatttcagccagaatagtctgcccctgggaggcagcggcggcggccagatgcccgtgaagttcgaggacatcgccgtgagcttcagccaggaggagtgggagtacctgaacgaggagcagaaggagctgtacagggaggtgatggaggagaactaccagaccctgatcagcctgggcaccggcagcccccccatcacccccgacatcatcagccacatcgagaggggcgaggagccctacatcagggaggagcccggcagcgaggagaggggccccgtgaggagcagcggcggcccaagcagcggcgcccctcctcccagcggcggcaggcggcccaagcagcggcgcccctcctcccagcggcggcagcccagccggctccccaacctctaccgaggagggcacctctgagtccgccacccccgagagcggccctggcacctccaccgagcccagcgagggcagcgcacccggcagccctgccggcagccccacctccacagaggagggaaccagcaccgagcccagcgaaggcagcgccccaggcaccagcaccgagcctagtgagcaggagattaaacggatcaacaagatcagaagaagacttgtgaaagacagcaacaccaagaaggccggcaagacaggccccatgaaaaccctgctggttagagtgatgacacccgatctgagagagcggctggaaaacctgagaaagaagcctgaaaatatcccccagcccatcagcaatacatctagagccaacctgaataagctgctgaccgattacaccgaaatgaagaaggcgatcctgcatgtgtactgggaagagttccagaaggaccctgtgggcctgatgagccgggtggcccagcctgccagcaagaagatcgatcagaacaagctgaaacctgagatggacgagaagggcaacctgaccaccgccggctttgcctgctctcagtgtggccagcccctgttcgtgtacaagctggagcaggtgtctgagaagggcaaggcttacaccaactacttcggacggtgcaatgtggccgagcacgaaaagctgatcctgctggcccagctgaagcccgagaaggatagcgacgaagccgtgacatatagcctgggaaagtttgggcagagggccctggatttctacagcattcatgtgaccaaggagtccacccaccccgtgaagcccctggcccagatcgccggaaacagatacgcctccggacctgtgggaaaggccctgagcgacgcatgtatgggcacaatcgcctccttcctgtctaagtaccaggacatcatcatcgaacaccagaaggtggtgaagggcaaccagaagagactggagagcctgcgggagctggccggcaaggaaaacctggaataccctagcgtgaccctgccacctcagcctcacaccaaggagggcgttgatgcctacaacgaagtgatcgcccgggtgcgaatgtgggtgaacctgaacctgtggcagaagctgaagctaagcagagatgatgccaagcctctgctgagactgaagggattcccttcctttcctctggtcgagagacaggccaacgaagtggactggtgggacatggtgtgtaacgtgaagaagctgatcaacgagaaaaaggaggatggcaaggtgttttggcagaatctggctggctacaagagacaggaagccctgagaccatacctgagcagcgaggaagatcggaagaagggaaagaaattcgctcggtaccagctgggcgacctgctgctgcacctggaaaagaagcacggcgaggactggggaaaggtgtacgacgaggcctgggagcggattgacaagaaagtggaaggcctgagcaagcacatcaagctggaagaggaacggagaagcgaggacgcccagagcaaggccgccctgaccgactggctgcgggctaaggccagcttcgtgatcgagggcctgaaggaggccgacaaggacgagttctgcagatgcgagctgaagctgcagaagtggtacggggacctgcggggaaagcccttcgccatcgaagccgagaacagcatcctggacatcagcggcttcagcaagcagtacaactgtgccttcatctggcagaaggacggcgtgaagaagctgaacctgtacctgatcatcaactacttcaagggcggcaagctgcggttcaagaagatcaaacctgaagccttcgaagccaacagattctacaccgtgatcaacaaaaagagcggcgagatcgtgcccatggaggtgaacttcaacttcgacgaccccaacctgatcatcctgcctctggcctttggcaagagacagggcagagaattcatctggaacgacctgctgtccctggaaaccggcagcctgaagctggccaacggaagagtgatcgagaagacactgtacaacagaagaacccggcaggatgagcctgccctgttcgtggccctgaccttcgagcggcgggaggtcctggactcctccaatatcaaaccaatgaacctgatcggcgtggcaagaggcgaaaacatccccgccgtgatcgccctgaccgaccccgagggctgcccactgagccggtttaaggatagcctgggaaacccaacccacatcctgagaatcggcgagagctataaggagaagcagcggaccatccaggccaagaaggaggtggagcagcggagagccggcggctacagccggaagtacgccagcaaagccaagaatctggcagacgatatggtgagaaacaccgctagagatctgctgtactacgccgtgacccaggatgccatgctgatcttcgccaacctgagccggggcttcggccggcagggcaagcggaccttcatggccgagagacagtacacacggatggaggactggctgaccgccaagctggcctacgagggcctgagcaagacctacctgtccaagacactggcccagtacacctccaagacatgcagcaactgtgggtttaccatcaccagcgccgactacgacagggtgctggagaagctgaagaagacagcaacaggctggatgaccacaattaacggcaaggagctgaaggtggagggccagattacctactacaacagatacaagagacagaacgtagtcaaggacctgtccgtcgagctggatagactgagcgaagaatctgtgaacaacgacatctcctcctggacaaagggcagaagcggagaagctctgagcctcctgaagaaaagattctcccatagacccgtgcaggagaagttcgtgtgcctgaactgcggcttcgagacacacgcagccgagcaagccgccctgaacatcgccagatcctggctgttcctgcggagccaggagtacaagaaataccagacaaacaagacaaccggcaacaccgataagagagccttcgtcgagacctggcagtccttttaccggaagaagcttaaggaggtgtggaaacctgccgtgcggtctggcggatctggcggaggctccaccagccccaagaaaaagagaaaagtctaagctgccttctgcggggcttgccttctggccatgcccttcttctctcccttgcacctgtacctcttggtctttgaataaagcctgagtaggaaggctagcaaaaaaaaaaaaaaaaaaaaaaaaaaaaaaaaaaaaaaaaaaaaaaaaaaaaaaaaaaaaaaaaaaaaaaaaaaaaaaaagcccagccggctccccaacctctaccgaggagggcacctctgagtccgccacccccgagagcggccctggcacctccaccgagcccagcgagggcagcgcacccggcagccctgccggcagccccacctccacagaggagggaaccagcaccgagcccagcgaaggcagcgccccaggcaccagcaccgagcctagtgagcaggagattaaacggatcaacaagatcagaagaagacttgtgaaagacagcaacaccaagaaggccggcaagacaggccccatgaaaaccctgctggttagagtgatgacacccgatctgagagagcggctggaaaacctgagaaagaagcctgaaaatatcccccagcccatcagcaatacatctagagccaacctgaataagctgctgaccgattacaccgaaatgaagaaggcgatcctgcatgtgtactgggaagagttccagaaggaccctgtgggcctgatgagccgggtggcccagcctgccagcaagaagatcgatcagaacaagctgaaacctgagatggacgagaagggcaacctgaccaccgccggctttgcctgctctcagtgtggccagcccctgttcgtgtacaagctggagcaggtgtctgagaagggcaaggcttacaccaactacttcggacggtgcaatgtggccgagcacgaaaagctgatcctgctggcccagctgaagcccgagaaggatagcgacgaagccgtgacatatagcctgggaaagtttgggcagagggccctggatttctacagcattcatgtgaccaaggagtccacccaccccgtgaagcccctggcccagatcgccggaaacagatacgcctccggacctgtgggaaaggccctgagcgacgcatgtatgggcacaatcgcctccttcctgtctaagtaccaggacatcatcatcgaacaccagaaggtggtgaagggcaaccagaagagactggagagcctgcgggagctggccggcaaggaaaacctggaataccctagcgtgaccctgccacctcagcctcacaccaaggagggcgttgatgcctacaacgaagtgatcgcccgggtgcgaatgtgggtgaacctgaacctgtggcagaagctgaagctaagcagagatgatgccaagcctctgctgagactgaagggattcccttcctttcctctggtcgagagacaggccaacgaagtggactggtgggacatggtgtgtaacgtgaagaagctgatcaacgagaaaaaggaggatggcaaggtgttttggcagaatctggctggctacaagagacaggaagccctgagaccatacctgagcagcgaggaagatcggaagaagggaaagaaattcgctcggtaccagctgggcgacctgctgctgcacctggaaaagaagcacggcgaggactggggaaaggtgtacgacgaggcctgggagcggattgacaagaaagtggaaggcctgagcaagcacatcaagctggaagaggaacggagaagcgaggacgcccagagcaaggccgccctgaccgactggctgcgggctaaggccagcttcgtgatcgagggcctgaaggaggccgacaaggacgagttctgcagatgcgagctgaagctgcagaagtggtacggggacctgcggggaaagcccttcgccatcgaagccgagaacagcatcctggacatcagcggcttcagcaagcagtacaactgtgccttcatctggcagaaggacggcgtgaagaagctgaacctgtacctgatcatcaactacttcaagggcggcaagctgcggttcaagaagatcaaacctgaagccttcgaagccaacagattctacaccgtgatcaacaaaaagagcggcgagatcgtgcccatggaggtgaacttcaacttcgacgaccccaacctgatcatcctgcctctggcctttggcaagagacagggcagagaattcatctggaacgacctgctgtccctggaaaccggcagcctgaagctggccaacggaagagtgatcgagaagacactgtacaacagaagaacccggcaggatgagcctgccctgttcgtggccctgaccttcgagcggcgggaggtcctggactcctccaatatcaaaccaatgaacctgatcggcgtggcaagaggcgaaaacatccccgccgtgatcgccctgaccgaccccgagggctgcccactgagccggtttaaggatagcctgggaaacccaacccacatcctgagaatcggcgagagctataaggagaagcagcggaccatccaggccaagaaggaggtggagcagcggagagccggcggctacagccggaagtacgccagcaaagccaagaatctggcagacgatatggtgagaaacaccgctagagatctgctgtactacgccgtgacccaggatgccatgctgatcttcgccaacctgagccggggcttcggccggcagggcaagcggaccttcatggccgagagacagtacacacggatggaggactggctgaccgccaagctggcctacgagggcctgagcaagacctacctgtccaagacactggcccagtacacctccaagacatgcagcaactgtgggtttaccatcaccagcgccgactacgacagggtgctggagaagctgaagaagacagcaacaggctggatgaccacaattaacggcaaggagctgaaggtggagggccagattacctactacaacagatacaagagacagaacgtagtcaaggacctgtccgtcgagctggatagactgagcgaagaatctgtgaacaacgacatctcctcctggacaaagggcagaagcggagaagctctgagcctcctgaagaaaagattctcccatagacccgtgcaggagaagttcgtgtgcctgaactgcggcttcgagacacacgcagccgagcaagccgccctgaacatcgccagatcctggctgttcctgcggagccaggagtacaagaaataccagacaaacaagacaaccggcaacaccgataagagagccttcgtcgagacctggcagtccttttaccggaagaagcttaaggaggtgtggaaacctgccgtgcggtctggcggatctggcggaggctccaccagccccaagaaaaagagaaaagtctaagctgccttctgcggggcttgccttctggccatgcccttcttctctcccttgcacctgtacctcttggtctttgaataaagcctgagtaggaaggctagcaaaaaaaaaaaaaaaaaaaaaaaaaaaaaaaaaaaaaaaaaaaaaaaaaaaaaaaaaaaaaaaaaaaaaaaaaaaaaaaa

SEQ ID NO: 9068 - RNA, 8787 nt, synthetic construct
  source 1..8787: mol_type = other RNA
aggaaataagagagaaaagaagagtaagaagaaatataagagccaccatggcccctaagaagaagcgtaaagtgagccggatgaaccacgaccaggagttcgacccccctaaggtgtaccctcccgtccccgccgagaagagaaagcccatccgggtcctgagcctgttcgatggcatcgccaccggtctgctggtgctgaaggacctgggcatccaggtggataggtacattgcctccgaggtgtgcgaggactccatcaccgtgggaatggtgcgtcatcagggcaagatcatgtacgtgggcgacgtgcggagcgtgacacagaagcatatccaggagtggggccctttcgacctggtgatcggcggcagcccttgcaatgacctgagcatcgtgaacccagcccggaagggcctgtacgagggaaccggcagactgttcttcgagttttacagactgctgcacgacgcccggcctaaggaaggcgacgaccggcccttcttttggctgttcgagaatgtggtggccatgggagtcagcgacaagcgggatattagccggttcctggagagcaaccccgtgatgatcgatgccaaggaagtgagcgccgcccaccgggccagatacttctggggcaatctgcctggcatgaacagacccctggccagcaccgtgaacgacaagctggagctgcaggagtgcctggagcacggccggatcgccaagttcagcaaggtgagaaccatcaccacccgaagcaacagcatcaaacaaggcaaggaccagcactttcctgtgttcatgaacgagaaggaggacatcctgtggtgtaccgagatggagagagtgttcgggttcccagtccactacacagatgtcagcaacatgtctagactggccagacagagactgctgggaagaagctggtccgtccctgtgatcagacacctgttcgcccctctgaaggagtacttcgcctgcgtgagcagcggcaacagcaacgccaacagccggggccccagcttctctagcggcctggtgccactgtccctgagagggagccacatgggccccatggagatctacaaaaccgtgagcgcctggaagcggcagcctgtgcgcgtgctgagcctgtttcggaatatcgataaagtcctgaaaagcctgggattcctggagagcggctctggctccggcggtggcaccctgaagtacgtggaggatgtgacaaacgtggtcagacgggatgtggagaagtggggccccttcgatctggtgtacggcagcacccaacccctgggcagctcttgtgaccggtgccctggctggtacatgtttcagttccaccggatcctgcagtacgccctgccgagacaggagtcccagcggccattcttttggattttcatggacaacttgctgctgaccgaggatgaccaggaaactaccactcggttcctgcagaccgaagccgtgaccctgcaggacgtgagaggccgggactaccagaacgccatgcgggtgtggtccaacatccctggactgaaaagcaagcacgcacctctgacccctaaagaagaggagtacctgcaggcccaggtgcggagcagaagcaagctggacgcccctaaggtggatctgctggtgaagaattgcctcctgcccctgagagagtacttcaagtatttcagccagaatagtctgcccctgggaggcagcggcggcggcgccagcgcccaggtgaccttcgaggacatcgccgtgagcttctgccacgaggagtggaggtacctggacgagggccagaaggagctgtacaaggaggtgatgaaggagaactacgagaccctgatcagcctgggcttcctgtgcgagaagcccagcctgatcagcaagatcgagcaggaggaggacccctgcgtgagggaccagcagaacagcagggagaggaggaggaggctgaagaacttcggcggcccaagcagcggcgcccctcctcccagcggcggcaggcggcccaagcagcggcgcccctcctcccagcggcggcagcccagccggctccccaacctctaccgaggagggcacctctgagtccgccacccccgagagcggccctggcacctccaccgagcccagcgagggcagcgcacccggcagccctgccggcagccccacctccacagaggagggaaccagcaccgagcccagcgaaggcagcgccccaggcaccagcaccgagcctagtgagcaggagattaaacggatcaacaagatcagaagaagacttgtgaaagacagcaacaccaagaaggccggcaagacaggccccatgaaaaccctgctggttagagtgatgacacccgatctgagagagcggctggaaaacctgagaaagaagcctgaaaatatcccccagcccatcagcaatacatctagagccaacctgaataagctgctgaccgattacaccgaaatgaagaaggcgatcctgcatgtgtactgggaagagttccagaaggaccctgtgggcctgatgagccgggtggcccagcctgccagcaagaagatcgatcagaacaagctgaaacctgagatggacgagaagggcaacctgaccaccgccggctttgcctgctctcagtgtggccagcccctgttcgtgtacaagctggagcaggtgtctgagaagggcaaggcttacaccaactacttcggacggtgcaatgtggccgagcacgaaaagctgatcctgctggcccagctgaagcccgagaaggatagcgacgaagccgtgacatatagcctgggaaagtttgggcagagggccctggatttctacagcattcatgtgaccaaggagtccacccaccccgtgaagcccctggcccagatcgccggaaacagatacgcctccggacctgtgggaaaggccctgagcgacgcatgtatgggcacaatcgcctccttcctgtctaagtaccaggacatcatcatcgaacaccagaaggtggtgaagggcaaccagaagagactggagagcctgcgggagctggccggcaaggaaaacctggaataccctagcgtgaccctgccacctcagcctcacaccaaggagggcgttgatgcctacaacgaagtgatcgcccgggtgcgaatgtgggtgaacctgaacctgtggcagaagctgaagctaagcagagatgatgccaagcctctgctgagactgaagggattcccttcctttcctctggtcgagagacaggccaacgaagtggactggtgggacatggtgtgtaacgtgaagaagctgatcaacgagaaaaaggaggatggcaaggtgttttggcagaatctggctggctacaagagacaggaagccctgagaccatacctgagcagcgaggaagatcggaagaagggaaagaaattcgctcggtaccagctgggcgacctgctgctgcacctggaaaagaagcacggcgaggactggggaaaggtgtacgacgaggcctgggagcggattgacaagaaagtggaaggcctgagcaagcacatcaagctggaagaggaacggagaagcgaggacgcccagagcaaggccgccctgaccgactggctgcgggctaaggccagcttcgtgatcgagggcctgaaggaggccgacaaggacgagttctgcagatgcgagctgaagctgcagaagtggtacggggacctgcggggaaagcccttcgccatcgaagccgagaacagcatcctggacatcagcggcttcagcaagcagtacaactgtgccttcatctggcagaaggacggcgtgaagaagctgaacctgtacctgatcatcaactacttcaagggcggcaagctgcggttcaagaagatcaaacctgaagccttcgaagccaacagattctacaccgtgatcaacaaaaagagcggcgagatcgtgcccatggaggtgaacttcaacttcgacgaccccaacctgatcatcctgcctctggcctttggcaagagacagggcagagaattcatctggaacgacctgctgtccctggaaaccggcagcctgaagctggccaacggaagagtgatcgagaagacactgtacaacagaagaacccggcaggatgagcctgccctgttcgtggccctgaccttcgagcggcgggaggtcctggactcctccaatatcaaaccaatgaacctgatcggcgtggcaagaggcgaaaacatccccgccgtgatcgccctgaccgaccccgagggctgcccactgagccggtttaaggatagcctgggaaacccaacccacatcctgagaatcggcgagagctataaggagaagcagcggaccatccaggccaagaaggaggtggagcagcggagagccggcggctacagccggaagtacgccagcaaagccaagaatctggcagacgatatggtgagaaacaccgctagagatctgctgtactacgccgtgacccaggatgccatgctgatcttcgccaacctgagccggggcttcggccggcagggcaagcggaccttcatggccgagagacagtacacacggatggaggactggctgaccgccaagctggcctacgagggcctgagcaagacctacctgtccaagacactggcccagtacacctccaagacatgcagcaactgtgggtttaccatcaccagcgccgactacgacagggtgctggagaagctgaagaagacagcaacaggctggatgaccacaattaacggcaaggagctgaaggtggagggccagattacctactacaacagatacaagagacagaacgtagtcaaggacctgtccgtcgagctggatagactgagcgaagaatctgtgaacaacgacatctcctcctggacaaagggcagaagcggagaagctctgagcctcctgaagaaaagattctcccatagacccgtgcaggagaagttcgtgtgcctgaactgcggcttcgagacacacgcagccgagcaagccgccctgaacatcgccagatcctggctgttcctgcggagccaggagtacaagaaataccagacaaacaagacaaccggcaacaccgataagagagccttcgtcgagacctggcagtccttttaccggaagaagcttaaggaggtgtggaaacctgccgtgcggtctggcggatctggcggaggctccaccagccccaagaaaaagagaaaagtctaagctgccttctgcggggcttgccttctggccatgcccttcttctctcccttgcacctgtacctcttggtctttgaataaagcctgagtaggaaggctagcaaaaaaaaaaaaaaaaaaaaaaaaaaaaaaaaaaaaaaaaaaaaaaaaaaaaaaaaaaaaaaaaaaaaaaaaaaaaaaaagcccagccggctccccaacctctaccgaggagggcacctctgagtccgccacccccgagagcggccctggcacctccaccgagcccagcgagggcagcgcacccggcagccctgccggcagccccacctccacagaggagggaaccagcaccgagcccagcgaaggcagcgccccaggcaccagcaccgagcctagtgagcaggagattaaacggatcaacaagatcagaagaagacttgtgaaagacagcaacaccaagaaggccggcaagacaggccccatgaaaaccctgctggttagagtgatgacacccgatctgagagagcggctggaaaacctgagaaagaagcctgaaaatatcccccagcccatcagcaatacatctagagccaacctgaataagctgctgaccgattacaccgaaatgaagaaggcgatcctgcatgtgtactgggaagagttccagaaggaccctgtgggcctgatgagccgggtggcccagcctgccagcaagaagatcgatcagaacaagctgaaacctgagatggacgagaagggcaacctgaccaccgccggctttgcctgctctcagtgtggccagcccctgttcgtgtacaagctggagcaggtgtctgagaagggcaaggcttacaccaactacttcggacggtgcaatgtggccgagcacgaaaagctgatcctgctggcccagctgaagcccgagaaggatagcgacgaagccgtgacatatagcctgggaaagtttgggcagagggccctggatttctacagcattcatgtgaccaaggagtccacccaccccgtgaagcccctggcccagatcgccggaaacagatacgcctccggacctgtgggaaaggccctgagcgacgcatgtatgggcacaatcgcctccttcctgtctaagtaccaggacatcatcatcgaacaccagaaggtggtgaagggcaaccagaagagactggagagcctgcgggagctggccggcaaggaaaacctggaataccctagcgtgaccctgccacctcagcctcacaccaaggagggcgttgatgcctacaacgaagtgatcgcccgggtgcgaatgtgggtgaacctgaacctgtggcagaagctgaagctaagcagagatgatgccaagcctctgctgagactgaagggattcccttcctttcctctggtcgagagacaggccaacgaagtggactggtgggacatggtgtgtaacgtgaagaagctgatcaacgagaaaaaggaggatggcaaggtgttttggcagaatctggctggctacaagagacaggaagccctgagaccatacctgagcagcgaggaagatcggaagaagggaaagaaattcgctcggtaccagctgggcgacctgctgctgcacctggaaaagaagcacggcgaggactggggaaaggtgtacgacgaggcctgggagcggattgacaagaaagtggaaggcctgagcaagcacatcaagctggaagaggaacggagaagcgaggacgcccagagcaaggccgccctgaccgactggctgcgggctaaggccagcttcgtgatcgagggcctgaaggaggccgacaaggacgagttctgcagatgcgagctgaagctgcagaagtggtacggggacctgcggggaaagcccttcgccatcgaagccgagaacagcatcctggacatcagcggcttcagcaagcagtacaactgtgccttcatctggcagaaggacggcgtgaagaagctgaacctgtacctgatcatcaactacttcaagggcggcaagctgcggttcaagaagatcaaacctgaagccttcgaagccaacagattctacaccgtgatcaacaaaaagagcggcgagatcgtgcccatggaggtgaacttcaacttcgacgaccccaacctgatcatcctgcctctggcctttggcaagagacagggcagagaattcatctggaacgacctgctgtccctggaaaccggcagcctgaagctggccaacggaagagtgatcgagaagacactgtacaacagaagaacccggcaggatgagcctgccctgttcgtggccctgaccttcgagcggcgggaggtcctggactcctccaatatcaaaccaatgaacctgatcggcgtggcaagaggcgaaaacatccccgccgtgatcgccctgaccgaccccgagggctgcccactgagccggtttaaggatagcctgggaaacccaacccacatcctgagaatcggcgagagctataaggagaagcagcggaccatccaggccaagaaggaggtggagcagcggagagccggcggctacagccggaagtacgccagcaaagccaagaatctggcagacgatatggtgagaaacaccgctagagatctgctgtactacgccgtgacccaggatgccatgctgatcttcgccaacctgagccggggcttcggccggcagggcaagcggaccttcatggccgagagacagtacacacggatggaggactggctgaccgccaagctggcctacgagggcctgagcaagacctacctgtccaagacactggcccagtacacctccaagacatgcagcaactgtgggtttaccatcaccagcgccgactacgacagggtgctggagaagctgaagaagacagcaacaggctggatgaccacaattaacggcaaggagctgaaggtggagggccagattacctactacaacagatacaagagacagaacgtagtcaaggacctgtccgtcgagctggatagactgagcgaagaatctgtgaacaacgacatctcctcctggacaaagggcagaagcggagaagctctgagcctcctgaagaaaagattctcccatagacccgtgcaggagaagttcgtgtgcctgaactgcggcttcgagacacacgcagccgagcaagccgccctgaacatcgccagatcctggctgttcctgcggagccaggagtacaagaaataccagacaaacaagacaaccggcaacaccgataagagagccttcgtcgagacctggcagtccttttaccggaagaagcttaaggaggtgtggaaacctgccgtgcggtctggcggatctggcggaggctccaccagccccaagaaaaagagaaaagtctaagctgccttctgcggggcttgccttctggccatgcccttcttctctcccttgcacctgtacctcttggtctttgaataaagcctgagtaggaaggctagcaaaaaaaaaaaaaaaaaaaaaaaaaaaaaaaaaaaaaaaaaaaaaaaaaaaaaaaaaaaaaaaaaaaaaaaaaaaaaaaa

SEQ ID NO: 9069 - RNA, 8787 nt, synthetic construct
  source 1..8787: mol_type = other RNA
aggaaataagagagaaaagaagagtaagaagaaatataagagccaccatggcccctaagaagaagcgtaaagtgagccggatgaaccacgaccaggagttcgacccccctaaggtgtaccctcccgtccccgccgagaagagaaagcccatccgggtcctgagcctgttcgatggcatcgccaccggtctgctggtgctgaaggacctgggcatccaggtggataggtacattgcctccgaggtgtgcgaggactccatcaccgtgggaatggtgcgtcatcagggcaagatcatgtacgtgggcgacgtgcggagcgtgacacagaagcatatccaggagtggggccctttcgacctggtgatcggcggcagcccttgcaatgacctgagcatcgtgaacccagcccggaagggcctgtacgagggaaccggcagactgttcttcgagttttacagactgctgcacgacgcccggcctaaggaaggcgacgaccggcccttcttttggctgttcgagaatgtggtggccatgggagtcagcgacaagcgggatattagccggttcctggagagcaaccccgtgatgatcgatgccaaggaagtgagcgccgcccaccgggccagatacttctggggcaatctgcctggcatgaacagacccctggccagcaccgtgaacgacaagctggagctgcaggagtgcctggagcacggccggatcgccaagttcagcaaggtgagaaccatcaccacccgaagcaacagcatcaaacaaggcaaggaccagcactttcctgtgttcatgaacgagaaggaggacatcctgtggtgtaccgagatggagagagtgttcgggttcccagtccactacacagatgtcagcaacatgtctagactggccagacagagactgctgggaagaagctggtccgtccctgtgatcagacacctgttcgcccctctgaaggagtacttcgcctgcgtgagcagcggcaacagcaacgccaacagccggggccccagcttctctagcggcctggtgccactgtccctgagagggagccacatgggccccatggagatctacaaaaccgtgagcgcctggaagcggcagcctgtgcgcgtgctgagcctgtttcggaatatcgataaagtcctgaaaagcctgggattcctggagagcggctctggctccggcggtggcaccctgaagtacgtggaggatgtgacaaacgtggtcagacgggatgtggagaagtggggccccttcgatctggtgtacggcagcacccaacccctgggcagctcttgtgaccggtgccctggctggtacatgtttcagttccaccggatcctgcagtacgccctgccgagacaggagtcccagcggccattcttttggattttcatggacaacttgctgctgaccgaggatgaccaggaaactaccactcggttcctgcagaccgaagccgtgaccctgcaggacgtgagaggccgggactaccagaacgccatgcgggtgtggtccaacatccctggactgaaaagcaagcacgcacctctgacccctaaagaagaggagtacctgcaggcccaggtgcggagcagaagcaagctggacgcccctaaggtggatctgctggtgaagaattgcctcctgcccctgagagagtacttcaagtatttcagccagaatagtctgcccctgggaggcagcggcggcggcagccagggcctggtgaccttcggcgacgtggccgtggacttcagccaggaggagtgggcctggctgagcaccacccagaggaccctgtacaggaaggtgaccctggagaactacaggaacctggccagcctgggcctgtgcgtgagcaagcccgccgtgatcagcctgctggagcagggcaaggagccctggatcgtgaagaggaagatgaccaggggcggctgccccgacctgaacgccgtgggcggcccaagcagcggcgcccctcctcccagcggcggcaggcggcccaagcagcggcgcccctcctcccagcggcggcagcccagccggctccccaacctctaccgaggagggcacctctgagtccgccacccccgagagcggccctggcacctccaccgagcccagcgagggcagcgcacccggcagccctgccggcagccccacctccacagaggagggaaccagcaccgagcccagcgaaggcagcgccccaggcaccagcaccgagcctagtgagcaggagattaaacggatcaacaagatcagaagaagacttgtgaaagacagcaacaccaagaaggccggcaagacaggccccatgaaaaccctgctggttagagtgatgacacccgatctgagagagcggctggaaaacctgagaaagaagcctgaaaatatcccccagcccatcagcaatacatctagagccaacctgaataagctgctgaccgattacaccgaaatgaagaaggcgatcctgcatgtgtactgggaagagttccagaaggaccctgtgggcctgatgagccgggtggcccagcctgccagcaagaagatcgatcagaacaagctgaaacctgagatggacgagaagggcaacctgaccaccgccggctttgcctgctctcagtgtggccagcccctgttcgtgtacaagctggagcaggtgtctgagaagggcaaggcttacaccaactacttcggacggtgcaatgtggccgagcacgaaaagctgatcctgctggcccagctgaagcccgagaaggatagcgacgaagccgtgacatatagcctgggaaagtttgggcagagggccctggatttctacagcattcatgtgaccaaggagtccacccaccccgtgaagcccctggcccagatcgccggaaacagatacgcctccggacctgtgggaaaggccctgagcgacgcatgtatgggcacaatcgcctccttcctgtctaagtaccaggacatcatcatcgaacaccagaaggtggtgaagggcaaccagaagagactggagagcctgcgggagctggccggcaaggaaaacctggaataccctagcgtgaccctgccacctcagcctcacaccaaggagggcgttgatgcctacaacgaagtgatcgcccgggtgcgaatgtgggtgaacctgaacctgtggcagaagctgaagctaagcagagatgatgccaagcctctgctgagactgaagggattcccttcctttcctctggtcgagagacaggccaacgaagtggactggtgggacatggtgtgtaacgtgaagaagctgatcaacgagaaaaaggaggatggcaaggtgttttggcagaatctggctggctacaagagacaggaagccctgagaccatacctgagcagcgaggaagatcggaagaagggaaagaaattcgctcggtaccagctgggcgacctgctgctgcacctggaaaagaagcacggcgaggactggggaaaggtgtacgacgaggcctgggagcggattgacaagaaagtggaaggcctgagcaagcacatcaagctggaagaggaacggagaagcgaggacgcccagagcaaggccgccctgaccgactggctgcgggctaaggccagcttcgtgatcgagggcctgaaggaggccgacaaggacgagttctgcagatgcgagctgaagctgcagaagtggtacggggacctgcggggaaagcccttcgccatcgaagccgagaacagcatcctggacatcagcggcttcagcaagcagtacaactgtgccttcatctggcagaaggacggcgtgaagaagctgaacctgtacctgatcatcaactacttcaagggcggcaagctgcggttcaagaagatcaaacctgaagccttcgaagccaacagattctacaccgtgatcaacaaaaagagcggcgagatcgtgcccatggaggtgaacttcaacttcgacgaccccaacctgatcatcctgcctctggcctttggcaagagacagggcagagaattcatctggaacgacctgctgtccctggaaaccggcagcctgaagctggccaacggaagagtgatcgagaagacactgtacaacagaagaacccggcaggatgagcctgccctgttcgtggccctgaccttcgagcggcgggaggtcctggactcctccaatatcaaaccaatgaacctgatcggcgtggcaagaggcgaaaacatccccgccgtgatcgccctgaccgaccccgagggctgcccactgagccggtttaaggatagcctgggaaacccaacccacatcctgagaatcggcgagagctataaggagaagcagcggaccatccaggccaagaaggaggtggagcagcggagagccggcggctacagccggaagtacgccagcaaagccaagaatctggcagacgatatggtgagaaacaccgctagagatctgctgtactacgccgtgacccaggatgccatgctgatcttcgccaacctgagccggggcttcggccggcagggcaagcggaccttcatggccgagagacagtacacacggatggaggactggctgaccgccaagctggcctacgagggcctgagcaagacctacctgtccaagacactggcccagtacacctccaagacatgcagcaactgtgggtttaccatcaccagcgccgactacgacagggtgctggagaagctgaagaagacagcaacaggctggatgaccacaattaacggcaaggagctgaaggtggagggccagattacctactacaacagatacaagagacagaacgtagtcaaggacctgtccgtcgagctggatagactgagcgaagaatctgtgaacaacgacatctcctcctggacaaagggcagaagcggagaagctctgagcctcctgaagaaaagattctcccatagacccgtgcaggagaagttcgtgtgcctgaactgcggcttcgagacacacgcagccgagcaagccgccctgaacatcgccagatcctggctgttcctgcggagccaggagtacaagaaataccagacaaacaagacaaccggcaacaccgataagagagccttcgtcgagacctggcagtccttttaccggaagaagcttaaggaggtgtggaaacctgccgtgcggtctggcggatctggcggaggctccaccagccccaagaaaaagagaaaagtctaagctgccttctgcggggcttgccttctggccatgcccttcttctctcccttgcacctgtacctcttggtctttgaataaagcctgagtaggaaggctagcaaaaaaaaaaaaaaaaaaaaaaaaaaaaaaaaaaaaaaaaaaaaaaaaaaaaaaaaaaaaaaaaaaaaaaaaaaaaaaaagcccagccggctccccaacctctaccgaggagggcacctctgagtccgccacccccgagagcggccctggcacctccaccgagcccagcgagggcagcgcacccggcagccctgccggcagccccacctccacagaggagggaaccagcaccgagcccagcgaaggcagcgccccaggcaccagcaccgagcctagtgagcaggagattaaacggatcaacaagatcagaagaagacttgtgaaagacagcaacaccaagaaggccggcaagacaggccccatgaaaaccctgctggttagagtgatgacacccgatctgagagagcggctggaaaacctgagaaagaagcctgaaaatatcccccagcccatcagcaatacatctagagccaacctgaataagctgctgaccgattacaccgaaatgaagaaggcgatcctgcatgtgtactgggaagagttccagaaggaccctgtgggcctgatgagccgggtggcccagcctgccagcaagaagatcgatcagaacaagctgaaacctgagatggacgagaagggcaacctgaccaccgccggctttgcctgctctcagtgtggccagcccctgttcgtgtacaagctggagcaggtgtctgagaagggcaaggcttacaccaactacttcggacggtgcaatgtggccgagcacgaaaagctgatcctgctggcccagctgaagcccgagaaggatagcgacgaagccgtgacatatagcctgggaaagtttgggcagagggccctggatttctacagcattcatgtgaccaaggagtccacccaccccgtgaagcccctggcccagatcgccggaaacagatacgcctccggacctgtgggaaaggccctgagcgacgcatgtatgggcacaatcgcctccttcctgtctaagtaccaggacatcatcatcgaacaccagaaggtggtgaagggcaaccagaagagactggagagcctgcgggagctggccggcaaggaaaacctggaataccctagcgtgaccctgccacctcagcctcacaccaaggagggcgttgatgcctacaacgaagtgatcgcccgggtgcgaatgtgggtgaacctgaacctgtggcagaagctgaagctaagcagagatgatgccaagcctctgctgagactgaagggattcccttcctttcctctggtcgagagacaggccaacgaagtggactggtgggacatggtgtgtaacgtgaagaagctgatcaacgagaaaaaggaggatggcaaggtgttttggcagaatctggctggctacaagagacaggaagccctgagaccatacctgagcagcgaggaagatcggaagaagggaaagaaattcgctcggtaccagctgggcgacctgctgctgcacctggaaaagaagcacggcgaggactggggaaaggtgtacgacgaggcctgggagcggattgacaagaaagtggaaggcctgagcaagcacatcaagctggaagaggaacggagaagcgaggacgcccagagcaaggccgccctgaccgactggctgcgggctaaggccagcttcgtgatcgagggcctgaaggaggccgacaaggacgagttctgcagatgcgagctgaagctgcagaagtggtacggggacctgcggggaaagcccttcgccatcgaagccgagaacagcatcctggacatcagcggcttcagcaagcagtacaactgtgccttcatctggcagaaggacggcgtgaagaagctgaacctgtacctgatcatcaactacttcaagggcggcaagctgcggttcaagaagatcaaacctgaagccttcgaagccaacagattctacaccgtgatcaacaaaaagagcggcgagatcgtgcccatggaggtgaacttcaacttcgacgaccccaacctgatcatcctgcctctggcctttggcaagagacagggcagagaattcatctggaacgacctgctgtccctggaaaccggcagcctgaagctggccaacggaagagtgatcgagaagacactgtacaacagaagaacccggcaggatgagcctgccctgttcgtggccctgaccttcgagcggcgggaggtcctggactcctccaatatcaaaccaatgaacctgatcggcgtggcaagaggcgaaaacatccccgccgtgatcgccctgaccgaccccgagggctgcccactgagccggtttaaggatagcctgggaaacccaacccacatcctgagaatcggcgagagctataaggagaagcagcggaccatccaggccaagaaggaggtggagcagcggagagccggcggctacagccggaagtacgccagcaaagccaagaatctggcagacgatatggtgagaaacaccgctagagatctgctgtactacgccgtgacccaggatgccatgctgatcttcgccaacctgagccggggcttcggccggcagggcaagcggaccttcatggccgagagacagtacacacggatggaggactggctgaccgccaagctggcctacgagggcctgagcaagacctacctgtccaagacactggcccagtacacctccaagacatgcagcaactgtgggtttaccatcaccagcgccgactacgacagggtgctggagaagctgaagaagacagcaacaggctggatgaccacaattaacggcaaggagctgaaggtggagggccagattacctactacaacagatacaagagacagaacgtagtcaaggacctgtccgtcgagctggatagactgagcgaagaatctgtgaacaacgacatctcctcctggacaaagggcagaagcggagaagctctgagcctcctgaagaaaagattctcccatagacccgtgcaggagaagttcgtgtgcctgaactgcggcttcgagacacacgcagccgagcaagccgccctgaacatcgccagatcctggctgttcctgcggagccaggagtacaagaaataccagacaaacaagacaaccggcaacaccgataagagagccttcgtcgagacctggcagtccttttaccggaagaagcttaaggaggtgtggaaacctgccgtgcggtctggcggatctggcggaggctccaccagccccaagaaaaagagaaaagtctaagctgccttctgcggggcttgccttctggccatgcccttcttctctcccttgcacctgtacctcttggtctttgaataaagcctgagtaggaaggctagcaaaaaaaaaaaaaaaaaaaaaaaaaaaaaaaaaaaaaaaaaaaaaaaaaaaaaaaaaaaaaaaaaaaaaaaaaaaaaaaa

SEQ ID NO: 9070 - RNA, 8787 nt, synthetic construct
  source 1..8787: mol_type = other RNA
aggaaataagagagaaaagaagagtaagaagaaatataagagccaccatggcccctaagaagaagcgtaaagtgagccggatgaaccacgaccaggagttcgacccccctaaggtgtaccctcccgtccccgccgagaagagaaagcccatccgggtcctgagcctgttcgatggcatcgccaccggtctgctggtgctgaaggacctgggcatccaggtggataggtacattgcctccgaggtgtgcgaggactccatcaccgtgggaatggtgcgtcatcagggcaagatcatgtacgtgggcgacgtgcggagcgtgacacagaagcatatccaggagtggggccctttcgacctggtgatcggcggcagcccttgcaatgacctgagcatcgtgaacccagcccggaagggcctgtacgagggaaccggcagactgttcttcgagttttacagactgctgcacgacgcccggcctaaggaaggcgacgaccggcccttcttttggctgttcgagaatgtggtggccatgggagtcagcgacaagcgggatattagccggttcctggagagcaaccccgtgatgatcgatgccaaggaagtgagcgccgcccaccgggccagatacttctggggcaatctgcctggcatgaacagacccctggccagcaccgtgaacgacaagctggagctgcaggagtgcctggagcacggccggatcgccaagttcagcaaggtgagaaccatcaccacccgaagcaacagcatcaaacaaggcaaggaccagcactttcctgtgttcatgaacgagaaggaggacatcctgtggtgtaccgagatggagagagtgttcgggttcccagtccactacacagatgtcagcaacatgtctagactggccagacagagactgctgggaagaagctggtccgtccctgtgatcagacacctgttcgcccctctgaaggagtacttcgcctgcgtgagcagcggcaacagcaacgccaacagccggggccccagcttctctagcggcctggtgccactgtccctgagagggagccacatgggccccatggagatctacaaaaccgtgagcgcctggaagcggcagcctgtgcgcgtgctgagcctgtttcggaatatcgataaagtcctgaaaagcctgggattcctggagagcggctctggctccggcggtggcaccctgaagtacgtggaggatgtgacaaacgtggtcagacgggatgtggagaagtggggccccttcgatctggtgtacggcagcacccaacccctgggcagctcttgtgaccggtgccctggctggtacatgtttcagttccaccggatcctgcagtacgccctgccgagacaggagtcccagcggccattcttttggattttcatggacaacttgctgctgaccgaggatgaccaggaaactaccactcggttcctgcagaccgaagccgtgaccctgcaggacgtgagaggccgggactaccagaacgccatgcgggtgtggtccaacatccctggactgaaaagcaagcacgcacctctgacccctaaagaagaggagtacctgcaggcccaggtgcggagcagaagcaagctggacgcccctaaggtggatctgctggtgaagaattgcctcctgcccctgagagagtacttcaagtatttcagccagaatagtctgcccctgggaggcagcggcggcggcagcaaggtgcccgtgaccttcggcgacctggccatctacttcagccaggaggagtgggagtggctgagccccatccagaaggacctgtacgaggacgtgatgctggagaactaccagaacctggtgagcctgggcctgagcttcaggaggcccaacgtgatcaccctgctggagaagggcaaggccccctggatggtggagcccgccaggaagaggaggggcgtggacagcggcagcaagtgcggcggcccaagcagcggcgcccctcctcccagcggcggcaggcggcccaagcagcggcgcccctcctcccagcggcggcagcccagccggctccccaacctctaccgaggagggcacctctgagtccgccacccccgagagcggccctggcacctccaccgagcccagcgagggcagcgcacccggcagccctgccggcagccccacctccacagaggagggaaccagcaccgagcccagcgaaggcagcgccccaggcaccagcaccgagcctagtgagcaggagattaaacggatcaacaagatcagaagaagacttgtgaaagacagcaacaccaagaaggccggcaagacaggccccatgaaaaccctgctggttagagtgatgacacccgatctgagagagcggctggaaaacctgagaaagaagcctgaaaatatcccccagcccatcagcaatacatctagagccaacctgaataagctgctgaccgattacaccgaaatgaagaaggcgatcctgcatgtgtactgggaagagttccagaaggaccctgtgggcctgatgagccgggtggcccagcctgccagcaagaagatcgatcagaacaagctgaaacctgagatggacgagaagggcaacctgaccaccgccggctttgcctgctctcagtgtggccagcccctgttcgtgtacaagctggagcaggtgtctgagaagggcaaggcttacaccaactacttcggacggtgcaatgtggccgagcacgaaaagctgatcctgctggcccagctgaagcccgagaaggatagcgacgaagccgtgacatatagcctgggaaagtttgggcagagggccctggatttctacagcattcatgtgaccaaggagtccacccaccccgtgaagcccctggcccagatcgccggaaacagatacgcctccggacctgtgggaaaggccctgagcgacgcatgtatgggcacaatcgcctccttcctgtctaagtaccaggacatcatcatcgaacaccagaaggtggtgaagggcaaccagaagagactggagagcctgcgggagctggccggcaaggaaaacctggaataccctagcgtgaccctgccacctcagcctcacaccaaggagggcgttgatgcctacaacgaagtgatcgcccgggtgcgaatgtgggtgaacctgaacctgtggcagaagctgaagctaagcagagatgatgccaagcctctgctgagactgaagggattcccttcctttcctctggtcgagagacaggccaacgaagtggactggtgggacatggtgtgtaacgtgaagaagctgatcaacgagaaaaaggaggatggcaaggtgttttggcagaatctggctggctacaagagacaggaagccctgagaccatacctgagcagcgaggaagatcggaagaagggaaagaaattcgctcggtaccagctgggcgacctgctgctgcacctggaaaagaagcacggcgaggactggggaaaggtgtacgacgaggcctgggagcggattgacaagaaagtggaaggcctgagcaagcacatcaagctggaagaggaacggagaagcgaggacgcccagagcaaggccgccctgaccgactggctgcgggctaaggccagcttcgtgatcgagggcctgaaggaggccgacaaggacgagttctgcagatgcgagctgaagctgcagaagtggtacggggacctgcggggaaagcccttcgccatcgaagccgagaacagcatcctggacatcagcggcttcagcaagcagtacaactgtgccttcatctggcagaaggacggcgtgaagaagctgaacctgtacctgatcatcaactacttcaagggcggcaagctgcggttcaagaagatcaaacctgaagccttcgaagccaacagattctacaccgtgatcaacaaaaagagcggcgagatcgtgcccatggaggtgaacttcaacttcgacgaccccaacctgatcatcctgcctctggcctttggcaagagacagggcagagaattcatctggaacgacctgctgtccctggaaaccggcagcctgaagctggccaacggaagagtgatcgagaagacactgtacaacagaagaacccggcaggatgagcctgccctgttcgtggccctgaccttcgagcggcgggaggtcctggactcctccaatatcaaaccaatgaacctgatcggcgtggcaagaggcgaaaacatccccgccgtgatcgccctgaccgaccccgagggctgcccactgagccggtttaaggatagcctgggaaacccaacccacatcctgagaatcggcgagagctataaggagaagcagcggaccatccaggccaagaaggaggtggagcagcggagagccggcggctacagccggaagtacgccagcaaagccaagaatctggcagacgatatggtgagaaacaccgctagagatctgctgtactacgccgtgacccaggatgccatgctgatcttcgccaacctgagccggggcttcggccggcagggcaagcggaccttcatggccgagagacagtacacacggatggaggactggctgaccgccaagctggcctacgagggcctgagcaagacctacctgtccaagacactggcccagtacacctccaagacatgcagcaactgtgggtttaccatcaccagcgccgactacgacagggtgctggagaagctgaagaagacagcaacaggctggatgaccacaattaacggcaaggagctgaaggtggagggccagattacctactacaacagatacaagagacagaacgtagtcaaggacctgtccgtcgagctggatagactgagcgaagaatctgtgaacaacgacatctcctcctggacaaagggcagaagcggagaagctctgagcctcctgaagaaaagattctcccatagacccgtgcaggagaagttcgtgtgcctgaactgcggcttcgagacacacgcagccgagcaagccgccctgaacatcgccagatcctggctgttcctgcggagccaggagtacaagaaataccagacaaacaagacaaccggcaacaccgataagagagccttcgtcgagacctggcagtccttttaccggaagaagcttaaggaggtgtggaaacctgccgtgcggtctggcggatctggcggaggctccaccagccccaagaaaaagagaaaagtctaagctgccttctgcggggcttgccttctggccatgcccttcttctctcccttgcacctgtacctcttggtctttgaataaagcctgagtaggaaggctagcaaaaaaaaaaaaaaaaaaaaaaaaaaaaaaaaaaaaaaaaaaaaaaaaaaaaaaaaaaaaaaaaaaaaaaaaaaaaaaaagcccagccggctccccaacctctaccgaggagggcacctctgagtccgccacccccgagagcggccctggcacctccaccgagcccagcgagggcagcgcacccggcagccctgccggcagccccacctccacagaggagggaaccagcaccgagcccagcgaaggcagcgccccaggcaccagcaccgagcctagtgagcaggagattaaacggatcaacaagatcagaagaagacttgtgaaagacagcaacaccaagaaggccggcaagacaggccccatgaaaaccctgctggttagagtgatgacacccgatctgagagagcggctggaaaacctgagaaagaagcctgaaaatatcccccagcccatcagcaatacatctagagccaacctgaataagctgctgaccgattacaccgaaatgaagaaggcgatcctgcatgtgtactgggaagagttccagaaggaccctgtgggcctgatgagccgggtggcccagcctgccagcaagaagatcgatcagaacaagctgaaacctgagatggacgagaagggcaacctgaccaccgccggctttgcctgctctcagtgtggccagcccctgttcgtgtacaagctggagcaggtgtctgagaagggcaaggcttacaccaactacttcggacggtgcaatgtggccgagcacgaaaagctgatcctgctggcccagctgaagcccgagaaggatagcgacgaagccgtgacatatagcctgggaaagtttgggcagagggccctggatttctacagcattcatgtgaccaaggagtccacccaccccgtgaagcccctggcccagatcgccggaaacagatacgcctccggacctgtgggaaaggccctgagcgacgcatgtatgggcacaatcgcctccttcctgtctaagtaccaggacatcatcatcgaacaccagaaggtggtgaagggcaaccagaagagactggagagcctgcgggagctggccggcaaggaaaacctggaataccctagcgtgaccctgccacctcagcctcacaccaaggagggcgttgatgcctacaacgaagtgatcgcccgggtgcgaatgtgggtgaacctgaacctgtggcagaagctgaagctaagcagagatgatgccaagcctctgctgagactgaagggattcccttcctttcctctggtcgagagacaggccaacgaagtggactggtgggacatggtgtgtaacgtgaagaagctgatcaacgagaaaaaggaggatggcaaggtgttttggcagaatctggctggctacaagagacaggaagccctgagaccatacctgagcagcgaggaagatcggaagaagggaaagaaattcgctcggtaccagctgggcgacctgctgctgcacctggaaaagaagcacggcgaggactggggaaaggtgtacgacgaggcctgggagcggattgacaagaaagtggaaggcctgagcaagcacatcaagctggaagaggaacggagaagcgaggacgcccagagcaaggccgccctgaccgactggctgcgggctaaggccagcttcgtgatcgagggcctgaaggaggccgacaaggacgagttctgcagatgcgagctgaagctgcagaagtggtacggggacctgcggggaaagcccttcgccatcgaagccgagaacagcatcctggacatcagcggcttcagcaagcagtacaactgtgccttcatctggcagaaggacggcgtgaagaagctgaacctgtacctgatcatcaactacttcaagggcggcaagctgcggttcaagaagatcaaacctgaagccttcgaagccaacagattctacaccgtgatcaacaaaaagagcggcgagatcgtgcccatggaggtgaacttcaacttcgacgaccccaacctgatcatcctgcctctggcctttggcaagagacagggcagagaattcatctggaacgacctgctgtccctggaaaccggcagcctgaagctggccaacggaagagtgatcgagaagacactgtacaacagaagaacccggcaggatgagcctgccctgttcgtggccctgaccttcgagcggcgggaggtcctggactcctccaatatcaaaccaatgaacctgatcggcgtggcaagaggcgaaaacatccccgccgtgatcgccctgaccgaccccgagggctgcccactgagccggtttaaggatagcctgggaaacccaacccacatcctgagaatcggcgagagctataaggagaagcagcggaccatccaggccaagaaggaggtggagcagcggagagccggcggctacagccggaagtacgccagcaaagccaagaatctggcagacgatatggtgagaaacaccgctagagatctgctgtactacgccgtgacccaggatgccatgctgatcttcgccaacctgagccggggcttcggccggcagggcaagcggaccttcatggccgagagacagtacacacggatggaggactggctgaccgccaagctggcctacgagggcctgagcaagacctacctgtccaagacactggcccagtacacctccaagacatgcagcaactgtgggtttaccatcaccagcgccgactacgacagggtgctggagaagctgaagaagacagcaacaggctggatgaccacaattaacggcaaggagctgaaggtggagggccagattacctactacaacagatacaagagacagaacgtagtcaaggacctgtccgtcgagctggatagactgagcgaagaatctgtgaacaacgacatctcctcctggacaaagggcagaagcggagaagctctgagcctcctgaagaaaagattctcccatagacccgtgcaggagaagttcgtgtgcctgaactgcggcttcgagacacacgcagccgagcaagccgccctgaacatcgccagatcctggctgttcctgcggagccaggagtacaagaaataccagacaaacaagacaaccggcaacaccgataagagagccttcgtcgagacctggcagtccttttaccggaagaagcttaaggaggtgtggaaacctgccgtgcggtctggcggatctggcggaggctccaccagccccaagaaaaagagaaaagtctaagctgccttctgcggggcttgccttctggccatgcccttcttctctcccttgcacctgtacctcttggtctttgaataaagcctgagtaggaaggctagcaaaaaaaaaaaaaaaaaaaaaaaaaaaaaaaaaaaaaaaaaaaaaaaaaaaaaaaaaaaaaaaaaaaaaaaaaaaaaaaa

SEQ ID NO: 9071 - RNA, 8787 nt, synthetic construct
  source 1..8787: mol_type = other RNA
aggaaataagagagaaaagaagagtaagaagaaatataagagccaccatggcccctaagaagaagcgtaaagtgagccggatgaaccacgaccaggagttcgacccccctaaggtgtaccctcccgtccccgccgagaagagaaagcccatccgggtcctgagcctgttcgatggcatcgccaccggtctgctggtgctgaaggacctgggcatccaggtggataggtacattgcctccgaggtgtgcgaggactccatcaccgtgggaatggtgcgtcatcagggcaagatcatgtacgtgggcgacgtgcggagcgtgacacagaagcatatccaggagtggggccctttcgacctggtgatcggcggcagcccttgcaatgacctgagcatcgtgaacccagcccggaagggcctgtacgagggaaccggcagactgttcttcgagttttacagactgctgcacgacgcccggcctaaggaaggcgacgaccggcccttcttttggctgttcgagaatgtggtggccatgggagtcagcgacaagcgggatattagccggttcctggagagcaaccccgtgatgatcgatgccaaggaagtgagcgccgcccaccgggccagatacttctggggcaatctgcctggcatgaacagacccctggccagcaccgtgaacgacaagctggagctgcaggagtgcctggagcacggccggatcgccaagttcagcaaggtgagaaccatcaccacccgaagcaacagcatcaaacaaggcaaggaccagcactttcctgtgttcatgaacgagaaggaggacatcctgtggtgtaccgagatggagagagtgttcgggttcccagtccactacacagatgtcagcaacatgtctagactggccagacagagactgctgggaagaagctggtccgtccctgtgatcagacacctgttcgcccctctgaaggagtacttcgcctgcgtgagcagcggcaacagcaacgccaacagccggggccccagcttctctagcggcctggtgccactgtccctgagagggagccacatgggccccatggagatctacaaaaccgtgagcgcctggaagcggcagcctgtgcgcgtgctgagcctgtttcggaatatcgataaagtcctgaaaagcctgggattcctggagagcggctctggctccggcggtggcaccctgaagtacgtggaggatgtgacaaacgtggtcagacgggatgtggagaagtggggccccttcgatctggtgtacggcagcacccaacccctgggcagctcttgtgaccggtgccctggctggtacatgtttcagttccaccggatcctgcagtacgccctgccgagacaggagtcccagcggccattcttttggattttcatggacaacttgctgctgaccgaggatgaccaggaaactaccactcggttcctgcagaccgaagccgtgaccctgcaggacgtgagaggccgggactaccagaacgccatgcgggtgtggtccaacatccctggactgaaaagcaagcacgcacctctgacccctaaagaagaggagtacctgcaggcccaggtgcggagcagaagcaagctggacgcccctaaggtggatctgctggtgaagaattgcctcctgcccctgagagagtacttcaagtatttcagccagaatagtctgcccctgggaggcagcggcggcggcctgcaggagctgctgaccttcaaggacgtgagcgtggagttcagcgtggacgagtgggcctgcctggaccccgcccagcagaccctgtacagggacgtgatgctggagaactacaggcacctggtgttcctgggcctgacccccagcaagccccacctgatcacctgcctggagcagagcaaggagccctggaaggtgaaggcctaccagaccgtggtgaagcaccccgccgtgagcaaccacggcggcccaagcagcggcgcccctcctcccagcggcggcaggcggcccaagcagcggcgcccctcctcccagcggcggcagcccagccggctccccaacctctaccgaggagggcacctctgagtccgccacccccgagagcggccctggcacctccaccgagcccagcgagggcagcgcacccggcagccctgccggcagccccacctccacagaggagggaaccagcaccgagcccagcgaaggcagcgccccaggcaccagcaccgagcctagtgagcaggagattaaacggatcaacaagatcagaagaagacttgtgaaagacagcaacaccaagaaggccggcaagacaggccccatgaaaaccctgctggttagagtgatgacacccgatctgagagagcggctggaaaacctgagaaagaagcctgaaaatatcccccagcccatcagcaatacatctagagccaacctgaataagctgctgaccgattacaccgaaatgaagaaggcgatcctgcatgtgtactgggaagagttccagaaggaccctgtgggcctgatgagccgggtggcccagcctgccagcaagaagatcgatcagaacaagctgaaacctgagatggacgagaagggcaacctgaccaccgccggctttgcctgctctcagtgtggccagcccctgttcgtgtacaagctggagcaggtgtctgagaagggcaaggcttacaccaactacttcggacggtgcaatgtggccgagcacgaaaagctgatcctgctggcccagctgaagcccgagaaggatagcgacgaagccgtgacatatagcctgggaaagtttgggcagagggccctggatttctacagcattcatgtgaccaaggagtccacccaccccgtgaagcccctggcccagatcgccggaaacagatacgcctccggacctgtgggaaaggccctgagcgacgcatgtatgggcacaatcgcctccttcctgtctaagtaccaggacatcatcatcgaacaccagaaggtggtgaagggcaaccagaagagactggagagcctgcgggagctggccggcaaggaaaacctggaataccctagcgtgaccctgccacctcagcctcacaccaaggagggcgttgatgcctacaacgaagtgatcgcccgggtgcgaatgtgggtgaacctgaacctgtggcagaagctgaagctaagcagagatgatgccaagcctctgctgagactgaagggattcccttcctttcctctggtcgagagacaggccaacgaagtggactggtgggacatggtgtgtaacgtgaagaagctgatcaacgagaaaaaggaggatggcaaggtgttttggcagaatctggctggctacaagagacaggaagccctgagaccatacctgagcagcgaggaagatcggaagaagggaaagaaattcgctcggtaccagctgggcgacctgctgctgcacctggaaaagaagcacggcgaggactggggaaaggtgtacgacgaggcctgggagcggattgacaagaaagtggaaggcctgagcaagcacatcaagctggaagaggaacggagaagcgaggacgcccagagcaaggccgccctgaccgactggctgcgggctaaggccagcttcgtgatcgagggcctgaaggaggccgacaaggacgagttctgcagatgcgagctgaagctgcagaagtggtacggggacctgcggggaaagcccttcgccatcgaagccgagaacagcatcctggacatcagcggcttcagcaagcagtacaactgtgccttcatctggcagaaggacggcgtgaagaagctgaacctgtacctgatcatcaactacttcaagggcggcaagctgcggttcaagaagatcaaacctgaagccttcgaagccaacagattctacaccgtgatcaacaaaaagagcggcgagatcgtgcccatggaggtgaacttcaacttcgacgaccccaacctgatcatcctgcctctggcctttggcaagagacagggcagagaattcatctggaacgacctgctgtccctggaaaccggcagcctgaagctggccaacggaagagtgatcgagaagacactgtacaacagaagaacccggcaggatgagcctgccctgttcgtggccctgaccttcgagcggcgggaggtcctggactcctccaatatcaaaccaatgaacctgatcggcgtggcaagaggcgaaaacatccccgccgtgatcgccctgaccgaccccgagggctgcccactgagccggtttaaggatagcctgggaaacccaacccacatcctgagaatcggcgagagctataaggagaagcagcggaccatccaggccaagaaggaggtggagcagcggagagccggcggctacagccggaagtacgccagcaaagccaagaatctggcagacgatatggtgagaaacaccgctagagatctgctgtactacgccgtgacccaggatgccatgctgatcttcgccaacctgagccggggcttcggccggcagggcaagcggaccttcatggccgagagacagtacacacggatggaggactggctgaccgccaagctggcctacgagggcctgagcaagacctacctgtccaagacactggcccagtacacctccaagacatgcagcaactgtgggtttaccatcaccagcgccgactacgacagggtgctggagaagctgaagaagacagcaacaggctggatgaccacaattaacggcaaggagctgaaggtggagggccagattacctactacaacagatacaagagacagaacgtagtcaaggacctgtccgtcgagctggatagactgagcgaagaatctgtgaacaacgacatctcctcctggacaaagggcagaagcggagaagctctgagcctcctgaagaaaagattctcccatagacccgtgcaggagaagttcgtgtgcctgaactgcggcttcgagacacacgcagccgagcaagccgccctgaacatcgccagatcctggctgttcctgcggagccaggagtacaagaaataccagacaaacaagacaaccggcaacaccgataagagagccttcgtcgagacctggcagtccttttaccggaagaagcttaaggaggtgtggaaacctgccgtgcggtctggcggatctggcggaggctccaccagccccaagaaaaagagaaaagtctaagctgccttctgcggggcttgccttctggccatgcccttcttctctcccttgcacctgtacctcttggtctttgaataaagcctgagtaggaaggctagcaaaaaaaaaaaaaaaaaaaaaaaaaaaaaaaaaaaaaaaaaaaaaaaaaaaaaaaaaaaaaaaaaaaaaaaaaaaaaaaagcccagccggctccccaacctctaccgaggagggcacctctgagtccgccacccccgagagcggccctggcacctccaccgagcccagcgagggcagcgcacccggcagccctgccggcagccccacctccacagaggagggaaccagcaccgagcccagcgaaggcagcgccccaggcaccagcaccgagcctagtgagcaggagattaaacggatcaacaagatcagaagaagacttgtgaaagacagcaacaccaagaaggccggcaagacaggccccatgaaaaccctgctggttagagtgatgacacccgatctgagagagcggctggaaaacctgagaaagaagcctgaaaatatcccccagcccatcagcaatacatctagagccaacctgaataagctgctgaccgattacaccgaaatgaagaaggcgatcctgcatgtgtactgggaagagttccagaaggaccctgtgggcctgatgagccgggtggcccagcctgccagcaagaagatcgatcagaacaagctgaaacctgagatggacgagaagggcaacctgaccaccgccggctttgcctgctctcagtgtggccagcccctgttcgtgtacaagctggagcaggtgtctgagaagggcaaggcttacaccaactacttcggacggtgcaatgtggccgagcacgaaaagctgatcctgctggcccagctgaagcccgagaaggatagcgacgaagccgtgacatatagcctgggaaagtttgggcagagggccctggatttctacagcattcatgtgaccaaggagtccacccaccccgtgaagcccctggcccagatcgccggaaacagatacgcctccggacctgtgggaaaggccctgagcgacgcatgtatgggcacaatcgcctccttcctgtctaagtaccaggacatcatcatcgaacaccagaaggtggtgaagggcaaccagaagagactggagagcctgcgggagctggccggcaaggaaaacctggaataccctagcgtgaccctgccacctcagcctcacaccaaggagggcgttgatgcctacaacgaagtgatcgcccgggtgcgaatgtgggtgaacctgaacctgtggcagaagctgaagctaagcagagatgatgccaagcctctgctgagactgaagggattcccttcctttcctctggtcgagagacaggccaacgaagtggactggtgggacatggtgtgtaacgtgaagaagctgatcaacgagaaaaaggaggatggcaaggtgttttggcagaatctggctggctacaagagacaggaagccctgagaccatacctgagcagcgaggaagatcggaagaagggaaagaaattcgctcggtaccagctgggcgacctgctgctgcacctggaaaagaagcacggcgaggactggggaaaggtgtacgacgaggcctgggagcggattgacaagaaagtggaaggcctgagcaagcacatcaagctggaagaggaacggagaagcgaggacgcccagagcaaggccgccctgaccgactggctgcgggctaaggccagcttcgtgatcgagggcctgaaggaggccgacaaggacgagttctgcagatgcgagctgaagctgcagaagtggtacggggacctgcggggaaagcccttcgccatcgaagccgagaacagcatcctggacatcagcggcttcagcaagcagtacaactgtgccttcatctggcagaaggacggcgtgaagaagctgaacctgtacctgatcatcaactacttcaagggcggcaagctgcggttcaagaagatcaaacctgaagccttcgaagccaacagattctacaccgtgatcaacaaaaagagcggcgagatcgtgcccatggaggtgaacttcaacttcgacgaccccaacctgatcatcctgcctctggcctttggcaagagacagggcagagaattcatctggaacgacctgctgtccctggaaaccggcagcctgaagctggccaacggaagagtgatcgagaagacactgtacaacagaagaacccggcaggatgagcctgccctgttcgtggccctgaccttcgagcggcgggaggtcctggactcctccaatatcaaaccaatgaacctgatcggcgtggcaagaggcgaaaacatccccgccgtgatcgccctgaccgaccccgagggctgcccactgagccggtttaaggatagcctgggaaacccaacccacatcctgagaatcggcgagagctataaggagaagcagcggaccatccaggccaagaaggaggtggagcagcggagagccggcggctacagccggaagtacgccagcaaagccaagaatctggcagacgatatggtgagaaacaccgctagagatctgctgtactacgccgtgacccaggatgccatgctgatcttcgccaacctgagccggggcttcggccggcagggcaagcggaccttcatggccgagagacagtacacacggatggaggactggctgaccgccaagctggcctacgagggcctgagcaagacctacctgtccaagacactggcccagtacacctccaagacatgcagcaactgtgggtttaccatcaccagcgccgactacgacagggtgctggagaagctgaagaagacagcaacaggctggatgaccacaattaacggcaaggagctgaaggtggagggccagattacctactacaacagatacaagagacagaacgtagtcaaggacctgtccgtcgagctggatagactgagcgaagaatctgtgaacaacgacatctcctcctggacaaagggcagaagcggagaagctctgagcctcctgaagaaaagattctcccatagacccgtgcaggagaagttcgtgtgcctgaactgcggcttcgagacacacgcagccgagcaagccgccctgaacatcgccagatcctggctgttcctgcggagccaggagtacaagaaataccagacaaacaagacaaccggcaacaccgataagagagccttcgtcgagacctggcagtccttttaccggaagaagcttaaggaggtgtggaaacctgccgtgcggtctggcggatctggcggaggctccaccagccccaagaaaaagagaaaagtctaagctgccttctgcggggcttgccttctggccatgcccttcttctctcccttgcacctgtacctcttggtctttgaataaagcctgagtaggaaggctagcaaaaaaaaaaaaaaaaaaaaaaaaaaaaaaaaaaaaaaaaaaaaaaaaaaaaaaaaaaaaaaaaaaaaaaaaaaaaaaaa

SEQ ID NO: 9072 - RNA, 8784 nt, synthetic construct
  source 1..8784: mol_type = other RNA
aggaaataagagagaaaagaagagtaagaagaaatataagagccaccatggcccctaagaagaagcgtaaagtgagccggatgaaccacgaccaggagttcgacccccctaaggtgtaccctcccgtccccgccgagaagagaaagcccatccgggtcctgagcctgttcgatggcatcgccaccggtctgctggtgctgaaggacctgggcatccaggtggataggtacattgcctccgaggtgtgcgaggactccatcaccgtgggaatggtgcgtcatcagggcaagatcatgtacgtgggcgacgtgcggagcgtgacacagaagcatatccaggagtggggccctttcgacctggtgatcggcggcagcccttgcaatgacctgagcatcgtgaacccagcccggaagggcctgtacgagggaaccggcagactgttcttcgagttttacagactgctgcacgacgcccggcctaaggaaggcgacgaccggcccttcttttggctgttcgagaatgtggtggccatgggagtcagcgacaagcgggatattagccggttcctggagagcaaccccgtgatgatcgatgccaaggaagtgagcgccgcccaccgggccagatacttctggggcaatctgcctggcatgaacagacccctggccagcaccgtgaacgacaagctggagctgcaggagtgcctggagcacggccggatcgccaagttcagcaaggtgagaaccatcaccacccgaagcaacagcatcaaacaaggcaaggaccagcactttcctgtgttcatgaacgagaaggaggacatcctgtggtgtaccgagatggagagagtgttcgggttcccagtccactacacagatgtcagcaacatgtctagactggccagacagagactgctgggaagaagctggtccgtccctgtgatcagacacctgttcgcccctctgaaggagtacttcgcctgcgtgagcagcggcaacagcaacgccaacagccggggccccagcttctctagcggcctggtgccactgtccctgagagggagccacatgggccccatggagatctacaaaaccgtgagcgcctggaagcggcagcctgtgcgcgtgctgagcctgtttcggaatatcgataaagtcctgaaaagcctgggattcctggagagcggctctggctccggcggtggcaccctgaagtacgtggaggatgtgacaaacgtggtcagacgggatgtggagaagtggggccccttcgatctggtgtacggcagcacccaacccctgggcagctcttgtgaccggtgccctggctggtacatgtttcagttccaccggatcctgcagtacgccctgccgagacaggagtcccagcggccattcttttggattttcatggacaacttgctgctgaccgaggatgaccaggaaactaccactcggttcctgcagaccgaagccgtgaccctgcaggacgtgagaggccgggactaccagaacgccatgcgggtgtggtccaacatccctggactgaaaagcaagcacgcacctctgacccctaaagaagaggagtacctgcaggcccaggtgcggagcagaagcaagctggacgcccctaaggtggatctgctggtgaagaattgcctcctgcccctgagagagtacttcaagtatttcagccagaatagtctgcccctgggaggcagcggcggcggcaacgtggaggtggtgaaggtgatgccccaggacctggtgaccttcaaggacgtggccatcgacttcagccaggaggagtggcagtggatgaaccccgcccagaagagactgtacagaagcatgatgctggagaactaccagagcctggtgagcctgggcctgtgcatcagcaagccctacgtgatcagcctgctggagcagggcagagagccctgggagatgaccagcgagatgaccagaggcggcccaagcagcggcgcccctcctcccagcggcggcaggcggcccaagcagcggcgcccctcctcccagcggcggcagcccagccggctccccaacctctaccgaggagggcacctctgagtccgccacccccgagagcggccctggcacctccaccgagcccagcgagggcagcgcacccggcagccctgccggcagccccacctccacagaggagggaaccagcaccgagcccagcgaaggcagcgccccaggcaccagcaccgagcctagtgagcaggagattaaacggatcaacaagatcagaagaagacttgtgaaagacagcaacaccaagaaggccggcaagacaggccccatgaaaaccctgctggttagagtgatgacacccgatctgagagagcggctggaaaacctgagaaagaagcctgaaaatatcccccagcccatcagcaatacatctagagccaacctgaataagctgctgaccgattacaccgaaatgaagaaggcgatcctgcatgtgtactgggaagagttccagaaggaccctgtgggcctgatgagccgggtggcccagcctgccagcaagaagatcgatcagaacaagctgaaacctgagatggacgagaagggcaacctgaccaccgccggctttgcctgctctcagtgtggccagcccctgttcgtgtacaagctggagcaggtgtctgagaagggcaaggcttacaccaactacttcggacggtgcaatgtggccgagcacgaaaagctgatcctgctggcccagctgaagcccgagaaggatagcgacgaagccgtgacatatagcctgggaaagtttgggcagagggccctggatttctacagcattcatgtgaccaaggagtccacccaccccgtgaagcccctggcccagatcgccggaaacagatacgcctccggacctgtgggaaaggccctgagcgacgcatgtatgggcacaatcgcctccttcctgtctaagtaccaggacatcatcatcgaacaccagaaggtggtgaagggcaaccagaagagactggagagcctgcgggagctggccggcaaggaaaacctggaataccctagcgtgaccctgccacctcagcctcacaccaaggagggcgttgatgcctacaacgaagtgatcgcccgggtgcgaatgtgggtgaacctgaacctgtggcagaagctgaagctaagcagagatgatgccaagcctctgctgagactgaagggattcccttcctttcctctggtcgagagacaggccaacgaagtggactggtgggacatggtgtgtaacgtgaagaagctgatcaacgagaaaaaggaggatggcaaggtgttttggcagaatctggctggctacaagagacaggaagccctgagaccatacctgagcagcgaggaagatcggaagaagggaaagaaattcgctcggtaccagctgggcgacctgctgctgcacctggaaaagaagcacggcgaggactggggaaaggtgtacgacgaggcctgggagcggattgacaagaaagtggaaggcctgagcaagcacatcaagctggaagaggaacggagaagcgaggacgcccagagcaaggccgccctgaccgactggctgcgggctaaggccagcttcgtgatcgagggcctgaaggaggccgacaaggacgagttctgcagatgcgagctgaagctgcagaagtggtacggggacctgcggggaaagcccttcgccatcgaagccgagaacagcatcctggacatcagcggcttcagcaagcagtacaactgtgccttcatctggcagaaggacggcgtgaagaagctgaacctgtacctgatcatcaactacttcaagggcggcaagctgcggttcaagaagatcaaacctgaagccttcgaagccaacagattctacaccgtgatcaacaaaaagagcggcgagatcgtgcccatggaggtgaacttcaacttcgacgaccccaacctgatcatcctgcctctggcctttggcaagagacagggcagagaattcatctggaacgacctgctgtccctggaaaccggcagcctgaagctggccaacggaagagtgatcgagaagacactgtacaacagaagaacccggcaggatgagcctgccctgttcgtggccctgaccttcgagcggcgggaggtcctggactcctccaatatcaaaccaatgaacctgatcggcgtggcaagaggcgaaaacatccccgccgtgatcgccctgaccgaccccgagggctgcccactgagccggtttaaggatagcctgggaaacccaacccacatcctgagaatcggcgagagctataaggagaagcagcggaccatccaggccaagaaggaggtggagcagcggagagccggcggctacagccggaagtacgccagcaaagccaagaatctggcagacgatatggtgagaaacaccgctagagatctgctgtactacgccgtgacccaggatgccatgctgatcttcgccaacctgagccggggcttcggccggcagggcaagcggaccttcatggccgagagacagtacacacggatggaggactggctgaccgccaagctggcctacgagggcctgagcaagacctacctgtccaagacactggcccagtacacctccaagacatgcagcaactgtgggtttaccatcaccagcgccgactacgacagggtgctggagaagctgaagaagacagcaacaggctggatgaccacaattaacggcaaggagctgaaggtggagggccagattacctactacaacagatacaagagacagaacgtagtcaaggacctgtccgtcgagctggatagactgagcgaagaatctgtgaacaacgacatctcctcctggacaaagggcagaagcggagaagctctgagcctcctgaagaaaagattctcccatagacccgtgcaggagaagttcgtgtgcctgaactgcggcttcgagacacacgcagccgagcaagccgccctgaacatcgccagatcctggctgttcctgcggagccaggagtacaagaaataccagacaaacaagacaaccggcaacaccgataagagagccttcgtcgagacctggcagtccttttaccggaagaagcttaaggaggtgtggaaacctgccgtgcggtctggcggatctggcggaggctccaccagccccaagaaaaagagaaaagtctaagctgccttctgcggggcttgccttctggccatgcccttcttctctcccttgcacctgtacctcttggtctttgaataaagcctgagtaggaaggctagcaaaaaaaaaaaaaaaaaaaaaaaaaaaaaaaaaaaaaaaaaaaaaaaaaaaaaaaaaaaaaaaaaaaaaaaaaaaaaaaagcccagccggctccccaacctctaccgaggagggcacctctgagtccgccacccccgagagcggccctggcacctccaccgagcccagcgagggcagcgcacccggcagccctgccggcagccccacctccacagaggagggaaccagcaccgagcccagcgaaggcagcgccccaggcaccagcaccgagcctagtgagcaggagattaaacggatcaacaagatcagaagaagacttgtgaaagacagcaacaccaagaaggccggcaagacaggccccatgaaaaccctgctggttagagtgatgacacccgatctgagagagcggctggaaaacctgagaaagaagcctgaaaatatcccccagcccatcagcaatacatctagagccaacctgaataagctgctgaccgattacaccgaaatgaagaaggcgatcctgcatgtgtactgggaagagttccagaaggaccctgtgggcctgatgagccgggtggcccagcctgccagcaagaagatcgatcagaacaagctgaaacctgagatggacgagaagggcaacctgaccaccgccggctttgcctgctctcagtgtggccagcccctgttcgtgtacaagctggagcaggtgtctgagaagggcaaggcttacaccaactacttcggacggtgcaatgtggccgagcacgaaaagctgatcctgctggcccagctgaagcccgagaaggatagcgacgaagccgtgacatatagcctgggaaagtttgggcagagggccctggatttctacagcattcatgtgaccaaggagtccacccaccccgtgaagcccctggcccagatcgccggaaacagatacgcctccggacctgtgggaaaggccctgagcgacgcatgtatgggcacaatcgcctccttcctgtctaagtaccaggacatcatcatcgaacaccagaaggtggtgaagggcaaccagaagagactggagagcctgcgggagctggccggcaaggaaaacctggaataccctagcgtgaccctgccacctcagcctcacaccaaggagggcgttgatgcctacaacgaagtgatcgcccgggtgcgaatgtgggtgaacctgaacctgtggcagaagctgaagctaagcagagatgatgccaagcctctgctgagactgaagggattcccttcctttcctctggtcgagagacaggccaacgaagtggactggtgggacatggtgtgtaacgtgaagaagctgatcaacgagaaaaaggaggatggcaaggtgttttggcagaatctggctggctacaagagacaggaagccctgagaccatacctgagcagcgaggaagatcggaagaagggaaagaaattcgctcggtaccagctgggcgacctgctgctgcacctggaaaagaagcacggcgaggactggggaaaggtgtacgacgaggcctgggagcggattgacaagaaagtggaaggcctgagcaagcacatcaagctggaagaggaacggagaagcgaggacgcccagagcaaggccgccctgaccgactggctgcgggctaaggccagcttcgtgatcgagggcctgaaggaggccgacaaggacgagttctgcagatgcgagctgaagctgcagaagtggtacggggacctgcggggaaagcccttcgccatcgaagccgagaacagcatcctggacatcagcggcttcagcaagcagtacaactgtgccttcatctggcagaaggacggcgtgaagaagctgaacctgtacctgatcatcaactacttcaagggcggcaagctgcggttcaagaagatcaaacctgaagccttcgaagccaacagattctacaccgtgatcaacaaaaagagcggcgagatcgtgcccatggaggtgaacttcaacttcgacgaccccaacctgatcatcctgcctctggcctttggcaagagacagggcagagaattcatctggaacgacctgctgtccctggaaaccggcagcctgaagctggccaacggaagagtgatcgagaagacactgtacaacagaagaacccggcaggatgagcctgccctgttcgtggccctgaccttcgagcggcgggaggtcctggactcctccaatatcaaaccaatgaacctgatcggcgtggcaagaggcgaaaacatccccgccgtgatcgccctgaccgaccccgagggctgcccactgagccggtttaaggatagcctgggaaacccaacccacatcctgagaatcggcgagagctataaggagaagcagcggaccatccaggccaagaaggaggtggagcagcggagagccggcggctacagccggaagtacgccagcaaagccaagaatctggcagacgatatggtgagaaacaccgctagagatctgctgtactacgccgtgacccaggatgccatgctgatcttcgccaacctgagccggggcttcggccggcagggcaagcggaccttcatggccgagagacagtacacacggatggaggactggctgaccgccaagctggcctacgagggcctgagcaagacctacctgtccaagacactggcccagtacacctccaagacatgcagcaactgtgggtttaccatcaccagcgccgactacgacagggtgctggagaagctgaagaagacagcaacaggctggatgaccacaattaacggcaaggagctgaaggtggagggccagattacctactacaacagatacaagagacagaacgtagtcaaggacctgtccgtcgagctggatagactgagcgaagaatctgtgaacaacgacatctcctcctggacaaagggcagaagcggagaagctctgagcctcctgaagaaaagattctcccatagacccgtgcaggagaagttcgtgtgcctgaactgcggcttcgagacacacgcagccgagcaagccgccctgaacatcgccagatcctggctgttcctgcggagccaggagtacaagaaataccagacaaacaagacaaccggcaacaccgataagagagccttcgtcgagacctggcagtccttttaccggaagaagcttaaggaggtgtggaaacctgccgtgcggtctggcggatctggcggaggctccaccagccccaagaaaaagagaaaagtctaagctgccttctgcggggcttgccttctggccatgcccttcttctctcccttgcacctgtacctcttggtctttgaataaagcctgagtaggaaggctagcaaaaaaaaaaaaaaaaaaaaaaaaaaaaaaaaaaaaaaaaaaaaaaaaaaaaaaaaaaaaaaaaaaaaaaaaaaaaaaaa

SEQ ID NO: 9073 - RNA, 8787 nt, synthetic construct
  source 1..8787: mol_type = other RNA
aggaaataagagagaaaagaagagtaagaagaaatataagagccaccatggcccctaagaagaagcgtaaagtgagccggatgaaccacgaccaggagttcgacccccctaaggtgtaccctcccgtccccgccgagaagagaaagcccatccgggtcctgagcctgttcgatggcatcgccaccggtctgctggtgctgaaggacctgggcatccaggtggataggtacattgcctccgaggtgtgcgaggactccatcaccgtgggaatggtgcgtcatcagggcaagatcatgtacgtgggcgacgtgcggagcgtgacacagaagcatatccaggagtggggccctttcgacctggtgatcggcggcagcccttgcaatgacctgagcatcgtgaacccagcccggaagggcctgtacgagggaaccggcagactgttcttcgagttttacagactgctgcacgacgcccggcctaaggaaggcgacgaccggcccttcttttggctgttcgagaatgtggtggccatgggagtcagcgacaagcgggatattagccggttcctggagagcaaccccgtgatgatcgatgccaaggaagtgagcgccgcccaccgggccagatacttctggggcaatctgcctggcatgaacagacccctggccagcaccgtgaacgacaagctggagctgcaggagtgcctggagcacggccggatcgccaagttcagcaaggtgagaaccatcaccacccgaagcaacagcatcaaacaaggcaaggaccagcactttcctgtgttcatgaacgagaaggaggacatcctgtggtgtaccgagatggagagagtgttcgggttcccagtccactacacagatgtcagcaacatgtctagactggccagacagagactgctgggaagaagctggtccgtccctgtgatcagacacctgttcgcccctctgaaggagtacttcgcctgcgtgagcagcggcaacagcaacgccaacagccggggccccagcttctctagcggcctggtgccactgtccctgagagggagccacatgggccccatggagatctacaaaaccgtgagcgcctggaagcggcagcctgtgcgcgtgctgagcctgtttcggaatatcgataaagtcctgaaaagcctgggattcctggagagcggctctggctccggcggtggcaccctgaagtacgtggaggatgtgacaaacgtggtcagacgggatgtggagaagtggggccccttcgatctggtgtacggcagcacccaacccctgggcagctcttgtgaccggtgccctggctggtacatgtttcagttccaccggatcctgcagtacgccctgccgagacaggagtcccagcggccattcttttggattttcatggacaacttgctgctgaccgaggatgaccaggaaactaccactcggttcctgcagaccgaagccgtgaccctgcaggacgtgagaggccgggactaccagaacgccatgcgggtgtggtccaacatccctggactgaaaagcaagcacgcacctctgacccctaaagaagaggagtacctgcaggcccaggtgcggagcagaagcaagctggacgcccctaaggtggatctgctggtgaagaattgcctcctgcccctgagagagtacttcaagtatttcagccagaatagtctgcccctgggaggcagcggcggcggcttccaggagagcgtggccttcgaggacgtggccgtgtacttcacccagaaccagtggggcagcctggaccccgcccagagggccctgtacagcgaggtgatgctggagaactacgccaacgtggccagcctggtggccttccccttccccaagcccgccctgatcagccacctggagaagggcgaggccccctggggccccgacccctgggacgccgagatccccagcggcatcaaccagggcggcggcccaagcagcggcgcccctcctcccagcggcggcaggcggcccaagcagcggcgcccctcctcccagcggcggcagcccagccggctccccaacctctaccgaggagggcacctctgagtccgccacccccgagagcggccctggcacctccaccgagcccagcgagggcagcgcacccggcagccctgccggcagccccacctccacagaggagggaaccagcaccgagcccagcgaaggcagcgccccaggcaccagcaccgagcctagtgagcaggagattaaacggatcaacaagatcagaagaagacttgtgaaagacagcaacaccaagaaggccggcaagacaggccccatgaaaaccctgctggttagagtgatgacacccgatctgagagagcggctggaaaacctgagaaagaagcctgaaaatatcccccagcccatcagcaatacatctagagccaacctgaataagctgctgaccgattacaccgaaatgaagaaggcgatcctgcatgtgtactgggaagagttccagaaggaccctgtgggcctgatgagccgggtggcccagcctgccagcaagaagatcgatcagaacaagctgaaacctgagatggacgagaagggcaacctgaccaccgccggctttgcctgctctcagtgtggccagcccctgttcgtgtacaagctggagcaggtgtctgagaagggcaaggcttacaccaactacttcggacggtgcaatgtggccgagcacgaaaagctgatcctgctggcccagctgaagcccgagaaggatagcgacgaagccgtgacatatagcctgggaaagtttgggcagagggccctggatttctacagcattcatgtgaccaaggagtccacccaccccgtgaagcccctggcccagatcgccggaaacagatacgcctccggacctgtgggaaaggccctgagcgacgcatgtatgggcacaatcgcctccttcctgtctaagtaccaggacatcatcatcgaacaccagaaggtggtgaagggcaaccagaagagactggagagcctgcgggagctggccggcaaggaaaacctggaataccctagcgtgaccctgccacctcagcctcacaccaaggagggcgttgatgcctacaacgaagtgatcgcccgggtgcgaatgtgggtgaacctgaacctgtggcagaagctgaagctaagcagagatgatgccaagcctctgctgagactgaagggattcccttcctttcctctggtcgagagacaggccaacgaagtggactggtgggacatggtgtgtaacgtgaagaagctgatcaacgagaaaaaggaggatggcaaggtgttttggcagaatctggctggctacaagagacaggaagccctgagaccatacctgagcagcgaggaagatcggaagaagggaaagaaattcgctcggtaccagctgggcgacctgctgctgcacctggaaaagaagcacggcgaggactggggaaaggtgtacgacgaggcctgggagcggattgacaagaaagtggaaggcctgagcaagcacatcaagctggaagaggaacggagaagcgaggacgcccagagcaaggccgccctgaccgactggctgcgggctaaggccagcttcgtgatcgagggcctgaaggaggccgacaaggacgagttctgcagatgcgagctgaagctgcagaagtggtacggggacctgcggggaaagcccttcgccatcgaagccgagaacagcatcctggacatcagcggcttcagcaagcagtacaactgtgccttcatctggcagaaggacggcgtgaagaagctgaacctgtacctgatcatcaactacttcaagggcggcaagctgcggttcaagaagatcaaacctgaagccttcgaagccaacagattctacaccgtgatcaacaaaaagagcggcgagatcgtgcccatggaggtgaacttcaacttcgacgaccccaacctgatcatcctgcctctggcctttggcaagagacagggcagagaattcatctggaacgacctgctgtccctggaaaccggcagcctgaagctggccaacggaagagtgatcgagaagacactgtacaacagaagaacccggcaggatgagcctgccctgttcgtggccctgaccttcgagcggcgggaggtcctggactcctccaatatcaaaccaatgaacctgatcggcgtggcaagaggcgaaaacatccccgccgtgatcgccctgaccgaccccgagggctgcccactgagccggtttaaggatagcctgggaaacccaacccacatcctgagaatcggcgagagctataaggagaagcagcggaccatccaggccaagaaggaggtggagcagcggagagccggcggctacagccggaagtacgccagcaaagccaagaatctggcagacgatatggtgagaaacaccgctagagatctgctgtactacgccgtgacccaggatgccatgctgatcttcgccaacctgagccggggcttcggccggcagggcaagcggaccttcatggccgagagacagtacacacggatggaggactggctgaccgccaagctggcctacgagggcctgagcaagacctacctgtccaagacactggcccagtacacctccaagacatgcagcaactgtgggtttaccatcaccagcgccgactacgacagggtgctggagaagctgaagaagacagcaacaggctggatgaccacaattaacggcaaggagctgaaggtggagggccagattacctactacaacagatacaagagacagaacgtagtcaaggacctgtccgtcgagctggatagactgagcgaagaatctgtgaacaacgacatctcctcctggacaaagggcagaagcggagaagctctgagcctcctgaagaaaagattctcccatagacccgtgcaggagaagttcgtgtgcctgaactgcggcttcgagacacacgcagccgagcaagccgccctgaacatcgccagatcctggctgttcctgcggagccaggagtacaagaaataccagacaaacaagacaaccggcaacaccgataagagagccttcgtcgagacctggcagtccttttaccggaagaagcttaaggaggtgtggaaacctgccgtgcggtctggcggatctggcggaggctccaccagccccaagaaaaagagaaaagtctaagctgccttctgcggggcttgccttctggccatgcccttcttctctcccttgcacctgtacctcttggtctttgaataaagcctgagtaggaaggctagcaaaaaaaaaaaaaaaaaaaaaaaaaaaaaaaaaaaaaaaaaaaaaaaaaaaaaaaaaaaaaaaaaaaaaaaaaaaaaaaagcccagccggctccccaacctctaccgaggagggcacctctgagtccgccacccccgagagcggccctggcacctccaccgagcccagcgagggcagcgcacccggcagccctgccggcagccccacctccacagaggagggaaccagcaccgagcccagcgaaggcagcgccccaggcaccagcaccgagcctagtgagcaggagattaaacggatcaacaagatcagaagaagacttgtgaaagacagcaacaccaagaaggccggcaagacaggccccatgaaaaccctgctggttagagtgatgacacccgatctgagagagcggctggaaaacctgagaaagaagcctgaaaatatcccccagcccatcagcaatacatctagagccaacctgaataagctgctgaccgattacaccgaaatgaagaaggcgatcctgcatgtgtactgggaagagttccagaaggaccctgtgggcctgatgagccgggtggcccagcctgccagcaagaagatcgatcagaacaagctgaaacctgagatggacgagaagggcaacctgaccaccgccggctttgcctgctctcagtgtggccagcccctgttcgtgtacaagctggagcaggtgtctgagaagggcaaggcttacaccaactacttcggacggtgcaatgtggccgagcacgaaaagctgatcctgctggcccagctgaagcccgagaaggatagcgacgaagccgtgacatatagcctgggaaagtttgggcagagggccctggatttctacagcattcatgtgaccaaggagtccacccaccccgtgaagcccctggcccagatcgccggaaacagatacgcctccggacctgtgggaaaggccctgagcgacgcatgtatgggcacaatcgcctccttcctgtctaagtaccaggacatcatcatcgaacaccagaaggtggtgaagggcaaccagaagagactggagagcctgcgggagctggccggcaaggaaaacctggaataccctagcgtgaccctgccacctcagcctcacaccaaggagggcgttgatgcctacaacgaagtgatcgcccgggtgcgaatgtgggtgaacctgaacctgtggcagaagctgaagctaagcagagatgatgccaagcctctgctgagactgaagggattcccttcctttcctctggtcgagagacaggccaacgaagtggactggtgggacatggtgtgtaacgtgaagaagctgatcaacgagaaaaaggaggatggcaaggtgttttggcagaatctggctggctacaagagacaggaagccctgagaccatacctgagcagcgaggaagatcggaagaagggaaagaaattcgctcggtaccagctgggcgacctgctgctgcacctggaaaagaagcacggcgaggactggggaaaggtgtacgacgaggcctgggagcggattgacaagaaagtggaaggcctgagcaagcacatcaagctggaagaggaacggagaagcgaggacgcccagagcaaggccgccctgaccgactggctgcgggctaaggccagcttcgtgatcgagggcctgaaggaggccgacaaggacgagttctgcagatgcgagctgaagctgcagaagtggtacggggacctgcggggaaagcccttcgccatcgaagccgagaacagcatcctggacatcagcggcttcagcaagcagtacaactgtgccttcatctggcagaaggacggcgtgaagaagctgaacctgtacctgatcatcaactacttcaagggcggcaagctgcggttcaagaagatcaaacctgaagccttcgaagccaacagattctacaccgtgatcaacaaaaagagcggcgagatcgtgcccatggaggtgaacttcaacttcgacgaccccaacctgatcatcctgcctctggcctttggcaagagacagggcagagaattcatctggaacgacctgctgtccctggaaaccggcagcctgaagctggccaacggaagagtgatcgagaagacactgtacaacagaagaacccggcaggatgagcctgccctgttcgtggccctgaccttcgagcggcgggaggtcctggactcctccaatatcaaaccaatgaacctgatcggcgtggcaagaggcgaaaacatccccgccgtgatcgccctgaccgaccccgagggctgcccactgagccggtttaaggatagcctgggaaacccaacccacatcctgagaatcggcgagagctataaggagaagcagcggaccatccaggccaagaaggaggtggagcagcggagagccggcggctacagccggaagtacgccagcaaagccaagaatctggcagacgatatggtgagaaacaccgctagagatctgctgtactacgccgtgacccaggatgccatgctgatcttcgccaacctgagccggggcttcggccggcagggcaagcggaccttcatggccgagagacagtacacacggatggaggactggctgaccgccaagctggcctacgagggcctgagcaagacctacctgtccaagacactggcccagtacacctccaagacatgcagcaactgtgggtttaccatcaccagcgccgactacgacagggtgctggagaagctgaagaagacagcaacaggctggatgaccacaattaacggcaaggagctgaaggtggagggccagattacctactacaacagatacaagagacagaacgtagtcaaggacctgtccgtcgagctggatagactgagcgaagaatctgtgaacaacgacatctcctcctggacaaagggcagaagcggagaagctctgagcctcctgaagaaaagattctcccatagacccgtgcaggagaagttcgtgtgcctgaactgcggcttcgagacacacgcagccgagcaagccgccctgaacatcgccagatcctggctgttcctgcggagccaggagtacaagaaataccagacaaacaagacaaccggcaacaccgataagagagccttcgtcgagacctggcagtccttttaccggaagaagcttaaggaggtgtggaaacctgccgtgcggtctggcggatctggcggaggctccaccagccccaagaaaaagagaaaagtctaagctgccttctgcggggcttgccttctggccatgcccttcttctctcccttgcacctgtacctcttggtctttgaataaagcctgagtaggaaggctagcaaaaaaaaaaaaaaaaaaaaaaaaaaaaaaaaaaaaaaaaaaaaaaaaaaaaaaaaaaaaaaaaaaaaaaaaaaaaaaaa

SEQ ID NO: 9074 - RNA, 8787 nt, synthetic construct
  source 1..8787: mol_type = other RNA
aggaaataagagagaaaagaagagtaagaagaaatataagagccaccatggcccctaagaagaagcgtaaagtgagccggatgaaccacgaccaggagttcgacccccctaaggtgtaccctcccgtccccgccgagaagagaaagcccatccgggtcctgagcctgttcgatggcatcgccaccggtctgctggtgctgaaggacctgggcatccaggtggataggtacattgcctccgaggtgtgcgaggactccatcaccgtgggaatggtgcgtcatcagggcaagatcatgtacgtgggcgacgtgcggagcgtgacacagaagcatatccaggagtggggccctttcgacctggtgatcggcggcagcccttgcaatgacctgagcatcgtgaacccagcccggaagggcctgtacgagggaaccggcagactgttcttcgagttttacagactgctgcacgacgcccggcctaaggaaggcgacgaccggcccttcttttggctgttcgagaatgtggtggccatgggagtcagcgacaagcgggatattagccggttcctggagagcaaccccgtgatgatcgatgccaaggaagtgagcgccgcccaccgggccagatacttctggggcaatctgcctggcatgaacagacccctggccagcaccgtgaacgacaagctggagctgcaggagtgcctggagcacggccggatcgccaagttcagcaaggtgagaaccatcaccacccgaagcaacagcatcaaacaaggcaaggaccagcactttcctgtgttcatgaacgagaaggaggacatcctgtggtgtaccgagatggagagagtgttcgggttcccagtccactacacagatgtcagcaacatgtctagactggccagacagagactgctgggaagaagctggtccgtccctgtgatcagacacctgttcgcccctctgaaggagtacttcgcctgcgtgagcagcggcaacagcaacgccaacagccggggccccagcttctctagcggcctggtgccactgtccctgagagggagccacatgggccccatggagatctacaaaaccgtgagcgcctggaagcggcagcctgtgcgcgtgctgagcctgtttcggaatatcgataaagtcctgaaaagcctgggattcctggagagcggctctggctccggcggtggcaccctgaagtacgtggaggatgtgacaaacgtggtcagacgggatgtggagaagtggggccccttcgatctggtgtacggcagcacccaacccctgggcagctcttgtgaccggtgccctggctggtacatgtttcagttccaccggatcctgcagtacgccctgccgagacaggagtcccagcggccattcttttggattttcatggacaacttgctgctgaccgaggatgaccaggaaactaccactcggttcctgcagaccgaagccgtgaccctgcaggacgtgagaggccgggactaccagaacgccatgcgggtgtggtccaacatccctggactgaaaagcaagcacgcacctctgacccctaaagaagaggagtacctgcaggcccaggtgcggagcagaagcaagctggacgcccctaaggtggatctgctggtgaagaattgcctcctgcccctgagagagtacttcaagtatttcagccagaatagtctgcccctgggaggcagcggcggcggcccccagaagagcgtgaccttcgaggacgtggccgtgtacttcacccaggccgagtgggacggcctgagccccgcccagaggaccctgtacagggacgtgatgctggagaactacggcaacgtggccagcctgggcttccccctgctgaagcccgccgtgatcagccagctggagggcggcggcgagctgggcggccccagccccctggccgccggcaccggcctgaggggcctgtggaccgtgggcggcccaagcagcggcgcccctcctcccagcggcggcaggcggcccaagcagcggcgcccctcctcccagcggcggcagcccagccggctccccaacctctaccgaggagggcacctctgagtccgccacccccgagagcggccctggcacctccaccgagcccagcgagggcagcgcacccggcagccctgccggcagccccacctccacagaggagggaaccagcaccgagcccagcgaaggcagcgccccaggcaccagcaccgagcctagtgagcaggagattaaacggatcaacaagatcagaagaagacttgtgaaagacagcaacaccaagaaggccggcaagacaggccccatgaaaaccctgctggttagagtgatgacacccgatctgagagagcggctggaaaacctgagaaagaagcctgaaaatatcccccagcccatcagcaatacatctagagccaacctgaataagctgctgaccgattacaccgaaatgaagaaggcgatcctgcatgtgtactgggaagagttccagaaggaccctgtgggcctgatgagccgggtggcccagcctgccagcaagaagatcgatcagaacaagctgaaacctgagatggacgagaagggcaacctgaccaccgccggctttgcctgctctcagtgtggccagcccctgttcgtgtacaagctggagcaggtgtctgagaagggcaaggcttacaccaactacttcggacggtgcaatgtggccgagcacgaaaagctgatcctgctggcccagctgaagcccgagaaggatagcgacgaagccgtgacatatagcctgggaaagtttgggcagagggccctggatttctacagcattcatgtgaccaaggagtccacccaccccgtgaagcccctggcccagatcgccggaaacagatacgcctccggacctgtgggaaaggccctgagcgacgcatgtatgggcacaatcgcctccttcctgtctaagtaccaggacatcatcatcgaacaccagaaggtggtgaagggcaaccagaagagactggagagcctgcgggagctggccggcaaggaaaacctggaataccctagcgtgaccctgccacctcagcctcacaccaaggagggcgttgatgcctacaacgaagtgatcgcccgggtgcgaatgtgggtgaacctgaacctgtggcagaagctgaagctaagcagagatgatgccaagcctctgctgagactgaagggattcccttcctttcctctggtcgagagacaggccaacgaagtggactggtgggacatggtgtgtaacgtgaagaagctgatcaacgagaaaaaggaggatggcaaggtgttttggcagaatctggctggctacaagagacaggaagccctgagaccatacctgagcagcgaggaagatcggaagaagggaaagaaattcgctcggtaccagctgggcgacctgctgctgcacctggaaaagaagcacggcgaggactggggaaaggtgtacgacgaggcctgggagcggattgacaagaaagtggaaggcctgagcaagcacatcaagctggaagaggaacggagaagcgaggacgcccagagcaaggccgccctgaccgactggctgcgggctaaggccagcttcgtgatcgagggcctgaaggaggccgacaaggacgagttctgcagatgcgagctgaagctgcagaagtggtacggggacctgcggggaaagcccttcgccatcgaagccgagaacagcatcctggacatcagcggcttcagcaagcagtacaactgtgccttcatctggcagaaggacggcgtgaagaagctgaacctgtacctgatcatcaactacttcaagggcggcaagctgcggttcaagaagatcaaacctgaagccttcgaagccaacagattctacaccgtgatcaacaaaaagagcggcgagatcgtgcccatggaggtgaacttcaacttcgacgaccccaacctgatcatcctgcctctggcctttggcaagagacagggcagagaattcatctggaacgacctgctgtccctggaaaccggcagcctgaagctggccaacggaagagtgatcgagaagacactgtacaacagaagaacccggcaggatgagcctgccctgttcgtggccctgaccttcgagcggcgggaggtcctggactcctccaatatcaaaccaatgaacctgatcggcgtggcaagaggcgaaaacatccccgccgtgatcgccctgaccgaccccgagggctgcccactgagccggtttaaggatagcctgggaaacccaacccacatcctgagaatcggcgagagctataaggagaagcagcggaccatccaggccaagaaggaggtggagcagcggagagccggcggctacagccggaagtacgccagcaaagccaagaatctggcagacgatatggtgagaaacaccgctagagatctgctgtactacgccgtgacccaggatgccatgctgatcttcgccaacctgagccggggcttcggccggcagggcaagcggaccttcatggccgagagacagtacacacggatggaggactggctgaccgccaagctggcctacgagggcctgagcaagacctacctgtccaagacactggcccagtacacctccaagacatgcagcaactgtgggtttaccatcaccagcgccgactacgacagggtgctggagaagctgaagaagacagcaacaggctggatgaccacaattaacggcaaggagctgaaggtggagggccagattacctactacaacagatacaagagacagaacgtagtcaaggacctgtccgtcgagctggatagactgagcgaagaatctgtgaacaacgacatctcctcctggacaaagggcagaagcggagaagctctgagcctcctgaagaaaagattctcccatagacccgtgcaggagaagttcgtgtgcctgaactgcggcttcgagacacacgcagccgagcaagccgccctgaacatcgccagatcctggctgttcctgcggagccaggagtacaagaaataccagacaaacaagacaaccggcaacaccgataagagagccttcgtcgagacctggcagtccttttaccggaagaagcttaaggaggtgtggaaacctgccgtgcggtctggcggatctggcggaggctccaccagccccaagaaaaagagaaaagtctaagctgccttctgcggggcttgccttctggccatgcccttcttctctcccttgcacctgtacctcttggtctttgaataaagcctgagtaggaaggctagcaaaaaaaaaaaaaaaaaaaaaaaaaaaaaaaaaaaaaaaaaaaaaaaaaaaaaaaaaaaaaaaaaaaaaaaaaaaaaaaagcccagccggctccccaacctctaccgaggagggcacctctgagtccgccacccccgagagcggccctggcacctccaccgagcccagcgagggcagcgcacccggcagccctgccggcagccccacctccacagaggagggaaccagcaccgagcccagcgaaggcagcgccccaggcaccagcaccgagcctagtgagcaggagattaaacggatcaacaagatcagaagaagacttgtgaaagacagcaacaccaagaaggccggcaagacaggccccatgaaaaccctgctggttagagtgatgacacccgatctgagagagcggctggaaaacctgagaaagaagcctgaaaatatcccccagcccatcagcaatacatctagagccaacctgaataagctgctgaccgattacaccgaaatgaagaaggcgatcctgcatgtgtactgggaagagttccagaaggaccctgtgggcctgatgagccgggtggcccagcctgccagcaagaagatcgatcagaacaagctgaaacctgagatggacgagaagggcaacctgaccaccgccggctttgcctgctctcagtgtggccagcccctgttcgtgtacaagctggagcaggtgtctgagaagggcaaggcttacaccaactacttcggacggtgcaatgtggccgagcacgaaaagctgatcctgctggcccagctgaagcccgagaaggatagcgacgaagccgtgacatatagcctgggaaagtttgggcagagggccctggatttctacagcattcatgtgaccaaggagtccacccaccccgtgaagcccctggcccagatcgccggaaacagatacgcctccggacctgtgggaaaggccctgagcgacgcatgtatgggcacaatcgcctccttcctgtctaagtaccaggacatcatcatcgaacaccagaaggtggtgaagggcaaccagaagagactggagagcctgcgggagctggccggcaaggaaaacctggaataccctagcgtgaccctgccacctcagcctcacaccaaggagggcgttgatgcctacaacgaagtgatcgcccgggtgcgaatgtgggtgaacctgaacctgtggcagaagctgaagctaagcagagatgatgccaagcctctgctgagactgaagggattcccttcctttcctctggtcgagagacaggccaacgaagtggactggtgggacatggtgtgtaacgtgaagaagctgatcaacgagaaaaaggaggatggcaaggtgttttggcagaatctggctggctacaagagacaggaagccctgagaccatacctgagcagcgaggaagatcggaagaagggaaagaaattcgctcggtaccagctgggcgacctgctgctgcacctggaaaagaagcacggcgaggactggggaaaggtgtacgacgaggcctgggagcggattgacaagaaagtggaaggcctgagcaagcacatcaagctggaagaggaacggagaagcgaggacgcccagagcaaggccgccctgaccgactggctgcgggctaaggccagcttcgtgatcgagggcctgaaggaggccgacaaggacgagttctgcagatgcgagctgaagctgcagaagtggtacggggacctgcggggaaagcccttcgccatcgaagccgagaacagcatcctggacatcagcggcttcagcaagcagtacaactgtgccttcatctggcagaaggacggcgtgaagaagctgaacctgtacctgatcatcaactacttcaagggcggcaagctgcggttcaagaagatcaaacctgaagccttcgaagccaacagattctacaccgtgatcaacaaaaagagcggcgagatcgtgcccatggaggtgaacttcaacttcgacgaccccaacctgatcatcctgcctctggcctttggcaagagacagggcagagaattcatctggaacgacctgctgtccctggaaaccggcagcctgaagctggccaacggaagagtgatcgagaagacactgtacaacagaagaacccggcaggatgagcctgccctgttcgtggccctgaccttcgagcggcgggaggtcctggactcctccaatatcaaaccaatgaacctgatcggcgtggcaagaggcgaaaacatccccgccgtgatcgccctgaccgaccccgagggctgcccactgagccggtttaaggatagcctgggaaacccaacccacatcctgagaatcggcgagagctataaggagaagcagcggaccatccaggccaagaaggaggtggagcagcggagagccggcggctacagccggaagtacgccagcaaagccaagaatctggcagacgatatggtgagaaacaccgctagagatctgctgtactacgccgtgacccaggatgccatgctgatcttcgccaacctgagccggggcttcggccggcagggcaagcggaccttcatggccgagagacagtacacacggatggaggactggctgaccgccaagctggcctacgagggcctgagcaagacctacctgtccaagacactggcccagtacacctccaagacatgcagcaactgtgggtttaccatcaccagcgccgactacgacagggtgctggagaagctgaagaagacagcaacaggctggatgaccacaattaacggcaaggagctgaaggtggagggccagattacctactacaacagatacaagagacagaacgtagtcaaggacctgtccgtcgagctggatagactgagcgaagaatctgtgaacaacgacatctcctcctggacaaagggcagaagcggagaagctctgagcctcctgaagaaaagattctcccatagacccgtgcaggagaagttcgtgtgcctgaactgcggcttcgagacacacgcagccgagcaagccgccctgaacatcgccagatcctggctgttcctgcggagccaggagtacaagaaataccagacaaacaagacaaccggcaacaccgataagagagccttcgtcgagacctggcagtccttttaccggaagaagcttaaggaggtgtggaaacctgccgtgcggtctggcggatctggcggaggctccaccagccccaagaaaaagagaaaagtctaagctgccttctgcggggcttgccttctggccatgcccttcttctctcccttgcacctgtacctcttggtctttgaataaagcctgagtaggaaggctagcaaaaaaaaaaaaaaaaaaaaaaaaaaaaaaaaaaaaaaaaaaaaaaaaaaaaaaaaaaaaaaaaaaaaaaaaaaaaaaaa

SEQ ID NO: 9075 - RNA, 8787 nt, synthetic construct
  source 1..8787: mol_type = other RNA
aggaaataagagagaaaagaagagtaagaagaaatataagagccaccatggcccctaagaagaagcgtaaagtgagccggatgaaccacgaccaggagttcgacccccctaaggtgtaccctcccgtccccgccgagaagagaaagcccatccgggtcctgagcctgttcgatggcatcgccaccggtctgctggtgctgaaggacctgggcatccaggtggataggtacattgcctccgaggtgtgcgaggactccatcaccgtgggaatggtgcgtcatcagggcaagatcatgtacgtgggcgacgtgcggagcgtgacacagaagcatatccaggagtggggccctttcgacctggtgatcggcggcagcccttgcaatgacctgagcatcgtgaacccagcccggaagggcctgtacgagggaaccggcagactgttcttcgagttttacagactgctgcacgacgcccggcctaaggaaggcgacgaccggcccttcttttggctgttcgagaatgtggtggccatgggagtcagcgacaagcgggatattagccggttcctggagagcaaccccgtgatgatcgatgccaaggaagtgagcgccgcccaccgggccagatacttctggggcaatctgcctggcatgaacagacccctggccagcaccgtgaacgacaagctggagctgcaggagtgcctggagcacggccggatcgccaagttcagcaaggtgagaaccatcaccacccgaagcaacagcatcaaacaaggcaaggaccagcactttcctgtgttcatgaacgagaaggaggacatcctgtggtgtaccgagatggagagagtgttcgggttcccagtccactacacagatgtcagcaacatgtctagactggccagacagagactgctgggaagaagctggtccgtccctgtgatcagacacctgttcgcccctctgaaggagtacttcgcctgcgtgagcagcggcaacagcaacgccaacagccggggccccagcttctctagcggcctggtgccactgtccctgagagggagccacatgggccccatggagatctacaaaaccgtgagcgcctggaagcggcagcctgtgcgcgtgctgagcctgtttcggaatatcgataaagtcctgaaaagcctgggattcctggagagcggctctggctccggcggtggcaccctgaagtacgtggaggatgtgacaaacgtggtcagacgggatgtggagaagtggggccccttcgatctggtgtacggcagcacccaacccctgggcagctcttgtgaccggtgccctggctggtacatgtttcagttccaccggatcctgcagtacgccctgccgagacaggagtcccagcggccattcttttggattttcatggacaacttgctgctgaccgaggatgaccaggaaactaccactcggttcctgcagaccgaagccgtgaccctgcaggacgtgagaggccgggactaccagaacgccatgcgggtgtggtccaacatccctggactgaaaagcaagcacgcacctctgacccctaaagaagaggagtacctgcaggcccaggtgcggagcagaagcaagctggacgcccctaaggtggatctgctggtgaagaattgcctcctgcccctgagagagtacttcaagtatttcagccagaatagtctgcccctgggaggcagcggcggcggcatggccttcgaggacgtggccgtgtacttcagccaggaggagtgggtgttcctggacgccgcccagagggccctgtacaggcacgtgatgctggagaacttcgccctggtggacagcatcggcctgagcatcagcaggcccagggtgatcatccagctgcagaggggcgaggagccctgggtgagcaacaggaccaacaccggccccggcaggggcaccaggaggaggcccagcctgggcagcggcggcccaagcagcggcgcccctcctcccagcggcggcaggcggcccaagcagcggcgcccctcctcccagcggcggcagcccagccggctccccaacctctaccgaggagggcacctctgagtccgccacccccgagagcggccctggcacctccaccgagcccagcgagggcagcgcacccggcagccctgccggcagccccacctccacagaggagggaaccagcaccgagcccagcgaaggcagcgccccaggcaccagcaccgagcctagtgagcaggagattaaacggatcaacaagatcagaagaagacttgtgaaagacagcaacaccaagaaggccggcaagacaggccccatgaaaaccctgctggttagagtgatgacacccgatctgagagagcggctggaaaacctgagaaagaagcctgaaaatatcccccagcccatcagcaatacatctagagccaacctgaataagctgctgaccgattacaccgaaatgaagaaggcgatcctgcatgtgtactgggaagagttccagaaggaccctgtgggcctgatgagccgggtggcccagcctgccagcaagaagatcgatcagaacaagctgaaacctgagatggacgagaagggcaacctgaccaccgccggctttgcctgctctcagtgtggccagcccctgttcgtgtacaagctggagcaggtgtctgagaagggcaaggcttacaccaactacttcggacggtgcaatgtggccgagcacgaaaagctgatcctgctggcccagctgaagcccgagaaggatagcgacgaagccgtgacatatagcctgggaaagtttgggcagagggccctggatttctacagcattcatgtgaccaaggagtccacccaccccgtgaagcccctggcccagatcgccggaaacagatacgcctccggacctgtgggaaaggccctgagcgacgcatgtatgggcacaatcgcctccttcctgtctaagtaccaggacatcatcatcgaacaccagaaggtggtgaagggcaaccagaagagactggagagcctgcgggagctggccggcaaggaaaacctggaataccctagcgtgaccctgccacctcagcctcacaccaaggagggcgttgatgcctacaacgaagtgatcgcccgggtgcgaatgtgggtgaacctgaacctgtggcagaagctgaagctaagcagagatgatgccaagcctctgctgagactgaagggattcccttcctttcctctggtcgagagacaggccaacgaagtggactggtgggacatggtgtgtaacgtgaagaagctgatcaacgagaaaaaggaggatggcaaggtgttttggcagaatctggctggctacaagagacaggaagccctgagaccatacctgagcagcgaggaagatcggaagaagggaaagaaattcgctcggtaccagctgggcgacctgctgctgcacctggaaaagaagcacggcgaggactggggaaaggtgtacgacgaggcctgggagcggattgacaagaaagtggaaggcctgagcaagcacatcaagctggaagaggaacggagaagcgaggacgcccagagcaaggccgccctgaccgactggctgcgggctaaggccagcttcgtgatcgagggcctgaaggaggccgacaaggacgagttctgcagatgcgagctgaagctgcagaagtggtacggggacctgcggggaaagcccttcgccatcgaagccgagaacagcatcctggacatcagcggcttcagcaagcagtacaactgtgccttcatctggcagaaggacggcgtgaagaagctgaacctgtacctgatcatcaactacttcaagggcggcaagctgcggttcaagaagatcaaacctgaagccttcgaagccaacagattctacaccgtgatcaacaaaaagagcggcgagatcgtgcccatggaggtgaacttcaacttcgacgaccccaacctgatcatcctgcctctggcctttggcaagagacagggcagagaattcatctggaacgacctgctgtccctggaaaccggcagcctgaagctggccaacggaagagtgatcgagaagacactgtacaacagaagaacccggcaggatgagcctgccctgttcgtggccctgaccttcgagcggcgggaggtcctggactcctccaatatcaaaccaatgaacctgatcggcgtggcaagaggcgaaaacatccccgccgtgatcgccctgaccgaccccgagggctgcccactgagccggtttaaggatagcctgggaaacccaacccacatcctgagaatcggcgagagctataaggagaagcagcggaccatccaggccaagaaggaggtggagcagcggagagccggcggctacagccggaagtacgccagcaaagccaagaatctggcagacgatatggtgagaaacaccgctagagatctgctgtactacgccgtgacccaggatgccatgctgatcttcgccaacctgagccggggcttcggccggcagggcaagcggaccttcatggccgagagacagtacacacggatggaggactggctgaccgccaagctggcctacgagggcctgagcaagacctacctgtccaagacactggcccagtacacctccaagacatgcagcaactgtgggtttaccatcaccagcgccgactacgacagggtgctggagaagctgaagaagacagcaacaggctggatgaccacaattaacggcaaggagctgaaggtggagggccagattacctactacaacagatacaagagacagaacgtagtcaaggacctgtccgtcgagctggatagactgagcgaagaatctgtgaacaacgacatctcctcctggacaaagggcagaagcggagaagctctgagcctcctgaagaaaagattctcccatagacccgtgcaggagaagttcgtgtgcctgaactgcggcttcgagacacacgcagccgagcaagccgccctgaacatcgccagatcctggctgttcctgcggagccaggagtacaagaaataccagacaaacaagacaaccggcaacaccgataagagagccttcgtcgagacctggcagtccttttaccggaagaagcttaaggaggtgtggaaacctgccgtgcggtctggcggatctggcggaggctccaccagccccaagaaaaagagaaaagtctaagctgccttctgcggggcttgccttctggccatgcccttcttctctcccttgcacctgtacctcttggtctttgaataaagcctgagtaggaaggctagcaaaaaaaaaaaaaaaaaaaaaaaaaaaaaaaaaaaaaaaaaaaaaaaaaaaaaaaaaaaaaaaaaaaaaaaaaaaaaaaagcccagccggctccccaacctctaccgaggagggcacctctgagtccgccacccccgagagcggccctggcacctccaccgagcccagcgagggcagcgcacccggcagccctgccggcagccccacctccacagaggagggaaccagcaccgagcccagcgaaggcagcgccccaggcaccagcaccgagcctagtgagcaggagattaaacggatcaacaagatcagaagaagacttgtgaaagacagcaacaccaagaaggccggcaagacaggccccatgaaaaccctgctggttagagtgatgacacccgatctgagagagcggctggaaaacctgagaaagaagcctgaaaatatcccccagcccatcagcaatacatctagagccaacctgaataagctgctgaccgattacaccgaaatgaagaaggcgatcctgcatgtgtactgggaagagttccagaaggaccctgtgggcctgatgagccgggtggcccagcctgccagcaagaagatcgatcagaacaagctgaaacctgagatggacgagaagggcaacctgaccaccgccggctttgcctgctctcagtgtggccagcccctgttcgtgtacaagctggagcaggtgtctgagaagggcaaggcttacaccaactacttcggacggtgcaatgtggccgagcacgaaaagctgatcctgctggcccagctgaagcccgagaaggatagcgacgaagccgtgacatatagcctgggaaagtttgggcagagggccctggatttctacagcattcatgtgaccaaggagtccacccaccccgtgaagcccctggcccagatcgccggaaacagatacgcctccggacctgtgggaaaggccctgagcgacgcatgtatgggcacaatcgcctccttcctgtctaagtaccaggacatcatcatcgaacaccagaaggtggtgaagggcaaccagaagagactggagagcctgcgggagctggccggcaaggaaaacctggaataccctagcgtgaccctgccacctcagcctcacaccaaggagggcgttgatgcctacaacgaagtgatcgcccgggtgcgaatgtgggtgaacctgaacctgtggcagaagctgaagctaagcagagatgatgccaagcctctgctgagactgaagggattcccttcctttcctctggtcgagagacaggccaacgaagtggactggtgggacatggtgtgtaacgtgaagaagctgatcaacgagaaaaaggaggatggcaaggtgttttggcagaatctggctggctacaagagacaggaagccctgagaccatacctgagcagcgaggaagatcggaagaagggaaagaaattcgctcggtaccagctgggcgacctgctgctgcacctggaaaagaagcacggcgaggactggggaaaggtgtacgacgaggcctgggagcggattgacaagaaagtggaaggcctgagcaagcacatcaagctggaagaggaacggagaagcgaggacgcccagagcaaggccgccctgaccgactggctgcgggctaaggccagcttcgtgatcgagggcctgaaggaggccgacaaggacgagttctgcagatgcgagctgaagctgcagaagtggtacggggacctgcggggaaagcccttcgccatcgaagccgagaacagcatcctggacatcagcggcttcagcaagcagtacaactgtgccttcatctggcagaaggacggcgtgaagaagctgaacctgtacctgatcatcaactacttcaagggcggcaagctgcggttcaagaagatcaaacctgaagccttcgaagccaacagattctacaccgtgatcaacaaaaagagcggcgagatcgtgcccatggaggtgaacttcaacttcgacgaccccaacctgatcatcctgcctctggcctttggcaagagacagggcagagaattcatctggaacgacctgctgtccctggaaaccggcagcctgaagctggccaacggaagagtgatcgagaagacactgtacaacagaagaacccggcaggatgagcctgccctgttcgtggccctgaccttcgagcggcgggaggtcctggactcctccaatatcaaaccaatgaacctgatcggcgtggcaagaggcgaaaacatccccgccgtgatcgccctgaccgaccccgagggctgcccactgagccggtttaaggatagcctgggaaacccaacccacatcctgagaatcggcgagagctataaggagaagcagcggaccatccaggccaagaaggaggtggagcagcggagagccggcggctacagccggaagtacgccagcaaagccaagaatctggcagacgatatggtgagaaacaccgctagagatctgctgtactacgccgtgacccaggatgccatgctgatcttcgccaacctgagccggggcttcggccggcagggcaagcggaccttcatggccgagagacagtacacacggatggaggactggctgaccgccaagctggcctacgagggcctgagcaagacctacctgtccaagacactggcccagtacacctccaagacatgcagcaactgtgggtttaccatcaccagcgccgactacgacagggtgctggagaagctgaagaagacagcaacaggctggatgaccacaattaacggcaaggagctgaaggtggagggccagattacctactacaacagatacaagagacagaacgtagtcaaggacctgtccgtcgagctggatagactgagcgaagaatctgtgaacaacgacatctcctcctggacaaagggcagaagcggagaagctctgagcctcctgaagaaaagattctcccatagacccgtgcaggagaagttcgtgtgcctgaactgcggcttcgagacacacgcagccgagcaagccgccctgaacatcgccagatcctggctgttcctgcggagccaggagtacaagaaataccagacaaacaagacaaccggcaacaccgataagagagccttcgtcgagacctggcagtccttttaccggaagaagcttaaggaggtgtggaaacctgccgtgcggtctggcggatctggcggaggctccaccagccccaagaaaaagagaaaagtctaagctgccttctgcggggcttgccttctggccatgcccttcttctctcccttgcacctgtacctcttggtctttgaataaagcctgagtaggaaggctagcaaaaaaaaaaaaaaaaaaaaaaaaaaaaaaaaaaaaaaaaaaaaaaaaaaaaaaaaaaaaaaaaaaaaaaaaaaaaaaaa

SEQ ID NO: 9076 - RNA, 8787 nt, synthetic construct
  source 1..8787: mol_type = other RNA
aggaaataagagagaaaagaagagtaagaagaaatataagagccaccatggcccctaagaagaagcgtaaagtgagccggatgaaccacgaccaggagttcgacccccctaaggtgtaccctcccgtccccgccgagaagagaaagcccatccgggtcctgagcctgttcgatggcatcgccaccggtctgctggtgctgaaggacctgggcatccaggtggataggtacattgcctccgaggtgtgcgaggactccatcaccgtgggaatggtgcgtcatcagggcaagatcatgtacgtgggcgacgtgcggagcgtgacacagaagcatatccaggagtggggccctttcgacctggtgatcggcggcagcccttgcaatgacctgagcatcgtgaacccagcccggaagggcctgtacgagggaaccggcagactgttcttcgagttttacagactgctgcacgacgcccggcctaaggaaggcgacgaccggcccttcttttggctgttcgagaatgtggtggccatgggagtcagcgacaagcgggatattagccggttcctggagagcaaccccgtgatgatcgatgccaaggaagtgagcgccgcccaccgggccagatacttctggggcaatctgcctggcatgaacagacccctggccagcaccgtgaacgacaagctggagctgcaggagtgcctggagcacggccggatcgccaagttcagcaaggtgagaaccatcaccacccgaagcaacagcatcaaacaaggcaaggaccagcactttcctgtgttcatgaacgagaaggaggacatcctgtggtgtaccgagatggagagagtgttcgggttcccagtccactacacagatgtcagcaacatgtctagactggccagacagagactgctgggaagaagctggtccgtccctgtgatcagacacctgttcgcccctctgaaggagtacttcgcctgcgtgagcagcggcaacagcaacgccaacagccggggccccagcttctctagcggcctggtgccactgtccctgagagggagccacatgggccccatggagatctacaaaaccgtgagcgcctggaagcggcagcctgtgcgcgtgctgagcctgtttcggaatatcgataaagtcctgaaaagcctgggattcctggagagcggctctggctccggcggtggcaccctgaagtacgtggaggatgtgacaaacgtggtcagacgggatgtggagaagtggggccccttcgatctggtgtacggcagcacccaacccctgggcagctcttgtgaccggtgccctggctggtacatgtttcagttccaccggatcctgcagtacgccctgccgagacaggagtcccagcggccattcttttggattttcatggacaacttgctgctgaccgaggatgaccaggaaactaccactcggttcctgcagaccgaagccgtgaccctgcaggacgtgagaggccgggactaccagaacgccatgcgggtgtggtccaacatccctggactgaaaagcaagcacgcacctctgacccctaaagaagaggagtacctgcaggcccaggtgcggagcagaagcaagctggacgcccctaaggtggatctgctggtgaagaattgcctcctgcccctgagagagtacttcaagtatttcagccagaatagtctgcccctgggaggcagcggcggcggcgcccacggcagcgtgatgttcaacgacgtgagcatcgtgttcagccaggaggagtgggagtacctggacctggagcagagggacctgtacagggacgtgatgctggagaactacagcaacctggtgagcctgggctgcttcatcagcaagcccgacgtgatcagcctgctggagcagggcaaggagccctggaaggtggtgaggaagggcaggaggcagtaccccgacctggagaccaggtacggcggcccaagcagcggcgcccctcctcccagcggcggcaggcggcccaagcagcggcgcccctcctcccagcggcggcagcccagccggctccccaacctctaccgaggagggcacctctgagtccgccacccccgagagcggccctggcacctccaccgagcccagcgagggcagcgcacccggcagccctgccggcagccccacctccacagaggagggaaccagcaccgagcccagcgaaggcagcgccccaggcaccagcaccgagcctagtgagcaggagattaaacggatcaacaagatcagaagaagacttgtgaaagacagcaacaccaagaaggccggcaagacaggccccatgaaaaccctgctggttagagtgatgacacccgatctgagagagcggctggaaaacctgagaaagaagcctgaaaatatcccccagcccatcagcaatacatctagagccaacctgaataagctgctgaccgattacaccgaaatgaagaaggcgatcctgcatgtgtactgggaagagttccagaaggaccctgtgggcctgatgagccgggtggcccagcctgccagcaagaagatcgatcagaacaagctgaaacctgagatggacgagaagggcaacctgaccaccgccggctttgcctgctctcagtgtggccagcccctgttcgtgtacaagctggagcaggtgtctgagaagggcaaggcttacaccaactacttcggacggtgcaatgtggccgagcacgaaaagctgatcctgctggcccagctgaagcccgagaaggatagcgacgaagccgtgacatatagcctgggaaagtttgggcagagggccctggatttctacagcattcatgtgaccaaggagtccacccaccccgtgaagcccctggcccagatcgccggaaacagatacgcctccggacctgtgggaaaggccctgagcgacgcatgtatgggcacaatcgcctccttcctgtctaagtaccaggacatcatcatcgaacaccagaaggtggtgaagggcaaccagaagagactggagagcctgcgggagctggccggcaaggaaaacctggaataccctagcgtgaccctgccacctcagcctcacaccaaggagggcgttgatgcctacaacgaagtgatcgcccgggtgcgaatgtgggtgaacctgaacctgtggcagaagctgaagctaagcagagatgatgccaagcctctgctgagactgaagggattcccttcctttcctctggtcgagagacaggccaacgaagtggactggtgggacatggtgtgtaacgtgaagaagctgatcaacgagaaaaaggaggatggcaaggtgttttggcagaatctggctggctacaagagacaggaagccctgagaccatacctgagcagcgaggaagatcggaagaagggaaagaaattcgctcggtaccagctgggcgacctgctgctgcacctggaaaagaagcacggcgaggactggggaaaggtgtacgacgaggcctgggagcggattgacaagaaagtggaaggcctgagcaagcacatcaagctggaagaggaacggagaagcgaggacgcccagagcaaggccgccctgaccgactggctgcgggctaaggccagcttcgtgatcgagggcctgaaggaggccgacaaggacgagttctgcagatgcgagctgaagctgcagaagtggtacggggacctgcggggaaagcccttcgccatcgaagccgagaacagcatcctggacatcagcggcttcagcaagcagtacaactgtgccttcatctggcagaaggacggcgtgaagaagctgaacctgtacctgatcatcaactacttcaagggcggcaagctgcggttcaagaagatcaaacctgaagccttcgaagccaacagattctacaccgtgatcaacaaaaagagcggcgagatcgtgcccatggaggtgaacttcaacttcgacgaccccaacctgatcatcctgcctctggcctttggcaagagacagggcagagaattcatctggaacgacctgctgtccctggaaaccggcagcctgaagctggccaacggaagagtgatcgagaagacactgtacaacagaagaacccggcaggatgagcctgccctgttcgtggccctgaccttcgagcggcgggaggtcctggactcctccaatatcaaaccaatgaacctgatcggcgtggcaagaggcgaaaacatccccgccgtgatcgccctgaccgaccccgagggctgcccactgagccggtttaaggatagcctgggaaacccaacccacatcctgagaatcggcgagagctataaggagaagcagcggaccatccaggccaagaaggaggtggagcagcggagagccggcggctacagccggaagtacgccagcaaagccaagaatctggcagacgatatggtgagaaacaccgctagagatctgctgtactacgccgtgacccaggatgccatgctgatcttcgccaacctgagccggggcttcggccggcagggcaagcggaccttcatggccgagagacagtacacacggatggaggactggctgaccgccaagctggcctacgagggcctgagcaagacctacctgtccaagacactggcccagtacacctccaagacatgcagcaactgtgggtttaccatcaccagcgccgactacgacagggtgctggagaagctgaagaagacagcaacaggctggatgaccacaattaacggcaaggagctgaaggtggagggccagattacctactacaacagatacaagagacagaacgtagtcaaggacctgtccgtcgagctggatagactgagcgaagaatctgtgaacaacgacatctcctcctggacaaagggcagaagcggagaagctctgagcctcctgaagaaaagattctcccatagacccgtgcaggagaagttcgtgtgcctgaactgcggcttcgagacacacgcagccgagcaagccgccctgaacatcgccagatcctggctgttcctgcggagccaggagtacaagaaataccagacaaacaagacaaccggcaacaccgataagagagccttcgtcgagacctggcagtccttttaccggaagaagcttaaggaggtgtggaaacctgccgtgcggtctggcggatctggcggaggctccaccagccccaagaaaaagagaaaagtctaagctgccttctgcggggcttgccttctggccatgcccttcttctctcccttgcacctgtacctcttggtctttgaataaagcctgagtaggaaggctagcaaaaaaaaaaaaaaaaaaaaaaaaaaaaaaaaaaaaaaaaaaaaaaaaaaaaaaaaaaaaaaaaaaaaaaaaaaaaaaaagcccagccggctccccaacctctaccgaggagggcacctctgagtccgccacccccgagagcggccctggcacctccaccgagcccagcgagggcagcgcacccggcagccctgccggcagccccacctccacagaggagggaaccagcaccgagcccagcgaaggcagcgccccaggcaccagcaccgagcctagtgagcaggagattaaacggatcaacaagatcagaagaagacttgtgaaagacagcaacaccaagaaggccggcaagacaggccccatgaaaaccctgctggttagagtgatgacacccgatctgagagagcggctggaaaacctgagaaagaagcctgaaaatatcccccagcccatcagcaatacatctagagccaacctgaataagctgctgaccgattacaccgaaatgaagaaggcgatcctgcatgtgtactgggaagagttccagaaggaccctgtgggcctgatgagccgggtggcccagcctgccagcaagaagatcgatcagaacaagctgaaacctgagatggacgagaagggcaacctgaccaccgccggctttgcctgctctcagtgtggccagcccctgttcgtgtacaagctggagcaggtgtctgagaagggcaaggcttacaccaactacttcggacggtgcaatgtggccgagcacgaaaagctgatcctgctggcccagctgaagcccgagaaggatagcgacgaagccgtgacatatagcctgggaaagtttgggcagagggccctggatttctacagcattcatgtgaccaaggagtccacccaccccgtgaagcccctggcccagatcgccggaaacagatacgcctccggacctgtgggaaaggccctgagcgacgcatgtatgggcacaatcgcctccttcctgtctaagtaccaggacatcatcatcgaacaccagaaggtggtgaagggcaaccagaagagactggagagcctgcgggagctggccggcaaggaaaacctggaataccctagcgtgaccctgccacctcagcctcacaccaaggagggcgttgatgcctacaacgaagtgatcgcccgggtgcgaatgtgggtgaacctgaacctgtggcagaagctgaagctaagcagagatgatgccaagcctctgctgagactgaagggattcccttcctttcctctggtcgagagacaggccaacgaagtggactggtgggacatggtgtgtaacgtgaagaagctgatcaacgagaaaaaggaggatggcaaggtgttttggcagaatctggctggctacaagagacaggaagccctgagaccatacctgagcagcgaggaagatcggaagaagggaaagaaattcgctcggtaccagctgggcgacctgctgctgcacctggaaaagaagcacggcgaggactggggaaaggtgtacgacgaggcctgggagcggattgacaagaaagtggaaggcctgagcaagcacatcaagctggaagaggaacggagaagcgaggacgcccagagcaaggccgccctgaccgactggctgcgggctaaggccagcttcgtgatcgagggcctgaaggaggccgacaaggacgagttctgcagatgcgagctgaagctgcagaagtggtacggggacctgcggggaaagcccttcgccatcgaagccgagaacagcatcctggacatcagcggcttcagcaagcagtacaactgtgccttcatctggcagaaggacggcgtgaagaagctgaacctgtacctgatcatcaactacttcaagggcggcaagctgcggttcaagaagatcaaacctgaagccttcgaagccaacagattctacaccgtgatcaacaaaaagagcggcgagatcgtgcccatggaggtgaacttcaacttcgacgaccccaacctgatcatcctgcctctggcctttggcaagagacagggcagagaattcatctggaacgacctgctgtccctggaaaccggcagcctgaagctggccaacggaagagtgatcgagaagacactgtacaacagaagaacccggcaggatgagcctgccctgttcgtggccctgaccttcgagcggcgggaggtcctggactcctccaatatcaaaccaatgaacctgatcggcgtggcaagaggcgaaaacatccccgccgtgatcgccctgaccgaccccgagggctgcccactgagccggtttaaggatagcctgggaaacccaacccacatcctgagaatcggcgagagctataaggagaagcagcggaccatccaggccaagaaggaggtggagcagcggagagccggcggctacagccggaagtacgccagcaaagccaagaatctggcagacgatatggtgagaaacaccgctagagatctgctgtactacgccgtgacccaggatgccatgctgatcttcgccaacctgagccggggcttcggccggcagggcaagcggaccttcatggccgagagacagtacacacggatggaggactggctgaccgccaagctggcctacgagggcctgagcaagacctacctgtccaagacactggcccagtacacctccaagacatgcagcaactgtgggtttaccatcaccagcgccgactacgacagggtgctggagaagctgaagaagacagcaacaggctggatgaccacaattaacggcaaggagctgaaggtggagggccagattacctactacaacagatacaagagacagaacgtagtcaaggacctgtccgtcgagctggatagactgagcgaagaatctgtgaacaacgacatctcctcctggacaaagggcagaagcggagaagctctgagcctcctgaagaaaagattctcccatagacccgtgcaggagaagttcgtgtgcctgaactgcggcttcgagacacacgcagccgagcaagccgccctgaacatcgccagatcctggctgttcctgcggagccaggagtacaagaaataccagacaaacaagacaaccggcaacaccgataagagagccttcgtcgagacctggcagtccttttaccggaagaagcttaaggaggtgtggaaacctgccgtgcggtctggcggatctggcggaggctccaccagccccaagaaaaagagaaaagtctaagctgccttctgcggggcttgccttctggccatgcccttcttctctcccttgcacctgtacctcttggtctttgaataaagcctgagtaggaaggctagcaaaaaaaaaaaaaaaaaaaaaaaaaaaaaaaaaaaaaaaaaaaaaaaaaaaaaaaaaaaaaaaaaaaaaaaaaaaaaaaa

SEQ ID NO: 9077 - RNA, 8787 nt, synthetic construct
  source 1..8787: mol_type = other RNA
aggaaataagagagaaaagaagagtaagaagaaatataagagccaccatggcccctaagaagaagcgtaaagtgagccggatgaaccacgaccaggagttcgacccccctaaggtgtaccctcccgtccccgccgagaagagaaagcccatccgggtcctgagcctgttcgatggcatcgccaccggtctgctggtgctgaaggacctgggcatccaggtggataggtacattgcctccgaggtgtgcgaggactccatcaccgtgggaatggtgcgtcatcagggcaagatcatgtacgtgggcgacgtgcggagcgtgacacagaagcatatccaggagtggggccctttcgacctggtgatcggcggcagcccttgcaatgacctgagcatcgtgaacccagcccggaagggcctgtacgagggaaccggcagactgttcttcgagttttacagactgctgcacgacgcccggcctaaggaaggcgacgaccggcccttcttttggctgttcgagaatgtggtggccatgggagtcagcgacaagcgggatattagccggttcctggagagcaaccccgtgatgatcgatgccaaggaagtgagcgccgcccaccgggccagatacttctggggcaatctgcctggcatgaacagacccctggccagcaccgtgaacgacaagctggagctgcaggagtgcctggagcacggccggatcgccaagttcagcaaggtgagaaccatcaccacccgaagcaacagcatcaaacaaggcaaggaccagcactttcctgtgttcatgaacgagaaggaggacatcctgtggtgtaccgagatggagagagtgttcgggttcccagtccactacacagatgtcagcaacatgtctagactggccagacagagactgctgggaagaagctggtccgtccctgtgatcagacacctgttcgcccctctgaaggagtacttcgcctgcgtgagcagcggcaacagcaacgccaacagccggggccccagcttctctagcggcctggtgccactgtccctgagagggagccacatgggccccatggagatctacaaaaccgtgagcgcctggaagcggcagcctgtgcgcgtgctgagcctgtttcggaatatcgataaagtcctgaaaagcctgggattcctggagagcggctctggctccggcggtggcaccctgaagtacgtggaggatgtgacaaacgtggtcagacgggatgtggagaagtggggccccttcgatctggtgtacggcagcacccaacccctgggcagctcttgtgaccggtgccctggctggtacatgtttcagttccaccggatcctgcagtacgccctgccgagacaggagtcccagcggccattcttttggattttcatggacaacttgctgctgaccgaggatgaccaggaaactaccactcggttcctgcagaccgaagccgtgaccctgcaggacgtgagaggccgggactaccagaacgccatgcgggtgtggtccaacatccctggactgaaaagcaagcacgcacctctgacccctaaagaagaggagtacctgcaggcccaggtgcggagcagaagcaagctggacgcccctaaggtggatctgctggtgaagaattgcctcctgcccctgagagagtacttcaagtatttcagccagaatagtctgcccctgggaggcagcggcggcggcgcccacggcagcgtgatgttcaacgacgtgagcatcgtgttcagccaggaggagtgggagtacctggacctggagcagagggacctgtacagggacgtgatgctggagaactacagcaacctggtgagcctgggctgcttcatcagcaagcccgacgtgatcagcctgctggagcagggcaaggagccctggaaggtggtgaggaagggcaggaggaggtaccccgacctggagaccaggtacggcggcccaagcagcggcgcccctcctcccagcggcggcaggcggcccaagcagcggcgcccctcctcccagcggcggcagcccagccggctccccaacctctaccgaggagggcacctctgagtccgccacccccgagagcggccctggcacctccaccgagcccagcgagggcagcgcacccggcagccctgccggcagccccacctccacagaggagggaaccagcaccgagcccagcgaaggcagcgccccaggcaccagcaccgagcctagtgagcaggagattaaacggatcaacaagatcagaagaagacttgtgaaagacagcaacaccaagaaggccggcaagacaggccccatgaaaaccctgctggttagagtgatgacacccgatctgagagagcggctggaaaacctgagaaagaagcctgaaaatatcccccagcccatcagcaatacatctagagccaacctgaataagctgctgaccgattacaccgaaatgaagaaggcgatcctgcatgtgtactgggaagagttccagaaggaccctgtgggcctgatgagccgggtggcccagcctgccagcaagaagatcgatcagaacaagctgaaacctgagatggacgagaagggcaacctgaccaccgccggctttgcctgctctcagtgtggccagcccctgttcgtgtacaagctggagcaggtgtctgagaagggcaaggcttacaccaactacttcggacggtgcaatgtggccgagcacgaaaagctgatcctgctggcccagctgaagcccgagaaggatagcgacgaagccgtgacatatagcctgggaaagtttgggcagagggccctggatttctacagcattcatgtgaccaaggagtccacccaccccgtgaagcccctggcccagatcgccggaaacagatacgcctccggacctgtgggaaaggccctgagcgacgcatgtatgggcacaatcgcctccttcctgtctaagtaccaggacatcatcatcgaacaccagaaggtggtgaagggcaaccagaagagactggagagcctgcgggagctggccggcaaggaaaacctggaataccctagcgtgaccctgccacctcagcctcacaccaaggagggcgttgatgcctacaacgaagtgatcgcccgggtgcgaatgtgggtgaacctgaacctgtggcagaagctgaagctaagcagagatgatgccaagcctctgctgagactgaagggattcccttcctttcctctggtcgagagacaggccaacgaagtggactggtgggacatggtgtgtaacgtgaagaagctgatcaacgagaaaaaggaggatggcaaggtgttttggcagaatctggctggctacaagagacaggaagccctgagaccatacctgagcagcgaggaagatcggaagaagggaaagaaattcgctcggtaccagctgggcgacctgctgctgcacctggaaaagaagcacggcgaggactggggaaaggtgtacgacgaggcctgggagcggattgacaagaaagtggaaggcctgagcaagcacatcaagctggaagaggaacggagaagcgaggacgcccagagcaaggccgccctgaccgactggctgcgggctaaggccagcttcgtgatcgagggcctgaaggaggccgacaaggacgagttctgcagatgcgagctgaagctgcagaagtggtacggggacctgcggggaaagcccttcgccatcgaagccgagaacagcatcctggacatcagcggcttcagcaagcagtacaactgtgccttcatctggcagaaggacggcgtgaagaagctgaacctgtacctgatcatcaactacttcaagggcggcaagctgcggttcaagaagatcaaacctgaagccttcgaagccaacagattctacaccgtgatcaacaaaaagagcggcgagatcgtgcccatggaggtgaacttcaacttcgacgaccccaacctgatcatcctgcctctggcctttggcaagagacagggcagagaattcatctggaacgacctgctgtccctggaaaccggcagcctgaagctggccaacggaagagtgatcgagaagacactgtacaacagaagaacccggcaggatgagcctgccctgttcgtggccctgaccttcgagcggcgggaggtcctggactcctccaatatcaaaccaatgaacctgatcggcgtggcaagaggcgaaaacatccccgccgtgatcgccctgaccgaccccgagggctgcccactgagccggtttaaggatagcctgggaaacccaacccacatcctgagaatcggcgagagctataaggagaagcagcggaccatccaggccaagaaggaggtggagcagcggagagccggcggctacagccggaagtacgccagcaaagccaagaatctggcagacgatatggtgagaaacaccgctagagatctgctgtactacgccgtgacccaggatgccatgctgatcttcgccaacctgagccggggcttcggccggcagggcaagcggaccttcatggccgagagacagtacacacggatggaggactggctgaccgccaagctggcctacgagggcctgagcaagacctacctgtccaagacactggcccagtacacctccaagacatgcagcaactgtgggtttaccatcaccagcgccgactacgacagggtgctggagaagctgaagaagacagcaacaggctggatgaccacaattaacggcaaggagctgaaggtggagggccagattacctactacaacagatacaagagacagaacgtagtcaaggacctgtccgtcgagctggatagactgagcgaagaatctgtgaacaacgacatctcctcctggacaaagggcagaagcggagaagctctgagcctcctgaagaaaagattctcccatagacccgtgcaggagaagttcgtgtgcctgaactgcggcttcgagacacacgcagccgagcaagccgccctgaacatcgccagatcctggctgttcctgcggagccaggagtacaagaaataccagacaaacaagacaaccggcaacaccgataagagagccttcgtcgagacctggcagtccttttaccggaagaagcttaaggaggtgtggaaacctgccgtgcggtctggcggatctggcggaggctccaccagccccaagaaaaagagaaaagtctaagctgccttctgcggggcttgccttctggccatgcccttcttctctcccttgcacctgtacctcttggtctttgaataaagcctgagtaggaaggctagcaaaaaaaaaaaaaaaaaaaaaaaaaaaaaaaaaaaaaaaaaaaaaaaaaaaaaaaaaaaaaaaaaaaaaaaaaaaaaaaagcccagccggctccccaacctctaccgaggagggcacctctgagtccgccacccccgagagcggccctggcacctccaccgagcccagcgagggcagcgcacccggcagccctgccggcagccccacctccacagaggagggaaccagcaccgagcccagcgaaggcagcgccccaggcaccagcaccgagcctagtgagcaggagattaaacggatcaacaagatcagaagaagacttgtgaaagacagcaacaccaagaaggccggcaagacaggccccatgaaaaccctgctggttagagtgatgacacccgatctgagagagcggctggaaaacctgagaaagaagcctgaaaatatcccccagcccatcagcaatacatctagagccaacctgaataagctgctgaccgattacaccgaaatgaagaaggcgatcctgcatgtgtactgggaagagttccagaaggaccctgtgggcctgatgagccgggtggcccagcctgccagcaagaagatcgatcagaacaagctgaaacctgagatggacgagaagggcaacctgaccaccgccggctttgcctgctctcagtgtggccagcccctgttcgtgtacaagctggagcaggtgtctgagaagggcaaggcttacaccaactacttcggacggtgcaatgtggccgagcacgaaaagctgatcctgctggcccagctgaagcccgagaaggatagcgacgaagccgtgacatatagcctgggaaagtttgggcagagggccctggatttctacagcattcatgtgaccaaggagtccacccaccccgtgaagcccctggcccagatcgccggaaacagatacgcctccggacctgtgggaaaggccctgagcgacgcatgtatgggcacaatcgcctccttcctgtctaagtaccaggacatcatcatcgaacaccagaaggtggtgaagggcaaccagaagagactggagagcctgcgggagctggccggcaaggaaaacctggaataccctagcgtgaccctgccacctcagcctcacaccaaggagggcgttgatgcctacaacgaagtgatcgcccgggtgcgaatgtgggtgaacctgaacctgtggcagaagctgaagctaagcagagatgatgccaagcctctgctgagactgaagggattcccttcctttcctctggtcgagagacaggccaacgaagtggactggtgggacatggtgtgtaacgtgaagaagctgatcaacgagaaaaaggaggatggcaaggtgttttggcagaatctggctggctacaagagacaggaagccctgagaccatacctgagcagcgaggaagatcggaagaagggaaagaaattcgctcggtaccagctgggcgacctgctgctgcacctggaaaagaagcacggcgaggactggggaaaggtgtacgacgaggcctgggagcggattgacaagaaagtggaaggcctgagcaagcacatcaagctggaagaggaacggagaagcgaggacgcccagagcaaggccgccctgaccgactggctgcgggctaaggccagcttcgtgatcgagggcctgaaggaggccgacaaggacgagttctgcagatgcgagctgaagctgcagaagtggtacggggacctgcggggaaagcccttcgccatcgaagccgagaacagcatcctggacatcagcggcttcagcaagcagtacaactgtgccttcatctggcagaaggacggcgtgaagaagctgaacctgtacctgatcatcaactacttcaagggcggcaagctgcggttcaagaagatcaaacctgaagccttcgaagccaacagattctacaccgtgatcaacaaaaagagcggcgagatcgtgcccatggaggtgaacttcaacttcgacgaccccaacctgatcatcctgcctctggcctttggcaagagacagggcagagaattcatctggaacgacctgctgtccctggaaaccggcagcctgaagctggccaacggaagagtgatcgagaagacactgtacaacagaagaacccggcaggatgagcctgccctgttcgtggccctgaccttcgagcggcgggaggtcctggactcctccaatatcaaaccaatgaacctgatcggcgtggcaagaggcgaaaacatccccgccgtgatcgccctgaccgaccccgagggctgcccactgagccggtttaaggatagcctgggaaacccaacccacatcctgagaatcggcgagagctataaggagaagcagcggaccatccaggccaagaaggaggtggagcagcggagagccggcggctacagccggaagtacgccagcaaagccaagaatctggcagacgatatggtgagaaacaccgctagagatctgctgtactacgccgtgacccaggatgccatgctgatcttcgccaacctgagccggggcttcggccggcagggcaagcggaccttcatggccgagagacagtacacacggatggaggactggctgaccgccaagctggcctacgagggcctgagcaagacctacctgtccaagacactggcccagtacacctccaagacatgcagcaactgtgggtttaccatcaccagcgccgactacgacagggtgctggagaagctgaagaagacagcaacaggctggatgaccacaattaacggcaaggagctgaaggtggagggccagattacctactacaacagatacaagagacagaacgtagtcaaggacctgtccgtcgagctggatagactgagcgaagaatctgtgaacaacgacatctcctcctggacaaagggcagaagcggagaagctctgagcctcctgaagaaaagattctcccatagacccgtgcaggagaagttcgtgtgcctgaactgcggcttcgagacacacgcagccgagcaagccgccctgaacatcgccagatcctggctgttcctgcggagccaggagtacaagaaataccagacaaacaagacaaccggcaacaccgataagagagccttcgtcgagacctggcagtccttttaccggaagaagcttaaggaggtgtggaaacctgccgtgcggtctggcggatctggcggaggctccaccagccccaagaaaaagagaaaagtctaagctgccttctgcggggcttgccttctggccatgcccttcttctctcccttgcacctgtacctcttggtctttgaataaagcctgagtaggaaggctagcaaaaaaaaaaaaaaaaaaaaaaaaaaaaaaaaaaaaaaaaaaaaaaaaaaaaaaaaaaaaaaaaaaaaaaaaaaaaaaaa

SEQ ID NO: 9078 - RNA, 8787 nt, synthetic construct
  source 1..8787: mol_type = other RNA
aggaaataagagagaaaagaagagtaagaagaaatataagagccaccatggcccctaagaagaagcgtaaagtgagccggatgaaccacgaccaggagttcgacccccctaaggtgtaccctcccgtccccgccgagaagagaaagcccatccgggtcctgagcctgttcgatggcatcgccaccggtctgctggtgctgaaggacctgggcatccaggtggataggtacattgcctccgaggtgtgcgaggactccatcaccgtgggaatggtgcgtcatcagggcaagatcatgtacgtgggcgacgtgcggagcgtgacacagaagcatatccaggagtggggccctttcgacctggtgatcggcggcagcccttgcaatgacctgagcatcgtgaacccagcccggaagggcctgtacgagggaaccggcagactgttcttcgagttttacagactgctgcacgacgcccggcctaaggaaggcgacgaccggcccttcttttggctgttcgagaatgtggtggccatgggagtcagcgacaagcgggatattagccggttcctggagagcaaccccgtgatgatcgatgccaaggaagtgagcgccgcccaccgggccagatacttctggggcaatctgcctggcatgaacagacccctggccagcaccgtgaacgacaagctggagctgcaggagtgcctggagcacggccggatcgccaagttcagcaaggtgagaaccatcaccacccgaagcaacagcatcaaacaaggcaaggaccagcactttcctgtgttcatgaacgagaaggaggacatcctgtggtgtaccgagatggagagagtgttcgggttcccagtccactacacagatgtcagcaacatgtctagactggccagacagagactgctgggaagaagctggtccgtccctgtgatcagacacctgttcgcccctctgaaggagtacttcgcctgcgtgagcagcggcaacagcaacgccaacagccggggccccagcttctctagcggcctggtgccactgtccctgagagggagccacatgggccccatggagatctacaaaaccgtgagcgcctggaagcggcagcctgtgcgcgtgctgagcctgtttcggaatatcgataaagtcctgaaaagcctgggattcctggagagcggctctggctccggcggtggcaccctgaagtacgtggaggatgtgacaaacgtggtcagacgggatgtggagaagtggggccccttcgatctggtgtacggcagcacccaacccctgggcagctcttgtgaccggtgccctggctggtacatgtttcagttccaccggatcctgcagtacgccctgccgagacaggagtcccagcggccattcttttggattttcatggacaacttgctgctgaccgaggatgaccaggaaactaccactcggttcctgcagaccgaagccgtgaccctgcaggacgtgagaggccgggactaccagaacgccatgcgggtgtggtccaacatccctggactgaaaagcaagcacgcacctctgacccctaaagaagaggagtacctgcaggcccaggtgcggagcagaagcaagctggacgcccctaaggtggatctgctggtgaagaattgcctcctgcccctgagagagtacttcaagtatttcagccagaatagtctgcccctgggaggcagcggcggcggcgcccaccacctggtgatgttcagggacgtggccgtggacttcagccaggaggagtgggagtgcctgaacccctaccagaggaacctgtacagggacgtgatcctggagaactacagcaacctggtgagcgtggccggctgcagcatcagcaagcccgacgtgatcaccctgctggagcagggcaaggagccctggatggtggtgagggacgagaggaggaggagcctggacctggagagcaggggcggcccaagcagcggcgcccctcctcccagcggcggcaggcggcccaagcagcggcgcccctcctcccagcggcggcagcccagccggctccccaacctctaccgaggagggcacctctgagtccgccacccccgagagcggccctggcacctccaccgagcccagcgagggcagcgcacccggcagccctgccggcagccccacctccacagaggagggaaccagcaccgagcccagcgaaggcagcgccccaggcaccagcaccgagcctagtgagcaggagattaaacggatcaacaagatcagaagaagacttgtgaaagacagcaacaccaagaaggccggcaagacaggccccatgaaaaccctgctggttagagtgatgacacccgatctgagagagcggctggaaaacctgagaaagaagcctgaaaatatcccccagcccatcagcaatacatctagagccaacctgaataagctgctgaccgattacaccgaaatgaagaaggcgatcctgcatgtgtactgggaagagttccagaaggaccctgtgggcctgatgagccgggtggcccagcctgccagcaagaagatcgatcagaacaagctgaaacctgagatggacgagaagggcaacctgaccaccgccggctttgcctgctctcagtgtggccagcccctgttcgtgtacaagctggagcaggtgtctgagaagggcaaggcttacaccaactacttcggacggtgcaatgtggccgagcacgaaaagctgatcctgctggcccagctgaagcccgagaaggatagcgacgaagccgtgacatatagcctgggaaagtttgggcagagggccctggatttctacagcattcatgtgaccaaggagtccacccaccccgtgaagcccctggcccagatcgccggaaacagatacgcctccggacctgtgggaaaggccctgagcgacgcatgtatgggcacaatcgcctccttcctgtctaagtaccaggacatcatcatcgaacaccagaaggtggtgaagggcaaccagaagagactggagagcctgcgggagctggccggcaaggaaaacctggaataccctagcgtgaccctgccacctcagcctcacaccaaggagggcgttgatgcctacaacgaagtgatcgcccgggtgcgaatgtgggtgaacctgaacctgtggcagaagctgaagctaagcagagatgatgccaagcctctgctgagactgaagggattcccttcctttcctctggtcgagagacaggccaacgaagtggactggtgggacatggtgtgtaacgtgaagaagctgatcaacgagaaaaaggaggatggcaaggtgttttggcagaatctggctggctacaagagacaggaagccctgagaccatacctgagcagcgaggaagatcggaagaagggaaagaaattcgctcggtaccagctgggcgacctgctgctgcacctggaaaagaagcacggcgaggactggggaaaggtgtacgacgaggcctgggagcggattgacaagaaagtggaaggcctgagcaagcacatcaagctggaagaggaacggagaagcgaggacgcccagagcaaggccgccctgaccgactggctgcgggctaaggccagcttcgtgatcgagggcctgaaggaggccgacaaggacgagttctgcagatgcgagctgaagctgcagaagtggtacggggacctgcggggaaagcccttcgccatcgaagccgagaacagcatcctggacatcagcggcttcagcaagcagtacaactgtgccttcatctggcagaaggacggcgtgaagaagctgaacctgtacctgatcatcaactacttcaagggcggcaagctgcggttcaagaagatcaaacctgaagccttcgaagccaacagattctacaccgtgatcaacaaaaagagcggcgagatcgtgcccatggaggtgaacttcaacttcgacgaccccaacctgatcatcctgcctctggcctttggcaagagacagggcagagaattcatctggaacgacctgctgtccctggaaaccggcagcctgaagctggccaacggaagagtgatcgagaagacactgtacaacagaagaacccggcaggatgagcctgccctgttcgtggccctgaccttcgagcggcgggaggtcctggactcctccaatatcaaaccaatgaacctgatcggcgtggcaagaggcgaaaacatccccgccgtgatcgccctgaccgaccccgagggctgcccactgagccggtttaaggatagcctgggaaacccaacccacatcctgagaatcggcgagagctataaggagaagcagcggaccatccaggccaagaaggaggtggagcagcggagagccggcggctacagccggaagtacgccagcaaagccaagaatctggcagacgatatggtgagaaacaccgctagagatctgctgtactacgccgtgacccaggatgccatgctgatcttcgccaacctgagccggggcttcggccggcagggcaagcggaccttcatggccgagagacagtacacacggatggaggactggctgaccgccaagctggcctacgagggcctgagcaagacctacctgtccaagacactggcccagtacacctccaagacatgcagcaactgtgggtttaccatcaccagcgccgactacgacagggtgctggagaagctgaagaagacagcaacaggctggatgaccacaattaacggcaaggagctgaaggtggagggccagattacctactacaacagatacaagagacagaacgtagtcaaggacctgtccgtcgagctggatagactgagcgaagaatctgtgaacaacgacatctcctcctggacaaagggcagaagcggagaagctctgagcctcctgaagaaaagattctcccatagacccgtgcaggagaagttcgtgtgcctgaactgcggcttcgagacacacgcagccgagcaagccgccctgaacatcgccagatcctggctgttcctgcggagccaggagtacaagaaataccagacaaacaagacaaccggcaacaccgataagagagccttcgtcgagacctggcagtccttttaccggaagaagcttaaggaggtgtggaaacctgccgtgcggtctggcggatctggcggaggctccaccagccccaagaaaaagagaaaagtctaagctgccttctgcggggcttgccttctggccatgcccttcttctctcccttgcacctgtacctcttggtctttgaataaagcctgagtaggaaggctagcaaaaaaaaaaaaaaaaaaaaaaaaaaaaaaaaaaaaaaaaaaaaaaaaaaaaaaaaaaaaaaaaaaaaaaaaaaaaaaaagcccagccggctccccaacctctaccgaggagggcacctctgagtccgccacccccgagagcggccctggcacctccaccgagcccagcgagggcagcgcacccggcagccctgccggcagccccacctccacagaggagggaaccagcaccgagcccagcgaaggcagcgccccaggcaccagcaccgagcctagtgagcaggagattaaacggatcaacaagatcagaagaagacttgtgaaagacagcaacaccaagaaggccggcaagacaggccccatgaaaaccctgctggttagagtgatgacacccgatctgagagagcggctggaaaacctgagaaagaagcctgaaaatatcccccagcccatcagcaatacatctagagccaacctgaataagctgctgaccgattacaccgaaatgaagaaggcgatcctgcatgtgtactgggaagagttccagaaggaccctgtgggcctgatgagccgggtggcccagcctgccagcaagaagatcgatcagaacaagctgaaacctgagatggacgagaagggcaacctgaccaccgccggctttgcctgctctcagtgtggccagcccctgttcgtgtacaagctggagcaggtgtctgagaagggcaaggcttacaccaactacttcggacggtgcaatgtggccgagcacgaaaagctgatcctgctggcccagctgaagcccgagaaggatagcgacgaagccgtgacatatagcctgggaaagtttgggcagagggccctggatttctacagcattcatgtgaccaaggagtccacccaccccgtgaagcccctggcccagatcgccggaaacagatacgcctccggacctgtgggaaaggccctgagcgacgcatgtatgggcacaatcgcctccttcctgtctaagtaccaggacatcatcatcgaacaccagaaggtggtgaagggcaaccagaagagactggagagcctgcgggagctggccggcaaggaaaacctggaataccctagcgtgaccctgccacctcagcctcacaccaaggagggcgttgatgcctacaacgaagtgatcgcccgggtgcgaatgtgggtgaacctgaacctgtggcagaagctgaagctaagcagagatgatgccaagcctctgctgagactgaagggattcccttcctttcctctggtcgagagacaggccaacgaagtggactggtgggacatggtgtgtaacgtgaagaagctgatcaacgagaaaaaggaggatggcaaggtgttttggcagaatctggctggctacaagagacaggaagccctgagaccatacctgagcagcgaggaagatcggaagaagggaaagaaattcgctcggtaccagctgggcgacctgctgctgcacctggaaaagaagcacggcgaggactggggaaaggtgtacgacgaggcctgggagcggattgacaagaaagtggaaggcctgagcaagcacatcaagctggaagaggaacggagaagcgaggacgcccagagcaaggccgccctgaccgactggctgcgggctaaggccagcttcgtgatcgagggcctgaaggaggccgacaaggacgagttctgcagatgcgagctgaagctgcagaagtggtacggggacctgcggggaaagcccttcgccatcgaagccgagaacagcatcctggacatcagcggcttcagcaagcagtacaactgtgccttcatctggcagaaggacggcgtgaagaagctgaacctgtacctgatcatcaactacttcaagggcggcaagctgcggttcaagaagatcaaacctgaagccttcgaagccaacagattctacaccgtgatcaacaaaaagagcggcgagatcgtgcccatggaggtgaacttcaacttcgacgaccccaacctgatcatcctgcctctggcctttggcaagagacagggcagagaattcatctggaacgacctgctgtccctggaaaccggcagcctgaagctggccaacggaagagtgatcgagaagacactgtacaacagaagaacccggcaggatgagcctgccctgttcgtggccctgaccttcgagcggcgggaggtcctggactcctccaatatcaaaccaatgaacctgatcggcgtggcaagaggcgaaaacatccccgccgtgatcgccctgaccgaccccgagggctgcccactgagccggtttaaggatagcctgggaaacccaacccacatcctgagaatcggcgagagctataaggagaagcagcggaccatccaggccaagaaggaggtggagcagcggagagccggcggctacagccggaagtacgccagcaaagccaagaatctggcagacgatatggtgagaaacaccgctagagatctgctgtactacgccgtgacccaggatgccatgctgatcttcgccaacctgagccggggcttcggccggcagggcaagcggaccttcatggccgagagacagtacacacggatggaggactggctgaccgccaagctggcctacgagggcctgagcaagacctacctgtccaagacactggcccagtacacctccaagacatgcagcaactgtgggtttaccatcaccagcgccgactacgacagggtgctggagaagctgaagaagacagcaacaggctggatgaccacaattaacggcaaggagctgaaggtggagggccagattacctactacaacagatacaagagacagaacgtagtcaaggacctgtccgtcgagctggatagactgagcgaagaatctgtgaacaacgacatctcctcctggacaaagggcagaagcggagaagctctgagcctcctgaagaaaagattctcccatagacccgtgcaggagaagttcgtgtgcctgaactgcggcttcgagacacacgcagccgagcaagccgccctgaacatcgccagatcctggctgttcctgcggagccaggagtacaagaaataccagacaaacaagacaaccggcaacaccgataagagagccttcgtcgagacctggcagtccttttaccggaagaagcttaaggaggtgtggaaacctgccgtgcggtctggcggatctggcggaggctccaccagccccaagaaaaagagaaaagtctaagctgccttctgcggggcttgccttctggccatgcccttcttctctcccttgcacctgtacctcttggtctttgaataaagcctgagtaggaaggctagcaaaaaaaaaaaaaaaaaaaaaaaaaaaaaaaaaaaaaaaaaaaaaaaaaaaaaaaaaaaaaaaaaaaaaaaaaaaaaaaa

SEQ ID NO: 9079 - RNA, 8787 nt, synthetic construct
  source 1..8787: mol_type = other RNA
aggaaataagagagaaaagaagagtaagaagaaatataagagccaccatggcccctaagaagaagcgtaaagtgagccggatgaaccacgaccaggagttcgacccccctaaggtgtaccctcccgtccccgccgagaagagaaagcccatccgggtcctgagcctgttcgatggcatcgccaccggtctgctggtgctgaaggacctgggcatccaggtggataggtacattgcctccgaggtgtgcgaggactccatcaccgtgggaatggtgcgtcatcagggcaagatcatgtacgtgggcgacgtgcggagcgtgacacagaagcatatccaggagtggggccctttcgacctggtgatcggcggcagcccttgcaatgacctgagcatcgtgaacccagcccggaagggcctgtacgagggaaccggcagactgttcttcgagttttacagactgctgcacgacgcccggcctaaggaaggcgacgaccggcccttcttttggctgttcgagaatgtggtggccatgggagtcagcgacaagcgggatattagccggttcctggagagcaaccccgtgatgatcgatgccaaggaagtgagcgccgcccaccgggccagatacttctggggcaatctgcctggcatgaacagacccctggccagcaccgtgaacgacaagctggagctgcaggagtgcctggagcacggccggatcgccaagttcagcaaggtgagaaccatcaccacccgaagcaacagcatcaaacaaggcaaggaccagcactttcctgtgttcatgaacgagaaggaggacatcctgtggtgtaccgagatggagagagtgttcgggttcccagtccactacacagatgtcagcaacatgtctagactggccagacagagactgctgggaagaagctggtccgtccctgtgatcagacacctgttcgcccctctgaaggagtacttcgcctgcgtgagcagcggcaacagcaacgccaacagccggggccccagcttctctagcggcctggtgccactgtccctgagagggagccacatgggccccatggagatctacaaaaccgtgagcgcctggaagcggcagcctgtgcgcgtgctgagcctgtttcggaatatcgataaagtcctgaaaagcctgggattcctggagagcggctctggctccggcggtggcaccctgaagtacgtggaggatgtgacaaacgtggtcagacgggatgtggagaagtggggccccttcgatctggtgtacggcagcacccaacccctgggcagctcttgtgaccggtgccctggctggtacatgtttcagttccaccggatcctgcagtacgccctgccgagacaggagtcccagcggccattcttttggattttcatggacaacttgctgctgaccgaggatgaccaggaaactaccactcggttcctgcagaccgaagccgtgaccctgcaggacgtgagaggccgggactaccagaacgccatgcgggtgtggtccaacatccctggactgaaaagcaagcacgcacctctgacccctaaagaagaggagtacctgcaggcccaggtgcggagcagaagcaagctggacgcccctaaggtggatctgctggtgaagaattgcctcctgcccctgagagagtacttcaagtatttcagccagaatagtctgcccctgggaggcagcggcggcggcgcccacggcagcgtgatgttcagcgacgtgagcatcgacttcagccaggaggagtgggactacctggacctggagcagagggacctgtacagggacgtgatgctggagaactacagcaacctggtgagcctgggctgcttcgtgagcaagcccgacgtgatcagcctgctggagcagggcaaggagccctggaaggtggtgaggaagggcaggaggaggtaccccgacctggagaccaactacggcggcccaagcagcggcgcccctcctcccagcggcggcaggcggcccaagcagcggcgcccctcctcccagcggcggcagcccagccggctccccaacctctaccgaggagggcacctctgagtccgccacccccgagagcggccctggcacctccaccgagcccagcgagggcagcgcacccggcagccctgccggcagccccacctccacagaggagggaaccagcaccgagcccagcgaaggcagcgccccaggcaccagcaccgagcctagtgagcaggagattaaacggatcaacaagatcagaagaagacttgtgaaagacagcaacaccaagaaggccggcaagacaggccccatgaaaaccctgctggttagagtgatgacacccgatctgagagagcggctggaaaacctgagaaagaagcctgaaaatatcccccagcccatcagcaatacatctagagccaacctgaataagctgctgaccgattacaccgaaatgaagaaggcgatcctgcatgtgtactgggaagagttccagaaggaccctgtgggcctgatgagccgggtggcccagcctgccagcaagaagatcgatcagaacaagctgaaacctgagatggacgagaagggcaacctgaccaccgccggctttgcctgctctcagtgtggccagcccctgttcgtgtacaagctggagcaggtgtctgagaagggcaaggcttacaccaactacttcggacggtgcaatgtggccgagcacgaaaagctgatcctgctggcccagctgaagcccgagaaggatagcgacgaagccgtgacatatagcctgggaaagtttgggcagagggccctggatttctacagcattcatgtgaccaaggagtccacccaccccgtgaagcccctggcccagatcgccggaaacagatacgcctccggacctgtgggaaaggccctgagcgacgcatgtatgggcacaatcgcctccttcctgtctaagtaccaggacatcatcatcgaacaccagaaggtggtgaagggcaaccagaagagactggagagcctgcgggagctggccggcaaggaaaacctggaataccctagcgtgaccctgccacctcagcctcacaccaaggagggcgttgatgcctacaacgaagtgatcgcccgggtgcgaatgtgggtgaacctgaacctgtggcagaagctgaagctaagcagagatgatgccaagcctctgctgagactgaagggattcccttcctttcctctggtcgagagacaggccaacgaagtggactggtgggacatggtgtgtaacgtgaagaagctgatcaacgagaaaaaggaggatggcaaggtgttttggcagaatctggctggctacaagagacaggaagccctgagaccatacctgagcagcgaggaagatcggaagaagggaaagaaattcgctcggtaccagctgggcgacctgctgctgcacctggaaaagaagcacggcgaggactggggaaaggtgtacgacgaggcctgggagcggattgacaagaaagtggaaggcctgagcaagcacatcaagctggaagaggaacggagaagcgaggacgcccagagcaaggccgccctgaccgactggctgcgggctaaggccagcttcgtgatcgagggcctgaaggaggccgacaaggacgagttctgcagatgcgagctgaagctgcagaagtggtacggggacctgcggggaaagcccttcgccatcgaagccgagaacagcatcctggacatcagcggcttcagcaagcagtacaactgtgccttcatctggcagaaggacggcgtgaagaagctgaacctgtacctgatcatcaactacttcaagggcggcaagctgcggttcaagaagatcaaacctgaagccttcgaagccaacagattctacaccgtgatcaacaaaaagagcggcgagatcgtgcccatggaggtgaacttcaacttcgacgaccccaacctgatcatcctgcctctggcctttggcaagagacagggcagagaattcatctggaacgacctgctgtccctggaaaccggcagcctgaagctggccaacggaagagtgatcgagaagacactgtacaacagaagaacccggcaggatgagcctgccctgttcgtggccctgaccttcgagcggcgggaggtcctggactcctccaatatcaaaccaatgaacctgatcggcgtggcaagaggcgaaaacatccccgccgtgatcgccctgaccgaccccgagggctgcccactgagccggtttaaggatagcctgggaaacccaacccacatcctgagaatcggcgagagctataaggagaagcagcggaccatccaggccaagaaggaggtggagcagcggagagccggcggctacagccggaagtacgccagcaaagccaagaatctggcagacgatatggtgagaaacaccgctagagatctgctgtactacgccgtgacccaggatgccatgctgatcttcgccaacctgagccggggcttcggccggcagggcaagcggaccttcatggccgagagacagtacacacggatggaggactggctgaccgccaagctggcctacgagggcctgagcaagacctacctgtccaagacactggcccagtacacctccaagacatgcagcaactgtgggtttaccatcaccagcgccgactacgacagggtgctggagaagctgaagaagacagcaacaggctggatgaccacaattaacggcaaggagctgaaggtggagggccagattacctactacaacagatacaagagacagaacgtagtcaaggacctgtccgtcgagctggatagactgagcgaagaatctgtgaacaacgacatctcctcctggacaaagggcagaagcggagaagctctgagcctcctgaagaaaagattctcccatagacccgtgcaggagaagttcgtgtgcctgaactgcggcttcgagacacacgcagccgagcaagccgccctgaacatcgccagatcctggctgttcctgcggagccaggagtacaagaaataccagacaaacaagacaaccggcaacaccgataagagagccttcgtcgagacctggcagtccttttaccggaagaagcttaaggaggtgtggaaacctgccgtgcggtctggcggatctggcggaggctccaccagccccaagaaaaagagaaaagtctaagctgccttctgcggggcttgccttctggccatgcccttcttctctcccttgcacctgtacctcttggtctttgaataaagcctgagtaggaaggctagcaaaaaaaaaaaaaaaaaaaaaaaaaaaaaaaaaaaaaaaaaaaaaaaaaaaaaaaaaaaaaaaaaaaaaaaaaaaaaaaagcccagccggctccccaacctctaccgaggagggcacctctgagtccgccacccccgagagcggccctggcacctccaccgagcccagcgagggcagcgcacccggcagccctgccggcagccccacctccacagaggagggaaccagcaccgagcccagcgaaggcagcgccccaggcaccagcaccgagcctagtgagcaggagattaaacggatcaacaagatcagaagaagacttgtgaaagacagcaacaccaagaaggccggcaagacaggccccatgaaaaccctgctggttagagtgatgacacccgatctgagagagcggctggaaaacctgagaaagaagcctgaaaatatcccccagcccatcagcaatacatctagagccaacctgaataagctgctgaccgattacaccgaaatgaagaaggcgatcctgcatgtgtactgggaagagttccagaaggaccctgtgggcctgatgagccgggtggcccagcctgccagcaagaagatcgatcagaacaagctgaaacctgagatggacgagaagggcaacctgaccaccgccggctttgcctgctctcagtgtggccagcccctgttcgtgtacaagctggagcaggtgtctgagaagggcaaggcttacaccaactacttcggacggtgcaatgtggccgagcacgaaaagctgatcctgctggcccagctgaagcccgagaaggatagcgacgaagccgtgacatatagcctgggaaagtttgggcagagggccctggatttctacagcattcatgtgaccaaggagtccacccaccccgtgaagcccctggcccagatcgccggaaacagatacgcctccggacctgtgggaaaggccctgagcgacgcatgtatgggcacaatcgcctccttcctgtctaagtaccaggacatcatcatcgaacaccagaaggtggtgaagggcaaccagaagagactggagagcctgcgggagctggccggcaaggaaaacctggaataccctagcgtgaccctgccacctcagcctcacaccaaggagggcgttgatgcctacaacgaagtgatcgcccgggtgcgaatgtgggtgaacctgaacctgtggcagaagctgaagctaagcagagatgatgccaagcctctgctgagactgaagggattcccttcctttcctctggtcgagagacaggccaacgaagtggactggtgggacatggtgtgtaacgtgaagaagctgatcaacgagaaaaaggaggatggcaaggtgttttggcagaatctggctggctacaagagacaggaagccctgagaccatacctgagcagcgaggaagatcggaagaagggaaagaaattcgctcggtaccagctgggcgacctgctgctgcacctggaaaagaagcacggcgaggactggggaaaggtgtacgacgaggcctgggagcggattgacaagaaagtggaaggcctgagcaagcacatcaagctggaagaggaacggagaagcgaggacgcccagagcaaggccgccctgaccgactggctgcgggctaaggccagcttcgtgatcgagggcctgaaggaggccgacaaggacgagttctgcagatgcgagctgaagctgcagaagtggtacggggacctgcggggaaagcccttcgccatcgaagccgagaacagcatcctggacatcagcggcttcagcaagcagtacaactgtgccttcatctggcagaaggacggcgtgaagaagctgaacctgtacctgatcatcaactacttcaagggcggcaagctgcggttcaagaagatcaaacctgaagccttcgaagccaacagattctacaccgtgatcaacaaaaagagcggcgagatcgtgcccatggaggtgaacttcaacttcgacgaccccaacctgatcatcctgcctctggcctttggcaagagacagggcagagaattcatctggaacgacctgctgtccctggaaaccggcagcctgaagctggccaacggaagagtgatcgagaagacactgtacaacagaagaacccggcaggatgagcctgccctgttcgtggccctgaccttcgagcggcgggaggtcctggactcctccaatatcaaaccaatgaacctgatcggcgtggcaagaggcgaaaacatccccgccgtgatcgccctgaccgaccccgagggctgcccactgagccggtttaaggatagcctgggaaacccaacccacatcctgagaatcggcgagagctataaggagaagcagcggaccatccaggccaagaaggaggtggagcagcggagagccggcggctacagccggaagtacgccagcaaagccaagaatctggcagacgatatggtgagaaacaccgctagagatctgctgtactacgccgtgacccaggatgccatgctgatcttcgccaacctgagccggggcttcggccggcagggcaagcggaccttcatggccgagagacagtacacacggatggaggactggctgaccgccaagctggcctacgagggcctgagcaagacctacctgtccaagacactggcccagtacacctccaagacatgcagcaactgtgggtttaccatcaccagcgccgactacgacagggtgctggagaagctgaagaagacagcaacaggctggatgaccacaattaacggcaaggagctgaaggtggagggccagattacctactacaacagatacaagagacagaacgtagtcaaggacctgtccgtcgagctggatagactgagcgaagaatctgtgaacaacgacatctcctcctggacaaagggcagaagcggagaagctctgagcctcctgaagaaaagattctcccatagacccgtgcaggagaagttcgtgtgcctgaactgcggcttcgagacacacgcagccgagcaagccgccctgaacatcgccagatcctggctgttcctgcggagccaggagtacaagaaataccagacaaacaagacaaccggcaacaccgataagagagccttcgtcgagacctggcagtccttttaccggaagaagcttaaggaggtgtggaaacctgccgtgcggtctggcggatctggcggaggctccaccagccccaagaaaaagagaaaagtctaagctgccttctgcggggcttgccttctggccatgcccttcttctctcccttgcacctgtacctcttggtctttgaataaagcctgagtaggaaggctagcaaaaaaaaaaaaaaaaaaaaaaaaaaaaaaaaaaaaaaaaaaaaaaaaaaaaaaaaaaaaaaaaaaaaaaaaaaaaaaaa

SEQ ID NO: 9080 - RNA, 8787 nt, synthetic construct
  source 1..8787: mol_type = other RNA
aggaaataagagagaaaagaagagtaagaagaaatataagagccaccatggcccctaagaagaagcgtaaagtgagccggatgaaccacgaccaggagttcgacccccctaaggtgtaccctcccgtccccgccgagaagagaaagcccatccgggtcctgagcctgttcgatggcatcgccaccggtctgctggtgctgaaggacctgggcatccaggtggataggtacattgcctccgaggtgtgcgaggactccatcaccgtgggaatggtgcgtcatcagggcaagatcatgtacgtgggcgacgtgcggagcgtgacacagaagcatatccaggagtggggccctttcgacctggtgatcggcggcagcccttgcaatgacctgagcatcgtgaacccagcccggaagggcctgtacgagggaaccggcagactgttcttcgagttttacagactgctgcacgacgcccggcctaaggaaggcgacgaccggcccttcttttggctgttcgagaatgtggtggccatgggagtcagcgacaagcgggatattagccggttcctggagagcaaccccgtgatgatcgatgccaaggaagtgagcgccgcccaccgggccagatacttctggggcaatctgcctggcatgaacagacccctggccagcaccgtgaacgacaagctggagctgcaggagtgcctggagcacggccggatcgccaagttcagcaaggtgagaaccatcaccacccgaagcaacagcatcaaacaaggcaaggaccagcactttcctgtgttcatgaacgagaaggaggacatcctgtggtgtaccgagatggagagagtgttcgggttcccagtccactacacagatgtcagcaacatgtctagactggccagacagagactgctgggaagaagctggtccgtccctgtgatcagacacctgttcgcccctctgaaggagtacttcgcctgcgtgagcagcggcaacagcaacgccaacagccggggccccagcttctctagcggcctggtgccactgtccctgagagggagccacatgggccccatggagatctacaaaaccgtgagcgcctggaagcggcagcctgtgcgcgtgctgagcctgtttcggaatatcgataaagtcctgaaaagcctgggattcctggagagcggctctggctccggcggtggcaccctgaagtacgtggaggatgtgacaaacgtggtcagacgggatgtggagaagtggggccccttcgatctggtgtacggcagcacccaacccctgggcagctcttgtgaccggtgccctggctggtacatgtttcagttccaccggatcctgcagtacgccctgccgagacaggagtcccagcggccattcttttggattttcatggacaacttgctgctgaccgaggatgaccaggaaactaccactcggttcctgcagaccgaagccgtgaccctgcaggacgtgagaggccgggactaccagaacgccatgcgggtgtggtccaacatccctggactgaaaagcaagcacgcacctctgacccctaaagaagaggagtacctgcaggcccaggtgcggagcagaagcaagctggacgcccctaaggtggatctgctggtgaagaattgcctcctgcccctgagagagtacttcaagtatttcagccagaatagtctgcccctgggaggcagcggcggcggcttccaggtgagcgtgaccttccaggacgtggccgtggacttcagcagggacgagtggaagaggctggacgacgcccagaaggccctgtacagggacgtgatgctggagaactacgagaacctggtgagcctgggcctgcccgtgagcaagctggacgtgatcagcctgctggagaggagggaggcccccaggagggccaaggagagggtgcccagggacctgccccccgacagcatcagccagggcggcccaagcagcggcgcccctcctcccagcggcggcaggcggcccaagcagcggcgcccctcctcccagcggcggcagcccagccggctccccaacctctaccgaggagggcacctctgagtccgccacccccgagagcggccctggcacctccaccgagcccagcgagggcagcgcacccggcagccctgccggcagccccacctccacagaggagggaaccagcaccgagcccagcgaaggcagcgccccaggcaccagcaccgagcctagtgagcaggagattaaacggatcaacaagatcagaagaagacttgtgaaagacagcaacaccaagaaggccggcaagacaggccccatgaaaaccctgctggttagagtgatgacacccgatctgagagagcggctggaaaacctgagaaagaagcctgaaaatatcccccagcccatcagcaatacatctagagccaacctgaataagctgctgaccgattacaccgaaatgaagaaggcgatcctgcatgtgtactgggaagagttccagaaggaccctgtgggcctgatgagccgggtggcccagcctgccagcaagaagatcgatcagaacaagctgaaacctgagatggacgagaagggcaacctgaccaccgccggctttgcctgctctcagtgtggccagcccctgttcgtgtacaagctggagcaggtgtctgagaagggcaaggcttacaccaactacttcggacggtgcaatgtggccgagcacgaaaagctgatcctgctggcccagctgaagcccgagaaggatagcgacgaagccgtgacatatagcctgggaaagtttgggcagagggccctggatttctacagcattcatgtgaccaaggagtccacccaccccgtgaagcccctggcccagatcgccggaaacagatacgcctccggacctgtgggaaaggccctgagcgacgcatgtatgggcacaatcgcctccttcctgtctaagtaccaggacatcatcatcgaacaccagaaggtggtgaagggcaaccagaagagactggagagcctgcgggagctggccggcaaggaaaacctggaataccctagcgtgaccctgccacctcagcctcacaccaaggagggcgttgatgcctacaacgaagtgatcgcccgggtgcgaatgtgggtgaacctgaacctgtggcagaagctgaagctaagcagagatgatgccaagcctctgctgagactgaagggattcccttcctttcctctggtcgagagacaggccaacgaagtggactggtgggacatggtgtgtaacgtgaagaagctgatcaacgagaaaaaggaggatggcaaggtgttttggcagaatctggctggctacaagagacaggaagccctgagaccatacctgagcagcgaggaagatcggaagaagggaaagaaattcgctcggtaccagctgggcgacctgctgctgcacctggaaaagaagcacggcgaggactggggaaaggtgtacgacgaggcctgggagcggattgacaagaaagtggaaggcctgagcaagcacatcaagctggaagaggaacggagaagcgaggacgcccagagcaaggccgccctgaccgactggctgcgggctaaggccagcttcgtgatcgagggcctgaaggaggccgacaaggacgagttctgcagatgcgagctgaagctgcagaagtggtacggggacctgcggggaaagcccttcgccatcgaagccgagaacagcatcctggacatcagcggcttcagcaagcagtacaactgtgccttcatctggcagaaggacggcgtgaagaagctgaacctgtacctgatcatcaactacttcaagggcggcaagctgcggttcaagaagatcaaacctgaagccttcgaagccaacagattctacaccgtgatcaacaaaaagagcggcgagatcgtgcccatggaggtgaacttcaacttcgacgaccccaacctgatcatcctgcctctggcctttggcaagagacagggcagagaattcatctggaacgacctgctgtccctggaaaccggcagcctgaagctggccaacggaagagtgatcgagaagacactgtacaacagaagaacccggcaggatgagcctgccctgttcgtggccctgaccttcgagcggcgggaggtcctggactcctccaatatcaaaccaatgaacctgatcggcgtggcaagaggcgaaaacatccccgccgtgatcgccctgaccgaccccgagggctgcccactgagccggtttaaggatagcctgggaaacccaacccacatcctgagaatcggcgagagctataaggagaagcagcggaccatccaggccaagaaggaggtggagcagcggagagccggcggctacagccggaagtacgccagcaaagccaagaatctggcagacgatatggtgagaaacaccgctagagatctgctgtactacgccgtgacccaggatgccatgctgatcttcgccaacctgagccggggcttcggccggcagggcaagcggaccttcatggccgagagacagtacacacggatggaggactggctgaccgccaagctggcctacgagggcctgagcaagacctacctgtccaagacactggcccagtacacctccaagacatgcagcaactgtgggtttaccatcaccagcgccgactacgacagggtgctggagaagctgaagaagacagcaacaggctggatgaccacaattaacggcaaggagctgaaggtggagggccagattacctactacaacagatacaagagacagaacgtagtcaaggacctgtccgtcgagctggatagactgagcgaagaatctgtgaacaacgacatctcctcctggacaaagggcagaagcggagaagctctgagcctcctgaagaaaagattctcccatagacccgtgcaggagaagttcgtgtgcctgaactgcggcttcgagacacacgcagccgagcaagccgccctgaacatcgccagatcctggctgttcctgcggagccaggagtacaagaaataccagacaaacaagacaaccggcaacaccgataagagagccttcgtcgagacctggcagtccttttaccggaagaagcttaaggaggtgtggaaacctgccgtgcggtctggcggatctggcggaggctccaccagccccaagaaaaagagaaaagtctaagctgccttctgcggggcttgccttctggccatgcccttcttctctcccttgcacctgtacctcttggtctttgaataaagcctgagtaggaaggctagcaaaaaaaaaaaaaaaaaaaaaaaaaaaaaaaaaaaaaaaaaaaaaaaaaaaaaaaaaaaaaaaaaaaaaaaaaaaaaaaagcccagccggctccccaacctctaccgaggagggcacctctgagtccgccacccccgagagcggccctggcacctccaccgagcccagcgagggcagcgcacccggcagccctgccggcagccccacctccacagaggagggaaccagcaccgagcccagcgaaggcagcgccccaggcaccagcaccgagcctagtgagcaggagattaaacggatcaacaagatcagaagaagacttgtgaaagacagcaacaccaagaaggccggcaagacaggccccatgaaaaccctgctggttagagtgatgacacccgatctgagagagcggctggaaaacctgagaaagaagcctgaaaatatcccccagcccatcagcaatacatctagagccaacctgaataagctgctgaccgattacaccgaaatgaagaaggcgatcctgcatgtgtactgggaagagttccagaaggaccctgtgggcctgatgagccgggtggcccagcctgccagcaagaagatcgatcagaacaagctgaaacctgagatggacgagaagggcaacctgaccaccgccggctttgcctgctctcagtgtggccagcccctgttcgtgtacaagctggagcaggtgtctgagaagggcaaggcttacaccaactacttcggacggtgcaatgtggccgagcacgaaaagctgatcctgctggcccagctgaagcccgagaaggatagcgacgaagccgtgacatatagcctgggaaagtttgggcagagggccctggatttctacagcattcatgtgaccaaggagtccacccaccccgtgaagcccctggcccagatcgccggaaacagatacgcctccggacctgtgggaaaggccctgagcgacgcatgtatgggcacaatcgcctccttcctgtctaagtaccaggacatcatcatcgaacaccagaaggtggtgaagggcaaccagaagagactggagagcctgcgggagctggccggcaaggaaaacctggaataccctagcgtgaccctgccacctcagcctcacaccaaggagggcgttgatgcctacaacgaagtgatcgcccgggtgcgaatgtgggtgaacctgaacctgtggcagaagctgaagctaagcagagatgatgccaagcctctgctgagactgaagggattcccttcctttcctctggtcgagagacaggccaacgaagtggactggtgggacatggtgtgtaacgtgaagaagctgatcaacgagaaaaaggaggatggcaaggtgttttggcagaatctggctggctacaagagacaggaagccctgagaccatacctgagcagcgaggaagatcggaagaagggaaagaaattcgctcggtaccagctgggcgacctgctgctgcacctggaaaagaagcacggcgaggactggggaaaggtgtacgacgaggcctgggagcggattgacaagaaagtggaaggcctgagcaagcacatcaagctggaagaggaacggagaagcgaggacgcccagagcaaggccgccctgaccgactggctgcgggctaaggccagcttcgtgatcgagggcctgaaggaggccgacaaggacgagttctgcagatgcgagctgaagctgcagaagtggtacggggacctgcggggaaagcccttcgccatcgaagccgagaacagcatcctggacatcagcggcttcagcaagcagtacaactgtgccttcatctggcagaaggacggcgtgaagaagctgaacctgtacctgatcatcaactacttcaagggcggcaagctgcggttcaagaagatcaaacctgaagccttcgaagccaacagattctacaccgtgatcaacaaaaagagcggcgagatcgtgcccatggaggtgaacttcaacttcgacgaccccaacctgatcatcctgcctctggcctttggcaagagacagggcagagaattcatctggaacgacctgctgtccctggaaaccggcagcctgaagctggccaacggaagagtgatcgagaagacactgtacaacagaagaacccggcaggatgagcctgccctgttcgtggccctgaccttcgagcggcgggaggtcctggactcctccaatatcaaaccaatgaacctgatcggcgtggcaagaggcgaaaacatccccgccgtgatcgccctgaccgaccccgagggctgcccactgagccggtttaaggatagcctgggaaacccaacccacatcctgagaatcggcgagagctataaggagaagcagcggaccatccaggccaagaaggaggtggagcagcggagagccggcggctacagccggaagtacgccagcaaagccaagaatctggcagacgatatggtgagaaacaccgctagagatctgctgtactacgccgtgacccaggatgccatgctgatcttcgccaacctgagccggggcttcggccggcagggcaagcggaccttcatggccgagagacagtacacacggatggaggactggctgaccgccaagctggcctacgagggcctgagcaagacctacctgtccaagacactggcccagtacacctccaagacatgcagcaactgtgggtttaccatcaccagcgccgactacgacagggtgctggagaagctgaagaagacagcaacaggctggatgaccacaattaacggcaaggagctgaaggtggagggccagattacctactacaacagatacaagagacagaacgtagtcaaggacctgtccgtcgagctggatagactgagcgaagaatctgtgaacaacgacatctcctcctggacaaagggcagaagcggagaagctctgagcctcctgaagaaaagattctcccatagacccgtgcaggagaagttcgtgtgcctgaactgcggcttcgagacacacgcagccgagcaagccgccctgaacatcgccagatcctggctgttcctgcggagccaggagtacaagaaataccagacaaacaagacaaccggcaacaccgataagagagccttcgtcgagacctggcagtccttttaccggaagaagcttaaggaggtgtggaaacctgccgtgcggtctggcggatctggcggaggctccaccagccccaagaaaaagagaaaagtctaagctgccttctgcggggcttgccttctggccatgcccttcttctctcccttgcacctgtacctcttggtctttgaataaagcctgagtaggaaggctagcaaaaaaaaaaaaaaaaaaaaaaaaaaaaaaaaaaaaaaaaaaaaaaaaaaaaaaaaaaaaaaaaaaaaaaaaaaaaaaaa

SEQ ID NO: 9081 - RNA, 8787 nt, synthetic construct
  source 1..8787: mol_type = other RNA
aggaaataagagagaaaagaagagtaagaagaaatataagagccaccatggcccctaagaagaagcgtaaagtgagccggatgaaccacgaccaggagttcgacccccctaaggtgtaccctcccgtccccgccgagaagagaaagcccatccgggtcctgagcctgttcgatggcatcgccaccggtctgctggtgctgaaggacctgggcatccaggtggataggtacattgcctccgaggtgtgcgaggactccatcaccgtgggaatggtgcgtcatcagggcaagatcatgtacgtgggcgacgtgcggagcgtgacacagaagcatatccaggagtggggccctttcgacctggtgatcggcggcagcccttgcaatgacctgagcatcgtgaacccagcccggaagggcctgtacgagggaaccggcagactgttcttcgagttttacagactgctgcacgacgcccggcctaaggaaggcgacgaccggcccttcttttggctgttcgagaatgtggtggccatgggagtcagcgacaagcgggatattagccggttcctggagagcaaccccgtgatgatcgatgccaaggaagtgagcgccgcccaccgggccagatacttctggggcaatctgcctggcatgaacagacccctggccagcaccgtgaacgacaagctggagctgcaggagtgcctggagcacggccggatcgccaagttcagcaaggtgagaaccatcaccacccgaagcaacagcatcaaacaaggcaaggaccagcactttcctgtgttcatgaacgagaaggaggacatcctgtggtgtaccgagatggagagagtgttcgggttcccagtccactacacagatgtcagcaacatgtctagactggccagacagagactgctgggaagaagctggtccgtccctgtgatcagacacctgttcgcccctctgaaggagtacttcgcctgcgtgagcagcggcaacagcaacgccaacagccggggccccagcttctctagcggcctggtgccactgtccctgagagggagccacatgggccccatggagatctacaaaaccgtgagcgcctggaagcggcagcctgtgcgcgtgctgagcctgtttcggaatatcgataaagtcctgaaaagcctgggattcctggagagcggctctggctccggcggtggcaccctgaagtacgtggaggatgtgacaaacgtggtcagacgggatgtggagaagtggggccccttcgatctggtgtacggcagcacccaacccctgggcagctcttgtgaccggtgccctggctggtacatgtttcagttccaccggatcctgcagtacgccctgccgagacaggagtcccagcggccattcttttggattttcatggacaacttgctgctgaccgaggatgaccaggaaactaccactcggttcctgcagaccgaagccgtgaccctgcaggacgtgagaggccgggactaccagaacgccatgcgggtgtggtccaacatccctggactgaaaagcaagcacgcacctctgacccctaaagaagaggagtacctgcaggcccaggtgcggagcagaagcaagctggacgcccctaaggtggatctgctggtgaagaattgcctcctgcccctgagagagtacttcaagtatttcagccagaatagtctgcccctgggaggcagcggcggcggccaggccgaggtgaccttcgaggacgtggccgtgctgttcagcagggaggagtggggcaggctgagccccgcccagaggggcctgtacagggacgtgatgctggagacctacaggaacctggtgagcctgggcgccggccccgccggccccaagcccggcgtgatcacccagctggagaggggcgacgagccctgggtgctggacgcccagggcgccaagggcaaggagaggctgagggtgagcggcggcccaagcagcggcgcccctcctcccagcggcggcaggcggcccaagcagcggcgcccctcctcccagcggcggcagcccagccggctccccaacctctaccgaggagggcacctctgagtccgccacccccgagagcggccctggcacctccaccgagcccagcgagggcagcgcacccggcagccctgccggcagccccacctccacagaggagggaaccagcaccgagcccagcgaaggcagcgccccaggcaccagcaccgagcctagtgagcaggagattaaacggatcaacaagatcagaagaagacttgtgaaagacagcaacaccaagaaggccggcaagacaggccccatgaaaaccctgctggttagagtgatgacacccgatctgagagagcggctggaaaacctgagaaagaagcctgaaaatatcccccagcccatcagcaatacatctagagccaacctgaataagctgctgaccgattacaccgaaatgaagaaggcgatcctgcatgtgtactgggaagagttccagaaggaccctgtgggcctgatgagccgggtggcccagcctgccagcaagaagatcgatcagaacaagctgaaacctgagatggacgagaagggcaacctgaccaccgccggctttgcctgctctcagtgtggccagcccctgttcgtgtacaagctggagcaggtgtctgagaagggcaaggcttacaccaactacttcggacggtgcaatgtggccgagcacgaaaagctgatcctgctggcccagctgaagcccgagaaggatagcgacgaagccgtgacatatagcctgggaaagtttgggcagagggccctggatttctacagcattcatgtgaccaaggagtccacccaccccgtgaagcccctggcccagatcgccggaaacagatacgcctccggacctgtgggaaaggccctgagcgacgcatgtatgggcacaatcgcctccttcctgtctaagtaccaggacatcatcatcgaacaccagaaggtggtgaagggcaaccagaagagactggagagcctgcgggagctggccggcaaggaaaacctggaataccctagcgtgaccctgccacctcagcctcacaccaaggagggcgttgatgcctacaacgaagtgatcgcccgggtgcgaatgtgggtgaacctgaacctgtggcagaagctgaagctaagcagagatgatgccaagcctctgctgagactgaagggattcccttcctttcctctggtcgagagacaggccaacgaagtggactggtgggacatggtgtgtaacgtgaagaagctgatcaacgagaaaaaggaggatggcaaggtgttttggcagaatctggctggctacaagagacaggaagccctgagaccatacctgagcagcgaggaagatcggaagaagggaaagaaattcgctcggtaccagctgggcgacctgctgctgcacctggaaaagaagcacggcgaggactggggaaaggtgtacgacgaggcctgggagcggattgacaagaaagtggaaggcctgagcaagcacatcaagctggaagaggaacggagaagcgaggacgcccagagcaaggccgccctgaccgactggctgcgggctaaggccagcttcgtgatcgagggcctgaaggaggccgacaaggacgagttctgcagatgcgagctgaagctgcagaagtggtacggggacctgcggggaaagcccttcgccatcgaagccgagaacagcatcctggacatcagcggcttcagcaagcagtacaactgtgccttcatctggcagaaggacggcgtgaagaagctgaacctgtacctgatcatcaactacttcaagggcggcaagctgcggttcaagaagatcaaacctgaagccttcgaagccaacagattctacaccgtgatcaacaaaaagagcggcgagatcgtgcccatggaggtgaacttcaacttcgacgaccccaacctgatcatcctgcctctggcctttggcaagagacagggcagagaattcatctggaacgacctgctgtccctggaaaccggcagcctgaagctggccaacggaagagtgatcgagaagacactgtacaacagaagaacccggcaggatgagcctgccctgttcgtggccctgaccttcgagcggcgggaggtcctggactcctccaatatcaaaccaatgaacctgatcggcgtggcaagaggcgaaaacatccccgccgtgatcgccctgaccgaccccgagggctgcccactgagccggtttaaggatagcctgggaaacccaacccacatcctgagaatcggcgagagctataaggagaagcagcggaccatccaggccaagaaggaggtggagcagcggagagccggcggctacagccggaagtacgccagcaaagccaagaatctggcagacgatatggtgagaaacaccgctagagatctgctgtactacgccgtgacccaggatgccatgctgatcttcgccaacctgagccggggcttcggccggcagggcaagcggaccttcatggccgagagacagtacacacggatggaggactggctgaccgccaagctggcctacgagggcctgagcaagacctacctgtccaagacactggcccagtacacctccaagacatgcagcaactgtgggtttaccatcaccagcgccgactacgacagggtgctggagaagctgaagaagacagcaacaggctggatgaccacaattaacggcaaggagctgaaggtggagggccagattacctactacaacagatacaagagacagaacgtagtcaaggacctgtccgtcgagctggatagactgagcgaagaatctgtgaacaacgacatctcctcctggacaaagggcagaagcggagaagctctgagcctcctgaagaaaagattctcccatagacccgtgcaggagaagttcgtgtgcctgaactgcggcttcgagacacacgcagccgagcaagccgccctgaacatcgccagatcctggctgttcctgcggagccaggagtacaagaaataccagacaaacaagacaaccggcaacaccgataagagagccttcgtcgagacctggcagtccttttaccggaagaagcttaaggaggtgtggaaacctgccgtgcggtctggcggatctggcggaggctccaccagccccaagaaaaagagaaaagtctaagctgccttctgcggggcttgccttctggccatgcccttcttctctcccttgcacctgtacctcttggtctttgaataaagcctgagtaggaaggctagcaaaaaaaaaaaaaaaaaaaaaaaaaaaaaaaaaaaaaaaaaaaaaaaaaaaaaaaaaaaaaaaaaaaaaaaaaaaaaaaagcccagccggctccccaacctctaccgaggagggcacctctgagtccgccacccccgagagcggccctggcacctccaccgagcccagcgagggcagcgcacccggcagccctgccggcagccccacctccacagaggagggaaccagcaccgagcccagcgaaggcagcgccccaggcaccagcaccgagcctagtgagcaggagattaaacggatcaacaagatcagaagaagacttgtgaaagacagcaacaccaagaaggccggcaagacaggccccatgaaaaccctgctggttagagtgatgacacccgatctgagagagcggctggaaaacctgagaaagaagcctgaaaatatcccccagcccatcagcaatacatctagagccaacctgaataagctgctgaccgattacaccgaaatgaagaaggcgatcctgcatgtgtactgggaagagttccagaaggaccctgtgggcctgatgagccgggtggcccagcctgccagcaagaagatcgatcagaacaagctgaaacctgagatggacgagaagggcaacctgaccaccgccggctttgcctgctctcagtgtggccagcccctgttcgtgtacaagctggagcaggtgtctgagaagggcaaggcttacaccaactacttcggacggtgcaatgtggccgagcacgaaaagctgatcctgctggcccagctgaagcccgagaaggatagcgacgaagccgtgacatatagcctgggaaagtttgggcagagggccctggatttctacagcattcatgtgaccaaggagtccacccaccccgtgaagcccctggcccagatcgccggaaacagatacgcctccggacctgtgggaaaggccctgagcgacgcatgtatgggcacaatcgcctccttcctgtctaagtaccaggacatcatcatcgaacaccagaaggtggtgaagggcaaccagaagagactggagagcctgcgggagctggccggcaaggaaaacctggaataccctagcgtgaccctgccacctcagcctcacaccaaggagggcgttgatgcctacaacgaagtgatcgcccgggtgcgaatgtgggtgaacctgaacctgtggcagaagctgaagctaagcagagatgatgccaagcctctgctgagactgaagggattcccttcctttcctctggtcgagagacaggccaacgaagtggactggtgggacatggtgtgtaacgtgaagaagctgatcaacgagaaaaaggaggatggcaaggtgttttggcagaatctggctggctacaagagacaggaagccctgagaccatacctgagcagcgaggaagatcggaagaagggaaagaaattcgctcggtaccagctgggcgacctgctgctgcacctggaaaagaagcacggcgaggactggggaaaggtgtacgacgaggcctgggagcggattgacaagaaagtggaaggcctgagcaagcacatcaagctggaagaggaacggagaagcgaggacgcccagagcaaggccgccctgaccgactggctgcgggctaaggccagcttcgtgatcgagggcctgaaggaggccgacaaggacgagttctgcagatgcgagctgaagctgcagaagtggtacggggacctgcggggaaagcccttcgccatcgaagccgagaacagcatcctggacatcagcggcttcagcaagcagtacaactgtgccttcatctggcagaaggacggcgtgaagaagctgaacctgtacctgatcatcaactacttcaagggcggcaagctgcggttcaagaagatcaaacctgaagccttcgaagccaacagattctacaccgtgatcaacaaaaagagcggcgagatcgtgcccatggaggtgaacttcaacttcgacgaccccaacctgatcatcctgcctctggcctttggcaagagacagggcagagaattcatctggaacgacctgctgtccctggaaaccggcagcctgaagctggccaacggaagagtgatcgagaagacactgtacaacagaagaacccggcaggatgagcctgccctgttcgtggccctgaccttcgagcggcgggaggtcctggactcctccaatatcaaaccaatgaacctgatcggcgtggcaagaggcgaaaacatccccgccgtgatcgccctgaccgaccccgagggctgcccactgagccggtttaaggatagcctgggaaacccaacccacatcctgagaatcggcgagagctataaggagaagcagcggaccatccaggccaagaaggaggtggagcagcggagagccggcggctacagccggaagtacgccagcaaagccaagaatctggcagacgatatggtgagaaacaccgctagagatctgctgtactacgccgtgacccaggatgccatgctgatcttcgccaacctgagccggggcttcggccggcagggcaagcggaccttcatggccgagagacagtacacacggatggaggactggctgaccgccaagctggcctacgagggcctgagcaagacctacctgtccaagacactggcccagtacacctccaagacatgcagcaactgtgggtttaccatcaccagcgccgactacgacagggtgctggagaagctgaagaagacagcaacaggctggatgaccacaattaacggcaaggagctgaaggtggagggccagattacctactacaacagatacaagagacagaacgtagtcaaggacctgtccgtcgagctggatagactgagcgaagaatctgtgaacaacgacatctcctcctggacaaagggcagaagcggagaagctctgagcctcctgaagaaaagattctcccatagacccgtgcaggagaagttcgtgtgcctgaactgcggcttcgagacacacgcagccgagcaagccgccctgaacatcgccagatcctggctgttcctgcggagccaggagtacaagaaataccagacaaacaagacaaccggcaacaccgataagagagccttcgtcgagacctggcagtccttttaccggaagaagcttaaggaggtgtggaaacctgccgtgcggtctggcggatctggcggaggctccaccagccccaagaaaaagagaaaagtctaagctgccttctgcggggcttgccttctggccatgcccttcttctctcccttgcacctgtacctcttggtctttgaataaagcctgagtaggaaggctagcaaaaaaaaaaaaaaaaaaaaaaaaaaaaaaaaaaaaaaaaaaaaaaaaaaaaaaaaaaaaaaaaaaaaaaaaaaaaaaaa

SEQ ID NO: 9082 - RNA, 8787 nt, synthetic construct
  source 1..8787: mol_type = other RNA
aggaaataagagagaaaagaagagtaagaagaaatataagagccaccatggcccctaagaagaagcgtaaagtgagccggatgaaccacgaccaggagttcgacccccctaaggtgtaccctcccgtccccgccgagaagagaaagcccatccgggtcctgagcctgttcgatggcatcgccaccggtctgctggtgctgaaggacctgggcatccaggtggataggtacattgcctccgaggtgtgcgaggactccatcaccgtgggaatggtgcgtcatcagggcaagatcatgtacgtgggcgacgtgcggagcgtgacacagaagcatatccaggagtggggccctttcgacctggtgatcggcggcagcccttgcaatgacctgagcatcgtgaacccagcccggaagggcctgtacgagggaaccggcagactgttcttcgagttttacagactgctgcacgacgcccggcctaaggaaggcgacgaccggcccttcttttggctgttcgagaatgtggtggccatgggagtcagcgacaagcgggatattagccggttcctggagagcaaccccgtgatgatcgatgccaaggaagtgagcgccgcccaccgggccagatacttctggggcaatctgcctggcatgaacagacccctggccagcaccgtgaacgacaagctggagctgcaggagtgcctggagcacggccggatcgccaagttcagcaaggtgagaaccatcaccacccgaagcaacagcatcaaacaaggcaaggaccagcactttcctgtgttcatgaacgagaaggaggacatcctgtggtgtaccgagatggagagagtgttcgggttcccagtccactacacagatgtcagcaacatgtctagactggccagacagagactgctgggaagaagctggtccgtccctgtgatcagacacctgttcgcccctctgaaggagtacttcgcctgcgtgagcagcggcaacagcaacgccaacagccggggccccagcttctctagcggcctggtgccactgtccctgagagggagccacatgggccccatggagatctacaaaaccgtgagcgcctggaagcggcagcctgtgcgcgtgctgagcctgtttcggaatatcgataaagtcctgaaaagcctgggattcctggagagcggctctggctccggcggtggcaccctgaagtacgtggaggatgtgacaaacgtggtcagacgggatgtggagaagtggggccccttcgatctggtgtacggcagcacccaacccctgggcagctcttgtgaccggtgccctggctggtacatgtttcagttccaccggatcctgcagtacgccctgccgagacaggagtcccagcggccattcttttggattttcatggacaacttgctgctgaccgaggatgaccaggaaactaccactcggttcctgcagaccgaagccgtgaccctgcaggacgtgagaggccgggactaccagaacgccatgcgggtgtggtccaacatccctggactgaaaagcaagcacgcacctctgacccctaaagaagaggagtacctgcaggcccaggtgcggagcagaagcaagctggacgcccctaaggtggatctgctggtgaagaattgcctcctgcccctgagagagtacttcaagtatttcagccagaatagtctgcccctgggaggcagcggcggcggcggcaagatgagcgtgaccttcgaggacgtggccctgtacttcagccccgaggagtgggccaagctgagcggctgccagaggcagctgtaccaggaggtgatgctggagaactaccagatggtggccagcctgggctgggccaacgtgaagcccgagatcatctgcaagatggagagggaggagaccccctgcgtgcccgacgtgcccggcaagcagcagaggcaccagagccccgtgcccgtgggcggcccaagcagcggcgcccctcctcccagcggcggcaggcggcccaagcagcggcgcccctcctcccagcggcggcagcccagccggctccccaacctctaccgaggagggcacctctgagtccgccacccccgagagcggccctggcacctccaccgagcccagcgagggcagcgcacccggcagccctgccggcagccccacctccacagaggagggaaccagcaccgagcccagcgaaggcagcgccccaggcaccagcaccgagcctagtgagcaggagattaaacggatcaacaagatcagaagaagacttgtgaaagacagcaacaccaagaaggccggcaagacaggccccatgaaaaccctgctggttagagtgatgacacccgatctgagagagcggctggaaaacctgagaaagaagcctgaaaatatcccccagcccatcagcaatacatctagagccaacctgaataagctgctgaccgattacaccgaaatgaagaaggcgatcctgcatgtgtactgggaagagttccagaaggaccctgtgggcctgatgagccgggtggcccagcctgccagcaagaagatcgatcagaacaagctgaaacctgagatggacgagaagggcaacctgaccaccgccggctttgcctgctctcagtgtggccagcccctgttcgtgtacaagctggagcaggtgtctgagaagggcaaggcttacaccaactacttcggacggtgcaatgtggccgagcacgaaaagctgatcctgctggcccagctgaagcccgagaaggatagcgacgaagccgtgacatatagcctgggaaagtttgggcagagggccctggatttctacagcattcatgtgaccaaggagtccacccaccccgtgaagcccctggcccagatcgccggaaacagatacgcctccggacctgtgggaaaggccctgagcgacgcatgtatgggcacaatcgcctccttcctgtctaagtaccaggacatcatcatcgaacaccagaaggtggtgaagggcaaccagaagagactggagagcctgcgggagctggccggcaaggaaaacctggaataccctagcgtgaccctgccacctcagcctcacaccaaggagggcgttgatgcctacaacgaagtgatcgcccgggtgcgaatgtgggtgaacctgaacctgtggcagaagctgaagctaagcagagatgatgccaagcctctgctgagactgaagggattcccttcctttcctctggtcgagagacaggccaacgaagtggactggtgggacatggtgtgtaacgtgaagaagctgatcaacgagaaaaaggaggatggcaaggtgttttggcagaatctggctggctacaagagacaggaagccctgagaccatacctgagcagcgaggaagatcggaagaagggaaagaaattcgctcggtaccagctgggcgacctgctgctgcacctggaaaagaagcacggcgaggactggggaaaggtgtacgacgaggcctgggagcggattgacaagaaagtggaaggcctgagcaagcacatcaagctggaagaggaacggagaagcgaggacgcccagagcaaggccgccctgaccgactggctgcgggctaaggccagcttcgtgatcgagggcctgaaggaggccgacaaggacgagttctgcagatgcgagctgaagctgcagaagtggtacggggacctgcggggaaagcccttcgccatcgaagccgagaacagcatcctggacatcagcggcttcagcaagcagtacaactgtgccttcatctggcagaaggacggcgtgaagaagctgaacctgtacctgatcatcaactacttcaagggcggcaagctgcggttcaagaagatcaaacctgaagccttcgaagccaacagattctacaccgtgatcaacaaaaagagcggcgagatcgtgcccatggaggtgaacttcaacttcgacgaccccaacctgatcatcctgcctctggcctttggcaagagacagggcagagaattcatctggaacgacctgctgtccctggaaaccggcagcctgaagctggccaacggaagagtgatcgagaagacactgtacaacagaagaacccggcaggatgagcctgccctgttcgtggccctgaccttcgagcggcgggaggtcctggactcctccaatatcaaaccaatgaacctgatcggcgtggcaagaggcgaaaacatccccgccgtgatcgccctgaccgaccccgagggctgcccactgagccggtttaaggatagcctgggaaacccaacccacatcctgagaatcggcgagagctataaggagaagcagcggaccatccaggccaagaaggaggtggagcagcggagagccggcggctacagccggaagtacgccagcaaagccaagaatctggcagacgatatggtgagaaacaccgctagagatctgctgtactacgccgtgacccaggatgccatgctgatcttcgccaacctgagccggggcttcggccggcagggcaagcggaccttcatggccgagagacagtacacacggatggaggactggctgaccgccaagctggcctacgagggcctgagcaagacctacctgtccaagacactggcccagtacacctccaagacatgcagcaactgtgggtttaccatcaccagcgccgactacgacagggtgctggagaagctgaagaagacagcaacaggctggatgaccacaattaacggcaaggagctgaaggtggagggccagattacctactacaacagatacaagagacagaacgtagtcaaggacctgtccgtcgagctggatagactgagcgaagaatctgtgaacaacgacatctcctcctggacaaagggcagaagcggagaagctctgagcctcctgaagaaaagattctcccatagacccgtgcaggagaagttcgtgtgcctgaactgcggcttcgagacacacgcagccgagcaagccgccctgaacatcgccagatcctggctgttcctgcggagccaggagtacaagaaataccagacaaacaagacaaccggcaacaccgataagagagccttcgtcgagacctggcagtccttttaccggaagaagcttaaggaggtgtggaaacctgccgtgcggtctggcggatctggcggaggctccaccagccccaagaaaaagagaaaagtctaagctgccttctgcggggcttgccttctggccatgcccttcttctctcccttgcacctgtacctcttggtctttgaataaagcctgagtaggaaggctagcaaaaaaaaaaaaaaaaaaaaaaaaaaaaaaaaaaaaaaaaaaaaaaaaaaaaaaaaaaaaaaaaaaaaaaaaaaaaaaaagcccagccggctccccaacctctaccgaggagggcacctctgagtccgccacccccgagagcggccctggcacctccaccgagcccagcgagggcagcgcacccggcagccctgccggcagccccacctccacagaggagggaaccagcaccgagcccagcgaaggcagcgccccaggcaccagcaccgagcctagtgagcaggagattaaacggatcaacaagatcagaagaagacttgtgaaagacagcaacaccaagaaggccggcaagacaggccccatgaaaaccctgctggttagagtgatgacacccgatctgagagagcggctggaaaacctgagaaagaagcctgaaaatatcccccagcccatcagcaatacatctagagccaacctgaataagctgctgaccgattacaccgaaatgaagaaggcgatcctgcatgtgtactgggaagagttccagaaggaccctgtgggcctgatgagccgggtggcccagcctgccagcaagaagatcgatcagaacaagctgaaacctgagatggacgagaagggcaacctgaccaccgccggctttgcctgctctcagtgtggccagcccctgttcgtgtacaagctggagcaggtgtctgagaagggcaaggcttacaccaactacttcggacggtgcaatgtggccgagcacgaaaagctgatcctgctggcccagctgaagcccgagaaggatagcgacgaagccgtgacatatagcctgggaaagtttgggcagagggccctggatttctacagcattcatgtgaccaaggagtccacccaccccgtgaagcccctggcccagatcgccggaaacagatacgcctccggacctgtgggaaaggccctgagcgacgcatgtatgggcacaatcgcctccttcctgtctaagtaccaggacatcatcatcgaacaccagaaggtggtgaagggcaaccagaagagactggagagcctgcgggagctggccggcaaggaaaacctggaataccctagcgtgaccctgccacctcagcctcacaccaaggagggcgttgatgcctacaacgaagtgatcgcccgggtgcgaatgtgggtgaacctgaacctgtggcagaagctgaagctaagcagagatgatgccaagcctctgctgagactgaagggattcccttcctttcctctggtcgagagacaggccaacgaagtggactggtgggacatggtgtgtaacgtgaagaagctgatcaacgagaaaaaggaggatggcaaggtgttttggcagaatctggctggctacaagagacaggaagccctgagaccatacctgagcagcgaggaagatcggaagaagggaaagaaattcgctcggtaccagctgggcgacctgctgctgcacctggaaaagaagcacggcgaggactggggaaaggtgtacgacgaggcctgggagcggattgacaagaaagtggaaggcctgagcaagcacatcaagctggaagaggaacggagaagcgaggacgcccagagcaaggccgccctgaccgactggctgcgggctaaggccagcttcgtgatcgagggcctgaaggaggccgacaaggacgagttctgcagatgcgagctgaagctgcagaagtggtacggggacctgcggggaaagcccttcgccatcgaagccgagaacagcatcctggacatcagcggcttcagcaagcagtacaactgtgccttcatctggcagaaggacggcgtgaagaagctgaacctgtacctgatcatcaactacttcaagggcggcaagctgcggttcaagaagatcaaacctgaagccttcgaagccaacagattctacaccgtgatcaacaaaaagagcggcgagatcgtgcccatggaggtgaacttcaacttcgacgaccccaacctgatcatcctgcctctggcctttggcaagagacagggcagagaattcatctggaacgacctgctgtccctggaaaccggcagcctgaagctggccaacggaagagtgatcgagaagacactgtacaacagaagaacccggcaggatgagcctgccctgttcgtggccctgaccttcgagcggcgggaggtcctggactcctccaatatcaaaccaatgaacctgatcggcgtggcaagaggcgaaaacatccccgccgtgatcgccctgaccgaccccgagggctgcccactgagccggtttaaggatagcctgggaaacccaacccacatcctgagaatcggcgagagctataaggagaagcagcggaccatccaggccaagaaggaggtggagcagcggagagccggcggctacagccggaagtacgccagcaaagccaagaatctggcagacgatatggtgagaaacaccgctagagatctgctgtactacgccgtgacccaggatgccatgctgatcttcgccaacctgagccggggcttcggccggcagggcaagcggaccttcatggccgagagacagtacacacggatggaggactggctgaccgccaagctggcctacgagggcctgagcaagacctacctgtccaagacactggcccagtacacctccaagacatgcagcaactgtgggtttaccatcaccagcgccgactacgacagggtgctggagaagctgaagaagacagcaacaggctggatgaccacaattaacggcaaggagctgaaggtggagggccagattacctactacaacagatacaagagacagaacgtagtcaaggacctgtccgtcgagctggatagactgagcgaagaatctgtgaacaacgacatctcctcctggacaaagggcagaagcggagaagctctgagcctcctgaagaaaagattctcccatagacccgtgcaggagaagttcgtgtgcctgaactgcggcttcgagacacacgcagccgagcaagccgccctgaacatcgccagatcctggctgttcctgcggagccaggagtacaagaaataccagacaaacaagacaaccggcaacaccgataagagagccttcgtcgagacctggcagtccttttaccggaagaagcttaaggaggtgtggaaacctgccgtgcggtctggcggatctggcggaggctccaccagccccaagaaaaagagaaaagtctaagctgccttctgcggggcttgccttctggccatgcccttcttctctcccttgcacctgtacctcttggtctttgaataaagcctgagtaggaaggctagcaaaaaaaaaaaaaaaaaaaaaaaaaaaaaaaaaaaaaaaaaaaaaaaaaaaaaaaaaaaaaaaaaaaaaaaaaaaaaaaa

SEQ ID NO: 9083 - RNA, 8784 nt, synthetic construct
  source 1..8784: mol_type = other RNA
aggaaataagagagaaaagaagagtaagaagaaatataagagccaccatggcccctaagaagaagcgtaaagtgagccggatgaaccacgaccaggagttcgacccccctaaggtgtaccctcccgtccccgccgagaagagaaagcccatccgggtcctgagcctgttcgatggcatcgccaccggtctgctggtgctgaaggacctgggcatccaggtggataggtacattgcctccgaggtgtgcgaggactccatcaccgtgggaatggtgcgtcatcagggcaagatcatgtacgtgggcgacgtgcggagcgtgacacagaagcatatccaggagtggggccctttcgacctggtgatcggcggcagcccttgcaatgacctgagcatcgtgaacccagcccggaagggcctgtacgagggaaccggcagactgttcttcgagttttacagactgctgcacgacgcccggcctaaggaaggcgacgaccggcccttcttttggctgttcgagaatgtggtggccatgggagtcagcgacaagcgggatattagccggttcctggagagcaaccccgtgatgatcgatgccaaggaagtgagcgccgcccaccgggccagatacttctggggcaatctgcctggcatgaacagacccctggccagcaccgtgaacgacaagctggagctgcaggagtgcctggagcacggccggatcgccaagttcagcaaggtgagaaccatcaccacccgaagcaacagcatcaaacaaggcaaggaccagcactttcctgtgttcatgaacgagaaggaggacatcctgtggtgtaccgagatggagagagtgttcgggttcccagtccactacacagatgtcagcaacatgtctagactggccagacagagactgctgggaagaagctggtccgtccctgtgatcagacacctgttcgcccctctgaaggagtacttcgcctgcgtgagcagcggcaacagcaacgccaacagccggggccccagcttctctagcggcctggtgccactgtccctgagagggagccacatgggccccatggagatctacaaaaccgtgagcgcctggaagcggcagcctgtgcgcgtgctgagcctgtttcggaatatcgataaagtcctgaaaagcctgggattcctggagagcggctctggctccggcggtggcaccctgaagtacgtggaggatgtgacaaacgtggtcagacgggatgtggagaagtggggccccttcgatctggtgtacggcagcacccaacccctgggcagctcttgtgaccggtgccctggctggtacatgtttcagttccaccggatcctgcagtacgccctgccgagacaggagtcccagcggccattcttttggattttcatggacaacttgctgctgaccgaggatgaccaggaaactaccactcggttcctgcagaccgaagccgtgaccctgcaggacgtgagaggccgggactaccagaacgccatgcgggtgtggtccaacatccctggactgaaaagcaagcacgcacctctgacccctaaagaagaggagtacctgcaggcccaggtgcggagcagaagcaagctggacgcccctaaggtggatctgctggtgaagaattgcctcctgcccctgagagagtacttcaagtatttcagccagaatagtctgcccctgggaggcagcggcggcggcagagagagcctggaggacgaggtgacccccggcctgcccaccgccgagagccaggagctgctgaccttcaaggacatcagcatcgacttcacccaggaggagtggggccagctggcccccgcccaccagaacctgtacagagaggtgatgctggagaactacagcaacctggtgagcgtgggctaccagctgagcaagcccagcgtgatcagccagctggagaagggcgaggagccctggggcggcccaagcagcggcgcccctcctcccagcggcggcaggcggcccaagcagcggcgcccctcctcccagcggcggcagcccagccggctccccaacctctaccgaggagggcacctctgagtccgccacccccgagagcggccctggcacctccaccgagcccagcgagggcagcgcacccggcagccctgccggcagccccacctccacagaggagggaaccagcaccgagcccagcgaaggcagcgccccaggcaccagcaccgagcctagtgagcaggagattaaacggatcaacaagatcagaagaagacttgtgaaagacagcaacaccaagaaggccggcaagacaggccccatgaaaaccctgctggttagagtgatgacacccgatctgagagagcggctggaaaacctgagaaagaagcctgaaaatatcccccagcccatcagcaatacatctagagccaacctgaataagctgctgaccgattacaccgaaatgaagaaggcgatcctgcatgtgtactgggaagagttccagaaggaccctgtgggcctgatgagccgggtggcccagcctgccagcaagaagatcgatcagaacaagctgaaacctgagatggacgagaagggcaacctgaccaccgccggctttgcctgctctcagtgtggccagcccctgttcgtgtacaagctggagcaggtgtctgagaagggcaaggcttacaccaactacttcggacggtgcaatgtggccgagcacgaaaagctgatcctgctggcccagctgaagcccgagaaggatagcgacgaagccgtgacatatagcctgggaaagtttgggcagagggccctggatttctacagcattcatgtgaccaaggagtccacccaccccgtgaagcccctggcccagatcgccggaaacagatacgcctccggacctgtgggaaaggccctgagcgacgcatgtatgggcacaatcgcctccttcctgtctaagtaccaggacatcatcatcgaacaccagaaggtggtgaagggcaaccagaagagactggagagcctgcgggagctggccggcaaggaaaacctggaataccctagcgtgaccctgccacctcagcctcacaccaaggagggcgttgatgcctacaacgaagtgatcgcccgggtgcgaatgtgggtgaacctgaacctgtggcagaagctgaagctaagcagagatgatgccaagcctctgctgagactgaagggattcccttcctttcctctggtcgagagacaggccaacgaagtggactggtgggacatggtgtgtaacgtgaagaagctgatcaacgagaaaaaggaggatggcaaggtgttttggcagaatctggctggctacaagagacaggaagccctgagaccatacctgagcagcgaggaagatcggaagaagggaaagaaattcgctcggtaccagctgggcgacctgctgctgcacctggaaaagaagcacggcgaggactggggaaaggtgtacgacgaggcctgggagcggattgacaagaaagtggaaggcctgagcaagcacatcaagctggaagaggaacggagaagcgaggacgcccagagcaaggccgccctgaccgactggctgcgggctaaggccagcttcgtgatcgagggcctgaaggaggccgacaaggacgagttctgcagatgcgagctgaagctgcagaagtggtacggggacctgcggggaaagcccttcgccatcgaagccgagaacagcatcctggacatcagcggcttcagcaagcagtacaactgtgccttcatctggcagaaggacggcgtgaagaagctgaacctgtacctgatcatcaactacttcaagggcggcaagctgcggttcaagaagatcaaacctgaagccttcgaagccaacagattctacaccgtgatcaacaaaaagagcggcgagatcgtgcccatggaggtgaacttcaacttcgacgaccccaacctgatcatcctgcctctggcctttggcaagagacagggcagagaattcatctggaacgacctgctgtccctggaaaccggcagcctgaagctggccaacggaagagtgatcgagaagacactgtacaacagaagaacccggcaggatgagcctgccctgttcgtggccctgaccttcgagcggcgggaggtcctggactcctccaatatcaaaccaatgaacctgatcggcgtggcaagaggcgaaaacatccccgccgtgatcgccctgaccgaccccgagggctgcccactgagccggtttaaggatagcctgggaaacccaacccacatcctgagaatcggcgagagctataaggagaagcagcggaccatccaggccaagaaggaggtggagcagcggagagccggcggctacagccggaagtacgccagcaaagccaagaatctggcagacgatatggtgagaaacaccgctagagatctgctgtactacgccgtgacccaggatgccatgctgatcttcgccaacctgagccggggcttcggccggcagggcaagcggaccttcatggccgagagacagtacacacggatggaggactggctgaccgccaagctggcctacgagggcctgagcaagacctacctgtccaagacactggcccagtacacctccaagacatgcagcaactgtgggtttaccatcaccagcgccgactacgacagggtgctggagaagctgaagaagacagcaacaggctggatgaccacaattaacggcaaggagctgaaggtggagggccagattacctactacaacagatacaagagacagaacgtagtcaaggacctgtccgtcgagctggatagactgagcgaagaatctgtgaacaacgacatctcctcctggacaaagggcagaagcggagaagctctgagcctcctgaagaaaagattctcccatagacccgtgcaggagaagttcgtgtgcctgaactgcggcttcgagacacacgcagccgagcaagccgccctgaacatcgccagatcctggctgttcctgcggagccaggagtacaagaaataccagacaaacaagacaaccggcaacaccgataagagagccttcgtcgagacctggcagtccttttaccggaagaagcttaaggaggtgtggaaacctgccgtgcggtctggcggatctggcggaggctccaccagccccaagaaaaagagaaaagtctaagctgccttctgcggggcttgccttctggccatgcccttcttctctcccttgcacctgtacctcttggtctttgaataaagcctgagtaggaaggctagcaaaaaaaaaaaaaaaaaaaaaaaaaaaaaaaaaaaaaaaaaaaaaaaaaaaaaaaaaaaaaaaaaaaaaaaaaaaaaaaagcccagccggctccccaacctctaccgaggagggcacctctgagtccgccacccccgagagcggccctggcacctccaccgagcccagcgagggcagcgcacccggcagccctgccggcagccccacctccacagaggagggaaccagcaccgagcccagcgaaggcagcgccccaggcaccagcaccgagcctagtgagcaggagattaaacggatcaacaagatcagaagaagacttgtgaaagacagcaacaccaagaaggccggcaagacaggccccatgaaaaccctgctggttagagtgatgacacccgatctgagagagcggctggaaaacctgagaaagaagcctgaaaatatcccccagcccatcagcaatacatctagagccaacctgaataagctgctgaccgattacaccgaaatgaagaaggcgatcctgcatgtgtactgggaagagttccagaaggaccctgtgggcctgatgagccgggtggcccagcctgccagcaagaagatcgatcagaacaagctgaaacctgagatggacgagaagggcaacctgaccaccgccggctttgcctgctctcagtgtggccagcccctgttcgtgtacaagctggagcaggtgtctgagaagggcaaggcttacaccaactacttcggacggtgcaatgtggccgagcacgaaaagctgatcctgctggcccagctgaagcccgagaaggatagcgacgaagccgtgacatatagcctgggaaagtttgggcagagggccctggatttctacagcattcatgtgaccaaggagtccacccaccccgtgaagcccctggcccagatcgccggaaacagatacgcctccggacctgtgggaaaggccctgagcgacgcatgtatgggcacaatcgcctccttcctgtctaagtaccaggacatcatcatcgaacaccagaaggtggtgaagggcaaccagaagagactggagagcctgcgggagctggccggcaaggaaaacctggaataccctagcgtgaccctgccacctcagcctcacaccaaggagggcgttgatgcctacaacgaagtgatcgcccgggtgcgaatgtgggtgaacctgaacctgtggcagaagctgaagctaagcagagatgatgccaagcctctgctgagactgaagggattcccttcctttcctctggtcgagagacaggccaacgaagtggactggtgggacatggtgtgtaacgtgaagaagctgatcaacgagaaaaaggaggatggcaaggtgttttggcagaatctggctggctacaagagacaggaagccctgagaccatacctgagcagcgaggaagatcggaagaagggaaagaaattcgctcggtaccagctgggcgacctgctgctgcacctggaaaagaagcacggcgaggactggggaaaggtgtacgacgaggcctgggagcggattgacaagaaagtggaaggcctgagcaagcacatcaagctggaagaggaacggagaagcgaggacgcccagagcaaggccgccctgaccgactggctgcgggctaaggccagcttcgtgatcgagggcctgaaggaggccgacaaggacgagttctgcagatgcgagctgaagctgcagaagtggtacggggacctgcggggaaagcccttcgccatcgaagccgagaacagcatcctggacatcagcggcttcagcaagcagtacaactgtgccttcatctggcagaaggacggcgtgaagaagctgaacctgtacctgatcatcaactacttcaagggcggcaagctgcggttcaagaagatcaaacctgaagccttcgaagccaacagattctacaccgtgatcaacaaaaagagcggcgagatcgtgcccatggaggtgaacttcaacttcgacgaccccaacctgatcatcctgcctctggcctttggcaagagacagggcagagaattcatctggaacgacctgctgtccctggaaaccggcagcctgaagctggccaacggaagagtgatcgagaagacactgtacaacagaagaacccggcaggatgagcctgccctgttcgtggccctgaccttcgagcggcgggaggtcctggactcctccaatatcaaaccaatgaacctgatcggcgtggcaagaggcgaaaacatccccgccgtgatcgccctgaccgaccccgagggctgcccactgagccggtttaaggatagcctgggaaacccaacccacatcctgagaatcggcgagagctataaggagaagcagcggaccatccaggccaagaaggaggtggagcagcggagagccggcggctacagccggaagtacgccagcaaagccaagaatctggcagacgatatggtgagaaacaccgctagagatctgctgtactacgccgtgacccaggatgccatgctgatcttcgccaacctgagccggggcttcggccggcagggcaagcggaccttcatggccgagagacagtacacacggatggaggactggctgaccgccaagctggcctacgagggcctgagcaagacctacctgtccaagacactggcccagtacacctccaagacatgcagcaactgtgggtttaccatcaccagcgccgactacgacagggtgctggagaagctgaagaagacagcaacaggctggatgaccacaattaacggcaaggagctgaaggtggagggccagattacctactacaacagatacaagagacagaacgtagtcaaggacctgtccgtcgagctggatagactgagcgaagaatctgtgaacaacgacatctcctcctggacaaagggcagaagcggagaagctctgagcctcctgaagaaaagattctcccatagacccgtgcaggagaagttcgtgtgcctgaactgcggcttcgagacacacgcagccgagcaagccgccctgaacatcgccagatcctggctgttcctgcggagccaggagtacaagaaataccagacaaacaagacaaccggcaacaccgataagagagccttcgtcgagacctggcagtccttttaccggaagaagcttaaggaggtgtggaaacctgccgtgcggtctggcggatctggcggaggctccaccagccccaagaaaaagagaaaagtctaagctgccttctgcggggcttgccttctggccatgcccttcttctctcccttgcacctgtacctcttggtctttgaataaagcctgagtaggaaggctagcaaaaaaaaaaaaaaaaaaaaaaaaaaaaaaaaaaaaaaaaaaaaaaaaaaaaaaaaaaaaaaaaaaaaaaaaaaaaaaaa

SEQ ID NO: 9084 - RNA, 8787 nt, synthetic construct
  source 1..8787: mol_type = other RNA
aggaaataagagagaaaagaagagtaagaagaaatataagagccaccatggcccctaagaagaagcgtaaagtgagccggatgaaccacgaccaggagttcgacccccctaaggtgtaccctcccgtccccgccgagaagagaaagcccatccgggtcctgagcctgttcgatggcatcgccaccggtctgctggtgctgaaggacctgggcatccaggtggataggtacattgcctccgaggtgtgcgaggactccatcaccgtgggaatggtgcgtcatcagggcaagatcatgtacgtgggcgacgtgcggagcgtgacacagaagcatatccaggagtggggccctttcgacctggtgatcggcggcagcccttgcaatgacctgagcatcgtgaacccagcccggaagggcctgtacgagggaaccggcagactgttcttcgagttttacagactgctgcacgacgcccggcctaaggaaggcgacgaccggcccttcttttggctgttcgagaatgtggtggccatgggagtcagcgacaagcgggatattagccggttcctggagagcaaccccgtgatgatcgatgccaaggaagtgagcgccgcccaccgggccagatacttctggggcaatctgcctggcatgaacagacccctggccagcaccgtgaacgacaagctggagctgcaggagtgcctggagcacggccggatcgccaagttcagcaaggtgagaaccatcaccacccgaagcaacagcatcaaacaaggcaaggaccagcactttcctgtgttcatgaacgagaaggaggacatcctgtggtgtaccgagatggagagagtgttcgggttcccagtccactacacagatgtcagcaacatgtctagactggccagacagagactgctgggaagaagctggtccgtccctgtgatcagacacctgttcgcccctctgaaggagtacttcgcctgcgtgagcagcggcaacagcaacgccaacagccggggccccagcttctctagcggcctggtgccactgtccctgagagggagccacatgggccccatggagatctacaaaaccgtgagcgcctggaagcggcagcctgtgcgcgtgctgagcctgtttcggaatatcgataaagtcctgaaaagcctgggattcctggagagcggctctggctccggcggtggcaccctgaagtacgtggaggatgtgacaaacgtggtcagacgggatgtggagaagtggggccccttcgatctggtgtacggcagcacccaacccctgggcagctcttgtgaccggtgccctggctggtacatgtttcagttccaccggatcctgcagtacgccctgccgagacaggagtcccagcggccattcttttggattttcatggacaacttgctgctgaccgaggatgaccaggaaactaccactcggttcctgcagaccgaagccgtgaccctgcaggacgtgagaggccgggactaccagaacgccatgcgggtgtggtccaacatccctggactgaaaagcaagcacgcacctctgacccctaaagaagaggagtacctgcaggcccaggtgcggagcagaagcaagctggacgcccctaaggtggatctgctggtgaagaattgcctcctgcccctgagagagtacttcaagtatttcagccagaatagtctgcccctgggaggcagcggcggcggcgcccaccacctggtgatgttcagggacgtggccgtggacttcagcaaggaggagtgggagtgcctgaacagctaccagaggaacctgtacagggacgtgatcctggagaactacagcaacctggtgagcgtgggctgcagcatcagcaagcccgacgtgatcaccctgctggagcagggcaaggagccctggatggtggtgagggacgagaggaggaggaggagcctggacctggagagcaggggcggcccaagcagcggcgcccctcctcccagcggcggcaggcggcccaagcagcggcgcccctcctcccagcggcggcagcccagccggctccccaacctctaccgaggagggcacctctgagtccgccacccccgagagcggccctggcacctccaccgagcccagcgagggcagcgcacccggcagccctgccggcagccccacctccacagaggagggaaccagcaccgagcccagcgaaggcagcgccccaggcaccagcaccgagcctagtgagcaggagattaaacggatcaacaagatcagaagaagacttgtgaaagacagcaacaccaagaaggccggcaagacaggccccatgaaaaccctgctggttagagtgatgacacccgatctgagagagcggctggaaaacctgagaaagaagcctgaaaatatcccccagcccatcagcaatacatctagagccaacctgaataagctgctgaccgattacaccgaaatgaagaaggcgatcctgcatgtgtactgggaagagttccagaaggaccctgtgggcctgatgagccgggtggcccagcctgccagcaagaagatcgatcagaacaagctgaaacctgagatggacgagaagggcaacctgaccaccgccggctttgcctgctctcagtgtggccagcccctgttcgtgtacaagctggagcaggtgtctgagaagggcaaggcttacaccaactacttcggacggtgcaatgtggccgagcacgaaaagctgatcctgctggcccagctgaagcccgagaaggatagcgacgaagccgtgacatatagcctgggaaagtttgggcagagggccctggatttctacagcattcatgtgaccaaggagtccacccaccccgtgaagcccctggcccagatcgccggaaacagatacgcctccggacctgtgggaaaggccctgagcgacgcatgtatgggcacaatcgcctccttcctgtctaagtaccaggacatcatcatcgaacaccagaaggtggtgaagggcaaccagaagagactggagagcctgcgggagctggccggcaaggaaaacctggaataccctagcgtgaccctgccacctcagcctcacaccaaggagggcgttgatgcctacaacgaagtgatcgcccgggtgcgaatgtgggtgaacctgaacctgtggcagaagctgaagctaagcagagatgatgccaagcctctgctgagactgaagggattcccttcctttcctctggtcgagagacaggccaacgaagtggactggtgggacatggtgtgtaacgtgaagaagctgatcaacgagaaaaaggaggatggcaaggtgttttggcagaatctggctggctacaagagacaggaagccctgagaccatacctgagcagcgaggaagatcggaagaagggaaagaaattcgctcggtaccagctgggcgacctgctgctgcacctggaaaagaagcacggcgaggactggggaaaggtgtacgacgaggcctgggagcggattgacaagaaagtggaaggcctgagcaagcacatcaagctggaagaggaacggagaagcgaggacgcccagagcaaggccgccctgaccgactggctgcgggctaaggccagcttcgtgatcgagggcctgaaggaggccgacaaggacgagttctgcagatgcgagctgaagctgcagaagtggtacggggacctgcggggaaagcccttcgccatcgaagccgagaacagcatcctggacatcagcggcttcagcaagcagtacaactgtgccttcatctggcagaaggacggcgtgaagaagctgaacctgtacctgatcatcaactacttcaagggcggcaagctgcggttcaagaagatcaaacctgaagccttcgaagccaacagattctacaccgtgatcaacaaaaagagcggcgagatcgtgcccatggaggtgaacttcaacttcgacgaccccaacctgatcatcctgcctctggcctttggcaagagacagggcagagaattcatctggaacgacctgctgtccctggaaaccggcagcctgaagctggccaacggaagagtgatcgagaagacactgtacaacagaagaacccggcaggatgagcctgccctgttcgtggccctgaccttcgagcggcgggaggtcctggactcctccaatatcaaaccaatgaacctgatcggcgtggcaagaggcgaaaacatccccgccgtgatcgccctgaccgaccccgagggctgcccactgagccggtttaaggatagcctgggaaacccaacccacatcctgagaatcggcgagagctataaggagaagcagcggaccatccaggccaagaaggaggtggagcagcggagagccggcggctacagccggaagtacgccagcaaagccaagaatctggcagacgatatggtgagaaacaccgctagagatctgctgtactacgccgtgacccaggatgccatgctgatcttcgccaacctgagccggggcttcggccggcagggcaagcggaccttcatggccgagagacagtacacacggatggaggactggctgaccgccaagctggcctacgagggcctgagcaagacctacctgtccaagacactggcccagtacacctccaagacatgcagcaactgtgggtttaccatcaccagcgccgactacgacagggtgctggagaagctgaagaagacagcaacaggctggatgaccacaattaacggcaaggagctgaaggtggagggccagattacctactacaacagatacaagagacagaacgtagtcaaggacctgtccgtcgagctggatagactgagcgaagaatctgtgaacaacgacatctcctcctggacaaagggcagaagcggagaagctctgagcctcctgaagaaaagattctcccatagacccgtgcaggagaagttcgtgtgcctgaactgcggcttcgagacacacgcagccgagcaagccgccctgaacatcgccagatcctggctgttcctgcggagccaggagtacaagaaataccagacaaacaagacaaccggcaacaccgataagagagccttcgtcgagacctggcagtccttttaccggaagaagcttaaggaggtgtggaaacctgccgtgcggtctggcggatctggcggaggctccaccagccccaagaaaaagagaaaagtctaagctgccttctgcggggcttgccttctggccatgcccttcttctctcccttgcacctgtacctcttggtctttgaataaagcctgagtaggaaggctagcaaaaaaaaaaaaaaaaaaaaaaaaaaaaaaaaaaaaaaaaaaaaaaaaaaaaaaaaaaaaaaaaaaaaaaaaaaaaaaaagcccagccggctccccaacctctaccgaggagggcacctctgagtccgccacccccgagagcggccctggcacctccaccgagcccagcgagggcagcgcacccggcagccctgccggcagccccacctccacagaggagggaaccagcaccgagcccagcgaaggcagcgccccaggcaccagcaccgagcctagtgagcaggagattaaacggatcaacaagatcagaagaagacttgtgaaagacagcaacaccaagaaggccggcaagacaggccccatgaaaaccctgctggttagagtgatgacacccgatctgagagagcggctggaaaacctgagaaagaagcctgaaaatatcccccagcccatcagcaatacatctagagccaacctgaataagctgctgaccgattacaccgaaatgaagaaggcgatcctgcatgtgtactgggaagagttccagaaggaccctgtgggcctgatgagccgggtggcccagcctgccagcaagaagatcgatcagaacaagctgaaacctgagatggacgagaagggcaacctgaccaccgccggctttgcctgctctcagtgtggccagcccctgttcgtgtacaagctggagcaggtgtctgagaagggcaaggcttacaccaactacttcggacggtgcaatgtggccgagcacgaaaagctgatcctgctggcccagctgaagcccgagaaggatagcgacgaagccgtgacatatagcctgggaaagtttgggcagagggccctggatttctacagcattcatgtgaccaaggagtccacccaccccgtgaagcccctggcccagatcgccggaaacagatacgcctccggacctgtgggaaaggccctgagcgacgcatgtatgggcacaatcgcctccttcctgtctaagtaccaggacatcatcatcgaacaccagaaggtggtgaagggcaaccagaagagactggagagcctgcgggagctggccggcaaggaaaacctggaataccctagcgtgaccctgccacctcagcctcacaccaaggagggcgttgatgcctacaacgaagtgatcgcccgggtgcgaatgtgggtgaacctgaacctgtggcagaagctgaagctaagcagagatgatgccaagcctctgctgagactgaagggattcccttcctttcctctggtcgagagacaggccaacgaagtggactggtgggacatggtgtgtaacgtgaagaagctgatcaacgagaaaaaggaggatggcaaggtgttttggcagaatctggctggctacaagagacaggaagccctgagaccatacctgagcagcgaggaagatcggaagaagggaaagaaattcgctcggtaccagctgggcgacctgctgctgcacctggaaaagaagcacggcgaggactggggaaaggtgtacgacgaggcctgggagcggattgacaagaaagtggaaggcctgagcaagcacatcaagctggaagaggaacggagaagcgaggacgcccagagcaaggccgccctgaccgactggctgcgggctaaggccagcttcgtgatcgagggcctgaaggaggccgacaaggacgagttctgcagatgcgagctgaagctgcagaagtggtacggggacctgcggggaaagcccttcgccatcgaagccgagaacagcatcctggacatcagcggcttcagcaagcagtacaactgtgccttcatctggcagaaggacggcgtgaagaagctgaacctgtacctgatcatcaactacttcaagggcggcaagctgcggttcaagaagatcaaacctgaagccttcgaagccaacagattctacaccgtgatcaacaaaaagagcggcgagatcgtgcccatggaggtgaacttcaacttcgacgaccccaacctgatcatcctgcctctggcctttggcaagagacagggcagagaattcatctggaacgacctgctgtccctggaaaccggcagcctgaagctggccaacggaagagtgatcgagaagacactgtacaacagaagaacccggcaggatgagcctgccctgttcgtggccctgaccttcgagcggcgggaggtcctggactcctccaatatcaaaccaatgaacctgatcggcgtggcaagaggcgaaaacatccccgccgtgatcgccctgaccgaccccgagggctgcccactgagccggtttaaggatagcctgggaaacccaacccacatcctgagaatcggcgagagctataaggagaagcagcggaccatccaggccaagaaggaggtggagcagcggagagccggcggctacagccggaagtacgccagcaaagccaagaatctggcagacgatatggtgagaaacaccgctagagatctgctgtactacgccgtgacccaggatgccatgctgatcttcgccaacctgagccggggcttcggccggcagggcaagcggaccttcatggccgagagacagtacacacggatggaggactggctgaccgccaagctggcctacgagggcctgagcaagacctacctgtccaagacactggcccagtacacctccaagacatgcagcaactgtgggtttaccatcaccagcgccgactacgacagggtgctggagaagctgaagaagacagcaacaggctggatgaccacaattaacggcaaggagctgaaggtggagggccagattacctactacaacagatacaagagacagaacgtagtcaaggacctgtccgtcgagctggatagactgagcgaagaatctgtgaacaacgacatctcctcctggacaaagggcagaagcggagaagctctgagcctcctgaagaaaagattctcccatagacccgtgcaggagaagttcgtgtgcctgaactgcggcttcgagacacacgcagccgagcaagccgccctgaacatcgccagatcctggctgttcctgcggagccaggagtacaagaaataccagacaaacaagacaaccggcaacaccgataagagagccttcgtcgagacctggcagtccttttaccggaagaagcttaaggaggtgtggaaacctgccgtgcggtctggcggatctggcggaggctccaccagccccaagaaaaagagaaaagtctaagctgccttctgcggggcttgccttctggccatgcccttcttctctcccttgcacctgtacctcttggtctttgaataaagcctgagtaggaaggctagcaaaaaaaaaaaaaaaaaaaaaaaaaaaaaaaaaaaaaaaaaaaaaaaaaaaaaaaaaaaaaaaaaaaaaaaaaaaaaaaa

SEQ ID NO: 9085 - RNA, 8787 nt, synthetic construct
  source 1..8787: mol_type = other RNA
aggaaataagagagaaaagaagagtaagaagaaatataagagccaccatggcccctaagaagaagcgtaaagtgagccggatgaaccacgaccaggagttcgacccccctaaggtgtaccctcccgtccccgccgagaagagaaagcccatccgggtcctgagcctgttcgatggcatcgccaccggtctgctggtgctgaaggacctgggcatccaggtggataggtacattgcctccgaggtgtgcgaggactccatcaccgtgggaatggtgcgtcatcagggcaagatcatgtacgtgggcgacgtgcggagcgtgacacagaagcatatccaggagtggggccctttcgacctggtgatcggcggcagcccttgcaatgacctgagcatcgtgaacccagcccggaagggcctgtacgagggaaccggcagactgttcttcgagttttacagactgctgcacgacgcccggcctaaggaaggcgacgaccggcccttcttttggctgttcgagaatgtggtggccatgggagtcagcgacaagcgggatattagccggttcctggagagcaaccccgtgatgatcgatgccaaggaagtgagcgccgcccaccgggccagatacttctggggcaatctgcctggcatgaacagacccctggccagcaccgtgaacgacaagctggagctgcaggagtgcctggagcacggccggatcgccaagttcagcaaggtgagaaccatcaccacccgaagcaacagcatcaaacaaggcaaggaccagcactttcctgtgttcatgaacgagaaggaggacatcctgtggtgtaccgagatggagagagtgttcgggttcccagtccactacacagatgtcagcaacatgtctagactggccagacagagactgctgggaagaagctggtccgtccctgtgatcagacacctgttcgcccctctgaaggagtacttcgcctgcgtgagcagcggcaacagcaacgccaacagccggggccccagcttctctagcggcctggtgccactgtccctgagagggagccacatgggccccatggagatctacaaaaccgtgagcgcctggaagcggcagcctgtgcgcgtgctgagcctgtttcggaatatcgataaagtcctgaaaagcctgggattcctggagagcggctctggctccggcggtggcaccctgaagtacgtggaggatgtgacaaacgtggtcagacgggatgtggagaagtggggccccttcgatctggtgtacggcagcacccaacccctgggcagctcttgtgaccggtgccctggctggtacatgtttcagttccaccggatcctgcagtacgccctgccgagacaggagtcccagcggccattcttttggattttcatggacaacttgctgctgaccgaggatgaccaggaaactaccactcggttcctgcagaccgaagccgtgaccctgcaggacgtgagaggccgggactaccagaacgccatgcgggtgtggtccaacatccctggactgaaaagcaagcacgcacctctgacccctaaagaagaggagtacctgcaggcccaggtgcggagcagaagcaagctggacgcccctaaggtggatctgctggtgaagaattgcctcctgcccctgagagagtacttcaagtatttcagccagaatagtctgcccctgggaggcagcggcggcggcagccaggagcccgtgaccttcgaggacgtggccgtgtacttcacccagaaccagtgggccagcctggaccccatgcagagggccctgtacctggaggtgatgctggagaactacgccaacatcaccagcctggccgccctgcccttccccaagcccgacctgatcctgcagctggagcagggcgaggccccctgggacctggacccctggacccccctggagggcgaggccctggagggcgtgggcggcccaagcagcggcgcccctcctcccagcggcggcaggcggcccaagcagcggcgcccctcctcccagcggcggcagcccagccggctccccaacctctaccgaggagggcacctctgagtccgccacccccgagagcggccctggcacctccaccgagcccagcgagggcagcgcacccggcagccctgccggcagccccacctccacagaggagggaaccagcaccgagcccagcgaaggcagcgccccaggcaccagcaccgagcctagtgagcaggagattaaacggatcaacaagatcagaagaagacttgtgaaagacagcaacaccaagaaggccggcaagacaggccccatgaaaaccctgctggttagagtgatgacacccgatctgagagagcggctggaaaacctgagaaagaagcctgaaaatatcccccagcccatcagcaatacatctagagccaacctgaataagctgctgaccgattacaccgaaatgaagaaggcgatcctgcatgtgtactgggaagagttccagaaggaccctgtgggcctgatgagccgggtggcccagcctgccagcaagaagatcgatcagaacaagctgaaacctgagatggacgagaagggcaacctgaccaccgccggctttgcctgctctcagtgtggccagcccctgttcgtgtacaagctggagcaggtgtctgagaagggcaaggcttacaccaactacttcggacggtgcaatgtggccgagcacgaaaagctgatcctgctggcccagctgaagcccgagaaggatagcgacgaagccgtgacatatagcctgggaaagtttgggcagagggccctggatttctacagcattcatgtgaccaaggagtccacccaccccgtgaagcccctggcccagatcgccggaaacagatacgcctccggacctgtgggaaaggccctgagcgacgcatgtatgggcacaatcgcctccttcctgtctaagtaccaggacatcatcatcgaacaccagaaggtggtgaagggcaaccagaagagactggagagcctgcgggagctggccggcaaggaaaacctggaataccctagcgtgaccctgccacctcagcctcacaccaaggagggcgttgatgcctacaacgaagtgatcgcccgggtgcgaatgtgggtgaacctgaacctgtggcagaagctgaagctaagcagagatgatgccaagcctctgctgagactgaagggattcccttcctttcctctggtcgagagacaggccaacgaagtggactggtgggacatggtgtgtaacgtgaagaagctgatcaacgagaaaaaggaggatggcaaggtgttttggcagaatctggctggctacaagagacaggaagccctgagaccatacctgagcagcgaggaagatcggaagaagggaaagaaattcgctcggtaccagctgggcgacctgctgctgcacctggaaaagaagcacggcgaggactggggaaaggtgtacgacgaggcctgggagcggattgacaagaaagtggaaggcctgagcaagcacatcaagctggaagaggaacggagaagcgaggacgcccagagcaaggccgccctgaccgactggctgcgggctaaggccagcttcgtgatcgagggcctgaaggaggccgacaaggacgagttctgcagatgcgagctgaagctgcagaagtggtacggggacctgcggggaaagcccttcgccatcgaagccgagaacagcatcctggacatcagcggcttcagcaagcagtacaactgtgccttcatctggcagaaggacggcgtgaagaagctgaacctgtacctgatcatcaactacttcaagggcggcaagctgcggttcaagaagatcaaacctgaagccttcgaagccaacagattctacaccgtgatcaacaaaaagagcggcgagatcgtgcccatggaggtgaacttcaacttcgacgaccccaacctgatcatcctgcctctggcctttggcaagagacagggcagagaattcatctggaacgacctgctgtccctggaaaccggcagcctgaagctggccaacggaagagtgatcgagaagacactgtacaacagaagaacccggcaggatgagcctgccctgttcgtggccctgaccttcgagcggcgggaggtcctggactcctccaatatcaaaccaatgaacctgatcggcgtggcaagaggcgaaaacatccccgccgtgatcgccctgaccgaccccgagggctgcccactgagccggtttaaggatagcctgggaaacccaacccacatcctgagaatcggcgagagctataaggagaagcagcggaccatccaggccaagaaggaggtggagcagcggagagccggcggctacagccggaagtacgccagcaaagccaagaatctggcagacgatatggtgagaaacaccgctagagatctgctgtactacgccgtgacccaggatgccatgctgatcttcgccaacctgagccggggcttcggccggcagggcaagcggaccttcatggccgagagacagtacacacggatggaggactggctgaccgccaagctggcctacgagggcctgagcaagacctacctgtccaagacactggcccagtacacctccaagacatgcagcaactgtgggtttaccatcaccagcgccgactacgacagggtgctggagaagctgaagaagacagcaacaggctggatgaccacaattaacggcaaggagctgaaggtggagggccagattacctactacaacagatacaagagacagaacgtagtcaaggacctgtccgtcgagctggatagactgagcgaagaatctgtgaacaacgacatctcctcctggacaaagggcagaagcggagaagctctgagcctcctgaagaaaagattctcccatagacccgtgcaggagaagttcgtgtgcctgaactgcggcttcgagacacacgcagccgagcaagccgccctgaacatcgccagatcctggctgttcctgcggagccaggagtacaagaaataccagacaaacaagacaaccggcaacaccgataagagagccttcgtcgagacctggcagtccttttaccggaagaagcttaaggaggtgtggaaacctgccgtgcggtctggcggatctggcggaggctccaccagccccaagaaaaagagaaaagtctaagctgccttctgcggggcttgccttctggccatgcccttcttctctcccttgcacctgtacctcttggtctttgaataaagcctgagtaggaaggctagcaaaaaaaaaaaaaaaaaaaaaaaaaaaaaaaaaaaaaaaaaaaaaaaaaaaaaaaaaaaaaaaaaaaaaaaaaaaaaaaagcccagccggctccccaacctctaccgaggagggcacctctgagtccgccacccccgagagcggccctggcacctccaccgagcccagcgagggcagcgcacccggcagccctgccggcagccccacctccacagaggagggaaccagcaccgagcccagcgaaggcagcgccccaggcaccagcaccgagcctagtgagcaggagattaaacggatcaacaagatcagaagaagacttgtgaaagacagcaacaccaagaaggccggcaagacaggccccatgaaaaccctgctggttagagtgatgacacccgatctgagagagcggctggaaaacctgagaaagaagcctgaaaatatcccccagcccatcagcaatacatctagagccaacctgaataagctgctgaccgattacaccgaaatgaagaaggcgatcctgcatgtgtactgggaagagttccagaaggaccctgtgggcctgatgagccgggtggcccagcctgccagcaagaagatcgatcagaacaagctgaaacctgagatggacgagaagggcaacctgaccaccgccggctttgcctgctctcagtgtggccagcccctgttcgtgtacaagctggagcaggtgtctgagaagggcaaggcttacaccaactacttcggacggtgcaatgtggccgagcacgaaaagctgatcctgctggcccagctgaagcccgagaaggatagcgacgaagccgtgacatatagcctgggaaagtttgggcagagggccctggatttctacagcattcatgtgaccaaggagtccacccaccccgtgaagcccctggcccagatcgccggaaacagatacgcctccggacctgtgggaaaggccctgagcgacgcatgtatgggcacaatcgcctccttcctgtctaagtaccaggacatcatcatcgaacaccagaaggtggtgaagggcaaccagaagagactggagagcctgcgggagctggccggcaaggaaaacctggaataccctagcgtgaccctgccacctcagcctcacaccaaggagggcgttgatgcctacaacgaagtgatcgcccgggtgcgaatgtgggtgaacctgaacctgtggcagaagctgaagctaagcagagatgatgccaagcctctgctgagactgaagggattcccttcctttcctctggtcgagagacaggccaacgaagtggactggtgggacatggtgtgtaacgtgaagaagctgatcaacgagaaaaaggaggatggcaaggtgttttggcagaatctggctggctacaagagacaggaagccctgagaccatacctgagcagcgaggaagatcggaagaagggaaagaaattcgctcggtaccagctgggcgacctgctgctgcacctggaaaagaagcacggcgaggactggggaaaggtgtacgacgaggcctgggagcggattgacaagaaagtggaaggcctgagcaagcacatcaagctggaagaggaacggagaagcgaggacgcccagagcaaggccgccctgaccgactggctgcgggctaaggccagcttcgtgatcgagggcctgaaggaggccgacaaggacgagttctgcagatgcgagctgaagctgcagaagtggtacggggacctgcggggaaagcccttcgccatcgaagccgagaacagcatcctggacatcagcggcttcagcaagcagtacaactgtgccttcatctggcagaaggacggcgtgaagaagctgaacctgtacctgatcatcaactacttcaagggcggcaagctgcggttcaagaagatcaaacctgaagccttcgaagccaacagattctacaccgtgatcaacaaaaagagcggcgagatcgtgcccatggaggtgaacttcaacttcgacgaccccaacctgatcatcctgcctctggcctttggcaagagacagggcagagaattcatctggaacgacctgctgtccctggaaaccggcagcctgaagctggccaacggaagagtgatcgagaagacactgtacaacagaagaacccggcaggatgagcctgccctgttcgtggccctgaccttcgagcggcgggaggtcctggactcctccaatatcaaaccaatgaacctgatcggcgtggcaagaggcgaaaacatccccgccgtgatcgccctgaccgaccccgagggctgcccactgagccggtttaaggatagcctgggaaacccaacccacatcctgagaatcggcgagagctataaggagaagcagcggaccatccaggccaagaaggaggtggagcagcggagagccggcggctacagccggaagtacgccagcaaagccaagaatctggcagacgatatggtgagaaacaccgctagagatctgctgtactacgccgtgacccaggatgccatgctgatcttcgccaacctgagccggggcttcggccggcagggcaagcggaccttcatggccgagagacagtacacacggatggaggactggctgaccgccaagctggcctacgagggcctgagcaagacctacctgtccaagacactggcccagtacacctccaagacatgcagcaactgtgggtttaccatcaccagcgccgactacgacagggtgctggagaagctgaagaagacagcaacaggctggatgaccacaattaacggcaaggagctgaaggtggagggccagattacctactacaacagatacaagagacagaacgtagtcaaggacctgtccgtcgagctggatagactgagcgaagaatctgtgaacaacgacatctcctcctggacaaagggcagaagcggagaagctctgagcctcctgaagaaaagattctcccatagacccgtgcaggagaagttcgtgtgcctgaactgcggcttcgagacacacgcagccgagcaagccgccctgaacatcgccagatcctggctgttcctgcggagccaggagtacaagaaataccagacaaacaagacaaccggcaacaccgataagagagccttcgtcgagacctggcagtccttttaccggaagaagcttaaggaggtgtggaaacctgccgtgcggtctggcggatctggcggaggctccaccagccccaagaaaaagagaaaagtctaagctgccttctgcggggcttgccttctggccatgcccttcttctctcccttgcacctgtacctcttggtctttgaataaagcctgagtaggaaggctagcaaaaaaaaaaaaaaaaaaaaaaaaaaaaaaaaaaaaaaaaaaaaaaaaaaaaaaaaaaaaaaaaaaaaaaaaaaaaaaaa

SEQ ID NO: 9086 - RNA, 8787 nt, synthetic construct
  source 1..8787: mol_type = other RNA
aggaaataagagagaaaagaagagtaagaagaaatataagagccaccatggcccctaagaagaagcgtaaagtgagccggatgaaccacgaccaggagttcgacccccctaaggtgtaccctcccgtccccgccgagaagagaaagcccatccgggtcctgagcctgttcgatggcatcgccaccggtctgctggtgctgaaggacctgggcatccaggtggataggtacattgcctccgaggtgtgcgaggactccatcaccgtgggaatggtgcgtcatcagggcaagatcatgtacgtgggcgacgtgcggagcgtgacacagaagcatatccaggagtggggccctttcgacctggtgatcggcggcagcccttgcaatgacctgagcatcgtgaacccagcccggaagggcctgtacgagggaaccggcagactgttcttcgagttttacagactgctgcacgacgcccggcctaaggaaggcgacgaccggcccttcttttggctgttcgagaatgtggtggccatgggagtcagcgacaagcgggatattagccggttcctggagagcaaccccgtgatgatcgatgccaaggaagtgagcgccgcccaccgggccagatacttctggggcaatctgcctggcatgaacagacccctggccagcaccgtgaacgacaagctggagctgcaggagtgcctggagcacggccggatcgccaagttcagcaaggtgagaaccatcaccacccgaagcaacagcatcaaacaaggcaaggaccagcactttcctgtgttcatgaacgagaaggaggacatcctgtggtgtaccgagatggagagagtgttcgggttcccagtccactacacagatgtcagcaacatgtctagactggccagacagagactgctgggaagaagctggtccgtccctgtgatcagacacctgttcgcccctctgaaggagtacttcgcctgcgtgagcagcggcaacagcaacgccaacagccggggccccagcttctctagcggcctggtgccactgtccctgagagggagccacatgggccccatggagatctacaaaaccgtgagcgcctggaagcggcagcctgtgcgcgtgctgagcctgtttcggaatatcgataaagtcctgaaaagcctgggattcctggagagcggctctggctccggcggtggcaccctgaagtacgtggaggatgtgacaaacgtggtcagacgggatgtggagaagtggggccccttcgatctggtgtacggcagcacccaacccctgggcagctcttgtgaccggtgccctggctggtacatgtttcagttccaccggatcctgcagtacgccctgccgagacaggagtcccagcggccattcttttggattttcatggacaacttgctgctgaccgaggatgaccaggaaactaccactcggttcctgcagaccgaagccgtgaccctgcaggacgtgagaggccgggactaccagaacgccatgcgggtgtggtccaacatccctggactgaaaagcaagcacgcacctctgacccctaaagaagaggagtacctgcaggcccaggtgcggagcagaagcaagctggacgcccctaaggtggatctgctggtgaagaattgcctcctgcccctgagagagtacttcaagtatttcagccagaatagtctgcccctgggaggcagcggcggcggcctgcccggcctgatggccttcgaggacgtggccgtgtacttcagccaggaggagtggggcctgctggacgccgtgcagagggccctgtacaggcacgtgatgctggagaacttcgccctggtggccagcctgggcctgagcgccagccccccccacgtggtgatccagctgcagaggggcgaggagccctgggtgcccagcggcctggacatgaccagcgccaggaacggccacaggaggcccggcggcccaagcagcggcgcccctcctcccagcggcggcaggcggcccaagcagcggcgcccctcctcccagcggcggcagcccagccggctccccaacctctaccgaggagggcacctctgagtccgccacccccgagagcggccctggcacctccaccgagcccagcgagggcagcgcacccggcagccctgccggcagccccacctccacagaggagggaaccagcaccgagcccagcgaaggcagcgccccaggcaccagcaccgagcctagtgagcaggagattaaacggatcaacaagatcagaagaagacttgtgaaagacagcaacaccaagaaggccggcaagacaggccccatgaaaaccctgctggttagagtgatgacacccgatctgagagagcggctggaaaacctgagaaagaagcctgaaaatatcccccagcccatcagcaatacatctagagccaacctgaataagctgctgaccgattacaccgaaatgaagaaggcgatcctgcatgtgtactgggaagagttccagaaggaccctgtgggcctgatgagccgggtggcccagcctgccagcaagaagatcgatcagaacaagctgaaacctgagatggacgagaagggcaacctgaccaccgccggctttgcctgctctcagtgtggccagcccctgttcgtgtacaagctggagcaggtgtctgagaagggcaaggcttacaccaactacttcggacggtgcaatgtggccgagcacgaaaagctgatcctgctggcccagctgaagcccgagaaggatagcgacgaagccgtgacatatagcctgggaaagtttgggcagagggccctggatttctacagcattcatgtgaccaaggagtccacccaccccgtgaagcccctggcccagatcgccggaaacagatacgcctccggacctgtgggaaaggccctgagcgacgcatgtatgggcacaatcgcctccttcctgtctaagtaccaggacatcatcatcgaacaccagaaggtggtgaagggcaaccagaagagactggagagcctgcgggagctggccggcaaggaaaacctggaataccctagcgtgaccctgccacctcagcctcacaccaaggagggcgttgatgcctacaacgaagtgatcgcccgggtgcgaatgtgggtgaacctgaacctgtggcagaagctgaagctaagcagagatgatgccaagcctctgctgagactgaagggattcccttcctttcctctggtcgagagacaggccaacgaagtggactggtgggacatggtgtgtaacgtgaagaagctgatcaacgagaaaaaggaggatggcaaggtgttttggcagaatctggctggctacaagagacaggaagccctgagaccatacctgagcagcgaggaagatcggaagaagggaaagaaattcgctcggtaccagctgggcgacctgctgctgcacctggaaaagaagcacggcgaggactggggaaaggtgtacgacgaggcctgggagcggattgacaagaaagtggaaggcctgagcaagcacatcaagctggaagaggaacggagaagcgaggacgcccagagcaaggccgccctgaccgactggctgcgggctaaggccagcttcgtgatcgagggcctgaaggaggccgacaaggacgagttctgcagatgcgagctgaagctgcagaagtggtacggggacctgcggggaaagcccttcgccatcgaagccgagaacagcatcctggacatcagcggcttcagcaagcagtacaactgtgccttcatctggcagaaggacggcgtgaagaagctgaacctgtacctgatcatcaactacttcaagggcggcaagctgcggttcaagaagatcaaacctgaagccttcgaagccaacagattctacaccgtgatcaacaaaaagagcggcgagatcgtgcccatggaggtgaacttcaacttcgacgaccccaacctgatcatcctgcctctggcctttggcaagagacagggcagagaattcatctggaacgacctgctgtccctggaaaccggcagcctgaagctggccaacggaagagtgatcgagaagacactgtacaacagaagaacccggcaggatgagcctgccctgttcgtggccctgaccttcgagcggcgggaggtcctggactcctccaatatcaaaccaatgaacctgatcggcgtggcaagaggcgaaaacatccccgccgtgatcgccctgaccgaccccgagggctgcccactgagccggtttaaggatagcctgggaaacccaacccacatcctgagaatcggcgagagctataaggagaagcagcggaccatccaggccaagaaggaggtggagcagcggagagccggcggctacagccggaagtacgccagcaaagccaagaatctggcagacgatatggtgagaaacaccgctagagatctgctgtactacgccgtgacccaggatgccatgctgatcttcgccaacctgagccggggcttcggccggcagggcaagcggaccttcatggccgagagacagtacacacggatggaggactggctgaccgccaagctggcctacgagggcctgagcaagacctacctgtccaagacactggcccagtacacctccaagacatgcagcaactgtgggtttaccatcaccagcgccgactacgacagggtgctggagaagctgaagaagacagcaacaggctggatgaccacaattaacggcaaggagctgaaggtggagggccagattacctactacaacagatacaagagacagaacgtagtcaaggacctgtccgtcgagctggatagactgagcgaagaatctgtgaacaacgacatctcctcctggacaaagggcagaagcggagaagctctgagcctcctgaagaaaagattctcccatagacccgtgcaggagaagttcgtgtgcctgaactgcggcttcgagacacacgcagccgagcaagccgccctgaacatcgccagatcctggctgttcctgcggagccaggagtacaagaaataccagacaaacaagacaaccggcaacaccgataagagagccttcgtcgagacctggcagtccttttaccggaagaagcttaaggaggtgtggaaacctgccgtgcggtctggcggatctggcggaggctccaccagccccaagaaaaagagaaaagtctaagctgccttctgcggggcttgccttctggccatgcccttcttctctcccttgcacctgtacctcttggtctttgaataaagcctgagtaggaaggctagcaaaaaaaaaaaaaaaaaaaaaaaaaaaaaaaaaaaaaaaaaaaaaaaaaaaaaaaaaaaaaaaaaaaaaaaaaaaaaaaagcccagccggctccccaacctctaccgaggagggcacctctgagtccgccacccccgagagcggccctggcacctccaccgagcccagcgagggcagcgcacccggcagccctgccggcagccccacctccacagaggagggaaccagcaccgagcccagcgaaggcagcgccccaggcaccagcaccgagcctagtgagcaggagattaaacggatcaacaagatcagaagaagacttgtgaaagacagcaacaccaagaaggccggcaagacaggccccatgaaaaccctgctggttagagtgatgacacccgatctgagagagcggctggaaaacctgagaaagaagcctgaaaatatcccccagcccatcagcaatacatctagagccaacctgaataagctgctgaccgattacaccgaaatgaagaaggcgatcctgcatgtgtactgggaagagttccagaaggaccctgtgggcctgatgagccgggtggcccagcctgccagcaagaagatcgatcagaacaagctgaaacctgagatggacgagaagggcaacctgaccaccgccggctttgcctgctctcagtgtggccagcccctgttcgtgtacaagctggagcaggtgtctgagaagggcaaggcttacaccaactacttcggacggtgcaatgtggccgagcacgaaaagctgatcctgctggcccagctgaagcccgagaaggatagcgacgaagccgtgacatatagcctgggaaagtttgggcagagggccctggatttctacagcattcatgtgaccaaggagtccacccaccccgtgaagcccctggcccagatcgccggaaacagatacgcctccggacctgtgggaaaggccctgagcgacgcatgtatgggcacaatcgcctccttcctgtctaagtaccaggacatcatcatcgaacaccagaaggtggtgaagggcaaccagaagagactggagagcctgcgggagctggccggcaaggaaaacctggaataccctagcgtgaccctgccacctcagcctcacaccaaggagggcgttgatgcctacaacgaagtgatcgcccgggtgcgaatgtgggtgaacctgaacctgtggcagaagctgaagctaagcagagatgatgccaagcctctgctgagactgaagggattcccttcctttcctctggtcgagagacaggccaacgaagtggactggtgggacatggtgtgtaacgtgaagaagctgatcaacgagaaaaaggaggatggcaaggtgttttggcagaatctggctggctacaagagacaggaagccctgagaccatacctgagcagcgaggaagatcggaagaagggaaagaaattcgctcggtaccagctgggcgacctgctgctgcacctggaaaagaagcacggcgaggactggggaaaggtgtacgacgaggcctgggagcggattgacaagaaagtggaaggcctgagcaagcacatcaagctggaagaggaacggagaagcgaggacgcccagagcaaggccgccctgaccgactggctgcgggctaaggccagcttcgtgatcgagggcctgaaggaggccgacaaggacgagttctgcagatgcgagctgaagctgcagaagtggtacggggacctgcggggaaagcccttcgccatcgaagccgagaacagcatcctggacatcagcggcttcagcaagcagtacaactgtgccttcatctggcagaaggacggcgtgaagaagctgaacctgtacctgatcatcaactacttcaagggcggcaagctgcggttcaagaagatcaaacctgaagccttcgaagccaacagattctacaccgtgatcaacaaaaagagcggcgagatcgtgcccatggaggtgaacttcaacttcgacgaccccaacctgatcatcctgcctctggcctttggcaagagacagggcagagaattcatctggaacgacctgctgtccctggaaaccggcagcctgaagctggccaacggaagagtgatcgagaagacactgtacaacagaagaacccggcaggatgagcctgccctgttcgtggccctgaccttcgagcggcgggaggtcctggactcctccaatatcaaaccaatgaacctgatcggcgtggcaagaggcgaaaacatccccgccgtgatcgccctgaccgaccccgagggctgcccactgagccggtttaaggatagcctgggaaacccaacccacatcctgagaatcggcgagagctataaggagaagcagcggaccatccaggccaagaaggaggtggagcagcggagagccggcggctacagccggaagtacgccagcaaagccaagaatctggcagacgatatggtgagaaacaccgctagagatctgctgtactacgccgtgacccaggatgccatgctgatcttcgccaacctgagccggggcttcggccggcagggcaagcggaccttcatggccgagagacagtacacacggatggaggactggctgaccgccaagctggcctacgagggcctgagcaagacctacctgtccaagacactggcccagtacacctccaagacatgcagcaactgtgggtttaccatcaccagcgccgactacgacagggtgctggagaagctgaagaagacagcaacaggctggatgaccacaattaacggcaaggagctgaaggtggagggccagattacctactacaacagatacaagagacagaacgtagtcaaggacctgtccgtcgagctggatagactgagcgaagaatctgtgaacaacgacatctcctcctggacaaagggcagaagcggagaagctctgagcctcctgaagaaaagattctcccatagacccgtgcaggagaagttcgtgtgcctgaactgcggcttcgagacacacgcagccgagcaagccgccctgaacatcgccagatcctggctgttcctgcggagccaggagtacaagaaataccagacaaacaagacaaccggcaacaccgataagagagccttcgtcgagacctggcagtccttttaccggaagaagcttaaggaggtgtggaaacctgccgtgcggtctggcggatctggcggaggctccaccagccccaagaaaaagagaaaagtctaagctgccttctgcggggcttgccttctggccatgcccttcttctctcccttgcacctgtacctcttggtctttgaataaagcctgagtaggaaggctagcaaaaaaaaaaaaaaaaaaaaaaaaaaaaaaaaaaaaaaaaaaaaaaaaaaaaaaaaaaaaaaaaaaaaaaaaaaaaaaaa

SEQ ID NO: 9087 - RNA, 8787 nt, synthetic construct
  source 1..8787: mol_type = other RNA
aggaaataagagagaaaagaagagtaagaagaaatataagagccaccatggcccctaagaagaagcgtaaagtgagccggatgaaccacgaccaggagttcgacccccctaaggtgtaccctcccgtccccgccgagaagagaaagcccatccgggtcctgagcctgttcgatggcatcgccaccggtctgctggtgctgaaggacctgggcatccaggtggataggtacattgcctccgaggtgtgcgaggactccatcaccgtgggaatggtgcgtcatcagggcaagatcatgtacgtgggcgacgtgcggagcgtgacacagaagcatatccaggagtggggccctttcgacctggtgatcggcggcagcccttgcaatgacctgagcatcgtgaacccagcccggaagggcctgtacgagggaaccggcagactgttcttcgagttttacagactgctgcacgacgcccggcctaaggaaggcgacgaccggcccttcttttggctgttcgagaatgtggtggccatgggagtcagcgacaagcgggatattagccggttcctggagagcaaccccgtgatgatcgatgccaaggaagtgagcgccgcccaccgggccagatacttctggggcaatctgcctggcatgaacagacccctggccagcaccgtgaacgacaagctggagctgcaggagtgcctggagcacggccggatcgccaagttcagcaaggtgagaaccatcaccacccgaagcaacagcatcaaacaaggcaaggaccagcactttcctgtgttcatgaacgagaaggaggacatcctgtggtgtaccgagatggagagagtgttcgggttcccagtccactacacagatgtcagcaacatgtctagactggccagacagagactgctgggaagaagctggtccgtccctgtgatcagacacctgttcgcccctctgaaggagtacttcgcctgcgtgagcagcggcaacagcaacgccaacagccggggccccagcttctctagcggcctggtgccactgtccctgagagggagccacatgggccccatggagatctacaaaaccgtgagcgcctggaagcggcagcctgtgcgcgtgctgagcctgtttcggaatatcgataaagtcctgaaaagcctgggattcctggagagcggctctggctccggcggtggcaccctgaagtacgtggaggatgtgacaaacgtggtcagacgggatgtggagaagtggggccccttcgatctggtgtacggcagcacccaacccctgggcagctcttgtgaccggtgccctggctggtacatgtttcagttccaccggatcctgcagtacgccctgccgagacaggagtcccagcggccattcttttggattttcatggacaacttgctgctgaccgaggatgaccaggaaactaccactcggttcctgcagaccgaagccgtgaccctgcaggacgtgagaggccgggactaccagaacgccatgcgggtgtggtccaacatccctggactgaaaagcaagcacgcacctctgacccctaaagaagaggagtacctgcaggcccaggtgcggagcagaagcaagctggacgcccctaaggtggatctgctggtgaagaattgcctcctgcccctgagagagtacttcaagtatttcagccagaatagtctgcccctgggaggcagcggcggcggctgctaccaggacagcgtgaccttcgacgacgtggccgtggacttcacccaggaggagtggaccctgctggacagcacccagaggagcctgtacagcgacgtgatgctggagaactacaagaacctggccaccgtgggcggccagatcatcaagcccagcctgatcagctggctggagcaggaggagagcaggaccgtgcagggcggcgtgctgaggggcaggaagacccagtggaggggcaccggcggcccaagcagcggcgcccctcctcccagcggcggcaggcggcccaagcagcggcgcccctcctcccagcggcggcagcccagccggctccccaacctctaccgaggagggcacctctgagtccgccacccccgagagcggccctggcacctccaccgagcccagcgagggcagcgcacccggcagccctgccggcagccccacctccacagaggagggaaccagcaccgagcccagcgaaggcagcgccccaggcaccagcaccgagcctagtgagcaggagattaaacggatcaacaagatcagaagaagacttgtgaaagacagcaacaccaagaaggccggcaagacaggccccatgaaaaccctgctggttagagtgatgacacccgatctgagagagcggctggaaaacctgagaaagaagcctgaaaatatcccccagcccatcagcaatacatctagagccaacctgaataagctgctgaccgattacaccgaaatgaagaaggcgatcctgcatgtgtactgggaagagttccagaaggaccctgtgggcctgatgagccgggtggcccagcctgccagcaagaagatcgatcagaacaagctgaaacctgagatggacgagaagggcaacctgaccaccgccggctttgcctgctctcagtgtggccagcccctgttcgtgtacaagctggagcaggtgtctgagaagggcaaggcttacaccaactacttcggacggtgcaatgtggccgagcacgaaaagctgatcctgctggcccagctgaagcccgagaaggatagcgacgaagccgtgacatatagcctgggaaagtttgggcagagggccctggatttctacagcattcatgtgaccaaggagtccacccaccccgtgaagcccctggcccagatcgccggaaacagatacgcctccggacctgtgggaaaggccctgagcgacgcatgtatgggcacaatcgcctccttcctgtctaagtaccaggacatcatcatcgaacaccagaaggtggtgaagggcaaccagaagagactggagagcctgcgggagctggccggcaaggaaaacctggaataccctagcgtgaccctgccacctcagcctcacaccaaggagggcgttgatgcctacaacgaagtgatcgcccgggtgcgaatgtgggtgaacctgaacctgtggcagaagctgaagctaagcagagatgatgccaagcctctgctgagactgaagggattcccttcctttcctctggtcgagagacaggccaacgaagtggactggtgggacatggtgtgtaacgtgaagaagctgatcaacgagaaaaaggaggatggcaaggtgttttggcagaatctggctggctacaagagacaggaagccctgagaccatacctgagcagcgaggaagatcggaagaagggaaagaaattcgctcggtaccagctgggcgacctgctgctgcacctggaaaagaagcacggcgaggactggggaaaggtgtacgacgaggcctgggagcggattgacaagaaagtggaaggcctgagcaagcacatcaagctggaagaggaacggagaagcgaggacgcccagagcaaggccgccctgaccgactggctgcgggctaaggccagcttcgtgatcgagggcctgaaggaggccgacaaggacgagttctgcagatgcgagctgaagctgcagaagtggtacggggacctgcggggaaagcccttcgccatcgaagccgagaacagcatcctggacatcagcggcttcagcaagcagtacaactgtgccttcatctggcagaaggacggcgtgaagaagctgaacctgtacctgatcatcaactacttcaagggcggcaagctgcggttcaagaagatcaaacctgaagccttcgaagccaacagattctacaccgtgatcaacaaaaagagcggcgagatcgtgcccatggaggtgaacttcaacttcgacgaccccaacctgatcatcctgcctctggcctttggcaagagacagggcagagaattcatctggaacgacctgctgtccctggaaaccggcagcctgaagctggccaacggaagagtgatcgagaagacactgtacaacagaagaacccggcaggatgagcctgccctgttcgtggccctgaccttcgagcggcgggaggtcctggactcctccaatatcaaaccaatgaacctgatcggcgtggcaagaggcgaaaacatccccgccgtgatcgccctgaccgaccccgagggctgcccactgagccggtttaaggatagcctgggaaacccaacccacatcctgagaatcggcgagagctataaggagaagcagcggaccatccaggccaagaaggaggtggagcagcggagagccggcggctacagccggaagtacgccagcaaagccaagaatctggcagacgatatggtgagaaacaccgctagagatctgctgtactacgccgtgacccaggatgccatgctgatcttcgccaacctgagccggggcttcggccggcagggcaagcggaccttcatggccgagagacagtacacacggatggaggactggctgaccgccaagctggcctacgagggcctgagcaagacctacctgtccaagacactggcccagtacacctccaagacatgcagcaactgtgggtttaccatcaccagcgccgactacgacagggtgctggagaagctgaagaagacagcaacaggctggatgaccacaattaacggcaaggagctgaaggtggagggccagattacctactacaacagatacaagagacagaacgtagtcaaggacctgtccgtcgagctggatagactgagcgaagaatctgtgaacaacgacatctcctcctggacaaagggcagaagcggagaagctctgagcctcctgaagaaaagattctcccatagacccgtgcaggagaagttcgtgtgcctgaactgcggcttcgagacacacgcagccgagcaagccgccctgaacatcgccagatcctggctgttcctgcggagccaggagtacaagaaataccagacaaacaagacaaccggcaacaccgataagagagccttcgtcgagacctggcagtccttttaccggaagaagcttaaggaggtgtggaaacctgccgtgcggtctggcggatctggcggaggctccaccagccccaagaaaaagagaaaagtctaagctgccttctgcggggcttgccttctggccatgcccttcttctctcccttgcacctgtacctcttggtctttgaataaagcctgagtaggaaggctagcaaaaaaaaaaaaaaaaaaaaaaaaaaaaaaaaaaaaaaaaaaaaaaaaaaaaaaaaaaaaaaaaaaaaaaaaaaaaaaaagcccagccggctccccaacctctaccgaggagggcacctctgagtccgccacccccgagagcggccctggcacctccaccgagcccagcgagggcagcgcacccggcagccctgccggcagccccacctccacagaggagggaaccagcaccgagcccagcgaaggcagcgccccaggcaccagcaccgagcctagtgagcaggagattaaacggatcaacaagatcagaagaagacttgtgaaagacagcaacaccaagaaggccggcaagacaggccccatgaaaaccctgctggttagagtgatgacacccgatctgagagagcggctggaaaacctgagaaagaagcctgaaaatatcccccagcccatcagcaatacatctagagccaacctgaataagctgctgaccgattacaccgaaatgaagaaggcgatcctgcatgtgtactgggaagagttccagaaggaccctgtgggcctgatgagccgggtggcccagcctgccagcaagaagatcgatcagaacaagctgaaacctgagatggacgagaagggcaacctgaccaccgccggctttgcctgctctcagtgtggccagcccctgttcgtgtacaagctggagcaggtgtctgagaagggcaaggcttacaccaactacttcggacggtgcaatgtggccgagcacgaaaagctgatcctgctggcccagctgaagcccgagaaggatagcgacgaagccgtgacatatagcctgggaaagtttgggcagagggccctggatttctacagcattcatgtgaccaaggagtccacccaccccgtgaagcccctggcccagatcgccggaaacagatacgcctccggacctgtgggaaaggccctgagcgacgcatgtatgggcacaatcgcctccttcctgtctaagtaccaggacatcatcatcgaacaccagaaggtggtgaagggcaaccagaagagactggagagcctgcgggagctggccggcaaggaaaacctggaataccctagcgtgaccctgccacctcagcctcacaccaaggagggcgttgatgcctacaacgaagtgatcgcccgggtgcgaatgtgggtgaacctgaacctgtggcagaagctgaagctaagcagagatgatgccaagcctctgctgagactgaagggattcccttcctttcctctggtcgagagacaggccaacgaagtggactggtgggacatggtgtgtaacgtgaagaagctgatcaacgagaaaaaggaggatggcaaggtgttttggcagaatctggctggctacaagagacaggaagccctgagaccatacctgagcagcgaggaagatcggaagaagggaaagaaattcgctcggtaccagctgggcgacctgctgctgcacctggaaaagaagcacggcgaggactggggaaaggtgtacgacgaggcctgggagcggattgacaagaaagtggaaggcctgagcaagcacatcaagctggaagaggaacggagaagcgaggacgcccagagcaaggccgccctgaccgactggctgcgggctaaggccagcttcgtgatcgagggcctgaaggaggccgacaaggacgagttctgcagatgcgagctgaagctgcagaagtggtacggggacctgcggggaaagcccttcgccatcgaagccgagaacagcatcctggacatcagcggcttcagcaagcagtacaactgtgccttcatctggcagaaggacggcgtgaagaagctgaacctgtacctgatcatcaactacttcaagggcggcaagctgcggttcaagaagatcaaacctgaagccttcgaagccaacagattctacaccgtgatcaacaaaaagagcggcgagatcgtgcccatggaggtgaacttcaacttcgacgaccccaacctgatcatcctgcctctggcctttggcaagagacagggcagagaattcatctggaacgacctgctgtccctggaaaccggcagcctgaagctggccaacggaagagtgatcgagaagacactgtacaacagaagaacccggcaggatgagcctgccctgttcgtggccctgaccttcgagcggcgggaggtcctggactcctccaatatcaaaccaatgaacctgatcggcgtggcaagaggcgaaaacatccccgccgtgatcgccctgaccgaccccgagggctgcccactgagccggtttaaggatagcctgggaaacccaacccacatcctgagaatcggcgagagctataaggagaagcagcggaccatccaggccaagaaggaggtggagcagcggagagccggcggctacagccggaagtacgccagcaaagccaagaatctggcagacgatatggtgagaaacaccgctagagatctgctgtactacgccgtgacccaggatgccatgctgatcttcgccaacctgagccggggcttcggccggcagggcaagcggaccttcatggccgagagacagtacacacggatggaggactggctgaccgccaagctggcctacgagggcctgagcaagacctacctgtccaagacactggcccagtacacctccaagacatgcagcaactgtgggtttaccatcaccagcgccgactacgacagggtgctggagaagctgaagaagacagcaacaggctggatgaccacaattaacggcaaggagctgaaggtggagggccagattacctactacaacagatacaagagacagaacgtagtcaaggacctgtccgtcgagctggatagactgagcgaagaatctgtgaacaacgacatctcctcctggacaaagggcagaagcggagaagctctgagcctcctgaagaaaagattctcccatagacccgtgcaggagaagttcgtgtgcctgaactgcggcttcgagacacacgcagccgagcaagccgccctgaacatcgccagatcctggctgttcctgcggagccaggagtacaagaaataccagacaaacaagacaaccggcaacaccgataagagagccttcgtcgagacctggcagtccttttaccggaagaagcttaaggaggtgtggaaacctgccgtgcggtctggcggatctggcggaggctccaccagccccaagaaaaagagaaaagtctaagctgccttctgcggggcttgccttctggccatgcccttcttctctcccttgcacctgtacctcttggtctttgaataaagcctgagtaggaaggctagcaaaaaaaaaaaaaaaaaaaaaaaaaaaaaaaaaaaaaaaaaaaaaaaaaaaaaaaaaaaaaaaaaaaaaaaaaaaaaaaa

SEQ ID NO: 9088 - RNA, 8787 nt, synthetic construct
  source 1..8787: mol_type = other RNA
aggaaataagagagaaaagaagagtaagaagaaatataagagccaccatggcccctaagaagaagcgtaaagtgagccggatgaaccacgaccaggagttcgacccccctaaggtgtaccctcccgtccccgccgagaagagaaagcccatccgggtcctgagcctgttcgatggcatcgccaccggtctgctggtgctgaaggacctgggcatccaggtggataggtacattgcctccgaggtgtgcgaggactccatcaccgtgggaatggtgcgtcatcagggcaagatcatgtacgtgggcgacgtgcggagcgtgacacagaagcatatccaggagtggggccctttcgacctggtgatcggcggcagcccttgcaatgacctgagcatcgtgaacccagcccggaagggcctgtacgagggaaccggcagactgttcttcgagttttacagactgctgcacgacgcccggcctaaggaaggcgacgaccggcccttcttttggctgttcgagaatgtggtggccatgggagtcagcgacaagcgggatattagccggttcctggagagcaaccccgtgatgatcgatgccaaggaagtgagcgccgcccaccgggccagatacttctggggcaatctgcctggcatgaacagacccctggccagcaccgtgaacgacaagctggagctgcaggagtgcctggagcacggccggatcgccaagttcagcaaggtgagaaccatcaccacccgaagcaacagcatcaaacaaggcaaggaccagcactttcctgtgttcatgaacgagaaggaggacatcctgtggtgtaccgagatggagagagtgttcgggttcccagtccactacacagatgtcagcaacatgtctagactggccagacagagactgctgggaagaagctggtccgtccctgtgatcagacacctgttcgcccctctgaaggagtacttcgcctgcgtgagcagcggcaacagcaacgccaacagccggggccccagcttctctagcggcctggtgccactgtccctgagagggagccacatgggccccatggagatctacaaaaccgtgagcgcctggaagcggcagcctgtgcgcgtgctgagcctgtttcggaatatcgataaagtcctgaaaagcctgggattcctggagagcggctctggctccggcggtggcaccctgaagtacgtggaggatgtgacaaacgtggtcagacgggatgtggagaagtggggccccttcgatctggtgtacggcagcacccaacccctgggcagctcttgtgaccggtgccctggctggtacatgtttcagttccaccggatcctgcagtacgccctgccgagacaggagtcccagcggccattcttttggattttcatggacaacttgctgctgaccgaggatgaccaggaaactaccactcggttcctgcagaccgaagccgtgaccctgcaggacgtgagaggccgggactaccagaacgccatgcgggtgtggtccaacatccctggactgaaaagcaagcacgcacctctgacccctaaagaagaggagtacctgcaggcccaggtgcggagcagaagcaagctggacgcccctaaggtggatctgctggtgaagaattgcctcctgcccctgagagagtacttcaagtatttcagccagaatagtctgcccctgggaggcagcggcggcggccaggagcccgtgaccttcgaggacgtggccgtgtacttcacccagaaccagtgggccagcctggacagcgcccagagggccctgtacagggaggtgatgctggagaactacgccaacgtggccagcctggtggtgagccccttccccaggcccgacctgatcagccagctggagaggggcgaggccccctgggaccccgacccctgggaggccgaggacctgaggggcatctgccccggcggcggcggcccaagcagcggcgcccctcctcccagcggcggcaggcggcccaagcagcggcgcccctcctcccagcggcggcagcccagccggctccccaacctctaccgaggagggcacctctgagtccgccacccccgagagcggccctggcacctccaccgagcccagcgagggcagcgcacccggcagccctgccggcagccccacctccacagaggagggaaccagcaccgagcccagcgaaggcagcgccccaggcaccagcaccgagcctagtgagcaggagattaaacggatcaacaagatcagaagaagacttgtgaaagacagcaacaccaagaaggccggcaagacaggccccatgaaaaccctgctggttagagtgatgacacccgatctgagagagcggctggaaaacctgagaaagaagcctgaaaatatcccccagcccatcagcaatacatctagagccaacctgaataagctgctgaccgattacaccgaaatgaagaaggcgatcctgcatgtgtactgggaagagttccagaaggaccctgtgggcctgatgagccgggtggcccagcctgccagcaagaagatcgatcagaacaagctgaaacctgagatggacgagaagggcaacctgaccaccgccggctttgcctgctctcagtgtggccagcccctgttcgtgtacaagctggagcaggtgtctgagaagggcaaggcttacaccaactacttcggacggtgcaatgtggccgagcacgaaaagctgatcctgctggcccagctgaagcccgagaaggatagcgacgaagccgtgacatatagcctgggaaagtttgggcagagggccctggatttctacagcattcatgtgaccaaggagtccacccaccccgtgaagcccctggcccagatcgccggaaacagatacgcctccggacctgtgggaaaggccctgagcgacgcatgtatgggcacaatcgcctccttcctgtctaagtaccaggacatcatcatcgaacaccagaaggtggtgaagggcaaccagaagagactggagagcctgcgggagctggccggcaaggaaaacctggaataccctagcgtgaccctgccacctcagcctcacaccaaggagggcgttgatgcctacaacgaagtgatcgcccgggtgcgaatgtgggtgaacctgaacctgtggcagaagctgaagctaagcagagatgatgccaagcctctgctgagactgaagggattcccttcctttcctctggtcgagagacaggccaacgaagtggactggtgggacatggtgtgtaacgtgaagaagctgatcaacgagaaaaaggaggatggcaaggtgttttggcagaatctggctggctacaagagacaggaagccctgagaccatacctgagcagcgaggaagatcggaagaagggaaagaaattcgctcggtaccagctgggcgacctgctgctgcacctggaaaagaagcacggcgaggactggggaaaggtgtacgacgaggcctgggagcggattgacaagaaagtggaaggcctgagcaagcacatcaagctggaagaggaacggagaagcgaggacgcccagagcaaggccgccctgaccgactggctgcgggctaaggccagcttcgtgatcgagggcctgaaggaggccgacaaggacgagttctgcagatgcgagctgaagctgcagaagtggtacggggacctgcggggaaagcccttcgccatcgaagccgagaacagcatcctggacatcagcggcttcagcaagcagtacaactgtgccttcatctggcagaaggacggcgtgaagaagctgaacctgtacctgatcatcaactacttcaagggcggcaagctgcggttcaagaagatcaaacctgaagccttcgaagccaacagattctacaccgtgatcaacaaaaagagcggcgagatcgtgcccatggaggtgaacttcaacttcgacgaccccaacctgatcatcctgcctctggcctttggcaagagacagggcagagaattcatctggaacgacctgctgtccctggaaaccggcagcctgaagctggccaacggaagagtgatcgagaagacactgtacaacagaagaacccggcaggatgagcctgccctgttcgtggccctgaccttcgagcggcgggaggtcctggactcctccaatatcaaaccaatgaacctgatcggcgtggcaagaggcgaaaacatccccgccgtgatcgccctgaccgaccccgagggctgcccactgagccggtttaaggatagcctgggaaacccaacccacatcctgagaatcggcgagagctataaggagaagcagcggaccatccaggccaagaaggaggtggagcagcggagagccggcggctacagccggaagtacgccagcaaagccaagaatctggcagacgatatggtgagaaacaccgctagagatctgctgtactacgccgtgacccaggatgccatgctgatcttcgccaacctgagccggggcttcggccggcagggcaagcggaccttcatggccgagagacagtacacacggatggaggactggctgaccgccaagctggcctacgagggcctgagcaagacctacctgtccaagacactggcccagtacacctccaagacatgcagcaactgtgggtttaccatcaccagcgccgactacgacagggtgctggagaagctgaagaagacagcaacaggctggatgaccacaattaacggcaaggagctgaaggtggagggccagattacctactacaacagatacaagagacagaacgtagtcaaggacctgtccgtcgagctggatagactgagcgaagaatctgtgaacaacgacatctcctcctggacaaagggcagaagcggagaagctctgagcctcctgaagaaaagattctcccatagacccgtgcaggagaagttcgtgtgcctgaactgcggcttcgagacacacgcagccgagcaagccgccctgaacatcgccagatcctggctgttcctgcggagccaggagtacaagaaataccagacaaacaagacaaccggcaacaccgataagagagccttcgtcgagacctggcagtccttttaccggaagaagcttaaggaggtgtggaaacctgccgtgcggtctggcggatctggcggaggctccaccagccccaagaaaaagagaaaagtctaagctgccttctgcggggcttgccttctggccatgcccttcttctctcccttgcacctgtacctcttggtctttgaataaagcctgagtaggaaggctagcaaaaaaaaaaaaaaaaaaaaaaaaaaaaaaaaaaaaaaaaaaaaaaaaaaaaaaaaaaaaaaaaaaaaaaaaaaaaaaaagcccagccggctccccaacctctaccgaggagggcacctctgagtccgccacccccgagagcggccctggcacctccaccgagcccagcgagggcagcgcacccggcagccctgccggcagccccacctccacagaggagggaaccagcaccgagcccagcgaaggcagcgccccaggcaccagcaccgagcctagtgagcaggagattaaacggatcaacaagatcagaagaagacttgtgaaagacagcaacaccaagaaggccggcaagacaggccccatgaaaaccctgctggttagagtgatgacacccgatctgagagagcggctggaaaacctgagaaagaagcctgaaaatatcccccagcccatcagcaatacatctagagccaacctgaataagctgctgaccgattacaccgaaatgaagaaggcgatcctgcatgtgtactgggaagagttccagaaggaccctgtgggcctgatgagccgggtggcccagcctgccagcaagaagatcgatcagaacaagctgaaacctgagatggacgagaagggcaacctgaccaccgccggctttgcctgctctcagtgtggccagcccctgttcgtgtacaagctggagcaggtgtctgagaagggcaaggcttacaccaactacttcggacggtgcaatgtggccgagcacgaaaagctgatcctgctggcccagctgaagcccgagaaggatagcgacgaagccgtgacatatagcctgggaaagtttgggcagagggccctggatttctacagcattcatgtgaccaaggagtccacccaccccgtgaagcccctggcccagatcgccggaaacagatacgcctccggacctgtgggaaaggccctgagcgacgcatgtatgggcacaatcgcctccttcctgtctaagtaccaggacatcatcatcgaacaccagaaggtggtgaagggcaaccagaagagactggagagcctgcgggagctggccggcaaggaaaacctggaataccctagcgtgaccctgccacctcagcctcacaccaaggagggcgttgatgcctacaacgaagtgatcgcccgggtgcgaatgtgggtgaacctgaacctgtggcagaagctgaagctaagcagagatgatgccaagcctctgctgagactgaagggattcccttcctttcctctggtcgagagacaggccaacgaagtggactggtgggacatggtgtgtaacgtgaagaagctgatcaacgagaaaaaggaggatggcaaggtgttttggcagaatctggctggctacaagagacaggaagccctgagaccatacctgagcagcgaggaagatcggaagaagggaaagaaattcgctcggtaccagctgggcgacctgctgctgcacctggaaaagaagcacggcgaggactggggaaaggtgtacgacgaggcctgggagcggattgacaagaaagtggaaggcctgagcaagcacatcaagctggaagaggaacggagaagcgaggacgcccagagcaaggccgccctgaccgactggctgcgggctaaggccagcttcgtgatcgagggcctgaaggaggccgacaaggacgagttctgcagatgcgagctgaagctgcagaagtggtacggggacctgcggggaaagcccttcgccatcgaagccgagaacagcatcctggacatcagcggcttcagcaagcagtacaactgtgccttcatctggcagaaggacggcgtgaagaagctgaacctgtacctgatcatcaactacttcaagggcggcaagctgcggttcaagaagatcaaacctgaagccttcgaagccaacagattctacaccgtgatcaacaaaaagagcggcgagatcgtgcccatggaggtgaacttcaacttcgacgaccccaacctgatcatcctgcctctggcctttggcaagagacagggcagagaattcatctggaacgacctgctgtccctggaaaccggcagcctgaagctggccaacggaagagtgatcgagaagacactgtacaacagaagaacccggcaggatgagcctgccctgttcgtggccctgaccttcgagcggcgggaggtcctggactcctccaatatcaaaccaatgaacctgatcggcgtggcaagaggcgaaaacatccccgccgtgatcgccctgaccgaccccgagggctgcccactgagccggtttaaggatagcctgggaaacccaacccacatcctgagaatcggcgagagctataaggagaagcagcggaccatccaggccaagaaggaggtggagcagcggagagccggcggctacagccggaagtacgccagcaaagccaagaatctggcagacgatatggtgagaaacaccgctagagatctgctgtactacgccgtgacccaggatgccatgctgatcttcgccaacctgagccggggcttcggccggcagggcaagcggaccttcatggccgagagacagtacacacggatggaggactggctgaccgccaagctggcctacgagggcctgagcaagacctacctgtccaagacactggcccagtacacctccaagacatgcagcaactgtgggtttaccatcaccagcgccgactacgacagggtgctggagaagctgaagaagacagcaacaggctggatgaccacaattaacggcaaggagctgaaggtggagggccagattacctactacaacagatacaagagacagaacgtagtcaaggacctgtccgtcgagctggatagactgagcgaagaatctgtgaacaacgacatctcctcctggacaaagggcagaagcggagaagctctgagcctcctgaagaaaagattctcccatagacccgtgcaggagaagttcgtgtgcctgaactgcggcttcgagacacacgcagccgagcaagccgccctgaacatcgccagatcctggctgttcctgcggagccaggagtacaagaaataccagacaaacaagacaaccggcaacaccgataagagagccttcgtcgagacctggcagtccttttaccggaagaagcttaaggaggtgtggaaacctgccgtgcggtctggcggatctggcggaggctccaccagccccaagaaaaagagaaaagtctaagctgccttctgcggggcttgccttctggccatgcccttcttctctcccttgcacctgtacctcttggtctttgaataaagcctgagtaggaaggctagcaaaaaaaaaaaaaaaaaaaaaaaaaaaaaaaaaaaaaaaaaaaaaaaaaaaaaaaaaaaaaaaaaaaaaaaaaaaaaaaa

SEQ ID NO: 9089 - RNA, 8787 nt, synthetic construct
  source 1..8787: mol_type = other RNA
aggaaataagagagaaaagaagagtaagaagaaatataagagccaccatggcccctaagaagaagcgtaaagtgagccggatgaaccacgaccaggagttcgacccccctaaggtgtaccctcccgtccccgccgagaagagaaagcccatccgggtcctgagcctgttcgatggcatcgccaccggtctgctggtgctgaaggacctgggcatccaggtggataggtacattgcctccgaggtgtgcgaggactccatcaccgtgggaatggtgcgtcatcagggcaagatcatgtacgtgggcgacgtgcggagcgtgacacagaagcatatccaggagtggggccctttcgacctggtgatcggcggcagcccttgcaatgacctgagcatcgtgaacccagcccggaagggcctgtacgagggaaccggcagactgttcttcgagttttacagactgctgcacgacgcccggcctaaggaaggcgacgaccggcccttcttttggctgttcgagaatgtggtggccatgggagtcagcgacaagcgggatattagccggttcctggagagcaaccccgtgatgatcgatgccaaggaagtgagcgccgcccaccgggccagatacttctggggcaatctgcctggcatgaacagacccctggccagcaccgtgaacgacaagctggagctgcaggagtgcctggagcacggccggatcgccaagttcagcaaggtgagaaccatcaccacccgaagcaacagcatcaaacaaggcaaggaccagcactttcctgtgttcatgaacgagaaggaggacatcctgtggtgtaccgagatggagagagtgttcgggttcccagtccactacacagatgtcagcaacatgtctagactggccagacagagactgctgggaagaagctggtccgtccctgtgatcagacacctgttcgcccctctgaaggagtacttcgcctgcgtgagcagcggcaacagcaacgccaacagccggggccccagcttctctagcggcctggtgccactgtccctgagagggagccacatgggccccatggagatctacaaaaccgtgagcgcctggaagcggcagcctgtgcgcgtgctgagcctgtttcggaatatcgataaagtcctgaaaagcctgggattcctggagagcggctctggctccggcggtggcaccctgaagtacgtggaggatgtgacaaacgtggtcagacgggatgtggagaagtggggccccttcgatctggtgtacggcagcacccaacccctgggcagctcttgtgaccggtgccctggctggtacatgtttcagttccaccggatcctgcagtacgccctgccgagacaggagtcccagcggccattcttttggattttcatggacaacttgctgctgaccgaggatgaccaggaaactaccactcggttcctgcagaccgaagccgtgaccctgcaggacgtgagaggccgggactaccagaacgccatgcgggtgtggtccaacatccctggactgaaaagcaagcacgcacctctgacccctaaagaagaggagtacctgcaggcccaggtgcggagcagaagcaagctggacgcccctaaggtggatctgctggtgaagaattgcctcctgcccctgagagagtacttcaagtatttcagccagaatagtctgcccctgggaggcagcggcggcggcatgcccctgggcagcgagctgttcagggacgtggccatcgtgttcagccaggaggagtggcagtggctggcccccgcccagagggacctgtacagggacgtgatgctggagacctacagcaacctggtgagcctgggcctggccatcagcaagcccgacgtgatcagcttcctggagcagggcaaggagccctggatggtggagagggtggtggccggcggcctgtgccccgtgctggagagcggcggcccaagcagcggcgcccctcctcccagcggcggcaggcggcccaagcagcggcgcccctcctcccagcggcggcagcccagccggctccccaacctctaccgaggagggcacctctgagtccgccacccccgagagcggccctggcacctccaccgagcccagcgagggcagcgcacccggcagccctgccggcagccccacctccacagaggagggaaccagcaccgagcccagcgaaggcagcgccccaggcaccagcaccgagcctagtgagcaggagattaaacggatcaacaagatcagaagaagacttgtgaaagacagcaacaccaagaaggccggcaagacaggccccatgaaaaccctgctggttagagtgatgacacccgatctgagagagcggctggaaaacctgagaaagaagcctgaaaatatcccccagcccatcagcaatacatctagagccaacctgaataagctgctgaccgattacaccgaaatgaagaaggcgatcctgcatgtgtactgggaagagttccagaaggaccctgtgggcctgatgagccgggtggcccagcctgccagcaagaagatcgatcagaacaagctgaaacctgagatggacgagaagggcaacctgaccaccgccggctttgcctgctctcagtgtggccagcccctgttcgtgtacaagctggagcaggtgtctgagaagggcaaggcttacaccaactacttcggacggtgcaatgtggccgagcacgaaaagctgatcctgctggcccagctgaagcccgagaaggatagcgacgaagccgtgacatatagcctgggaaagtttgggcagagggccctggatttctacagcattcatgtgaccaaggagtccacccaccccgtgaagcccctggcccagatcgccggaaacagatacgcctccggacctgtgggaaaggccctgagcgacgcatgtatgggcacaatcgcctccttcctgtctaagtaccaggacatcatcatcgaacaccagaaggtggtgaagggcaaccagaagagactggagagcctgcgggagctggccggcaaggaaaacctggaataccctagcgtgaccctgccacctcagcctcacaccaaggagggcgttgatgcctacaacgaagtgatcgcccgggtgcgaatgtgggtgaacctgaacctgtggcagaagctgaagctaagcagagatgatgccaagcctctgctgagactgaagggattcccttcctttcctctggtcgagagacaggccaacgaagtggactggtgggacatggtgtgtaacgtgaagaagctgatcaacgagaaaaaggaggatggcaaggtgttttggcagaatctggctggctacaagagacaggaagccctgagaccatacctgagcagcgaggaagatcggaagaagggaaagaaattcgctcggtaccagctgggcgacctgctgctgcacctggaaaagaagcacggcgaggactggggaaaggtgtacgacgaggcctgggagcggattgacaagaaagtggaaggcctgagcaagcacatcaagctggaagaggaacggagaagcgaggacgcccagagcaaggccgccctgaccgactggctgcgggctaaggccagcttcgtgatcgagggcctgaaggaggccgacaaggacgagttctgcagatgcgagctgaagctgcagaagtggtacggggacctgcggggaaagcccttcgccatcgaagccgagaacagcatcctggacatcagcggcttcagcaagcagtacaactgtgccttcatctggcagaaggacggcgtgaagaagctgaacctgtacctgatcatcaactacttcaagggcggcaagctgcggttcaagaagatcaaacctgaagccttcgaagccaacagattctacaccgtgatcaacaaaaagagcggcgagatcgtgcccatggaggtgaacttcaacttcgacgaccccaacctgatcatcctgcctctggcctttggcaagagacagggcagagaattcatctggaacgacctgctgtccctggaaaccggcagcctgaagctggccaacggaagagtgatcgagaagacactgtacaacagaagaacccggcaggatgagcctgccctgttcgtggccctgaccttcgagcggcgggaggtcctggactcctccaatatcaaaccaatgaacctgatcggcgtggcaagaggcgaaaacatccccgccgtgatcgccctgaccgaccccgagggctgcccactgagccggtttaaggatagcctgggaaacccaacccacatcctgagaatcggcgagagctataaggagaagcagcggaccatccaggccaagaaggaggtggagcagcggagagccggcggctacagccggaagtacgccagcaaagccaagaatctggcagacgatatggtgagaaacaccgctagagatctgctgtactacgccgtgacccaggatgccatgctgatcttcgccaacctgagccggggcttcggccggcagggcaagcggaccttcatggccgagagacagtacacacggatggaggactggctgaccgccaagctggcctacgagggcctgagcaagacctacctgtccaagacactggcccagtacacctccaagacatgcagcaactgtgggtttaccatcaccagcgccgactacgacagggtgctggagaagctgaagaagacagcaacaggctggatgaccacaattaacggcaaggagctgaaggtggagggccagattacctactacaacagatacaagagacagaacgtagtcaaggacctgtccgtcgagctggatagactgagcgaagaatctgtgaacaacgacatctcctcctggacaaagggcagaagcggagaagctctgagcctcctgaagaaaagattctcccatagacccgtgcaggagaagttcgtgtgcctgaactgcggcttcgagacacacgcagccgagcaagccgccctgaacatcgccagatcctggctgttcctgcggagccaggagtacaagaaataccagacaaacaagacaaccggcaacaccgataagagagccttcgtcgagacctggcagtccttttaccggaagaagcttaaggaggtgtggaaacctgccgtgcggtctggcggatctggcggaggctccaccagccccaagaaaaagagaaaagtctaagctgccttctgcggggcttgccttctggccatgcccttcttctctcccttgcacctgtacctcttggtctttgaataaagcctgagtaggaaggctagcaaaaaaaaaaaaaaaaaaaaaaaaaaaaaaaaaaaaaaaaaaaaaaaaaaaaaaaaaaaaaaaaaaaaaaaaaaaaaaaagcccagccggctccccaacctctaccgaggagggcacctctgagtccgccacccccgagagcggccctggcacctccaccgagcccagcgagggcagcgcacccggcagccctgccggcagccccacctccacagaggagggaaccagcaccgagcccagcgaaggcagcgccccaggcaccagcaccgagcctagtgagcaggagattaaacggatcaacaagatcagaagaagacttgtgaaagacagcaacaccaagaaggccggcaagacaggccccatgaaaaccctgctggttagagtgatgacacccgatctgagagagcggctggaaaacctgagaaagaagcctgaaaatatcccccagcccatcagcaatacatctagagccaacctgaataagctgctgaccgattacaccgaaatgaagaaggcgatcctgcatgtgtactgggaagagttccagaaggaccctgtgggcctgatgagccgggtggcccagcctgccagcaagaagatcgatcagaacaagctgaaacctgagatggacgagaagggcaacctgaccaccgccggctttgcctgctctcagtgtggccagcccctgttcgtgtacaagctggagcaggtgtctgagaagggcaaggcttacaccaactacttcggacggtgcaatgtggccgagcacgaaaagctgatcctgctggcccagctgaagcccgagaaggatagcgacgaagccgtgacatatagcctgggaaagtttgggcagagggccctggatttctacagcattcatgtgaccaaggagtccacccaccccgtgaagcccctggcccagatcgccggaaacagatacgcctccggacctgtgggaaaggccctgagcgacgcatgtatgggcacaatcgcctccttcctgtctaagtaccaggacatcatcatcgaacaccagaaggtggtgaagggcaaccagaagagactggagagcctgcgggagctggccggcaaggaaaacctggaataccctagcgtgaccctgccacctcagcctcacaccaaggagggcgttgatgcctacaacgaagtgatcgcccgggtgcgaatgtgggtgaacctgaacctgtggcagaagctgaagctaagcagagatgatgccaagcctctgctgagactgaagggattcccttcctttcctctggtcgagagacaggccaacgaagtggactggtgggacatggtgtgtaacgtgaagaagctgatcaacgagaaaaaggaggatggcaaggtgttttggcagaatctggctggctacaagagacaggaagccctgagaccatacctgagcagcgaggaagatcggaagaagggaaagaaattcgctcggtaccagctgggcgacctgctgctgcacctggaaaagaagcacggcgaggactggggaaaggtgtacgacgaggcctgggagcggattgacaagaaagtggaaggcctgagcaagcacatcaagctggaagaggaacggagaagcgaggacgcccagagcaaggccgccctgaccgactggctgcgggctaaggccagcttcgtgatcgagggcctgaaggaggccgacaaggacgagttctgcagatgcgagctgaagctgcagaagtggtacggggacctgcggggaaagcccttcgccatcgaagccgagaacagcatcctggacatcagcggcttcagcaagcagtacaactgtgccttcatctggcagaaggacggcgtgaagaagctgaacctgtacctgatcatcaactacttcaagggcggcaagctgcggttcaagaagatcaaacctgaagccttcgaagccaacagattctacaccgtgatcaacaaaaagagcggcgagatcgtgcccatggaggtgaacttcaacttcgacgaccccaacctgatcatcctgcctctggcctttggcaagagacagggcagagaattcatctggaacgacctgctgtccctggaaaccggcagcctgaagctggccaacggaagagtgatcgagaagacactgtacaacagaagaacccggcaggatgagcctgccctgttcgtggccctgaccttcgagcggcgggaggtcctggactcctccaatatcaaaccaatgaacctgatcggcgtggcaagaggcgaaaacatccccgccgtgatcgccctgaccgaccccgagggctgcccactgagccggtttaaggatagcctgggaaacccaacccacatcctgagaatcggcgagagctataaggagaagcagcggaccatccaggccaagaaggaggtggagcagcggagagccggcggctacagccggaagtacgccagcaaagccaagaatctggcagacgatatggtgagaaacaccgctagagatctgctgtactacgccgtgacccaggatgccatgctgatcttcgccaacctgagccggggcttcggccggcagggcaagcggaccttcatggccgagagacagtacacacggatggaggactggctgaccgccaagctggcctacgagggcctgagcaagacctacctgtccaagacactggcccagtacacctccaagacatgcagcaactgtgggtttaccatcaccagcgccgactacgacagggtgctggagaagctgaagaagacagcaacaggctggatgaccacaattaacggcaaggagctgaaggtggagggccagattacctactacaacagatacaagagacagaacgtagtcaaggacctgtccgtcgagctggatagactgagcgaagaatctgtgaacaacgacatctcctcctggacaaagggcagaagcggagaagctctgagcctcctgaagaaaagattctcccatagacccgtgcaggagaagttcgtgtgcctgaactgcggcttcgagacacacgcagccgagcaagccgccctgaacatcgccagatcctggctgttcctgcggagccaggagtacaagaaataccagacaaacaagacaaccggcaacaccgataagagagccttcgtcgagacctggcagtccttttaccggaagaagcttaaggaggtgtggaaacctgccgtgcggtctggcggatctggcggaggctccaccagccccaagaaaaagagaaaagtctaagctgccttctgcggggcttgccttctggccatgcccttcttctctcccttgcacctgtacctcttggtctttgaataaagcctgagtaggaaggctagcaaaaaaaaaaaaaaaaaaaaaaaaaaaaaaaaaaaaaaaaaaaaaaaaaaaaaaaaaaaaaaaaaaaaaaaaaaaaaaaa

SEQ ID NO: 9090 - RNA, 8787 nt, synthetic construct
  source 1..8787: mol_type = other RNA
aggaaataagagagaaaagaagagtaagaagaaatataagagccaccatggcccctaagaagaagcgtaaagtgagccggatgaaccacgaccaggagttcgacccccctaaggtgtaccctcccgtccccgccgagaagagaaagcccatccgggtcctgagcctgttcgatggcatcgccaccggtctgctggtgctgaaggacctgggcatccaggtggataggtacattgcctccgaggtgtgcgaggactccatcaccgtgggaatggtgcgtcatcagggcaagatcatgtacgtgggcgacgtgcggagcgtgacacagaagcatatccaggagtggggccctttcgacctggtgatcggcggcagcccttgcaatgacctgagcatcgtgaacccagcccggaagggcctgtacgagggaaccggcagactgttcttcgagttttacagactgctgcacgacgcccggcctaaggaaggcgacgaccggcccttcttttggctgttcgagaatgtggtggccatgggagtcagcgacaagcgggatattagccggttcctggagagcaaccccgtgatgatcgatgccaaggaagtgagcgccgcccaccgggccagatacttctggggcaatctgcctggcatgaacagacccctggccagcaccgtgaacgacaagctggagctgcaggagtgcctggagcacggccggatcgccaagttcagcaaggtgagaaccatcaccacccgaagcaacagcatcaaacaaggcaaggaccagcactttcctgtgttcatgaacgagaaggaggacatcctgtggtgtaccgagatggagagagtgttcgggttcccagtccactacacagatgtcagcaacatgtctagactggccagacagagactgctgggaagaagctggtccgtccctgtgatcagacacctgttcgcccctctgaaggagtacttcgcctgcgtgagcagcggcaacagcaacgccaacagccggggccccagcttctctagcggcctggtgccactgtccctgagagggagccacatgggccccatggagatctacaaaaccgtgagcgcctggaagcggcagcctgtgcgcgtgctgagcctgtttcggaatatcgataaagtcctgaaaagcctgggattcctggagagcggctctggctccggcggtggcaccctgaagtacgtggaggatgtgacaaacgtggtcagacgggatgtggagaagtggggccccttcgatctggtgtacggcagcacccaacccctgggcagctcttgtgaccggtgccctggctggtacatgtttcagttccaccggatcctgcagtacgccctgccgagacaggagtcccagcggccattcttttggattttcatggacaacttgctgctgaccgaggatgaccaggaaactaccactcggttcctgcagaccgaagccgtgaccctgcaggacgtgagaggccgggactaccagaacgccatgcgggtgtggtccaacatccctggactgaaaagcaagcacgcacctctgacccctaaagaagaggagtacctgcaggcccaggtgcggagcagaagcaagctggacgcccctaaggtggatctgctggtgaagaattgcctcctgcccctgagagagtacttcaagtatttcagccagaatagtctgcccctgggaggcagcggcggcggcctggcccccgaggaccacggcagcagctacgagggcagcgtgagcttcagggacgtggccatcgacttcagcagggaggagtggaggcacctggacctgagccagaggaacctgtacagggacgtgatgctggagacctacagccacctgctgagcgtgggctaccaggtgcccgaggccgaggtggtgatgctggagcagggcaaggagccctgggccctgcagggcgagaggcccaggcacggcggcccaagcagcggcgcccctcctcccagcggcggcaggcggcccaagcagcggcgcccctcctcccagcggcggcagcccagccggctccccaacctctaccgaggagggcacctctgagtccgccacccccgagagcggccctggcacctccaccgagcccagcgagggcagcgcacccggcagccctgccggcagccccacctccacagaggagggaaccagcaccgagcccagcgaaggcagcgccccaggcaccagcaccgagcctagtgagcaggagattaaacggatcaacaagatcagaagaagacttgtgaaagacagcaacaccaagaaggccggcaagacaggccccatgaaaaccctgctggttagagtgatgacacccgatctgagagagcggctggaaaacctgagaaagaagcctgaaaatatcccccagcccatcagcaatacatctagagccaacctgaataagctgctgaccgattacaccgaaatgaagaaggcgatcctgcatgtgtactgggaagagttccagaaggaccctgtgggcctgatgagccgggtggcccagcctgccagcaagaagatcgatcagaacaagctgaaacctgagatggacgagaagggcaacctgaccaccgccggctttgcctgctctcagtgtggccagcccctgttcgtgtacaagctggagcaggtgtctgagaagggcaaggcttacaccaactacttcggacggtgcaatgtggccgagcacgaaaagctgatcctgctggcccagctgaagcccgagaaggatagcgacgaagccgtgacatatagcctgggaaagtttgggcagagggccctggatttctacagcattcatgtgaccaaggagtccacccaccccgtgaagcccctggcccagatcgccggaaacagatacgcctccggacctgtgggaaaggccctgagcgacgcatgtatgggcacaatcgcctccttcctgtctaagtaccaggacatcatcatcgaacaccagaaggtggtgaagggcaaccagaagagactggagagcctgcgggagctggccggcaaggaaaacctggaataccctagcgtgaccctgccacctcagcctcacaccaaggagggcgttgatgcctacaacgaagtgatcgcccgggtgcgaatgtgggtgaacctgaacctgtggcagaagctgaagctaagcagagatgatgccaagcctctgctgagactgaagggattcccttcctttcctctggtcgagagacaggccaacgaagtggactggtgggacatggtgtgtaacgtgaagaagctgatcaacgagaaaaaggaggatggcaaggtgttttggcagaatctggctggctacaagagacaggaagccctgagaccatacctgagcagcgaggaagatcggaagaagggaaagaaattcgctcggtaccagctgggcgacctgctgctgcacctggaaaagaagcacggcgaggactggggaaaggtgtacgacgaggcctgggagcggattgacaagaaagtggaaggcctgagcaagcacatcaagctggaagaggaacggagaagcgaggacgcccagagcaaggccgccctgaccgactggctgcgggctaaggccagcttcgtgatcgagggcctgaaggaggccgacaaggacgagttctgcagatgcgagctgaagctgcagaagtggtacggggacctgcggggaaagcccttcgccatcgaagccgagaacagcatcctggacatcagcggcttcagcaagcagtacaactgtgccttcatctggcagaaggacggcgtgaagaagctgaacctgtacctgatcatcaactacttcaagggcggcaagctgcggttcaagaagatcaaacctgaagccttcgaagccaacagattctacaccgtgatcaacaaaaagagcggcgagatcgtgcccatggaggtgaacttcaacttcgacgaccccaacctgatcatcctgcctctggcctttggcaagagacagggcagagaattcatctggaacgacctgctgtccctggaaaccggcagcctgaagctggccaacggaagagtgatcgagaagacactgtacaacagaagaacccggcaggatgagcctgccctgttcgtggccctgaccttcgagcggcgggaggtcctggactcctccaatatcaaaccaatgaacctgatcggcgtggcaagaggcgaaaacatccccgccgtgatcgccctgaccgaccccgagggctgcccactgagccggtttaaggatagcctgggaaacccaacccacatcctgagaatcggcgagagctataaggagaagcagcggaccatccaggccaagaaggaggtggagcagcggagagccggcggctacagccggaagtacgccagcaaagccaagaatctggcagacgatatggtgagaaacaccgctagagatctgctgtactacgccgtgacccaggatgccatgctgatcttcgccaacctgagccggggcttcggccggcagggcaagcggaccttcatggccgagagacagtacacacggatggaggactggctgaccgccaagctggcctacgagggcctgagcaagacctacctgtccaagacactggcccagtacacctccaagacatgcagcaactgtgggtttaccatcaccagcgccgactacgacagggtgctggagaagctgaagaagacagcaacaggctggatgaccacaattaacggcaaggagctgaaggtggagggccagattacctactacaacagatacaagagacagaacgtagtcaaggacctgtccgtcgagctggatagactgagcgaagaatctgtgaacaacgacatctcctcctggacaaagggcagaagcggagaagctctgagcctcctgaagaaaagattctcccatagacccgtgcaggagaagttcgtgtgcctgaactgcggcttcgagacacacgcagccgagcaagccgccctgaacatcgccagatcctggctgttcctgcggagccaggagtacaagaaataccagacaaacaagacaaccggcaacaccgataagagagccttcgtcgagacctggcagtccttttaccggaagaagcttaaggaggtgtggaaacctgccgtgcggtctggcggatctggcggaggctccaccagccccaagaaaaagagaaaagtctaagctgccttctgcggggcttgccttctggccatgcccttcttctctcccttgcacctgtacctcttggtctttgaataaagcctgagtaggaaggctagcaaaaaaaaaaaaaaaaaaaaaaaaaaaaaaaaaaaaaaaaaaaaaaaaaaaaaaaaaaaaaaaaaaaaaaaaaaaaaaaagcccagccggctccccaacctctaccgaggagggcacctctgagtccgccacccccgagagcggccctggcacctccaccgagcccagcgagggcagcgcacccggcagccctgccggcagccccacctccacagaggagggaaccagcaccgagcccagcgaaggcagcgccccaggcaccagcaccgagcctagtgagcaggagattaaacggatcaacaagatcagaagaagacttgtgaaagacagcaacaccaagaaggccggcaagacaggccccatgaaaaccctgctggttagagtgatgacacccgatctgagagagcggctggaaaacctgagaaagaagcctgaaaatatcccccagcccatcagcaatacatctagagccaacctgaataagctgctgaccgattacaccgaaatgaagaaggcgatcctgcatgtgtactgggaagagttccagaaggaccctgtgggcctgatgagccgggtggcccagcctgccagcaagaagatcgatcagaacaagctgaaacctgagatggacgagaagggcaacctgaccaccgccggctttgcctgctctcagtgtggccagcccctgttcgtgtacaagctggagcaggtgtctgagaagggcaaggcttacaccaactacttcggacggtgcaatgtggccgagcacgaaaagctgatcctgctggcccagctgaagcccgagaaggatagcgacgaagccgtgacatatagcctgggaaagtttgggcagagggccctggatttctacagcattcatgtgaccaaggagtccacccaccccgtgaagcccctggcccagatcgccggaaacagatacgcctccggacctgtgggaaaggccctgagcgacgcatgtatgggcacaatcgcctccttcctgtctaagtaccaggacatcatcatcgaacaccagaaggtggtgaagggcaaccagaagagactggagagcctgcgggagctggccggcaaggaaaacctggaataccctagcgtgaccctgccacctcagcctcacaccaaggagggcgttgatgcctacaacgaagtgatcgcccgggtgcgaatgtgggtgaacctgaacctgtggcagaagctgaagctaagcagagatgatgccaagcctctgctgagactgaagggattcccttcctttcctctggtcgagagacaggccaacgaagtggactggtgggacatggtgtgtaacgtgaagaagctgatcaacgagaaaaaggaggatggcaaggtgttttggcagaatctggctggctacaagagacaggaagccctgagaccatacctgagcagcgaggaagatcggaagaagggaaagaaattcgctcggtaccagctgggcgacctgctgctgcacctggaaaagaagcacggcgaggactggggaaaggtgtacgacgaggcctgggagcggattgacaagaaagtggaaggcctgagcaagcacatcaagctggaagaggaacggagaagcgaggacgcccagagcaaggccgccctgaccgactggctgcgggctaaggccagcttcgtgatcgagggcctgaaggaggccgacaaggacgagttctgcagatgcgagctgaagctgcagaagtggtacggggacctgcggggaaagcccttcgccatcgaagccgagaacagcatcctggacatcagcggcttcagcaagcagtacaactgtgccttcatctggcagaaggacggcgtgaagaagctgaacctgtacctgatcatcaactacttcaagggcggcaagctgcggttcaagaagatcaaacctgaagccttcgaagccaacagattctacaccgtgatcaacaaaaagagcggcgagatcgtgcccatggaggtgaacttcaacttcgacgaccccaacctgatcatcctgcctctggcctttggcaagagacagggcagagaattcatctggaacgacctgctgtccctggaaaccggcagcctgaagctggccaacggaagagtgatcgagaagacactgtacaacagaagaacccggcaggatgagcctgccctgttcgtggccctgaccttcgagcggcgggaggtcctggactcctccaatatcaaaccaatgaacctgatcggcgtggcaagaggcgaaaacatccccgccgtgatcgccctgaccgaccccgagggctgcccactgagccggtttaaggatagcctgggaaacccaacccacatcctgagaatcggcgagagctataaggagaagcagcggaccatccaggccaagaaggaggtggagcagcggagagccggcggctacagccggaagtacgccagcaaagccaagaatctggcagacgatatggtgagaaacaccgctagagatctgctgtactacgccgtgacccaggatgccatgctgatcttcgccaacctgagccggggcttcggccggcagggcaagcggaccttcatggccgagagacagtacacacggatggaggactggctgaccgccaagctggcctacgagggcctgagcaagacctacctgtccaagacactggcccagtacacctccaagacatgcagcaactgtgggtttaccatcaccagcgccgactacgacagggtgctggagaagctgaagaagacagcaacaggctggatgaccacaattaacggcaaggagctgaaggtggagggccagattacctactacaacagatacaagagacagaacgtagtcaaggacctgtccgtcgagctggatagactgagcgaagaatctgtgaacaacgacatctcctcctggacaaagggcagaagcggagaagctctgagcctcctgaagaaaagattctcccatagacccgtgcaggagaagttcgtgtgcctgaactgcggcttcgagacacacgcagccgagcaagccgccctgaacatcgccagatcctggctgttcctgcggagccaggagtacaagaaataccagacaaacaagacaaccggcaacaccgataagagagccttcgtcgagacctggcagtccttttaccggaagaagcttaaggaggtgtggaaacctgccgtgcggtctggcggatctggcggaggctccaccagccccaagaaaaagagaaaagtctaagctgccttctgcggggcttgccttctggccatgcccttcttctctcccttgcacctgtacctcttggtctttgaataaagcctgagtaggaaggctagcaaaaaaaaaaaaaaaaaaaaaaaaaaaaaaaaaaaaaaaaaaaaaaaaaaaaaaaaaaaaaaaaaaaaaaaaaaaaaaaa

SEQ ID NO: 9091 - RNA, 8787 nt, synthetic construct
  source 1..8787: mol_type = other RNA
aggaaataagagagaaaagaagagtaagaagaaatataagagccaccatggcccctaagaagaagcgtaaagtgagccggatgaaccacgaccaggagttcgacccccctaaggtgtaccctcccgtccccgccgagaagagaaagcccatccgggtcctgagcctgttcgatggcatcgccaccggtctgctggtgctgaaggacctgggcatccaggtggataggtacattgcctccgaggtgtgcgaggactccatcaccgtgggaatggtgcgtcatcagggcaagatcatgtacgtgggcgacgtgcggagcgtgacacagaagcatatccaggagtggggccctttcgacctggtgatcggcggcagcccttgcaatgacctgagcatcgtgaacccagcccggaagggcctgtacgagggaaccggcagactgttcttcgagttttacagactgctgcacgacgcccggcctaaggaaggcgacgaccggcccttcttttggctgttcgagaatgtggtggccatgggagtcagcgacaagcgggatattagccggttcctggagagcaaccccgtgatgatcgatgccaaggaagtgagcgccgcccaccgggccagatacttctggggcaatctgcctggcatgaacagacccctggccagcaccgtgaacgacaagctggagctgcaggagtgcctggagcacggccggatcgccaagttcagcaaggtgagaaccatcaccacccgaagcaacagcatcaaacaaggcaaggaccagcactttcctgtgttcatgaacgagaaggaggacatcctgtggtgtaccgagatggagagagtgttcgggttcccagtccactacacagatgtcagcaacatgtctagactggccagacagagactgctgggaagaagctggtccgtccctgtgatcagacacctgttcgcccctctgaaggagtacttcgcctgcgtgagcagcggcaacagcaacgccaacagccggggccccagcttctctagcggcctggtgccactgtccctgagagggagccacatgggccccatggagatctacaaaaccgtgagcgcctggaagcggcagcctgtgcgcgtgctgagcctgtttcggaatatcgataaagtcctgaaaagcctgggattcctggagagcggctctggctccggcggtggcaccctgaagtacgtggaggatgtgacaaacgtggtcagacgggatgtggagaagtggggccccttcgatctggtgtacggcagcacccaacccctgggcagctcttgtgaccggtgccctggctggtacatgtttcagttccaccggatcctgcagtacgccctgccgagacaggagtcccagcggccattcttttggattttcatggacaacttgctgctgaccgaggatgaccaggaaactaccactcggttcctgcagaccgaagccgtgaccctgcaggacgtgagaggccgggactaccagaacgccatgcgggtgtggtccaacatccctggactgaaaagcaagcacgcacctctgacccctaaagaagaggagtacctgcaggcccaggtgcggagcagaagcaagctggacgcccctaaggtggatctgctggtgaagaattgcctcctgcccctgagagagtacttcaagtatttcagccagaatagtctgcccctgggaggcagcggcggcggcgacgaggccctgatggccttcaaggacgtggccgtggccttcacccagaaggagtggaagctgctgagccccgcccagaggaccctgtacagggacgtgatgctggagaactacagccacatggtgagcctgggcatcgccttccccaagcccaagctgatcacccagctggagcagggcgaggagccctggagggaggagagcgagagcctgctggacctgtgccccgccgagcccaggaccggcggcccaagcagcggcgcccctcctcccagcggcggcaggcggcccaagcagcggcgcccctcctcccagcggcggcagcccagccggctccccaacctctaccgaggagggcacctctgagtccgccacccccgagagcggccctggcacctccaccgagcccagcgagggcagcgcacccggcagccctgccggcagccccacctccacagaggagggaaccagcaccgagcccagcgaaggcagcgccccaggcaccagcaccgagcctagtgagcaggagattaaacggatcaacaagatcagaagaagacttgtgaaagacagcaacaccaagaaggccggcaagacaggccccatgaaaaccctgctggttagagtgatgacacccgatctgagagagcggctggaaaacctgagaaagaagcctgaaaatatcccccagcccatcagcaatacatctagagccaacctgaataagctgctgaccgattacaccgaaatgaagaaggcgatcctgcatgtgtactgggaagagttccagaaggaccctgtgggcctgatgagccgggtggcccagcctgccagcaagaagatcgatcagaacaagctgaaacctgagatggacgagaagggcaacctgaccaccgccggctttgcctgctctcagtgtggccagcccctgttcgtgtacaagctggagcaggtgtctgagaagggcaaggcttacaccaactacttcggacggtgcaatgtggccgagcacgaaaagctgatcctgctggcccagctgaagcccgagaaggatagcgacgaagccgtgacatatagcctgggaaagtttgggcagagggccctggatttctacagcattcatgtgaccaaggagtccacccaccccgtgaagcccctggcccagatcgccggaaacagatacgcctccggacctgtgggaaaggccctgagcgacgcatgtatgggcacaatcgcctccttcctgtctaagtaccaggacatcatcatcgaacaccagaaggtggtgaagggcaaccagaagagactggagagcctgcgggagctggccggcaaggaaaacctggaataccctagcgtgaccctgccacctcagcctcacaccaaggagggcgttgatgcctacaacgaagtgatcgcccgggtgcgaatgtgggtgaacctgaacctgtggcagaagctgaagctaagcagagatgatgccaagcctctgctgagactgaagggattcccttcctttcctctggtcgagagacaggccaacgaagtggactggtgggacatggtgtgtaacgtgaagaagctgatcaacgagaaaaaggaggatggcaaggtgttttggcagaatctggctggctacaagagacaggaagccctgagaccatacctgagcagcgaggaagatcggaagaagggaaagaaattcgctcggtaccagctgggcgacctgctgctgcacctggaaaagaagcacggcgaggactggggaaaggtgtacgacgaggcctgggagcggattgacaagaaagtggaaggcctgagcaagcacatcaagctggaagaggaacggagaagcgaggacgcccagagcaaggccgccctgaccgactggctgcgggctaaggccagcttcgtgatcgagggcctgaaggaggccgacaaggacgagttctgcagatgcgagctgaagctgcagaagtggtacggggacctgcggggaaagcccttcgccatcgaagccgagaacagcatcctggacatcagcggcttcagcaagcagtacaactgtgccttcatctggcagaaggacggcgtgaagaagctgaacctgtacctgatcatcaactacttcaagggcggcaagctgcggttcaagaagatcaaacctgaagccttcgaagccaacagattctacaccgtgatcaacaaaaagagcggcgagatcgtgcccatggaggtgaacttcaacttcgacgaccccaacctgatcatcctgcctctggcctttggcaagagacagggcagagaattcatctggaacgacctgctgtccctggaaaccggcagcctgaagctggccaacggaagagtgatcgagaagacactgtacaacagaagaacccggcaggatgagcctgccctgttcgtggccctgaccttcgagcggcgggaggtcctggactcctccaatatcaaaccaatgaacctgatcggcgtggcaagaggcgaaaacatccccgccgtgatcgccctgaccgaccccgagggctgcccactgagccggtttaaggatagcctgggaaacccaacccacatcctgagaatcggcgagagctataaggagaagcagcggaccatccaggccaagaaggaggtggagcagcggagagccggcggctacagccggaagtacgccagcaaagccaagaatctggcagacgatatggtgagaaacaccgctagagatctgctgtactacgccgtgacccaggatgccatgctgatcttcgccaacctgagccggggcttcggccggcagggcaagcggaccttcatggccgagagacagtacacacggatggaggactggctgaccgccaagctggcctacgagggcctgagcaagacctacctgtccaagacactggcccagtacacctccaagacatgcagcaactgtgggtttaccatcaccagcgccgactacgacagggtgctggagaagctgaagaagacagcaacaggctggatgaccacaattaacggcaaggagctgaaggtggagggccagattacctactacaacagatacaagagacagaacgtagtcaaggacctgtccgtcgagctggatagactgagcgaagaatctgtgaacaacgacatctcctcctggacaaagggcagaagcggagaagctctgagcctcctgaagaaaagattctcccatagacccgtgcaggagaagttcgtgtgcctgaactgcggcttcgagacacacgcagccgagcaagccgccctgaacatcgccagatcctggctgttcctgcggagccaggagtacaagaaataccagacaaacaagacaaccggcaacaccgataagagagccttcgtcgagacctggcagtccttttaccggaagaagcttaaggaggtgtggaaacctgccgtgcggtctggcggatctggcggaggctccaccagccccaagaaaaagagaaaagtctaagctgccttctgcggggcttgccttctggccatgcccttcttctctcccttgcacctgtacctcttggtctttgaataaagcctgagtaggaaggctagcaaaaaaaaaaaaaaaaaaaaaaaaaaaaaaaaaaaaaaaaaaaaaaaaaaaaaaaaaaaaaaaaaaaaaaaaaaaaaaaagcccagccggctccccaacctctaccgaggagggcacctctgagtccgccacccccgagagcggccctggcacctccaccgagcccagcgagggcagcgcacccggcagccctgccggcagccccacctccacagaggagggaaccagcaccgagcccagcgaaggcagcgccccaggcaccagcaccgagcctagtgagcaggagattaaacggatcaacaagatcagaagaagacttgtgaaagacagcaacaccaagaaggccggcaagacaggccccatgaaaaccctgctggttagagtgatgacacccgatctgagagagcggctggaaaacctgagaaagaagcctgaaaatatcccccagcccatcagcaatacatctagagccaacctgaataagctgctgaccgattacaccgaaatgaagaaggcgatcctgcatgtgtactgggaagagttccagaaggaccctgtgggcctgatgagccgggtggcccagcctgccagcaagaagatcgatcagaacaagctgaaacctgagatggacgagaagggcaacctgaccaccgccggctttgcctgctctcagtgtggccagcccctgttcgtgtacaagctggagcaggtgtctgagaagggcaaggcttacaccaactacttcggacggtgcaatgtggccgagcacgaaaagctgatcctgctggcccagctgaagcccgagaaggatagcgacgaagccgtgacatatagcctgggaaagtttgggcagagggccctggatttctacagcattcatgtgaccaaggagtccacccaccccgtgaagcccctggcccagatcgccggaaacagatacgcctccggacctgtgggaaaggccctgagcgacgcatgtatgggcacaatcgcctccttcctgtctaagtaccaggacatcatcatcgaacaccagaaggtggtgaagggcaaccagaagagactggagagcctgcgggagctggccggcaaggaaaacctggaataccctagcgtgaccctgccacctcagcctcacaccaaggagggcgttgatgcctacaacgaagtgatcgcccgggtgcgaatgtgggtgaacctgaacctgtggcagaagctgaagctaagcagagatgatgccaagcctctgctgagactgaagggattcccttcctttcctctggtcgagagacaggccaacgaagtggactggtgggacatggtgtgtaacgtgaagaagctgatcaacgagaaaaaggaggatggcaaggtgttttggcagaatctggctggctacaagagacaggaagccctgagaccatacctgagcagcgaggaagatcggaagaagggaaagaaattcgctcggtaccagctgggcgacctgctgctgcacctggaaaagaagcacggcgaggactggggaaaggtgtacgacgaggcctgggagcggattgacaagaaagtggaaggcctgagcaagcacatcaagctggaagaggaacggagaagcgaggacgcccagagcaaggccgccctgaccgactggctgcgggctaaggccagcttcgtgatcgagggcctgaaggaggccgacaaggacgagttctgcagatgcgagctgaagctgcagaagtggtacggggacctgcggggaaagcccttcgccatcgaagccgagaacagcatcctggacatcagcggcttcagcaagcagtacaactgtgccttcatctggcagaaggacggcgtgaagaagctgaacctgtacctgatcatcaactacttcaagggcggcaagctgcggttcaagaagatcaaacctgaagccttcgaagccaacagattctacaccgtgatcaacaaaaagagcggcgagatcgtgcccatggaggtgaacttcaacttcgacgaccccaacctgatcatcctgcctctggcctttggcaagagacagggcagagaattcatctggaacgacctgctgtccctggaaaccggcagcctgaagctggccaacggaagagtgatcgagaagacactgtacaacagaagaacccggcaggatgagcctgccctgttcgtggccctgaccttcgagcggcgggaggtcctggactcctccaatatcaaaccaatgaacctgatcggcgtggcaagaggcgaaaacatccccgccgtgatcgccctgaccgaccccgagggctgcccactgagccggtttaaggatagcctgggaaacccaacccacatcctgagaatcggcgagagctataaggagaagcagcggaccatccaggccaagaaggaggtggagcagcggagagccggcggctacagccggaagtacgccagcaaagccaagaatctggcagacgatatggtgagaaacaccgctagagatctgctgtactacgccgtgacccaggatgccatgctgatcttcgccaacctgagccggggcttcggccggcagggcaagcggaccttcatggccgagagacagtacacacggatggaggactggctgaccgccaagctggcctacgagggcctgagcaagacctacctgtccaagacactggcccagtacacctccaagacatgcagcaactgtgggtttaccatcaccagcgccgactacgacagggtgctggagaagctgaagaagacagcaacaggctggatgaccacaattaacggcaaggagctgaaggtggagggccagattacctactacaacagatacaagagacagaacgtagtcaaggacctgtccgtcgagctggatagactgagcgaagaatctgtgaacaacgacatctcctcctggacaaagggcagaagcggagaagctctgagcctcctgaagaaaagattctcccatagacccgtgcaggagaagttcgtgtgcctgaactgcggcttcgagacacacgcagccgagcaagccgccctgaacatcgccagatcctggctgttcctgcggagccaggagtacaagaaataccagacaaacaagacaaccggcaacaccgataagagagccttcgtcgagacctggcagtccttttaccggaagaagcttaaggaggtgtggaaacctgccgtgcggtctggcggatctggcggaggctccaccagccccaagaaaaagagaaaagtctaagctgccttctgcggggcttgccttctggccatgcccttcttctctcccttgcacctgtacctcttggtctttgaataaagcctgagtaggaaggctagcaaaaaaaaaaaaaaaaaaaaaaaaaaaaaaaaaaaaaaaaaaaaaaaaaaaaaaaaaaaaaaaaaaaaaaaaaaaaaaaa

SEQ ID NO: 9092 - RNA, 8787 nt, synthetic construct
  source 1..8787: mol_type = other RNA
aggaaataagagagaaaagaagagtaagaagaaatataagagccaccatggcccctaagaagaagcgtaaagtgagccggatgaaccacgaccaggagttcgacccccctaaggtgtaccctcccgtccccgccgagaagagaaagcccatccgggtcctgagcctgttcgatggcatcgccaccggtctgctggtgctgaaggacctgggcatccaggtggataggtacattgcctccgaggtgtgcgaggactccatcaccgtgggaatggtgcgtcatcagggcaagatcatgtacgtgggcgacgtgcggagcgtgacacagaagcatatccaggagtggggccctttcgacctggtgatcggcggcagcccttgcaatgacctgagcatcgtgaacccagcccggaagggcctgtacgagggaaccggcagactgttcttcgagttttacagactgctgcacgacgcccggcctaaggaaggcgacgaccggcccttcttttggctgttcgagaatgtggtggccatgggagtcagcgacaagcgggatattagccggttcctggagagcaaccccgtgatgatcgatgccaaggaagtgagcgccgcccaccgggccagatacttctggggcaatctgcctggcatgaacagacccctggccagcaccgtgaacgacaagctggagctgcaggagtgcctggagcacggccggatcgccaagttcagcaaggtgagaaccatcaccacccgaagcaacagcatcaaacaaggcaaggaccagcactttcctgtgttcatgaacgagaaggaggacatcctgtggtgtaccgagatggagagagtgttcgggttcccagtccactacacagatgtcagcaacatgtctagactggccagacagagactgctgggaagaagctggtccgtccctgtgatcagacacctgttcgcccctctgaaggagtacttcgcctgcgtgagcagcggcaacagcaacgccaacagccggggccccagcttctctagcggcctggtgccactgtccctgagagggagccacatgggccccatggagatctacaaaaccgtgagcgcctggaagcggcagcctgtgcgcgtgctgagcctgtttcggaatatcgataaagtcctgaaaagcctgggattcctggagagcggctctggctccggcggtggcaccctgaagtacgtggaggatgtgacaaacgtggtcagacgggatgtggagaagtggggccccttcgatctggtgtacggcagcacccaacccctgggcagctcttgtgaccggtgccctggctggtacatgtttcagttccaccggatcctgcagtacgccctgccgagacaggagtcccagcggccattcttttggattttcatggacaacttgctgctgaccgaggatgaccaggaaactaccactcggttcctgcagaccgaagccgtgaccctgcaggacgtgagaggccgggactaccagaacgccatgcgggtgtggtccaacatccctggactgaaaagcaagcacgcacctctgacccctaaagaagaggagtacctgcaggcccaggtgcggagcagaagcaagctggacgcccctaaggtggatctgctggtgaagaattgcctcctgcccctgagagagtacttcaagtatttcagccagaatagtctgcccctgggaggcagcggcggcggcgcccaggagagcgtgatgttcagcgacgtgagcatcgacttcagccaggaggagtgggagtgcctgaacgacgaccagagggccctgtacagggacgtgatgctggagaactacagcaacctggtgagcatgggccacagcatcagcaagcccgacgtgatcagcttcctggagcagggcaaggagccctggctggtggacagggagctgaccaggggccagtggcccgtgctggagagcaggggcggcccaagcagcggcgcccctcctcccagcggcggcaggcggcccaagcagcggcgcccctcctcccagcggcggcagcccagccggctccccaacctctaccgaggagggcacctctgagtccgccacccccgagagcggccctggcacctccaccgagcccagcgagggcagcgcacccggcagccctgccggcagccccacctccacagaggagggaaccagcaccgagcccagcgaaggcagcgccccaggcaccagcaccgagcctagtgagcaggagattaaacggatcaacaagatcagaagaagacttgtgaaagacagcaacaccaagaaggccggcaagacaggccccatgaaaaccctgctggttagagtgatgacacccgatctgagagagcggctggaaaacctgagaaagaagcctgaaaatatcccccagcccatcagcaatacatctagagccaacctgaataagctgctgaccgattacaccgaaatgaagaaggcgatcctgcatgtgtactgggaagagttccagaaggaccctgtgggcctgatgagccgggtggcccagcctgccagcaagaagatcgatcagaacaagctgaaacctgagatggacgagaagggcaacctgaccaccgccggctttgcctgctctcagtgtggccagcccctgttcgtgtacaagctggagcaggtgtctgagaagggcaaggcttacaccaactacttcggacggtgcaatgtggccgagcacgaaaagctgatcctgctggcccagctgaagcccgagaaggatagcgacgaagccgtgacatatagcctgggaaagtttgggcagagggccctggatttctacagcattcatgtgaccaaggagtccacccaccccgtgaagcccctggcccagatcgccggaaacagatacgcctccggacctgtgggaaaggccctgagcgacgcatgtatgggcacaatcgcctccttcctgtctaagtaccaggacatcatcatcgaacaccagaaggtggtgaagggcaaccagaagagactggagagcctgcgggagctggccggcaaggaaaacctggaataccctagcgtgaccctgccacctcagcctcacaccaaggagggcgttgatgcctacaacgaagtgatcgcccgggtgcgaatgtgggtgaacctgaacctgtggcagaagctgaagctaagcagagatgatgccaagcctctgctgagactgaagggattcccttcctttcctctggtcgagagacaggccaacgaagtggactggtgggacatggtgtgtaacgtgaagaagctgatcaacgagaaaaaggaggatggcaaggtgttttggcagaatctggctggctacaagagacaggaagccctgagaccatacctgagcagcgaggaagatcggaagaagggaaagaaattcgctcggtaccagctgggcgacctgctgctgcacctggaaaagaagcacggcgaggactggggaaaggtgtacgacgaggcctgggagcggattgacaagaaagtggaaggcctgagcaagcacatcaagctggaagaggaacggagaagcgaggacgcccagagcaaggccgccctgaccgactggctgcgggctaaggccagcttcgtgatcgagggcctgaaggaggccgacaaggacgagttctgcagatgcgagctgaagctgcagaagtggtacggggacctgcggggaaagcccttcgccatcgaagccgagaacagcatcctggacatcagcggcttcagcaagcagtacaactgtgccttcatctggcagaaggacggcgtgaagaagctgaacctgtacctgatcatcaactacttcaagggcggcaagctgcggttcaagaagatcaaacctgaagccttcgaagccaacagattctacaccgtgatcaacaaaaagagcggcgagatcgtgcccatggaggtgaacttcaacttcgacgaccccaacctgatcatcctgcctctggcctttggcaagagacagggcagagaattcatctggaacgacctgctgtccctggaaaccggcagcctgaagctggccaacggaagagtgatcgagaagacactgtacaacagaagaacccggcaggatgagcctgccctgttcgtggccctgaccttcgagcggcgggaggtcctggactcctccaatatcaaaccaatgaacctgatcggcgtggcaagaggcgaaaacatccccgccgtgatcgccctgaccgaccccgagggctgcccactgagccggtttaaggatagcctgggaaacccaacccacatcctgagaatcggcgagagctataaggagaagcagcggaccatccaggccaagaaggaggtggagcagcggagagccggcggctacagccggaagtacgccagcaaagccaagaatctggcagacgatatggtgagaaacaccgctagagatctgctgtactacgccgtgacccaggatgccatgctgatcttcgccaacctgagccggggcttcggccggcagggcaagcggaccttcatggccgagagacagtacacacggatggaggactggctgaccgccaagctggcctacgagggcctgagcaagacctacctgtccaagacactggcccagtacacctccaagacatgcagcaactgtgggtttaccatcaccagcgccgactacgacagggtgctggagaagctgaagaagacagcaacaggctggatgaccacaattaacggcaaggagctgaaggtggagggccagattacctactacaacagatacaagagacagaacgtagtcaaggacctgtccgtcgagctggatagactgagcgaagaatctgtgaacaacgacatctcctcctggacaaagggcagaagcggagaagctctgagcctcctgaagaaaagattctcccatagacccgtgcaggagaagttcgtgtgcctgaactgcggcttcgagacacacgcagccgagcaagccgccctgaacatcgccagatcctggctgttcctgcggagccaggagtacaagaaataccagacaaacaagacaaccggcaacaccgataagagagccttcgtcgagacctggcagtccttttaccggaagaagcttaaggaggtgtggaaacctgccgtgcggtctggcggatctggcggaggctccaccagccccaagaaaaagagaaaagtctaagctgccttctgcggggcttgccttctggccatgcccttcttctctcccttgcacctgtacctcttggtctttgaataaagcctgagtaggaaggctagcaaaaaaaaaaaaaaaaaaaaaaaaaaaaaaaaaaaaaaaaaaaaaaaaaaaaaaaaaaaaaaaaaaaaaaaaaaaaaaaagcccagccggctccccaacctctaccgaggagggcacctctgagtccgccacccccgagagcggccctggcacctccaccgagcccagcgagggcagcgcacccggcagccctgccggcagccccacctccacagaggagggaaccagcaccgagcccagcgaaggcagcgccccaggcaccagcaccgagcctagtgagcaggagattaaacggatcaacaagatcagaagaagacttgtgaaagacagcaacaccaagaaggccggcaagacaggccccatgaaaaccctgctggttagagtgatgacacccgatctgagagagcggctggaaaacctgagaaagaagcctgaaaatatcccccagcccatcagcaatacatctagagccaacctgaataagctgctgaccgattacaccgaaatgaagaaggcgatcctgcatgtgtactgggaagagttccagaaggaccctgtgggcctgatgagccgggtggcccagcctgccagcaagaagatcgatcagaacaagctgaaacctgagatggacgagaagggcaacctgaccaccgccggctttgcctgctctcagtgtggccagcccctgttcgtgtacaagctggagcaggtgtctgagaagggcaaggcttacaccaactacttcggacggtgcaatgtggccgagcacgaaaagctgatcctgctggcccagctgaagcccgagaaggatagcgacgaagccgtgacatatagcctgggaaagtttgggcagagggccctggatttctacagcattcatgtgaccaaggagtccacccaccccgtgaagcccctggcccagatcgccggaaacagatacgcctccggacctgtgggaaaggccctgagcgacgcatgtatgggcacaatcgcctccttcctgtctaagtaccaggacatcatcatcgaacaccagaaggtggtgaagggcaaccagaagagactggagagcctgcgggagctggccggcaaggaaaacctggaataccctagcgtgaccctgccacctcagcctcacaccaaggagggcgttgatgcctacaacgaagtgatcgcccgggtgcgaatgtgggtgaacctgaacctgtggcagaagctgaagctaagcagagatgatgccaagcctctgctgagactgaagggattcccttcctttcctctggtcgagagacaggccaacgaagtggactggtgggacatggtgtgtaacgtgaagaagctgatcaacgagaaaaaggaggatggcaaggtgttttggcagaatctggctggctacaagagacaggaagccctgagaccatacctgagcagcgaggaagatcggaagaagggaaagaaattcgctcggtaccagctgggcgacctgctgctgcacctggaaaagaagcacggcgaggactggggaaaggtgtacgacgaggcctgggagcggattgacaagaaagtggaaggcctgagcaagcacatcaagctggaagaggaacggagaagcgaggacgcccagagcaaggccgccctgaccgactggctgcgggctaaggccagcttcgtgatcgagggcctgaaggaggccgacaaggacgagttctgcagatgcgagctgaagctgcagaagtggtacggggacctgcggggaaagcccttcgccatcgaagccgagaacagcatcctggacatcagcggcttcagcaagcagtacaactgtgccttcatctggcagaaggacggcgtgaagaagctgaacctgtacctgatcatcaactacttcaagggcggcaagctgcggttcaagaagatcaaacctgaagccttcgaagccaacagattctacaccgtgatcaacaaaaagagcggcgagatcgtgcccatggaggtgaacttcaacttcgacgaccccaacctgatcatcctgcctctggcctttggcaagagacagggcagagaattcatctggaacgacctgctgtccctggaaaccggcagcctgaagctggccaacggaagagtgatcgagaagacactgtacaacagaagaacccggcaggatgagcctgccctgttcgtggccctgaccttcgagcggcgggaggtcctggactcctccaatatcaaaccaatgaacctgatcggcgtggcaagaggcgaaaacatccccgccgtgatcgccctgaccgaccccgagggctgcccactgagccggtttaaggatagcctgggaaacccaacccacatcctgagaatcggcgagagctataaggagaagcagcggaccatccaggccaagaaggaggtggagcagcggagagccggcggctacagccggaagtacgccagcaaagccaagaatctggcagacgatatggtgagaaacaccgctagagatctgctgtactacgccgtgacccaggatgccatgctgatcttcgccaacctgagccggggcttcggccggcagggcaagcggaccttcatggccgagagacagtacacacggatggaggactggctgaccgccaagctggcctacgagggcctgagcaagacctacctgtccaagacactggcccagtacacctccaagacatgcagcaactgtgggtttaccatcaccagcgccgactacgacagggtgctggagaagctgaagaagacagcaacaggctggatgaccacaattaacggcaaggagctgaaggtggagggccagattacctactacaacagatacaagagacagaacgtagtcaaggacctgtccgtcgagctggatagactgagcgaagaatctgtgaacaacgacatctcctcctggacaaagggcagaagcggagaagctctgagcctcctgaagaaaagattctcccatagacccgtgcaggagaagttcgtgtgcctgaactgcggcttcgagacacacgcagccgagcaagccgccctgaacatcgccagatcctggctgttcctgcggagccaggagtacaagaaataccagacaaacaagacaaccggcaacaccgataagagagccttcgtcgagacctggcagtccttttaccggaagaagcttaaggaggtgtggaaacctgccgtgcggtctggcggatctggcggaggctccaccagccccaagaaaaagagaaaagtctaagctgccttctgcggggcttgccttctggccatgcccttcttctctcccttgcacctgtacctcttggtctttgaataaagcctgagtaggaaggctagcaaaaaaaaaaaaaaaaaaaaaaaaaaaaaaaaaaaaaaaaaaaaaaaaaaaaaaaaaaaaaaaaaaaaaaaaaaaaaaaa

SEQ ID NO: 9093 - RNA, 8787 nt, synthetic construct
  source 1..8787: mol_type = other RNA
aggaaataagagagaaaagaagagtaagaagaaatataagagccaccatggcccctaagaagaagcgtaaagtgagccggatgaaccacgaccaggagttcgacccccctaaggtgtaccctcccgtccccgccgagaagagaaagcccatccgggtcctgagcctgttcgatggcatcgccaccggtctgctggtgctgaaggacctgggcatccaggtggataggtacattgcctccgaggtgtgcgaggactccatcaccgtgggaatggtgcgtcatcagggcaagatcatgtacgtgggcgacgtgcggagcgtgacacagaagcatatccaggagtggggccctttcgacctggtgatcggcggcagcccttgcaatgacctgagcatcgtgaacccagcccggaagggcctgtacgagggaaccggcagactgttcttcgagttttacagactgctgcacgacgcccggcctaaggaaggcgacgaccggcccttcttttggctgttcgagaatgtggtggccatgggagtcagcgacaagcgggatattagccggttcctggagagcaaccccgtgatgatcgatgccaaggaagtgagcgccgcccaccgggccagatacttctggggcaatctgcctggcatgaacagacccctggccagcaccgtgaacgacaagctggagctgcaggagtgcctggagcacggccggatcgccaagttcagcaaggtgagaaccatcaccacccgaagcaacagcatcaaacaaggcaaggaccagcactttcctgtgttcatgaacgagaaggaggacatcctgtggtgtaccgagatggagagagtgttcgggttcccagtccactacacagatgtcagcaacatgtctagactggccagacagagactgctgggaagaagctggtccgtccctgtgatcagacacctgttcgcccctctgaaggagtacttcgcctgcgtgagcagcggcaacagcaacgccaacagccggggccccagcttctctagcggcctggtgccactgtccctgagagggagccacatgggccccatggagatctacaaaaccgtgagcgcctggaagcggcagcctgtgcgcgtgctgagcctgtttcggaatatcgataaagtcctgaaaagcctgggattcctggagagcggctctggctccggcggtggcaccctgaagtacgtggaggatgtgacaaacgtggtcagacgggatgtggagaagtggggccccttcgatctggtgtacggcagcacccaacccctgggcagctcttgtgaccggtgccctggctggtacatgtttcagttccaccggatcctgcagtacgccctgccgagacaggagtcccagcggccattcttttggattttcatggacaacttgctgctgaccgaggatgaccaggaaactaccactcggttcctgcagaccgaagccgtgaccctgcaggacgtgagaggccgggactaccagaacgccatgcgggtgtggtccaacatccctggactgaaaagcaagcacgcacctctgacccctaaagaagaggagtacctgcaggcccaggtgcggagcagaagcaagctggacgcccctaaggtggatctgctggtgaagaattgcctcctgcccctgagagagtacttcaagtatttcagccagaatagtctgcccctgggaggcagcggcggcggcccccaggtgctggtgagcttcgaggaggtggccgtgctgctgagccaggaggagtggggccacctgggccccgaccagaagaggctgtacagggacgtgatgctggagacctacggcaacctggtgagcctgggcctgcagggcagcaagcccgacgtgatcagcaagctggagcagggcgaggagccctgggccccccacagccccaggatcgagggcagctggatctggaggaggaggaggggcggcccaagcagcggcgcccctcctcccagcggcggcaggcggcccaagcagcggcgcccctcctcccagcggcggcagcccagccggctccccaacctctaccgaggagggcacctctgagtccgccacccccgagagcggccctggcacctccaccgagcccagcgagggcagcgcacccggcagccctgccggcagccccacctccacagaggagggaaccagcaccgagcccagcgaaggcagcgccccaggcaccagcaccgagcctagtgagcaggagattaaacggatcaacaagatcagaagaagacttgtgaaagacagcaacaccaagaaggccggcaagacaggccccatgaaaaccctgctggttagagtgatgacacccgatctgagagagcggctggaaaacctgagaaagaagcctgaaaatatcccccagcccatcagcaatacatctagagccaacctgaataagctgctgaccgattacaccgaaatgaagaaggcgatcctgcatgtgtactgggaagagttccagaaggaccctgtgggcctgatgagccgggtggcccagcctgccagcaagaagatcgatcagaacaagctgaaacctgagatggacgagaagggcaacctgaccaccgccggctttgcctgctctcagtgtggccagcccctgttcgtgtacaagctggagcaggtgtctgagaagggcaaggcttacaccaactacttcggacggtgcaatgtggccgagcacgaaaagctgatcctgctggcccagctgaagcccgagaaggatagcgacgaagccgtgacatatagcctgggaaagtttgggcagagggccctggatttctacagcattcatgtgaccaaggagtccacccaccccgtgaagcccctggcccagatcgccggaaacagatacgcctccggacctgtgggaaaggccctgagcgacgcatgtatgggcacaatcgcctccttcctgtctaagtaccaggacatcatcatcgaacaccagaaggtggtgaagggcaaccagaagagactggagagcctgcgggagctggccggcaaggaaaacctggaataccctagcgtgaccctgccacctcagcctcacaccaaggagggcgttgatgcctacaacgaagtgatcgcccgggtgcgaatgtgggtgaacctgaacctgtggcagaagctgaagctaagcagagatgatgccaagcctctgctgagactgaagggattcccttcctttcctctggtcgagagacaggccaacgaagtggactggtgggacatggtgtgtaacgtgaagaagctgatcaacgagaaaaaggaggatggcaaggtgttttggcagaatctggctggctacaagagacaggaagccctgagaccatacctgagcagcgaggaagatcggaagaagggaaagaaattcgctcggtaccagctgggcgacctgctgctgcacctggaaaagaagcacggcgaggactggggaaaggtgtacgacgaggcctgggagcggattgacaagaaagtggaaggcctgagcaagcacatcaagctggaagaggaacggagaagcgaggacgcccagagcaaggccgccctgaccgactggctgcgggctaaggccagcttcgtgatcgagggcctgaaggaggccgacaaggacgagttctgcagatgcgagctgaagctgcagaagtggtacggggacctgcggggaaagcccttcgccatcgaagccgagaacagcatcctggacatcagcggcttcagcaagcagtacaactgtgccttcatctggcagaaggacggcgtgaagaagctgaacctgtacctgatcatcaactacttcaagggcggcaagctgcggttcaagaagatcaaacctgaagccttcgaagccaacagattctacaccgtgatcaacaaaaagagcggcgagatcgtgcccatggaggtgaacttcaacttcgacgaccccaacctgatcatcctgcctctggcctttggcaagagacagggcagagaattcatctggaacgacctgctgtccctggaaaccggcagcctgaagctggccaacggaagagtgatcgagaagacactgtacaacagaagaacccggcaggatgagcctgccctgttcgtggccctgaccttcgagcggcgggaggtcctggactcctccaatatcaaaccaatgaacctgatcggcgtggcaagaggcgaaaacatccccgccgtgatcgccctgaccgaccccgagggctgcccactgagccggtttaaggatagcctgggaaacccaacccacatcctgagaatcggcgagagctataaggagaagcagcggaccatccaggccaagaaggaggtggagcagcggagagccggcggctacagccggaagtacgccagcaaagccaagaatctggcagacgatatggtgagaaacaccgctagagatctgctgtactacgccgtgacccaggatgccatgctgatcttcgccaacctgagccggggcttcggccggcagggcaagcggaccttcatggccgagagacagtacacacggatggaggactggctgaccgccaagctggcctacgagggcctgagcaagacctacctgtccaagacactggcccagtacacctccaagacatgcagcaactgtgggtttaccatcaccagcgccgactacgacagggtgctggagaagctgaagaagacagcaacaggctggatgaccacaattaacggcaaggagctgaaggtggagggccagattacctactacaacagatacaagagacagaacgtagtcaaggacctgtccgtcgagctggatagactgagcgaagaatctgtgaacaacgacatctcctcctggacaaagggcagaagcggagaagctctgagcctcctgaagaaaagattctcccatagacccgtgcaggagaagttcgtgtgcctgaactgcggcttcgagacacacgcagccgagcaagccgccctgaacatcgccagatcctggctgttcctgcggagccaggagtacaagaaataccagacaaacaagacaaccggcaacaccgataagagagccttcgtcgagacctggcagtccttttaccggaagaagcttaaggaggtgtggaaacctgccgtgcggtctggcggatctggcggaggctccaccagccccaagaaaaagagaaaagtctaagctgccttctgcggggcttgccttctggccatgcccttcttctctcccttgcacctgtacctcttggtctttgaataaagcctgagtaggaaggctagcaaaaaaaaaaaaaaaaaaaaaaaaaaaaaaaaaaaaaaaaaaaaaaaaaaaaaaaaaaaaaaaaaaaaaaaaaaaaaaaagcccagccggctccccaacctctaccgaggagggcacctctgagtccgccacccccgagagcggccctggcacctccaccgagcccagcgagggcagcgcacccggcagccctgccggcagccccacctccacagaggagggaaccagcaccgagcccagcgaaggcagcgccccaggcaccagcaccgagcctagtgagcaggagattaaacggatcaacaagatcagaagaagacttgtgaaagacagcaacaccaagaaggccggcaagacaggccccatgaaaaccctgctggttagagtgatgacacccgatctgagagagcggctggaaaacctgagaaagaagcctgaaaatatcccccagcccatcagcaatacatctagagccaacctgaataagctgctgaccgattacaccgaaatgaagaaggcgatcctgcatgtgtactgggaagagttccagaaggaccctgtgggcctgatgagccgggtggcccagcctgccagcaagaagatcgatcagaacaagctgaaacctgagatggacgagaagggcaacctgaccaccgccggctttgcctgctctcagtgtggccagcccctgttcgtgtacaagctggagcaggtgtctgagaagggcaaggcttacaccaactacttcggacggtgcaatgtggccgagcacgaaaagctgatcctgctggcccagctgaagcccgagaaggatagcgacgaagccgtgacatatagcctgggaaagtttgggcagagggccctggatttctacagcattcatgtgaccaaggagtccacccaccccgtgaagcccctggcccagatcgccggaaacagatacgcctccggacctgtgggaaaggccctgagcgacgcatgtatgggcacaatcgcctccttcctgtctaagtaccaggacatcatcatcgaacaccagaaggtggtgaagggcaaccagaagagactggagagcctgcgggagctggccggcaaggaaaacctggaataccctagcgtgaccctgccacctcagcctcacaccaaggagggcgttgatgcctacaacgaagtgatcgcccgggtgcgaatgtgggtgaacctgaacctgtggcagaagctgaagctaagcagagatgatgccaagcctctgctgagactgaagggattcccttcctttcctctggtcgagagacaggccaacgaagtggactggtgggacatggtgtgtaacgtgaagaagctgatcaacgagaaaaaggaggatggcaaggtgttttggcagaatctggctggctacaagagacaggaagccctgagaccatacctgagcagcgaggaagatcggaagaagggaaagaaattcgctcggtaccagctgggcgacctgctgctgcacctggaaaagaagcacggcgaggactggggaaaggtgtacgacgaggcctgggagcggattgacaagaaagtggaaggcctgagcaagcacatcaagctggaagaggaacggagaagcgaggacgcccagagcaaggccgccctgaccgactggctgcgggctaaggccagcttcgtgatcgagggcctgaaggaggccgacaaggacgagttctgcagatgcgagctgaagctgcagaagtggtacggggacctgcggggaaagcccttcgccatcgaagccgagaacagcatcctggacatcagcggcttcagcaagcagtacaactgtgccttcatctggcagaaggacggcgtgaagaagctgaacctgtacctgatcatcaactacttcaagggcggcaagctgcggttcaagaagatcaaacctgaagccttcgaagccaacagattctacaccgtgatcaacaaaaagagcggcgagatcgtgcccatggaggtgaacttcaacttcgacgaccccaacctgatcatcctgcctctggcctttggcaagagacagggcagagaattcatctggaacgacctgctgtccctggaaaccggcagcctgaagctggccaacggaagagtgatcgagaagacactgtacaacagaagaacccggcaggatgagcctgccctgttcgtggccctgaccttcgagcggcgggaggtcctggactcctccaatatcaaaccaatgaacctgatcggcgtggcaagaggcgaaaacatccccgccgtgatcgccctgaccgaccccgagggctgcccactgagccggtttaaggatagcctgggaaacccaacccacatcctgagaatcggcgagagctataaggagaagcagcggaccatccaggccaagaaggaggtggagcagcggagagccggcggctacagccggaagtacgccagcaaagccaagaatctggcagacgatatggtgagaaacaccgctagagatctgctgtactacgccgtgacccaggatgccatgctgatcttcgccaacctgagccggggcttcggccggcagggcaagcggaccttcatggccgagagacagtacacacggatggaggactggctgaccgccaagctggcctacgagggcctgagcaagacctacctgtccaagacactggcccagtacacctccaagacatgcagcaactgtgggtttaccatcaccagcgccgactacgacagggtgctggagaagctgaagaagacagcaacaggctggatgaccacaattaacggcaaggagctgaaggtggagggccagattacctactacaacagatacaagagacagaacgtagtcaaggacctgtccgtcgagctggatagactgagcgaagaatctgtgaacaacgacatctcctcctggacaaagggcagaagcggagaagctctgagcctcctgaagaaaagattctcccatagacccgtgcaggagaagttcgtgtgcctgaactgcggcttcgagacacacgcagccgagcaagccgccctgaacatcgccagatcctggctgttcctgcggagccaggagtacaagaaataccagacaaacaagacaaccggcaacaccgataagagagccttcgtcgagacctggcagtccttttaccggaagaagcttaaggaggtgtggaaacctgccgtgcggtctggcggatctggcggaggctccaccagccccaagaaaaagagaaaagtctaagctgccttctgcggggcttgccttctggccatgcccttcttctctcccttgcacctgtacctcttggtctttgaataaagcctgagtaggaaggctagcaaaaaaaaaaaaaaaaaaaaaaaaaaaaaaaaaaaaaaaaaaaaaaaaaaaaaaaaaaaaaaaaaaaaaaaaaaaaaaaa

SEQ ID NO: 9094 - RNA, 8787 nt, synthetic construct
  source 1..8787: mol_type = other RNA
aggaaataagagagaaaagaagagtaagaagaaatataagagccaccatggcccctaagaagaagcgtaaagtgagccggatgaaccacgaccaggagttcgacccccctaaggtgtaccctcccgtccccgccgagaagagaaagcccatccgggtcctgagcctgttcgatggcatcgccaccggtctgctggtgctgaaggacctgggcatccaggtggataggtacattgcctccgaggtgtgcgaggactccatcaccgtgggaatggtgcgtcatcagggcaagatcatgtacgtgggcgacgtgcggagcgtgacacagaagcatatccaggagtggggccctttcgacctggtgatcggcggcagcccttgcaatgacctgagcatcgtgaacccagcccggaagggcctgtacgagggaaccggcagactgttcttcgagttttacagactgctgcacgacgcccggcctaaggaaggcgacgaccggcccttcttttggctgttcgagaatgtggtggccatgggagtcagcgacaagcgggatattagccggttcctggagagcaaccccgtgatgatcgatgccaaggaagtgagcgccgcccaccgggccagatacttctggggcaatctgcctggcatgaacagacccctggccagcaccgtgaacgacaagctggagctgcaggagtgcctggagcacggccggatcgccaagttcagcaaggtgagaaccatcaccacccgaagcaacagcatcaaacaaggcaaggaccagcactttcctgtgttcatgaacgagaaggaggacatcctgtggtgtaccgagatggagagagtgttcgggttcccagtccactacacagatgtcagcaacatgtctagactggccagacagagactgctgggaagaagctggtccgtccctgtgatcagacacctgttcgcccctctgaaggagtacttcgcctgcgtgagcagcggcaacagcaacgccaacagccggggccccagcttctctagcggcctggtgccactgtccctgagagggagccacatgggccccatggagatctacaaaaccgtgagcgcctggaagcggcagcctgtgcgcgtgctgagcctgtttcggaatatcgataaagtcctgaaaagcctgggattcctggagagcggctctggctccggcggtggcaccctgaagtacgtggaggatgtgacaaacgtggtcagacgggatgtggagaagtggggccccttcgatctggtgtacggcagcacccaacccctgggcagctcttgtgaccggtgccctggctggtacatgtttcagttccaccggatcctgcagtacgccctgccgagacaggagtcccagcggccattcttttggattttcatggacaacttgctgctgaccgaggatgaccaggaaactaccactcggttcctgcagaccgaagccgtgaccctgcaggacgtgagaggccgggactaccagaacgccatgcgggtgtggtccaacatccctggactgaaaagcaagcacgcacctctgacccctaaagaagaggagtacctgcaggcccaggtgcggagcagaagcaagctggacgcccctaaggtggatctgctggtgaagaattgcctcctgcccctgagagagtacttcaagtatttcagccagaatagtctgcccctgggaggcagcggcggcggcctgatcaacgccgtgacctacaacgacgtgcacatcaacttcacccaggaggagtgggccctgctggaccccagccagaagagcctgtacaaggacgtgatgctggagacctacaggaacctgaccgccatcggctacagctgcgaggaccacaacatcgaggagcactgccagagcagcaccaggcacaggaggtacgagaggaggcacagcagggagaagcccagcgagtacagccagtgcggcggcccaagcagcggcgcccctcctcccagcggcggcaggcggcccaagcagcggcgcccctcctcccagcggcggcagcccagccggctccccaacctctaccgaggagggcacctctgagtccgccacccccgagagcggccctggcacctccaccgagcccagcgagggcagcgcacccggcagccctgccggcagccccacctccacagaggagggaaccagcaccgagcccagcgaaggcagcgccccaggcaccagcaccgagcctagtgagcaggagattaaacggatcaacaagatcagaagaagacttgtgaaagacagcaacaccaagaaggccggcaagacaggccccatgaaaaccctgctggttagagtgatgacacccgatctgagagagcggctggaaaacctgagaaagaagcctgaaaatatcccccagcccatcagcaatacatctagagccaacctgaataagctgctgaccgattacaccgaaatgaagaaggcgatcctgcatgtgtactgggaagagttccagaaggaccctgtgggcctgatgagccgggtggcccagcctgccagcaagaagatcgatcagaacaagctgaaacctgagatggacgagaagggcaacctgaccaccgccggctttgcctgctctcagtgtggccagcccctgttcgtgtacaagctggagcaggtgtctgagaagggcaaggcttacaccaactacttcggacggtgcaatgtggccgagcacgaaaagctgatcctgctggcccagctgaagcccgagaaggatagcgacgaagccgtgacatatagcctgggaaagtttgggcagagggccctggatttctacagcattcatgtgaccaaggagtccacccaccccgtgaagcccctggcccagatcgccggaaacagatacgcctccggacctgtgggaaaggccctgagcgacgcatgtatgggcacaatcgcctccttcctgtctaagtaccaggacatcatcatcgaacaccagaaggtggtgaagggcaaccagaagagactggagagcctgcgggagctggccggcaaggaaaacctggaataccctagcgtgaccctgccacctcagcctcacaccaaggagggcgttgatgcctacaacgaagtgatcgcccgggtgcgaatgtgggtgaacctgaacctgtggcagaagctgaagctaagcagagatgatgccaagcctctgctgagactgaagggattcccttcctttcctctggtcgagagacaggccaacgaagtggactggtgggacatggtgtgtaacgtgaagaagctgatcaacgagaaaaaggaggatggcaaggtgttttggcagaatctggctggctacaagagacaggaagccctgagaccatacctgagcagcgaggaagatcggaagaagggaaagaaattcgctcggtaccagctgggcgacctgctgctgcacctggaaaagaagcacggcgaggactggggaaaggtgtacgacgaggcctgggagcggattgacaagaaagtggaaggcctgagcaagcacatcaagctggaagaggaacggagaagcgaggacgcccagagcaaggccgccctgaccgactggctgcgggctaaggccagcttcgtgatcgagggcctgaaggaggccgacaaggacgagttctgcagatgcgagctgaagctgcagaagtggtacggggacctgcggggaaagcccttcgccatcgaagccgagaacagcatcctggacatcagcggcttcagcaagcagtacaactgtgccttcatctggcagaaggacggcgtgaagaagctgaacctgtacctgatcatcaactacttcaagggcggcaagctgcggttcaagaagatcaaacctgaagccttcgaagccaacagattctacaccgtgatcaacaaaaagagcggcgagatcgtgcccatggaggtgaacttcaacttcgacgaccccaacctgatcatcctgcctctggcctttggcaagagacagggcagagaattcatctggaacgacctgctgtccctggaaaccggcagcctgaagctggccaacggaagagtgatcgagaagacactgtacaacagaagaacccggcaggatgagcctgccctgttcgtggccctgaccttcgagcggcgggaggtcctggactcctccaatatcaaaccaatgaacctgatcggcgtggcaagaggcgaaaacatccccgccgtgatcgccctgaccgaccccgagggctgcccactgagccggtttaaggatagcctgggaaacccaacccacatcctgagaatcggcgagagctataaggagaagcagcggaccatccaggccaagaaggaggtggagcagcggagagccggcggctacagccggaagtacgccagcaaagccaagaatctggcagacgatatggtgagaaacaccgctagagatctgctgtactacgccgtgacccaggatgccatgctgatcttcgccaacctgagccggggcttcggccggcagggcaagcggaccttcatggccgagagacagtacacacggatggaggactggctgaccgccaagctggcctacgagggcctgagcaagacctacctgtccaagacactggcccagtacacctccaagacatgcagcaactgtgggtttaccatcaccagcgccgactacgacagggtgctggagaagctgaagaagacagcaacaggctggatgaccacaattaacggcaaggagctgaaggtggagggccagattacctactacaacagatacaagagacagaacgtagtcaaggacctgtccgtcgagctggatagactgagcgaagaatctgtgaacaacgacatctcctcctggacaaagggcagaagcggagaagctctgagcctcctgaagaaaagattctcccatagacccgtgcaggagaagttcgtgtgcctgaactgcggcttcgagacacacgcagccgagcaagccgccctgaacatcgccagatcctggctgttcctgcggagccaggagtacaagaaataccagacaaacaagacaaccggcaacaccgataagagagccttcgtcgagacctggcagtccttttaccggaagaagcttaaggaggtgtggaaacctgccgtgcggtctggcggatctggcggaggctccaccagccccaagaaaaagagaaaagtctaagctgccttctgcggggcttgccttctggccatgcccttcttctctcccttgcacctgtacctcttggtctttgaataaagcctgagtaggaaggctagcaaaaaaaaaaaaaaaaaaaaaaaaaaaaaaaaaaaaaaaaaaaaaaaaaaaaaaaaaaaaaaaaaaaaaaaaaaaaaaaagcccagccggctccccaacctctaccgaggagggcacctctgagtccgccacccccgagagcggccctggcacctccaccgagcccagcgagggcagcgcacccggcagccctgccggcagccccacctccacagaggagggaaccagcaccgagcccagcgaaggcagcgccccaggcaccagcaccgagcctagtgagcaggagattaaacggatcaacaagatcagaagaagacttgtgaaagacagcaacaccaagaaggccggcaagacaggccccatgaaaaccctgctggttagagtgatgacacccgatctgagagagcggctggaaaacctgagaaagaagcctgaaaatatcccccagcccatcagcaatacatctagagccaacctgaataagctgctgaccgattacaccgaaatgaagaaggcgatcctgcatgtgtactgggaagagttccagaaggaccctgtgggcctgatgagccgggtggcccagcctgccagcaagaagatcgatcagaacaagctgaaacctgagatggacgagaagggcaacctgaccaccgccggctttgcctgctctcagtgtggccagcccctgttcgtgtacaagctggagcaggtgtctgagaagggcaaggcttacaccaactacttcggacggtgcaatgtggccgagcacgaaaagctgatcctgctggcccagctgaagcccgagaaggatagcgacgaagccgtgacatatagcctgggaaagtttgggcagagggccctggatttctacagcattcatgtgaccaaggagtccacccaccccgtgaagcccctggcccagatcgccggaaacagatacgcctccggacctgtgggaaaggccctgagcgacgcatgtatgggcacaatcgcctccttcctgtctaagtaccaggacatcatcatcgaacaccagaaggtggtgaagggcaaccagaagagactggagagcctgcgggagctggccggcaaggaaaacctggaataccctagcgtgaccctgccacctcagcctcacaccaaggagggcgttgatgcctacaacgaagtgatcgcccgggtgcgaatgtgggtgaacctgaacctgtggcagaagctgaagctaagcagagatgatgccaagcctctgctgagactgaagggattcccttcctttcctctggtcgagagacaggccaacgaagtggactggtgggacatggtgtgtaacgtgaagaagctgatcaacgagaaaaaggaggatggcaaggtgttttggcagaatctggctggctacaagagacaggaagccctgagaccatacctgagcagcgaggaagatcggaagaagggaaagaaattcgctcggtaccagctgggcgacctgctgctgcacctggaaaagaagcacggcgaggactggggaaaggtgtacgacgaggcctgggagcggattgacaagaaagtggaaggcctgagcaagcacatcaagctggaagaggaacggagaagcgaggacgcccagagcaaggccgccctgaccgactggctgcgggctaaggccagcttcgtgatcgagggcctgaaggaggccgacaaggacgagttctgcagatgcgagctgaagctgcagaagtggtacggggacctgcggggaaagcccttcgccatcgaagccgagaacagcatcctggacatcagcggcttcagcaagcagtacaactgtgccttcatctggcagaaggacggcgtgaagaagctgaacctgtacctgatcatcaactacttcaagggcggcaagctgcggttcaagaagatcaaacctgaagccttcgaagccaacagattctacaccgtgatcaacaaaaagagcggcgagatcgtgcccatggaggtgaacttcaacttcgacgaccccaacctgatcatcctgcctctggcctttggcaagagacagggcagagaattcatctggaacgacctgctgtccctggaaaccggcagcctgaagctggccaacggaagagtgatcgagaagacactgtacaacagaagaacccggcaggatgagcctgccctgttcgtggccctgaccttcgagcggcgggaggtcctggactcctccaatatcaaaccaatgaacctgatcggcgtggcaagaggcgaaaacatccccgccgtgatcgccctgaccgaccccgagggctgcccactgagccggtttaaggatagcctgggaaacccaacccacatcctgagaatcggcgagagctataaggagaagcagcggaccatccaggccaagaaggaggtggagcagcggagagccggcggctacagccggaagtacgccagcaaagccaagaatctggcagacgatatggtgagaaacaccgctagagatctgctgtactacgccgtgacccaggatgccatgctgatcttcgccaacctgagccggggcttcggccggcagggcaagcggaccttcatggccgagagacagtacacacggatggaggactggctgaccgccaagctggcctacgagggcctgagcaagacctacctgtccaagacactggcccagtacacctccaagacatgcagcaactgtgggtttaccatcaccagcgccgactacgacagggtgctggagaagctgaagaagacagcaacaggctggatgaccacaattaacggcaaggagctgaaggtggagggccagattacctactacaacagatacaagagacagaacgtagtcaaggacctgtccgtcgagctggatagactgagcgaagaatctgtgaacaacgacatctcctcctggacaaagggcagaagcggagaagctctgagcctcctgaagaaaagattctcccatagacccgtgcaggagaagttcgtgtgcctgaactgcggcttcgagacacacgcagccgagcaagccgccctgaacatcgccagatcctggctgttcctgcggagccaggagtacaagaaataccagacaaacaagacaaccggcaacaccgataagagagccttcgtcgagacctggcagtccttttaccggaagaagcttaaggaggtgtggaaacctgccgtgcggtctggcggatctggcggaggctccaccagccccaagaaaaagagaaaagtctaagctgccttctgcggggcttgccttctggccatgcccttcttctctcccttgcacctgtacctcttggtctttgaataaagcctgagtaggaaggctagcaaaaaaaaaaaaaaaaaaaaaaaaaaaaaaaaaaaaaaaaaaaaaaaaaaaaaaaaaaaaaaaaaaaaaaaaaaaaaaaa

SEQ ID NO: 9095 - RNA, 8787 nt, synthetic construct
  source 1..8787: mol_type = other RNA
aggaaataagagagaaaagaagagtaagaagaaatataagagccaccatggcccctaagaagaagcgtaaagtgagccggatgaaccacgaccaggagttcgacccccctaaggtgtaccctcccgtccccgccgagaagagaaagcccatccgggtcctgagcctgttcgatggcatcgccaccggtctgctggtgctgaaggacctgggcatccaggtggataggtacattgcctccgaggtgtgcgaggactccatcaccgtgggaatggtgcgtcatcagggcaagatcatgtacgtgggcgacgtgcggagcgtgacacagaagcatatccaggagtggggccctttcgacctggtgatcggcggcagcccttgcaatgacctgagcatcgtgaacccagcccggaagggcctgtacgagggaaccggcagactgttcttcgagttttacagactgctgcacgacgcccggcctaaggaaggcgacgaccggcccttcttttggctgttcgagaatgtggtggccatgggagtcagcgacaagcgggatattagccggttcctggagagcaaccccgtgatgatcgatgccaaggaagtgagcgccgcccaccgggccagatacttctggggcaatctgcctggcatgaacagacccctggccagcaccgtgaacgacaagctggagctgcaggagtgcctggagcacggccggatcgccaagttcagcaaggtgagaaccatcaccacccgaagcaacagcatcaaacaaggcaaggaccagcactttcctgtgttcatgaacgagaaggaggacatcctgtggtgtaccgagatggagagagtgttcgggttcccagtccactacacagatgtcagcaacatgtctagactggccagacagagactgctgggaagaagctggtccgtccctgtgatcagacacctgttcgcccctctgaaggagtacttcgcctgcgtgagcagcggcaacagcaacgccaacagccggggccccagcttctctagcggcctggtgccactgtccctgagagggagccacatgggccccatggagatctacaaaaccgtgagcgcctggaagcggcagcctgtgcgcgtgctgagcctgtttcggaatatcgataaagtcctgaaaagcctgggattcctggagagcggctctggctccggcggtggcaccctgaagtacgtggaggatgtgacaaacgtggtcagacgggatgtggagaagtggggccccttcgatctggtgtacggcagcacccaacccctgggcagctcttgtgaccggtgccctggctggtacatgtttcagttccaccggatcctgcagtacgccctgccgagacaggagtcccagcggccattcttttggattttcatggacaacttgctgctgaccgaggatgaccaggaaactaccactcggttcctgcagaccgaagccgtgaccctgcaggacgtgagaggccgggactaccagaacgccatgcgggtgtggtccaacatccctggactgaaaagcaagcacgcacctctgacccctaaagaagaggagtacctgcaggcccaggtgcggagcagaagcaagctggacgcccctaaggtggatctgctggtgaagaattgcctcctgcccctgagagagtacttcaagtatttcagccagaatagtctgcccctgggaggcagcggcggcggcaggcccgagagcgtgaccttcgaggacgtggccgtgtacttcagcgagaacgagtggatcggcctgggccccgcccagagggccctgtacagggacgtgatgctggagaactacggcgccgtggccagcctggccgccttccccttccccaagcccgccctgatcagccagctggagaggggcgaggccccctggtgcagcgtgccctggggcgccctggacggcgaggaccccaggagcatcggcggcccaagcagcggcgcccctcctcccagcggcggcaggcggcccaagcagcggcgcccctcctcccagcggcggcagcccagccggctccccaacctctaccgaggagggcacctctgagtccgccacccccgagagcggccctggcacctccaccgagcccagcgagggcagcgcacccggcagccctgccggcagccccacctccacagaggagggaaccagcaccgagcccagcgaaggcagcgccccaggcaccagcaccgagcctagtgagcaggagattaaacggatcaacaagatcagaagaagacttgtgaaagacagcaacaccaagaaggccggcaagacaggccccatgaaaaccctgctggttagagtgatgacacccgatctgagagagcggctggaaaacctgagaaagaagcctgaaaatatcccccagcccatcagcaatacatctagagccaacctgaataagctgctgaccgattacaccgaaatgaagaaggcgatcctgcatgtgtactgggaagagttccagaaggaccctgtgggcctgatgagccgggtggcccagcctgccagcaagaagatcgatcagaacaagctgaaacctgagatggacgagaagggcaacctgaccaccgccggctttgcctgctctcagtgtggccagcccctgttcgtgtacaagctggagcaggtgtctgagaagggcaaggcttacaccaactacttcggacggtgcaatgtggccgagcacgaaaagctgatcctgctggcccagctgaagcccgagaaggatagcgacgaagccgtgacatatagcctgggaaagtttgggcagagggccctggatttctacagcattcatgtgaccaaggagtccacccaccccgtgaagcccctggcccagatcgccggaaacagatacgcctccggacctgtgggaaaggccctgagcgacgcatgtatgggcacaatcgcctccttcctgtctaagtaccaggacatcatcatcgaacaccagaaggtggtgaagggcaaccagaagagactggagagcctgcgggagctggccggcaaggaaaacctggaataccctagcgtgaccctgccacctcagcctcacaccaaggagggcgttgatgcctacaacgaagtgatcgcccgggtgcgaatgtgggtgaacctgaacctgtggcagaagctgaagctaagcagagatgatgccaagcctctgctgagactgaagggattcccttcctttcctctggtcgagagacaggccaacgaagtggactggtgggacatggtgtgtaacgtgaagaagctgatcaacgagaaaaaggaggatggcaaggtgttttggcagaatctggctggctacaagagacaggaagccctgagaccatacctgagcagcgaggaagatcggaagaagggaaagaaattcgctcggtaccagctgggcgacctgctgctgcacctggaaaagaagcacggcgaggactggggaaaggtgtacgacgaggcctgggagcggattgacaagaaagtggaaggcctgagcaagcacatcaagctggaagaggaacggagaagcgaggacgcccagagcaaggccgccctgaccgactggctgcgggctaaggccagcttcgtgatcgagggcctgaaggaggccgacaaggacgagttctgcagatgcgagctgaagctgcagaagtggtacggggacctgcggggaaagcccttcgccatcgaagccgagaacagcatcctggacatcagcggcttcagcaagcagtacaactgtgccttcatctggcagaaggacggcgtgaagaagctgaacctgtacctgatcatcaactacttcaagggcggcaagctgcggttcaagaagatcaaacctgaagccttcgaagccaacagattctacaccgtgatcaacaaaaagagcggcgagatcgtgcccatggaggtgaacttcaacttcgacgaccccaacctgatcatcctgcctctggcctttggcaagagacagggcagagaattcatctggaacgacctgctgtccctggaaaccggcagcctgaagctggccaacggaagagtgatcgagaagacactgtacaacagaagaacccggcaggatgagcctgccctgttcgtggccctgaccttcgagcggcgggaggtcctggactcctccaatatcaaaccaatgaacctgatcggcgtggcaagaggcgaaaacatccccgccgtgatcgccctgaccgaccccgagggctgcccactgagccggtttaaggatagcctgggaaacccaacccacatcctgagaatcggcgagagctataaggagaagcagcggaccatccaggccaagaaggaggtggagcagcggagagccggcggctacagccggaagtacgccagcaaagccaagaatctggcagacgatatggtgagaaacaccgctagagatctgctgtactacgccgtgacccaggatgccatgctgatcttcgccaacctgagccggggcttcggccggcagggcaagcggaccttcatggccgagagacagtacacacggatggaggactggctgaccgccaagctggcctacgagggcctgagcaagacctacctgtccaagacactggcccagtacacctccaagacatgcagcaactgtgggtttaccatcaccagcgccgactacgacagggtgctggagaagctgaagaagacagcaacaggctggatgaccacaattaacggcaaggagctgaaggtggagggccagattacctactacaacagatacaagagacagaacgtagtcaaggacctgtccgtcgagctggatagactgagcgaagaatctgtgaacaacgacatctcctcctggacaaagggcagaagcggagaagctctgagcctcctgaagaaaagattctcccatagacccgtgcaggagaagttcgtgtgcctgaactgcggcttcgagacacacgcagccgagcaagccgccctgaacatcgccagatcctggctgttcctgcggagccaggagtacaagaaataccagacaaacaagacaaccggcaacaccgataagagagccttcgtcgagacctggcagtccttttaccggaagaagcttaaggaggtgtggaaacctgccgtgcggtctggcggatctggcggaggctccaccagccccaagaaaaagagaaaagtctaagctgccttctgcggggcttgccttctggccatgcccttcttctctcccttgcacctgtacctcttggtctttgaataaagcctgagtaggaaggctagcaaaaaaaaaaaaaaaaaaaaaaaaaaaaaaaaaaaaaaaaaaaaaaaaaaaaaaaaaaaaaaaaaaaaaaaaaaaaaaaagcccagccggctccccaacctctaccgaggagggcacctctgagtccgccacccccgagagcggccctggcacctccaccgagcccagcgagggcagcgcacccggcagccctgccggcagccccacctccacagaggagggaaccagcaccgagcccagcgaaggcagcgccccaggcaccagcaccgagcctagtgagcaggagattaaacggatcaacaagatcagaagaagacttgtgaaagacagcaacaccaagaaggccggcaagacaggccccatgaaaaccctgctggttagagtgatgacacccgatctgagagagcggctggaaaacctgagaaagaagcctgaaaatatcccccagcccatcagcaatacatctagagccaacctgaataagctgctgaccgattacaccgaaatgaagaaggcgatcctgcatgtgtactgggaagagttccagaaggaccctgtgggcctgatgagccgggtggcccagcctgccagcaagaagatcgatcagaacaagctgaaacctgagatggacgagaagggcaacctgaccaccgccggctttgcctgctctcagtgtggccagcccctgttcgtgtacaagctggagcaggtgtctgagaagggcaaggcttacaccaactacttcggacggtgcaatgtggccgagcacgaaaagctgatcctgctggcccagctgaagcccgagaaggatagcgacgaagccgtgacatatagcctgggaaagtttgggcagagggccctggatttctacagcattcatgtgaccaaggagtccacccaccccgtgaagcccctggcccagatcgccggaaacagatacgcctccggacctgtgggaaaggccctgagcgacgcatgtatgggcacaatcgcctccttcctgtctaagtaccaggacatcatcatcgaacaccagaaggtggtgaagggcaaccagaagagactggagagcctgcgggagctggccggcaaggaaaacctggaataccctagcgtgaccctgccacctcagcctcacaccaaggagggcgttgatgcctacaacgaagtgatcgcccgggtgcgaatgtgggtgaacctgaacctgtggcagaagctgaagctaagcagagatgatgccaagcctctgctgagactgaagggattcccttcctttcctctggtcgagagacaggccaacgaagtggactggtgggacatggtgtgtaacgtgaagaagctgatcaacgagaaaaaggaggatggcaaggtgttttggcagaatctggctggctacaagagacaggaagccctgagaccatacctgagcagcgaggaagatcggaagaagggaaagaaattcgctcggtaccagctgggcgacctgctgctgcacctggaaaagaagcacggcgaggactggggaaaggtgtacgacgaggcctgggagcggattgacaagaaagtggaaggcctgagcaagcacatcaagctggaagaggaacggagaagcgaggacgcccagagcaaggccgccctgaccgactggctgcgggctaaggccagcttcgtgatcgagggcctgaaggaggccgacaaggacgagttctgcagatgcgagctgaagctgcagaagtggtacggggacctgcggggaaagcccttcgccatcgaagccgagaacagcatcctggacatcagcggcttcagcaagcagtacaactgtgccttcatctggcagaaggacggcgtgaagaagctgaacctgtacctgatcatcaactacttcaagggcggcaagctgcggttcaagaagatcaaacctgaagccttcgaagccaacagattctacaccgtgatcaacaaaaagagcggcgagatcgtgcccatggaggtgaacttcaacttcgacgaccccaacctgatcatcctgcctctggcctttggcaagagacagggcagagaattcatctggaacgacctgctgtccctggaaaccggcagcctgaagctggccaacggaagagtgatcgagaagacactgtacaacagaagaacccggcaggatgagcctgccctgttcgtggccctgaccttcgagcggcgggaggtcctggactcctccaatatcaaaccaatgaacctgatcggcgtggcaagaggcgaaaacatccccgccgtgatcgccctgaccgaccccgagggctgcccactgagccggtttaaggatagcctgggaaacccaacccacatcctgagaatcggcgagagctataaggagaagcagcggaccatccaggccaagaaggaggtggagcagcggagagccggcggctacagccggaagtacgccagcaaagccaagaatctggcagacgatatggtgagaaacaccgctagagatctgctgtactacgccgtgacccaggatgccatgctgatcttcgccaacctgagccggggcttcggccggcagggcaagcggaccttcatggccgagagacagtacacacggatggaggactggctgaccgccaagctggcctacgagggcctgagcaagacctacctgtccaagacactggcccagtacacctccaagacatgcagcaactgtgggtttaccatcaccagcgccgactacgacagggtgctggagaagctgaagaagacagcaacaggctggatgaccacaattaacggcaaggagctgaaggtggagggccagattacctactacaacagatacaagagacagaacgtagtcaaggacctgtccgtcgagctggatagactgagcgaagaatctgtgaacaacgacatctcctcctggacaaagggcagaagcggagaagctctgagcctcctgaagaaaagattctcccatagacccgtgcaggagaagttcgtgtgcctgaactgcggcttcgagacacacgcagccgagcaagccgccctgaacatcgccagatcctggctgttcctgcggagccaggagtacaagaaataccagacaaacaagacaaccggcaacaccgataagagagccttcgtcgagacctggcagtccttttaccggaagaagcttaaggaggtgtggaaacctgccgtgcggtctggcggatctggcggaggctccaccagccccaagaaaaagagaaaagtctaagctgccttctgcggggcttgccttctggccatgcccttcttctctcccttgcacctgtacctcttggtctttgaataaagcctgagtaggaaggctagcaaaaaaaaaaaaaaaaaaaaaaaaaaaaaaaaaaaaaaaaaaaaaaaaaaaaaaaaaaaaaaaaaaaaaaaaaaaaaaaa

SEQ ID NO: 9096 - RNA, 8787 nt, synthetic construct
  source 1..8787: mol_type = other RNA
aggaaataagagagaaaagaagagtaagaagaaatataagagccaccatggcccctaagaagaagcgtaaagtgagccggatgaaccacgaccaggagttcgacccccctaaggtgtaccctcccgtccccgccgagaagagaaagcccatccgggtcctgagcctgttcgatggcatcgccaccggtctgctggtgctgaaggacctgggcatccaggtggataggtacattgcctccgaggtgtgcgaggactccatcaccgtgggaatggtgcgtcatcagggcaagatcatgtacgtgggcgacgtgcggagcgtgacacagaagcatatccaggagtggggccctttcgacctggtgatcggcggcagcccttgcaatgacctgagcatcgtgaacccagcccggaagggcctgtacgagggaaccggcagactgttcttcgagttttacagactgctgcacgacgcccggcctaaggaaggcgacgaccggcccttcttttggctgttcgagaatgtggtggccatgggagtcagcgacaagcgggatattagccggttcctggagagcaaccccgtgatgatcgatgccaaggaagtgagcgccgcccaccgggccagatacttctggggcaatctgcctggcatgaacagacccctggccagcaccgtgaacgacaagctggagctgcaggagtgcctggagcacggccggatcgccaagttcagcaaggtgagaaccatcaccacccgaagcaacagcatcaaacaaggcaaggaccagcactttcctgtgttcatgaacgagaaggaggacatcctgtggtgtaccgagatggagagagtgttcgggttcccagtccactacacagatgtcagcaacatgtctagactggccagacagagactgctgggaagaagctggtccgtccctgtgatcagacacctgttcgcccctctgaaggagtacttcgcctgcgtgagcagcggcaacagcaacgccaacagccggggccccagcttctctagcggcctggtgccactgtccctgagagggagccacatgggccccatggagatctacaaaaccgtgagcgcctggaagcggcagcctgtgcgcgtgctgagcctgtttcggaatatcgataaagtcctgaaaagcctgggattcctggagagcggctctggctccggcggtggcaccctgaagtacgtggaggatgtgacaaacgtggtcagacgggatgtggagaagtggggccccttcgatctggtgtacggcagcacccaacccctgggcagctcttgtgaccggtgccctggctggtacatgtttcagttccaccggatcctgcagtacgccctgccgagacaggagtcccagcggccattcttttggattttcatggacaacttgctgctgaccgaggatgaccaggaaactaccactcggttcctgcagaccgaagccgtgaccctgcaggacgtgagaggccgggactaccagaacgccatgcgggtgtggtccaacatccctggactgaaaagcaagcacgcacctctgacccctaaagaagaggagtacctgcaggcccaggtgcggagcagaagcaagctggacgcccctaaggtggatctgctggtgaagaattgcctcctgcccctgagagagtacttcaagtatttcagccagaatagtctgcccctgggaggcagcggcggcggcttccaggccagcgtgaccttcaaggacgtggccgtggacttcacctgggaggagtggaggctgctggaccccccccagaaggagctgttctgggaggtgatgctggagaactacaggaacctggtgtgcctgggcctggccgacagcaacaaggacgtgatgatgagcaagctggagagcggcgagccccactggatccccaccggcggcgtgctgaggagctgctggcccggctgggagagcggcggcccaagcagcggcgcccctcctcccagcggcggcaggcggcccaagcagcggcgcccctcctcccagcggcggcagcccagccggctccccaacctctaccgaggagggcacctctgagtccgccacccccgagagcggccctggcacctccaccgagcccagcgagggcagcgcacccggcagccctgccggcagccccacctccacagaggagggaaccagcaccgagcccagcgaaggcagcgccccaggcaccagcaccgagcctagtgagcaggagattaaacggatcaacaagatcagaagaagacttgtgaaagacagcaacaccaagaaggccggcaagacaggccccatgaaaaccctgctggttagagtgatgacacccgatctgagagagcggctggaaaacctgagaaagaagcctgaaaatatcccccagcccatcagcaatacatctagagccaacctgaataagctgctgaccgattacaccgaaatgaagaaggcgatcctgcatgtgtactgggaagagttccagaaggaccctgtgggcctgatgagccgggtggcccagcctgccagcaagaagatcgatcagaacaagctgaaacctgagatggacgagaagggcaacctgaccaccgccggctttgcctgctctcagtgtggccagcccctgttcgtgtacaagctggagcaggtgtctgagaagggcaaggcttacaccaactacttcggacggtgcaatgtggccgagcacgaaaagctgatcctgctggcccagctgaagcccgagaaggatagcgacgaagccgtgacatatagcctgggaaagtttgggcagagggccctggatttctacagcattcatgtgaccaaggagtccacccaccccgtgaagcccctggcccagatcgccggaaacagatacgcctccggacctgtgggaaaggccctgagcgacgcatgtatgggcacaatcgcctccttcctgtctaagtaccaggacatcatcatcgaacaccagaaggtggtgaagggcaaccagaagagactggagagcctgcgggagctggccggcaaggaaaacctggaataccctagcgtgaccctgccacctcagcctcacaccaaggagggcgttgatgcctacaacgaagtgatcgcccgggtgcgaatgtgggtgaacctgaacctgtggcagaagctgaagctaagcagagatgatgccaagcctctgctgagactgaagggattcccttcctttcctctggtcgagagacaggccaacgaagtggactggtgggacatggtgtgtaacgtgaagaagctgatcaacgagaaaaaggaggatggcaaggtgttttggcagaatctggctggctacaagagacaggaagccctgagaccatacctgagcagcgaggaagatcggaagaagggaaagaaattcgctcggtaccagctgggcgacctgctgctgcacctggaaaagaagcacggcgaggactggggaaaggtgtacgacgaggcctgggagcggattgacaagaaagtggaaggcctgagcaagcacatcaagctggaagaggaacggagaagcgaggacgcccagagcaaggccgccctgaccgactggctgcgggctaaggccagcttcgtgatcgagggcctgaaggaggccgacaaggacgagttctgcagatgcgagctgaagctgcagaagtggtacggggacctgcggggaaagcccttcgccatcgaagccgagaacagcatcctggacatcagcggcttcagcaagcagtacaactgtgccttcatctggcagaaggacggcgtgaagaagctgaacctgtacctgatcatcaactacttcaagggcggcaagctgcggttcaagaagatcaaacctgaagccttcgaagccaacagattctacaccgtgatcaacaaaaagagcggcgagatcgtgcccatggaggtgaacttcaacttcgacgaccccaacctgatcatcctgcctctggcctttggcaagagacagggcagagaattcatctggaacgacctgctgtccctggaaaccggcagcctgaagctggccaacggaagagtgatcgagaagacactgtacaacagaagaacccggcaggatgagcctgccctgttcgtggccctgaccttcgagcggcgggaggtcctggactcctccaatatcaaaccaatgaacctgatcggcgtggcaagaggcgaaaacatccccgccgtgatcgccctgaccgaccccgagggctgcccactgagccggtttaaggatagcctgggaaacccaacccacatcctgagaatcggcgagagctataaggagaagcagcggaccatccaggccaagaaggaggtggagcagcggagagccggcggctacagccggaagtacgccagcaaagccaagaatctggcagacgatatggtgagaaacaccgctagagatctgctgtactacgccgtgacccaggatgccatgctgatcttcgccaacctgagccggggcttcggccggcagggcaagcggaccttcatggccgagagacagtacacacggatggaggactggctgaccgccaagctggcctacgagggcctgagcaagacctacctgtccaagacactggcccagtacacctccaagacatgcagcaactgtgggtttaccatcaccagcgccgactacgacagggtgctggagaagctgaagaagacagcaacaggctggatgaccacaattaacggcaaggagctgaaggtggagggccagattacctactacaacagatacaagagacagaacgtagtcaaggacctgtccgtcgagctggatagactgagcgaagaatctgtgaacaacgacatctcctcctggacaaagggcagaagcggagaagctctgagcctcctgaagaaaagattctcccatagacccgtgcaggagaagttcgtgtgcctgaactgcggcttcgagacacacgcagccgagcaagccgccctgaacatcgccagatcctggctgttcctgcggagccaggagtacaagaaataccagacaaacaagacaaccggcaacaccgataagagagccttcgtcgagacctggcagtccttttaccggaagaagcttaaggaggtgtggaaacctgccgtgcggtctggcggatctggcggaggctccaccagccccaagaaaaagagaaaagtctaagctgccttctgcggggcttgccttctggccatgcccttcttctctcccttgcacctgtacctcttggtctttgaataaagcctgagtaggaaggctagcaaaaaaaaaaaaaaaaaaaaaaaaaaaaaaaaaaaaaaaaaaaaaaaaaaaaaaaaaaaaaaaaaaaaaaaaaaaaaaaagcccagccggctccccaacctctaccgaggagggcacctctgagtccgccacccccgagagcggccctggcacctccaccgagcccagcgagggcagcgcacccggcagccctgccggcagccccacctccacagaggagggaaccagcaccgagcccagcgaaggcagcgccccaggcaccagcaccgagcctagtgagcaggagattaaacggatcaacaagatcagaagaagacttgtgaaagacagcaacaccaagaaggccggcaagacaggccccatgaaaaccctgctggttagagtgatgacacccgatctgagagagcggctggaaaacctgagaaagaagcctgaaaatatcccccagcccatcagcaatacatctagagccaacctgaataagctgctgaccgattacaccgaaatgaagaaggcgatcctgcatgtgtactgggaagagttccagaaggaccctgtgggcctgatgagccgggtggcccagcctgccagcaagaagatcgatcagaacaagctgaaacctgagatggacgagaagggcaacctgaccaccgccggctttgcctgctctcagtgtggccagcccctgttcgtgtacaagctggagcaggtgtctgagaagggcaaggcttacaccaactacttcggacggtgcaatgtggccgagcacgaaaagctgatcctgctggcccagctgaagcccgagaaggatagcgacgaagccgtgacatatagcctgggaaagtttgggcagagggccctggatttctacagcattcatgtgaccaaggagtccacccaccccgtgaagcccctggcccagatcgccggaaacagatacgcctccggacctgtgggaaaggccctgagcgacgcatgtatgggcacaatcgcctccttcctgtctaagtaccaggacatcatcatcgaacaccagaaggtggtgaagggcaaccagaagagactggagagcctgcgggagctggccggcaaggaaaacctggaataccctagcgtgaccctgccacctcagcctcacaccaaggagggcgttgatgcctacaacgaagtgatcgcccgggtgcgaatgtgggtgaacctgaacctgtggcagaagctgaagctaagcagagatgatgccaagcctctgctgagactgaagggattcccttcctttcctctggtcgagagacaggccaacgaagtggactggtgggacatggtgtgtaacgtgaagaagctgatcaacgagaaaaaggaggatggcaaggtgttttggcagaatctggctggctacaagagacaggaagccctgagaccatacctgagcagcgaggaagatcggaagaagggaaagaaattcgctcggtaccagctgggcgacctgctgctgcacctggaaaagaagcacggcgaggactggggaaaggtgtacgacgaggcctgggagcggattgacaagaaagtggaaggcctgagcaagcacatcaagctggaagaggaacggagaagcgaggacgcccagagcaaggccgccctgaccgactggctgcgggctaaggccagcttcgtgatcgagggcctgaaggaggccgacaaggacgagttctgcagatgcgagctgaagctgcagaagtggtacggggacctgcggggaaagcccttcgccatcgaagccgagaacagcatcctggacatcagcggcttcagcaagcagtacaactgtgccttcatctggcagaaggacggcgtgaagaagctgaacctgtacctgatcatcaactacttcaagggcggcaagctgcggttcaagaagatcaaacctgaagccttcgaagccaacagattctacaccgtgatcaacaaaaagagcggcgagatcgtgcccatggaggtgaacttcaacttcgacgaccccaacctgatcatcctgcctctggcctttggcaagagacagggcagagaattcatctggaacgacctgctgtccctggaaaccggcagcctgaagctggccaacggaagagtgatcgagaagacactgtacaacagaagaacccggcaggatgagcctgccctgttcgtggccctgaccttcgagcggcgggaggtcctggactcctccaatatcaaaccaatgaacctgatcggcgtggcaagaggcgaaaacatccccgccgtgatcgccctgaccgaccccgagggctgcccactgagccggtttaaggatagcctgggaaacccaacccacatcctgagaatcggcgagagctataaggagaagcagcggaccatccaggccaagaaggaggtggagcagcggagagccggcggctacagccggaagtacgccagcaaagccaagaatctggcagacgatatggtgagaaacaccgctagagatctgctgtactacgccgtgacccaggatgccatgctgatcttcgccaacctgagccggggcttcggccggcagggcaagcggaccttcatggccgagagacagtacacacggatggaggactggctgaccgccaagctggcctacgagggcctgagcaagacctacctgtccaagacactggcccagtacacctccaagacatgcagcaactgtgggtttaccatcaccagcgccgactacgacagggtgctggagaagctgaagaagacagcaacaggctggatgaccacaattaacggcaaggagctgaaggtggagggccagattacctactacaacagatacaagagacagaacgtagtcaaggacctgtccgtcgagctggatagactgagcgaagaatctgtgaacaacgacatctcctcctggacaaagggcagaagcggagaagctctgagcctcctgaagaaaagattctcccatagacccgtgcaggagaagttcgtgtgcctgaactgcggcttcgagacacacgcagccgagcaagccgccctgaacatcgccagatcctggctgttcctgcggagccaggagtacaagaaataccagacaaacaagacaaccggcaacaccgataagagagccttcgtcgagacctggcagtccttttaccggaagaagcttaaggaggtgtggaaacctgccgtgcggtctggcggatctggcggaggctccaccagccccaagaaaaagagaaaagtctaagctgccttctgcggggcttgccttctggccatgcccttcttctctcccttgcacctgtacctcttggtctttgaataaagcctgagtaggaaggctagcaaaaaaaaaaaaaaaaaaaaaaaaaaaaaaaaaaaaaaaaaaaaaaaaaaaaaaaaaaaaaaaaaaaaaaaaaaaaaaaa

SEQ ID NO: 9097 - RNA, 8787 nt, synthetic construct
  source 1..8787: mol_type = other RNA
aggaaataagagagaaaagaagagtaagaagaaatataagagccaccatggcccctaagaagaagcgtaaagtgagccggatgaaccacgaccaggagttcgacccccctaaggtgtaccctcccgtccccgccgagaagagaaagcccatccgggtcctgagcctgttcgatggcatcgccaccggtctgctggtgctgaaggacctgggcatccaggtggataggtacattgcctccgaggtgtgcgaggactccatcaccgtgggaatggtgcgtcatcagggcaagatcatgtacgtgggcgacgtgcggagcgtgacacagaagcatatccaggagtggggccctttcgacctggtgatcggcggcagcccttgcaatgacctgagcatcgtgaacccagcccggaagggcctgtacgagggaaccggcagactgttcttcgagttttacagactgctgcacgacgcccggcctaaggaaggcgacgaccggcccttcttttggctgttcgagaatgtggtggccatgggagtcagcgacaagcgggatattagccggttcctggagagcaaccccgtgatgatcgatgccaaggaagtgagcgccgcccaccgggccagatacttctggggcaatctgcctggcatgaacagacccctggccagcaccgtgaacgacaagctggagctgcaggagtgcctggagcacggccggatcgccaagttcagcaaggtgagaaccatcaccacccgaagcaacagcatcaaacaaggcaaggaccagcactttcctgtgttcatgaacgagaaggaggacatcctgtggtgtaccgagatggagagagtgttcgggttcccagtccactacacagatgtcagcaacatgtctagactggccagacagagactgctgggaagaagctggtccgtccctgtgatcagacacctgttcgcccctctgaaggagtacttcgcctgcgtgagcagcggcaacagcaacgccaacagccggggccccagcttctctagcggcctggtgccactgtccctgagagggagccacatgggccccatggagatctacaaaaccgtgagcgcctggaagcggcagcctgtgcgcgtgctgagcctgtttcggaatatcgataaagtcctgaaaagcctgggattcctggagagcggctctggctccggcggtggcaccctgaagtacgtggaggatgtgacaaacgtggtcagacgggatgtggagaagtggggccccttcgatctggtgtacggcagcacccaacccctgggcagctcttgtgaccggtgccctggctggtacatgtttcagttccaccggatcctgcagtacgccctgccgagacaggagtcccagcggccattcttttggattttcatggacaacttgctgctgaccgaggatgaccaggaaactaccactcggttcctgcagaccgaagccgtgaccctgcaggacgtgagaggccgggactaccagaacgccatgcgggtgtggtccaacatccctggactgaaaagcaagcacgcacctctgacccctaaagaagaggagtacctgcaggcccaggtgcggagcagaagcaagctggacgcccctaaggtggatctgctggtgaagaattgcctcctgcccctgagagagtacttcaagtatttcagccagaatagtctgcccctgggaggcagcggcggcggcagccaggagagcgtgaccttccaggacgtgaccgtggacttcacccaggaggagtggtgcatgctggactgcagccagaagaagctgtacagggaggtgatgctggagaacgtgcagaacctgctgagcgtgggcctgcccgtgcccagggagaacctgctgagcagctgccagcagggcgacagcccctggctgctggagcagaagggcaccaggatcttcagggccgacgccgagatctgcggcggcccaagcagcggcgcccctcctcccagcggcggcaggcggcccaagcagcggcgcccctcctcccagcggcggcagcccagccggctccccaacctctaccgaggagggcacctctgagtccgccacccccgagagcggccctggcacctccaccgagcccagcgagggcagcgcacccggcagccctgccggcagccccacctccacagaggagggaaccagcaccgagcccagcgaaggcagcgccccaggcaccagcaccgagcctagtgagcaggagattaaacggatcaacaagatcagaagaagacttgtgaaagacagcaacaccaagaaggccggcaagacaggccccatgaaaaccctgctggttagagtgatgacacccgatctgagagagcggctggaaaacctgagaaagaagcctgaaaatatcccccagcccatcagcaatacatctagagccaacctgaataagctgctgaccgattacaccgaaatgaagaaggcgatcctgcatgtgtactgggaagagttccagaaggaccctgtgggcctgatgagccgggtggcccagcctgccagcaagaagatcgatcagaacaagctgaaacctgagatggacgagaagggcaacctgaccaccgccggctttgcctgctctcagtgtggccagcccctgttcgtgtacaagctggagcaggtgtctgagaagggcaaggcttacaccaactacttcggacggtgcaatgtggccgagcacgaaaagctgatcctgctggcccagctgaagcccgagaaggatagcgacgaagccgtgacatatagcctgggaaagtttgggcagagggccctggatttctacagcattcatgtgaccaaggagtccacccaccccgtgaagcccctggcccagatcgccggaaacagatacgcctccggacctgtgggaaaggccctgagcgacgcatgtatgggcacaatcgcctccttcctgtctaagtaccaggacatcatcatcgaacaccagaaggtggtgaagggcaaccagaagagactggagagcctgcgggagctggccggcaaggaaaacctggaataccctagcgtgaccctgccacctcagcctcacaccaaggagggcgttgatgcctacaacgaagtgatcgcccgggtgcgaatgtgggtgaacctgaacctgtggcagaagctgaagctaagcagagatgatgccaagcctctgctgagactgaagggattcccttcctttcctctggtcgagagacaggccaacgaagtggactggtgggacatggtgtgtaacgtgaagaagctgatcaacgagaaaaaggaggatggcaaggtgttttggcagaatctggctggctacaagagacaggaagccctgagaccatacctgagcagcgaggaagatcggaagaagggaaagaaattcgctcggtaccagctgggcgacctgctgctgcacctggaaaagaagcacggcgaggactggggaaaggtgtacgacgaggcctgggagcggattgacaagaaagtggaaggcctgagcaagcacatcaagctggaagaggaacggagaagcgaggacgcccagagcaaggccgccctgaccgactggctgcgggctaaggccagcttcgtgatcgagggcctgaaggaggccgacaaggacgagttctgcagatgcgagctgaagctgcagaagtggtacggggacctgcggggaaagcccttcgccatcgaagccgagaacagcatcctggacatcagcggcttcagcaagcagtacaactgtgccttcatctggcagaaggacggcgtgaagaagctgaacctgtacctgatcatcaactacttcaagggcggcaagctgcggttcaagaagatcaaacctgaagccttcgaagccaacagattctacaccgtgatcaacaaaaagagcggcgagatcgtgcccatggaggtgaacttcaacttcgacgaccccaacctgatcatcctgcctctggcctttggcaagagacagggcagagaattcatctggaacgacctgctgtccctggaaaccggcagcctgaagctggccaacggaagagtgatcgagaagacactgtacaacagaagaacccggcaggatgagcctgccctgttcgtggccctgaccttcgagcggcgggaggtcctggactcctccaatatcaaaccaatgaacctgatcggcgtggcaagaggcgaaaacatccccgccgtgatcgccctgaccgaccccgagggctgcccactgagccggtttaaggatagcctgggaaacccaacccacatcctgagaatcggcgagagctataaggagaagcagcggaccatccaggccaagaaggaggtggagcagcggagagccggcggctacagccggaagtacgccagcaaagccaagaatctggcagacgatatggtgagaaacaccgctagagatctgctgtactacgccgtgacccaggatgccatgctgatcttcgccaacctgagccggggcttcggccggcagggcaagcggaccttcatggccgagagacagtacacacggatggaggactggctgaccgccaagctggcctacgagggcctgagcaagacctacctgtccaagacactggcccagtacacctccaagacatgcagcaactgtgggtttaccatcaccagcgccgactacgacagggtgctggagaagctgaagaagacagcaacaggctggatgaccacaattaacggcaaggagctgaaggtggagggccagattacctactacaacagatacaagagacagaacgtagtcaaggacctgtccgtcgagctggatagactgagcgaagaatctgtgaacaacgacatctcctcctggacaaagggcagaagcggagaagctctgagcctcctgaagaaaagattctcccatagacccgtgcaggagaagttcgtgtgcctgaactgcggcttcgagacacacgcagccgagcaagccgccctgaacatcgccagatcctggctgttcctgcggagccaggagtacaagaaataccagacaaacaagacaaccggcaacaccgataagagagccttcgtcgagacctggcagtccttttaccggaagaagcttaaggaggtgtggaaacctgccgtgcggtctggcggatctggcggaggctccaccagccccaagaaaaagagaaaagtctaagctgccttctgcggggcttgccttctggccatgcccttcttctctcccttgcacctgtacctcttggtctttgaataaagcctgagtaggaaggctagcaaaaaaaaaaaaaaaaaaaaaaaaaaaaaaaaaaaaaaaaaaaaaaaaaaaaaaaaaaaaaaaaaaaaaaaaaaaaaaaagcccagccggctccccaacctctaccgaggagggcacctctgagtccgccacccccgagagcggccctggcacctccaccgagcccagcgagggcagcgcacccggcagccctgccggcagccccacctccacagaggagggaaccagcaccgagcccagcgaaggcagcgccccaggcaccagcaccgagcctagtgagcaggagattaaacggatcaacaagatcagaagaagacttgtgaaagacagcaacaccaagaaggccggcaagacaggccccatgaaaaccctgctggttagagtgatgacacccgatctgagagagcggctggaaaacctgagaaagaagcctgaaaatatcccccagcccatcagcaatacatctagagccaacctgaataagctgctgaccgattacaccgaaatgaagaaggcgatcctgcatgtgtactgggaagagttccagaaggaccctgtgggcctgatgagccgggtggcccagcctgccagcaagaagatcgatcagaacaagctgaaacctgagatggacgagaagggcaacctgaccaccgccggctttgcctgctctcagtgtggccagcccctgttcgtgtacaagctggagcaggtgtctgagaagggcaaggcttacaccaactacttcggacggtgcaatgtggccgagcacgaaaagctgatcctgctggcccagctgaagcccgagaaggatagcgacgaagccgtgacatatagcctgggaaagtttgggcagagggccctggatttctacagcattcatgtgaccaaggagtccacccaccccgtgaagcccctggcccagatcgccggaaacagatacgcctccggacctgtgggaaaggccctgagcgacgcatgtatgggcacaatcgcctccttcctgtctaagtaccaggacatcatcatcgaacaccagaaggtggtgaagggcaaccagaagagactggagagcctgcgggagctggccggcaaggaaaacctggaataccctagcgtgaccctgccacctcagcctcacaccaaggagggcgttgatgcctacaacgaagtgatcgcccgggtgcgaatgtgggtgaacctgaacctgtggcagaagctgaagctaagcagagatgatgccaagcctctgctgagactgaagggattcccttcctttcctctggtcgagagacaggccaacgaagtggactggtgggacatggtgtgtaacgtgaagaagctgatcaacgagaaaaaggaggatggcaaggtgttttggcagaatctggctggctacaagagacaggaagccctgagaccatacctgagcagcgaggaagatcggaagaagggaaagaaattcgctcggtaccagctgggcgacctgctgctgcacctggaaaagaagcacggcgaggactggggaaaggtgtacgacgaggcctgggagcggattgacaagaaagtggaaggcctgagcaagcacatcaagctggaagaggaacggagaagcgaggacgcccagagcaaggccgccctgaccgactggctgcgggctaaggccagcttcgtgatcgagggcctgaaggaggccgacaaggacgagttctgcagatgcgagctgaagctgcagaagtggtacggggacctgcggggaaagcccttcgccatcgaagccgagaacagcatcctggacatcagcggcttcagcaagcagtacaactgtgccttcatctggcagaaggacggcgtgaagaagctgaacctgtacctgatcatcaactacttcaagggcggcaagctgcggttcaagaagatcaaacctgaagccttcgaagccaacagattctacaccgtgatcaacaaaaagagcggcgagatcgtgcccatggaggtgaacttcaacttcgacgaccccaacctgatcatcctgcctctggcctttggcaagagacagggcagagaattcatctggaacgacctgctgtccctggaaaccggcagcctgaagctggccaacggaagagtgatcgagaagacactgtacaacagaagaacccggcaggatgagcctgccctgttcgtggccctgaccttcgagcggcgggaggtcctggactcctccaatatcaaaccaatgaacctgatcggcgtggcaagaggcgaaaacatccccgccgtgatcgccctgaccgaccccgagggctgcccactgagccggtttaaggatagcctgggaaacccaacccacatcctgagaatcggcgagagctataaggagaagcagcggaccatccaggccaagaaggaggtggagcagcggagagccggcggctacagccggaagtacgccagcaaagccaagaatctggcagacgatatggtgagaaacaccgctagagatctgctgtactacgccgtgacccaggatgccatgctgatcttcgccaacctgagccggggcttcggccggcagggcaagcggaccttcatggccgagagacagtacacacggatggaggactggctgaccgccaagctggcctacgagggcctgagcaagacctacctgtccaagacactggcccagtacacctccaagacatgcagcaactgtgggtttaccatcaccagcgccgactacgacagggtgctggagaagctgaagaagacagcaacaggctggatgaccacaattaacggcaaggagctgaaggtggagggccagattacctactacaacagatacaagagacagaacgtagtcaaggacctgtccgtcgagctggatagactgagcgaagaatctgtgaacaacgacatctcctcctggacaaagggcagaagcggagaagctctgagcctcctgaagaaaagattctcccatagacccgtgcaggagaagttcgtgtgcctgaactgcggcttcgagacacacgcagccgagcaagccgccctgaacatcgccagatcctggctgttcctgcggagccaggagtacaagaaataccagacaaacaagacaaccggcaacaccgataagagagccttcgtcgagacctggcagtccttttaccggaagaagcttaaggaggtgtggaaacctgccgtgcggtctggcggatctggcggaggctccaccagccccaagaaaaagagaaaagtctaagctgccttctgcggggcttgccttctggccatgcccttcttctctcccttgcacctgtacctcttggtctttgaataaagcctgagtaggaaggctagcaaaaaaaaaaaaaaaaaaaaaaaaaaaaaaaaaaaaaaaaaaaaaaaaaaaaaaaaaaaaaaaaaaaaaaaaaaaaaaaa

SEQ ID NO: 9098 - RNA, 8787 nt, synthetic construct
  source 1..8787: mol_type = other RNA
aggaaataagagagaaaagaagagtaagaagaaatataagagccaccatggcccctaagaagaagcgtaaagtgagccggatgaaccacgaccaggagttcgacccccctaaggtgtaccctcccgtccccgccgagaagagaaagcccatccgggtcctgagcctgttcgatggcatcgccaccggtctgctggtgctgaaggacctgggcatccaggtggataggtacattgcctccgaggtgtgcgaggactccatcaccgtgggaatggtgcgtcatcagggcaagatcatgtacgtgggcgacgtgcggagcgtgacacagaagcatatccaggagtggggccctttcgacctggtgatcggcggcagcccttgcaatgacctgagcatcgtgaacccagcccggaagggcctgtacgagggaaccggcagactgttcttcgagttttacagactgctgcacgacgcccggcctaaggaaggcgacgaccggcccttcttttggctgttcgagaatgtggtggccatgggagtcagcgacaagcgggatattagccggttcctggagagcaaccccgtgatgatcgatgccaaggaagtgagcgccgcccaccgggccagatacttctggggcaatctgcctggcatgaacagacccctggccagcaccgtgaacgacaagctggagctgcaggagtgcctggagcacggccggatcgccaagttcagcaaggtgagaaccatcaccacccgaagcaacagcatcaaacaaggcaaggaccagcactttcctgtgttcatgaacgagaaggaggacatcctgtggtgtaccgagatggagagagtgttcgggttcccagtccactacacagatgtcagcaacatgtctagactggccagacagagactgctgggaagaagctggtccgtccctgtgatcagacacctgttcgcccctctgaaggagtacttcgcctgcgtgagcagcggcaacagcaacgccaacagccggggccccagcttctctagcggcctggtgccactgtccctgagagggagccacatgggccccatggagatctacaaaaccgtgagcgcctggaagcggcagcctgtgcgcgtgctgagcctgtttcggaatatcgataaagtcctgaaaagcctgggattcctggagagcggctctggctccggcggtggcaccctgaagtacgtggaggatgtgacaaacgtggtcagacgggatgtggagaagtggggccccttcgatctggtgtacggcagcacccaacccctgggcagctcttgtgaccggtgccctggctggtacatgtttcagttccaccggatcctgcagtacgccctgccgagacaggagtcccagcggccattcttttggattttcatggacaacttgctgctgaccgaggatgaccaggaaactaccactcggttcctgcagaccgaagccgtgaccctgcaggacgtgagaggccgggactaccagaacgccatgcgggtgtggtccaacatccctggactgaaaagcaagcacgcacctctgacccctaaagaagaggagtacctgcaggcccaggtgcggagcagaagcaagctggacgcccctaaggtggatctgctggtgaagaattgcctcctgcccctgagagagtacttcaagtatttcagccagaatagtctgcccctgggaggcagcggcggcggcctgcaggagcccgtgagcttcgaggaggtggccgtgtacttcagcagggaggagtgggccctgctggaccccgcccagagggccctgtacagggacgtgatgctggagacctacgagtgcgtggccagcctggcccccctgcccgcccccaagcccatggtgatcagcctgctggaggagggcgaggagccctgggtgcccgacgtgggcagccccgaggccgtggccggcgacgtgagccccggcggcccaagcagcggcgcccctcctcccagcggcggcaggcggcccaagcagcggcgcccctcctcccagcggcggcagcccagccggctccccaacctctaccgaggagggcacctctgagtccgccacccccgagagcggccctggcacctccaccgagcccagcgagggcagcgcacccggcagccctgccggcagccccacctccacagaggagggaaccagcaccgagcccagcgaaggcagcgccccaggcaccagcaccgagcctagtgagcaggagattaaacggatcaacaagatcagaagaagacttgtgaaagacagcaacaccaagaaggccggcaagacaggccccatgaaaaccctgctggttagagtgatgacacccgatctgagagagcggctggaaaacctgagaaagaagcctgaaaatatcccccagcccatcagcaatacatctagagccaacctgaataagctgctgaccgattacaccgaaatgaagaaggcgatcctgcatgtgtactgggaagagttccagaaggaccctgtgggcctgatgagccgggtggcccagcctgccagcaagaagatcgatcagaacaagctgaaacctgagatggacgagaagggcaacctgaccaccgccggctttgcctgctctcagtgtggccagcccctgttcgtgtacaagctggagcaggtgtctgagaagggcaaggcttacaccaactacttcggacggtgcaatgtggccgagcacgaaaagctgatcctgctggcccagctgaagcccgagaaggatagcgacgaagccgtgacatatagcctgggaaagtttgggcagagggccctggatttctacagcattcatgtgaccaaggagtccacccaccccgtgaagcccctggcccagatcgccggaaacagatacgcctccggacctgtgggaaaggccctgagcgacgcatgtatgggcacaatcgcctccttcctgtctaagtaccaggacatcatcatcgaacaccagaaggtggtgaagggcaaccagaagagactggagagcctgcgggagctggccggcaaggaaaacctggaataccctagcgtgaccctgccacctcagcctcacaccaaggagggcgttgatgcctacaacgaagtgatcgcccgggtgcgaatgtgggtgaacctgaacctgtggcagaagctgaagctaagcagagatgatgccaagcctctgctgagactgaagggattcccttcctttcctctggtcgagagacaggccaacgaagtggactggtgggacatggtgtgtaacgtgaagaagctgatcaacgagaaaaaggaggatggcaaggtgttttggcagaatctggctggctacaagagacaggaagccctgagaccatacctgagcagcgaggaagatcggaagaagggaaagaaattcgctcggtaccagctgggcgacctgctgctgcacctggaaaagaagcacggcgaggactggggaaaggtgtacgacgaggcctgggagcggattgacaagaaagtggaaggcctgagcaagcacatcaagctggaagaggaacggagaagcgaggacgcccagagcaaggccgccctgaccgactggctgcgggctaaggccagcttcgtgatcgagggcctgaaggaggccgacaaggacgagttctgcagatgcgagctgaagctgcagaagtggtacggggacctgcggggaaagcccttcgccatcgaagccgagaacagcatcctggacatcagcggcttcagcaagcagtacaactgtgccttcatctggcagaaggacggcgtgaagaagctgaacctgtacctgatcatcaactacttcaagggcggcaagctgcggttcaagaagatcaaacctgaagccttcgaagccaacagattctacaccgtgatcaacaaaaagagcggcgagatcgtgcccatggaggtgaacttcaacttcgacgaccccaacctgatcatcctgcctctggcctttggcaagagacagggcagagaattcatctggaacgacctgctgtccctggaaaccggcagcctgaagctggccaacggaagagtgatcgagaagacactgtacaacagaagaacccggcaggatgagcctgccctgttcgtggccctgaccttcgagcggcgggaggtcctggactcctccaatatcaaaccaatgaacctgatcggcgtggcaagaggcgaaaacatccccgccgtgatcgccctgaccgaccccgagggctgcccactgagccggtttaaggatagcctgggaaacccaacccacatcctgagaatcggcgagagctataaggagaagcagcggaccatccaggccaagaaggaggtggagcagcggagagccggcggctacagccggaagtacgccagcaaagccaagaatctggcagacgatatggtgagaaacaccgctagagatctgctgtactacgccgtgacccaggatgccatgctgatcttcgccaacctgagccggggcttcggccggcagggcaagcggaccttcatggccgagagacagtacacacggatggaggactggctgaccgccaagctggcctacgagggcctgagcaagacctacctgtccaagacactggcccagtacacctccaagacatgcagcaactgtgggtttaccatcaccagcgccgactacgacagggtgctggagaagctgaagaagacagcaacaggctggatgaccacaattaacggcaaggagctgaaggtggagggccagattacctactacaacagatacaagagacagaacgtagtcaaggacctgtccgtcgagctggatagactgagcgaagaatctgtgaacaacgacatctcctcctggacaaagggcagaagcggagaagctctgagcctcctgaagaaaagattctcccatagacccgtgcaggagaagttcgtgtgcctgaactgcggcttcgagacacacgcagccgagcaagccgccctgaacatcgccagatcctggctgttcctgcggagccaggagtacaagaaataccagacaaacaagacaaccggcaacaccgataagagagccttcgtcgagacctggcagtccttttaccggaagaagcttaaggaggtgtggaaacctgccgtgcggtctggcggatctggcggaggctccaccagccccaagaaaaagagaaaagtctaagctgccttctgcggggcttgccttctggccatgcccttcttctctcccttgcacctgtacctcttggtctttgaataaagcctgagtaggaaggctagcaaaaaaaaaaaaaaaaaaaaaaaaaaaaaaaaaaaaaaaaaaaaaaaaaaaaaaaaaaaaaaaaaaaaaaaaaaaaaaaagcccagccggctccccaacctctaccgaggagggcacctctgagtccgccacccccgagagcggccctggcacctccaccgagcccagcgagggcagcgcacccggcagccctgccggcagccccacctccacagaggagggaaccagcaccgagcccagcgaaggcagcgccccaggcaccagcaccgagcctagtgagcaggagattaaacggatcaacaagatcagaagaagacttgtgaaagacagcaacaccaagaaggccggcaagacaggccccatgaaaaccctgctggttagagtgatgacacccgatctgagagagcggctggaaaacctgagaaagaagcctgaaaatatcccccagcccatcagcaatacatctagagccaacctgaataagctgctgaccgattacaccgaaatgaagaaggcgatcctgcatgtgtactgggaagagttccagaaggaccctgtgggcctgatgagccgggtggcccagcctgccagcaagaagatcgatcagaacaagctgaaacctgagatggacgagaagggcaacctgaccaccgccggctttgcctgctctcagtgtggccagcccctgttcgtgtacaagctggagcaggtgtctgagaagggcaaggcttacaccaactacttcggacggtgcaatgtggccgagcacgaaaagctgatcctgctggcccagctgaagcccgagaaggatagcgacgaagccgtgacatatagcctgggaaagtttgggcagagggccctggatttctacagcattcatgtgaccaaggagtccacccaccccgtgaagcccctggcccagatcgccggaaacagatacgcctccggacctgtgggaaaggccctgagcgacgcatgtatgggcacaatcgcctccttcctgtctaagtaccaggacatcatcatcgaacaccagaaggtggtgaagggcaaccagaagagactggagagcctgcgggagctggccggcaaggaaaacctggaataccctagcgtgaccctgccacctcagcctcacaccaaggagggcgttgatgcctacaacgaagtgatcgcccgggtgcgaatgtgggtgaacctgaacctgtggcagaagctgaagctaagcagagatgatgccaagcctctgctgagactgaagggattcccttcctttcctctggtcgagagacaggccaacgaagtggactggtgggacatggtgtgtaacgtgaagaagctgatcaacgagaaaaaggaggatggcaaggtgttttggcagaatctggctggctacaagagacaggaagccctgagaccatacctgagcagcgaggaagatcggaagaagggaaagaaattcgctcggtaccagctgggcgacctgctgctgcacctggaaaagaagcacggcgaggactggggaaaggtgtacgacgaggcctgggagcggattgacaagaaagtggaaggcctgagcaagcacatcaagctggaagaggaacggagaagcgaggacgcccagagcaaggccgccctgaccgactggctgcgggctaaggccagcttcgtgatcgagggcctgaaggaggccgacaaggacgagttctgcagatgcgagctgaagctgcagaagtggtacggggacctgcggggaaagcccttcgccatcgaagccgagaacagcatcctggacatcagcggcttcagcaagcagtacaactgtgccttcatctggcagaaggacggcgtgaagaagctgaacctgtacctgatcatcaactacttcaagggcggcaagctgcggttcaagaagatcaaacctgaagccttcgaagccaacagattctacaccgtgatcaacaaaaagagcggcgagatcgtgcccatggaggtgaacttcaacttcgacgaccccaacctgatcatcctgcctctggcctttggcaagagacagggcagagaattcatctggaacgacctgctgtccctggaaaccggcagcctgaagctggccaacggaagagtgatcgagaagacactgtacaacagaagaacccggcaggatgagcctgccctgttcgtggccctgaccttcgagcggcgggaggtcctggactcctccaatatcaaaccaatgaacctgatcggcgtggcaagaggcgaaaacatccccgccgtgatcgccctgaccgaccccgagggctgcccactgagccggtttaaggatagcctgggaaacccaacccacatcctgagaatcggcgagagctataaggagaagcagcggaccatccaggccaagaaggaggtggagcagcggagagccggcggctacagccggaagtacgccagcaaagccaagaatctggcagacgatatggtgagaaacaccgctagagatctgctgtactacgccgtgacccaggatgccatgctgatcttcgccaacctgagccggggcttcggccggcagggcaagcggaccttcatggccgagagacagtacacacggatggaggactggctgaccgccaagctggcctacgagggcctgagcaagacctacctgtccaagacactggcccagtacacctccaagacatgcagcaactgtgggtttaccatcaccagcgccgactacgacagggtgctggagaagctgaagaagacagcaacaggctggatgaccacaattaacggcaaggagctgaaggtggagggccagattacctactacaacagatacaagagacagaacgtagtcaaggacctgtccgtcgagctggatagactgagcgaagaatctgtgaacaacgacatctcctcctggacaaagggcagaagcggagaagctctgagcctcctgaagaaaagattctcccatagacccgtgcaggagaagttcgtgtgcctgaactgcggcttcgagacacacgcagccgagcaagccgccctgaacatcgccagatcctggctgttcctgcggagccaggagtacaagaaataccagacaaacaagacaaccggcaacaccgataagagagccttcgtcgagacctggcagtccttttaccggaagaagcttaaggaggtgtggaaacctgccgtgcggtctggcggatctggcggaggctccaccagccccaagaaaaagagaaaagtctaagctgccttctgcggggcttgccttctggccatgcccttcttctctcccttgcacctgtacctcttggtctttgaataaagcctgagtaggaaggctagcaaaaaaaaaaaaaaaaaaaaaaaaaaaaaaaaaaaaaaaaaaaaaaaaaaaaaaaaaaaaaaaaaaaaaaaaaaaaaaaa

SEQ ID NO: 9099 - RNA, 8787 nt, synthetic construct
  source 1..8787: mol_type = other RNA
aggaaataagagagaaaagaagagtaagaagaaatataagagccaccatggcccctaagaagaagcgtaaagtgagccggatgaaccacgaccaggagttcgacccccctaaggtgtaccctcccgtccccgccgagaagagaaagcccatccgggtcctgagcctgttcgatggcatcgccaccggtctgctggtgctgaaggacctgggcatccaggtggataggtacattgcctccgaggtgtgcgaggactccatcaccgtgggaatggtgcgtcatcagggcaagatcatgtacgtgggcgacgtgcggagcgtgacacagaagcatatccaggagtggggccctttcgacctggtgatcggcggcagcccttgcaatgacctgagcatcgtgaacccagcccggaagggcctgtacgagggaaccggcagactgttcttcgagttttacagactgctgcacgacgcccggcctaaggaaggcgacgaccggcccttcttttggctgttcgagaatgtggtggccatgggagtcagcgacaagcgggatattagccggttcctggagagcaaccccgtgatgatcgatgccaaggaagtgagcgccgcccaccgggccagatacttctggggcaatctgcctggcatgaacagacccctggccagcaccgtgaacgacaagctggagctgcaggagtgcctggagcacggccggatcgccaagttcagcaaggtgagaaccatcaccacccgaagcaacagcatcaaacaaggcaaggaccagcactttcctgtgttcatgaacgagaaggaggacatcctgtggtgtaccgagatggagagagtgttcgggttcccagtccactacacagatgtcagcaacatgtctagactggccagacagagactgctgggaagaagctggtccgtccctgtgatcagacacctgttcgcccctctgaaggagtacttcgcctgcgtgagcagcggcaacagcaacgccaacagccggggccccagcttctctagcggcctggtgccactgtccctgagagggagccacatgggccccatggagatctacaaaaccgtgagcgcctggaagcggcagcctgtgcgcgtgctgagcctgtttcggaatatcgataaagtcctgaaaagcctgggattcctggagagcggctctggctccggcggtggcaccctgaagtacgtggaggatgtgacaaacgtggtcagacgggatgtggagaagtggggccccttcgatctggtgtacggcagcacccaacccctgggcagctcttgtgaccggtgccctggctggtacatgtttcagttccaccggatcctgcagtacgccctgccgagacaggagtcccagcggccattcttttggattttcatggacaacttgctgctgaccgaggatgaccaggaaactaccactcggttcctgcagaccgaagccgtgaccctgcaggacgtgagaggccgggactaccagaacgccatgcgggtgtggtccaacatccctggactgaaaagcaagcacgcacctctgacccctaaagaagaggagtacctgcaggcccaggtgcggagcagaagcaagctggacgcccctaaggtggatctgctggtgaagaattgcctcctgcccctgagagagtacttcaagtatttcagccagaatagtctgcccctgggaggcagcggcggcggcagccaggagctgctgaccttcaaggacatcttcgtggacttcacccaggaggagtggggccagctggcccccgcccacaggaacctgtacagggaggtgatgctggagaactacggcaacctggtgagcgtgggctaccagctgagcaagcccggcgtgatcagccagctggagaagggcgaggagccctggctgatcgagagggagatcagcggcagccccagcagcgacctggagaacaagggcggcccaagcagcggcgcccctcctcccagcggcggcaggcggcccaagcagcggcgcccctcctcccagcggcggcagcccagccggctccccaacctctaccgaggagggcacctctgagtccgccacccccgagagcggccctggcacctccaccgagcccagcgagggcagcgcacccggcagccctgccggcagccccacctccacagaggagggaaccagcaccgagcccagcgaaggcagcgccccaggcaccagcaccgagcctagtgagcaggagattaaacggatcaacaagatcagaagaagacttgtgaaagacagcaacaccaagaaggccggcaagacaggccccatgaaaaccctgctggttagagtgatgacacccgatctgagagagcggctggaaaacctgagaaagaagcctgaaaatatcccccagcccatcagcaatacatctagagccaacctgaataagctgctgaccgattacaccgaaatgaagaaggcgatcctgcatgtgtactgggaagagttccagaaggaccctgtgggcctgatgagccgggtggcccagcctgccagcaagaagatcgatcagaacaagctgaaacctgagatggacgagaagggcaacctgaccaccgccggctttgcctgctctcagtgtggccagcccctgttcgtgtacaagctggagcaggtgtctgagaagggcaaggcttacaccaactacttcggacggtgcaatgtggccgagcacgaaaagctgatcctgctggcccagctgaagcccgagaaggatagcgacgaagccgtgacatatagcctgggaaagtttgggcagagggccctggatttctacagcattcatgtgaccaaggagtccacccaccccgtgaagcccctggcccagatcgccggaaacagatacgcctccggacctgtgggaaaggccctgagcgacgcatgtatgggcacaatcgcctccttcctgtctaagtaccaggacatcatcatcgaacaccagaaggtggtgaagggcaaccagaagagactggagagcctgcgggagctggccggcaaggaaaacctggaataccctagcgtgaccctgccacctcagcctcacaccaaggagggcgttgatgcctacaacgaagtgatcgcccgggtgcgaatgtgggtgaacctgaacctgtggcagaagctgaagctaagcagagatgatgccaagcctctgctgagactgaagggattcccttcctttcctctggtcgagagacaggccaacgaagtggactggtgggacatggtgtgtaacgtgaagaagctgatcaacgagaaaaaggaggatggcaaggtgttttggcagaatctggctggctacaagagacaggaagccctgagaccatacctgagcagcgaggaagatcggaagaagggaaagaaattcgctcggtaccagctgggcgacctgctgctgcacctggaaaagaagcacggcgaggactggggaaaggtgtacgacgaggcctgggagcggattgacaagaaagtggaaggcctgagcaagcacatcaagctggaagaggaacggagaagcgaggacgcccagagcaaggccgccctgaccgactggctgcgggctaaggccagcttcgtgatcgagggcctgaaggaggccgacaaggacgagttctgcagatgcgagctgaagctgcagaagtggtacggggacctgcggggaaagcccttcgccatcgaagccgagaacagcatcctggacatcagcggcttcagcaagcagtacaactgtgccttcatctggcagaaggacggcgtgaagaagctgaacctgtacctgatcatcaactacttcaagggcggcaagctgcggttcaagaagatcaaacctgaagccttcgaagccaacagattctacaccgtgatcaacaaaaagagcggcgagatcgtgcccatggaggtgaacttcaacttcgacgaccccaacctgatcatcctgcctctggcctttggcaagagacagggcagagaattcatctggaacgacctgctgtccctggaaaccggcagcctgaagctggccaacggaagagtgatcgagaagacactgtacaacagaagaacccggcaggatgagcctgccctgttcgtggccctgaccttcgagcggcgggaggtcctggactcctccaatatcaaaccaatgaacctgatcggcgtggcaagaggcgaaaacatccccgccgtgatcgccctgaccgaccccgagggctgcccactgagccggtttaaggatagcctgggaaacccaacccacatcctgagaatcggcgagagctataaggagaagcagcggaccatccaggccaagaaggaggtggagcagcggagagccggcggctacagccggaagtacgccagcaaagccaagaatctggcagacgatatggtgagaaacaccgctagagatctgctgtactacgccgtgacccaggatgccatgctgatcttcgccaacctgagccggggcttcggccggcagggcaagcggaccttcatggccgagagacagtacacacggatggaggactggctgaccgccaagctggcctacgagggcctgagcaagacctacctgtccaagacactggcccagtacacctccaagacatgcagcaactgtgggtttaccatcaccagcgccgactacgacagggtgctggagaagctgaagaagacagcaacaggctggatgaccacaattaacggcaaggagctgaaggtggagggccagattacctactacaacagatacaagagacagaacgtagtcaaggacctgtccgtcgagctggatagactgagcgaagaatctgtgaacaacgacatctcctcctggacaaagggcagaagcggagaagctctgagcctcctgaagaaaagattctcccatagacccgtgcaggagaagttcgtgtgcctgaactgcggcttcgagacacacgcagccgagcaagccgccctgaacatcgccagatcctggctgttcctgcggagccaggagtacaagaaataccagacaaacaagacaaccggcaacaccgataagagagccttcgtcgagacctggcagtccttttaccggaagaagcttaaggaggtgtggaaacctgccgtgcggtctggcggatctggcggaggctccaccagccccaagaaaaagagaaaagtctaagctgccttctgcggggcttgccttctggccatgcccttcttctctcccttgcacctgtacctcttggtctttgaataaagcctgagtaggaaggctagcaaaaaaaaaaaaaaaaaaaaaaaaaaaaaaaaaaaaaaaaaaaaaaaaaaaaaaaaaaaaaaaaaaaaaaaaaaaaaaaagcccagccggctccccaacctctaccgaggagggcacctctgagtccgccacccccgagagcggccctggcacctccaccgagcccagcgagggcagcgcacccggcagccctgccggcagccccacctccacagaggagggaaccagcaccgagcccagcgaaggcagcgccccaggcaccagcaccgagcctagtgagcaggagattaaacggatcaacaagatcagaagaagacttgtgaaagacagcaacaccaagaaggccggcaagacaggccccatgaaaaccctgctggttagagtgatgacacccgatctgagagagcggctggaaaacctgagaaagaagcctgaaaatatcccccagcccatcagcaatacatctagagccaacctgaataagctgctgaccgattacaccgaaatgaagaaggcgatcctgcatgtgtactgggaagagttccagaaggaccctgtgggcctgatgagccgggtggcccagcctgccagcaagaagatcgatcagaacaagctgaaacctgagatggacgagaagggcaacctgaccaccgccggctttgcctgctctcagtgtggccagcccctgttcgtgtacaagctggagcaggtgtctgagaagggcaaggcttacaccaactacttcggacggtgcaatgtggccgagcacgaaaagctgatcctgctggcccagctgaagcccgagaaggatagcgacgaagccgtgacatatagcctgggaaagtttgggcagagggccctggatttctacagcattcatgtgaccaaggagtccacccaccccgtgaagcccctggcccagatcgccggaaacagatacgcctccggacctgtgggaaaggccctgagcgacgcatgtatgggcacaatcgcctccttcctgtctaagtaccaggacatcatcatcgaacaccagaaggtggtgaagggcaaccagaagagactggagagcctgcgggagctggccggcaaggaaaacctggaataccctagcgtgaccctgccacctcagcctcacaccaaggagggcgttgatgcctacaacgaagtgatcgcccgggtgcgaatgtgggtgaacctgaacctgtggcagaagctgaagctaagcagagatgatgccaagcctctgctgagactgaagggattcccttcctttcctctggtcgagagacaggccaacgaagtggactggtgggacatggtgtgtaacgtgaagaagctgatcaacgagaaaaaggaggatggcaaggtgttttggcagaatctggctggctacaagagacaggaagccctgagaccatacctgagcagcgaggaagatcggaagaagggaaagaaattcgctcggtaccagctgggcgacctgctgctgcacctggaaaagaagcacggcgaggactggggaaaggtgtacgacgaggcctgggagcggattgacaagaaagtggaaggcctgagcaagcacatcaagctggaagaggaacggagaagcgaggacgcccagagcaaggccgccctgaccgactggctgcgggctaaggccagcttcgtgatcgagggcctgaaggaggccgacaaggacgagttctgcagatgcgagctgaagctgcagaagtggtacggggacctgcggggaaagcccttcgccatcgaagccgagaacagcatcctggacatcagcggcttcagcaagcagtacaactgtgccttcatctggcagaaggacggcgtgaagaagctgaacctgtacctgatcatcaactacttcaagggcggcaagctgcggttcaagaagatcaaacctgaagccttcgaagccaacagattctacaccgtgatcaacaaaaagagcggcgagatcgtgcccatggaggtgaacttcaacttcgacgaccccaacctgatcatcctgcctctggcctttggcaagagacagggcagagaattcatctggaacgacctgctgtccctggaaaccggcagcctgaagctggccaacggaagagtgatcgagaagacactgtacaacagaagaacccggcaggatgagcctgccctgttcgtggccctgaccttcgagcggcgggaggtcctggactcctccaatatcaaaccaatgaacctgatcggcgtggcaagaggcgaaaacatccccgccgtgatcgccctgaccgaccccgagggctgcccactgagccggtttaaggatagcctgggaaacccaacccacatcctgagaatcggcgagagctataaggagaagcagcggaccatccaggccaagaaggaggtggagcagcggagagccggcggctacagccggaagtacgccagcaaagccaagaatctggcagacgatatggtgagaaacaccgctagagatctgctgtactacgccgtgacccaggatgccatgctgatcttcgccaacctgagccggggcttcggccggcagggcaagcggaccttcatggccgagagacagtacacacggatggaggactggctgaccgccaagctggcctacgagggcctgagcaagacctacctgtccaagacactggcccagtacacctccaagacatgcagcaactgtgggtttaccatcaccagcgccgactacgacagggtgctggagaagctgaagaagacagcaacaggctggatgaccacaattaacggcaaggagctgaaggtggagggccagattacctactacaacagatacaagagacagaacgtagtcaaggacctgtccgtcgagctggatagactgagcgaagaatctgtgaacaacgacatctcctcctggacaaagggcagaagcggagaagctctgagcctcctgaagaaaagattctcccatagacccgtgcaggagaagttcgtgtgcctgaactgcggcttcgagacacacgcagccgagcaagccgccctgaacatcgccagatcctggctgttcctgcggagccaggagtacaagaaataccagacaaacaagacaaccggcaacaccgataagagagccttcgtcgagacctggcagtccttttaccggaagaagcttaaggaggtgtggaaacctgccgtgcggtctggcggatctggcggaggctccaccagccccaagaaaaagagaaaagtctaagctgccttctgcggggcttgccttctggccatgcccttcttctctcccttgcacctgtacctcttggtctttgaataaagcctgagtaggaaggctagcaaaaaaaaaaaaaaaaaaaaaaaaaaaaaaaaaaaaaaaaaaaaaaaaaaaaaaaaaaaaaaaaaaaaaaaaaaaaaaaa

SEQ ID NO: 9100 - RNA, 8787 nt, synthetic construct
  source 1..8787: mol_type = other RNA
aggaaataagagagaaaagaagagtaagaagaaatataagagccaccatggcccctaagaagaagcgtaaagtgagccggatgaaccacgaccaggagttcgacccccctaaggtgtaccctcccgtccccgccgagaagagaaagcccatccgggtcctgagcctgttcgatggcatcgccaccggtctgctggtgctgaaggacctgggcatccaggtggataggtacattgcctccgaggtgtgcgaggactccatcaccgtgggaatggtgcgtcatcagggcaagatcatgtacgtgggcgacgtgcggagcgtgacacagaagcatatccaggagtggggccctttcgacctggtgatcggcggcagcccttgcaatgacctgagcatcgtgaacccagcccggaagggcctgtacgagggaaccggcagactgttcttcgagttttacagactgctgcacgacgcccggcctaaggaaggcgacgaccggcccttcttttggctgttcgagaatgtggtggccatgggagtcagcgacaagcgggatattagccggttcctggagagcaaccccgtgatgatcgatgccaaggaagtgagcgccgcccaccgggccagatacttctggggcaatctgcctggcatgaacagacccctggccagcaccgtgaacgacaagctggagctgcaggagtgcctggagcacggccggatcgccaagttcagcaaggtgagaaccatcaccacccgaagcaacagcatcaaacaaggcaaggaccagcactttcctgtgttcatgaacgagaaggaggacatcctgtggtgtaccgagatggagagagtgttcgggttcccagtccactacacagatgtcagcaacatgtctagactggccagacagagactgctgggaagaagctggtccgtccctgtgatcagacacctgttcgcccctctgaaggagtacttcgcctgcgtgagcagcggcaacagcaacgccaacagccggggccccagcttctctagcggcctggtgccactgtccctgagagggagccacatgggccccatggagatctacaaaaccgtgagcgcctggaagcggcagcctgtgcgcgtgctgagcctgtttcggaatatcgataaagtcctgaaaagcctgggattcctggagagcggctctggctccggcggtggcaccctgaagtacgtggaggatgtgacaaacgtggtcagacgggatgtggagaagtggggccccttcgatctggtgtacggcagcacccaacccctgggcagctcttgtgaccggtgccctggctggtacatgtttcagttccaccggatcctgcagtacgccctgccgagacaggagtcccagcggccattcttttggattttcatggacaacttgctgctgaccgaggatgaccaggaaactaccactcggttcctgcagaccgaagccgtgaccctgcaggacgtgagaggccgggactaccagaacgccatgcgggtgtggtccaacatccctggactgaaaagcaagcacgcacctctgacccctaaagaagaggagtacctgcaggcccaggtgcggagcagaagcaagctggacgcccctaaggtggatctgctggtgaagaattgcctcctgcccctgagagagtacttcaagtatttcagccagaatagtctgcccctgggaggcagcggcggcggcccccagaagagcgtgaccttcgaggacgtggccgtgtacttcacccagaccgagtgggacggcctgagccccgcccagagggccctgtacagggacgtgatgctggagaactacggcaacgtggccagcctgggcttcagcctgctgaagcccgccgtgatcagccagctggagggcgccggcgagctggagggccccagccccctggtggccggcaccgagatcggcccccagggcctgtggggcggcccaagcagcggcgcccctcctcccagcggcggcaggcggcccaagcagcggcgcccctcctcccagcggcggcagcccagccggctccccaacctctaccgaggagggcacctctgagtccgccacccccgagagcggccctggcacctccaccgagcccagcgagggcagcgcacccggcagccctgccggcagccccacctccacagaggagggaaccagcaccgagcccagcgaaggcagcgccccaggcaccagcaccgagcctagtgagcaggagattaaacggatcaacaagatcagaagaagacttgtgaaagacagcaacaccaagaaggccggcaagacaggccccatgaaaaccctgctggttagagtgatgacacccgatctgagagagcggctggaaaacctgagaaagaagcctgaaaatatcccccagcccatcagcaatacatctagagccaacctgaataagctgctgaccgattacaccgaaatgaagaaggcgatcctgcatgtgtactgggaagagttccagaaggaccctgtgggcctgatgagccgggtggcccagcctgccagcaagaagatcgatcagaacaagctgaaacctgagatggacgagaagggcaacctgaccaccgccggctttgcctgctctcagtgtggccagcccctgttcgtgtacaagctggagcaggtgtctgagaagggcaaggcttacaccaactacttcggacggtgcaatgtggccgagcacgaaaagctgatcctgctggcccagctgaagcccgagaaggatagcgacgaagccgtgacatatagcctgggaaagtttgggcagagggccctggatttctacagcattcatgtgaccaaggagtccacccaccccgtgaagcccctggcccagatcgccggaaacagatacgcctccggacctgtgggaaaggccctgagcgacgcatgtatgggcacaatcgcctccttcctgtctaagtaccaggacatcatcatcgaacaccagaaggtggtgaagggcaaccagaagagactggagagcctgcgggagctggccggcaaggaaaacctggaataccctagcgtgaccctgccacctcagcctcacaccaaggagggcgttgatgcctacaacgaagtgatcgcccgggtgcgaatgtgggtgaacctgaacctgtggcagaagctgaagctaagcagagatgatgccaagcctctgctgagactgaagggattcccttcctttcctctggtcgagagacaggccaacgaagtggactggtgggacatggtgtgtaacgtgaagaagctgatcaacgagaaaaaggaggatggcaaggtgttttggcagaatctggctggctacaagagacaggaagccctgagaccatacctgagcagcgaggaagatcggaagaagggaaagaaattcgctcggtaccagctgggcgacctgctgctgcacctggaaaagaagcacggcgaggactggggaaaggtgtacgacgaggcctgggagcggattgacaagaaagtggaaggcctgagcaagcacatcaagctggaagaggaacggagaagcgaggacgcccagagcaaggccgccctgaccgactggctgcgggctaaggccagcttcgtgatcgagggcctgaaggaggccgacaaggacgagttctgcagatgcgagctgaagctgcagaagtggtacggggacctgcggggaaagcccttcgccatcgaagccgagaacagcatcctggacatcagcggcttcagcaagcagtacaactgtgccttcatctggcagaaggacggcgtgaagaagctgaacctgtacctgatcatcaactacttcaagggcggcaagctgcggttcaagaagatcaaacctgaagccttcgaagccaacagattctacaccgtgatcaacaaaaagagcggcgagatcgtgcccatggaggtgaacttcaacttcgacgaccccaacctgatcatcctgcctctggcctttggcaagagacagggcagagaattcatctggaacgacctgctgtccctggaaaccggcagcctgaagctggccaacggaagagtgatcgagaagacactgtacaacagaagaacccggcaggatgagcctgccctgttcgtggccctgaccttcgagcggcgggaggtcctggactcctccaatatcaaaccaatgaacctgatcggcgtggcaagaggcgaaaacatccccgccgtgatcgccctgaccgaccccgagggctgcccactgagccggtttaaggatagcctgggaaacccaacccacatcctgagaatcggcgagagctataaggagaagcagcggaccatccaggccaagaaggaggtggagcagcggagagccggcggctacagccggaagtacgccagcaaagccaagaatctggcagacgatatggtgagaaacaccgctagagatctgctgtactacgccgtgacccaggatgccatgctgatcttcgccaacctgagccggggcttcggccggcagggcaagcggaccttcatggccgagagacagtacacacggatggaggactggctgaccgccaagctggcctacgagggcctgagcaagacctacctgtccaagacactggcccagtacacctccaagacatgcagcaactgtgggtttaccatcaccagcgccgactacgacagggtgctggagaagctgaagaagacagcaacaggctggatgaccacaattaacggcaaggagctgaaggtggagggccagattacctactacaacagatacaagagacagaacgtagtcaaggacctgtccgtcgagctggatagactgagcgaagaatctgtgaacaacgacatctcctcctggacaaagggcagaagcggagaagctctgagcctcctgaagaaaagattctcccatagacccgtgcaggagaagttcgtgtgcctgaactgcggcttcgagacacacgcagccgagcaagccgccctgaacatcgccagatcctggctgttcctgcggagccaggagtacaagaaataccagacaaacaagacaaccggcaacaccgataagagagccttcgtcgagacctggcagtccttttaccggaagaagcttaaggaggtgtggaaacctgccgtgcggtctggcggatctggcggaggctccaccagccccaagaaaaagagaaaagtctaagctgccttctgcggggcttgccttctggccatgcccttcttctctcccttgcacctgtacctcttggtctttgaataaagcctgagtaggaaggctagcaaaaaaaaaaaaaaaaaaaaaaaaaaaaaaaaaaaaaaaaaaaaaaaaaaaaaaaaaaaaaaaaaaaaaaaaaaaaaaaagcccagccggctccccaacctctaccgaggagggcacctctgagtccgccacccccgagagcggccctggcacctccaccgagcccagcgagggcagcgcacccggcagccctgccggcagccccacctccacagaggagggaaccagcaccgagcccagcgaaggcagcgccccaggcaccagcaccgagcctagtgagcaggagattaaacggatcaacaagatcagaagaagacttgtgaaagacagcaacaccaagaaggccggcaagacaggccccatgaaaaccctgctggttagagtgatgacacccgatctgagagagcggctggaaaacctgagaaagaagcctgaaaatatcccccagcccatcagcaatacatctagagccaacctgaataagctgctgaccgattacaccgaaatgaagaaggcgatcctgcatgtgtactgggaagagttccagaaggaccctgtgggcctgatgagccgggtggcccagcctgccagcaagaagatcgatcagaacaagctgaaacctgagatggacgagaagggcaacctgaccaccgccggctttgcctgctctcagtgtggccagcccctgttcgtgtacaagctggagcaggtgtctgagaagggcaaggcttacaccaactacttcggacggtgcaatgtggccgagcacgaaaagctgatcctgctggcccagctgaagcccgagaaggatagcgacgaagccgtgacatatagcctgggaaagtttgggcagagggccctggatttctacagcattcatgtgaccaaggagtccacccaccccgtgaagcccctggcccagatcgccggaaacagatacgcctccggacctgtgggaaaggccctgagcgacgcatgtatgggcacaatcgcctccttcctgtctaagtaccaggacatcatcatcgaacaccagaaggtggtgaagggcaaccagaagagactggagagcctgcgggagctggccggcaaggaaaacctggaataccctagcgtgaccctgccacctcagcctcacaccaaggagggcgttgatgcctacaacgaagtgatcgcccgggtgcgaatgtgggtgaacctgaacctgtggcagaagctgaagctaagcagagatgatgccaagcctctgctgagactgaagggattcccttcctttcctctggtcgagagacaggccaacgaagtggactggtgggacatggtgtgtaacgtgaagaagctgatcaacgagaaaaaggaggatggcaaggtgttttggcagaatctggctggctacaagagacaggaagccctgagaccatacctgagcagcgaggaagatcggaagaagggaaagaaattcgctcggtaccagctgggcgacctgctgctgcacctggaaaagaagcacggcgaggactggggaaaggtgtacgacgaggcctgggagcggattgacaagaaagtggaaggcctgagcaagcacatcaagctggaagaggaacggagaagcgaggacgcccagagcaaggccgccctgaccgactggctgcgggctaaggccagcttcgtgatcgagggcctgaaggaggccgacaaggacgagttctgcagatgcgagctgaagctgcagaagtggtacggggacctgcggggaaagcccttcgccatcgaagccgagaacagcatcctggacatcagcggcttcagcaagcagtacaactgtgccttcatctggcagaaggacggcgtgaagaagctgaacctgtacctgatcatcaactacttcaagggcggcaagctgcggttcaagaagatcaaacctgaagccttcgaagccaacagattctacaccgtgatcaacaaaaagagcggcgagatcgtgcccatggaggtgaacttcaacttcgacgaccccaacctgatcatcctgcctctggcctttggcaagagacagggcagagaattcatctggaacgacctgctgtccctggaaaccggcagcctgaagctggccaacggaagagtgatcgagaagacactgtacaacagaagaacccggcaggatgagcctgccctgttcgtggccctgaccttcgagcggcgggaggtcctggactcctccaatatcaaaccaatgaacctgatcggcgtggcaagaggcgaaaacatccccgccgtgatcgccctgaccgaccccgagggctgcccactgagccggtttaaggatagcctgggaaacccaacccacatcctgagaatcggcgagagctataaggagaagcagcggaccatccaggccaagaaggaggtggagcagcggagagccggcggctacagccggaagtacgccagcaaagccaagaatctggcagacgatatggtgagaaacaccgctagagatctgctgtactacgccgtgacccaggatgccatgctgatcttcgccaacctgagccggggcttcggccggcagggcaagcggaccttcatggccgagagacagtacacacggatggaggactggctgaccgccaagctggcctacgagggcctgagcaagacctacctgtccaagacactggcccagtacacctccaagacatgcagcaactgtgggtttaccatcaccagcgccgactacgacagggtgctggagaagctgaagaagacagcaacaggctggatgaccacaattaacggcaaggagctgaaggtggagggccagattacctactacaacagatacaagagacagaacgtagtcaaggacctgtccgtcgagctggatagactgagcgaagaatctgtgaacaacgacatctcctcctggacaaagggcagaagcggagaagctctgagcctcctgaagaaaagattctcccatagacccgtgcaggagaagttcgtgtgcctgaactgcggcttcgagacacacgcagccgagcaagccgccctgaacatcgccagatcctggctgttcctgcggagccaggagtacaagaaataccagacaaacaagacaaccggcaacaccgataagagagccttcgtcgagacctggcagtccttttaccggaagaagcttaaggaggtgtggaaacctgccgtgcggtctggcggatctggcggaggctccaccagccccaagaaaaagagaaaagtctaagctgccttctgcggggcttgccttctggccatgcccttcttctctcccttgcacctgtacctcttggtctttgaataaagcctgagtaggaaggctagcaaaaaaaaaaaaaaaaaaaaaaaaaaaaaaaaaaaaaaaaaaaaaaaaaaaaaaaaaaaaaaaaaaaaaaaaaaaaaaaa

SEQ ID NO: 9101 - RNA, 8787 nt, synthetic construct
  source 1..8787: mol_type = other RNA
aggaaataagagagaaaagaagagtaagaagaaatataagagccaccatggcccctaagaagaagcgtaaagtgagccggatgaaccacgaccaggagttcgacccccctaaggtgtaccctcccgtccccgccgagaagagaaagcccatccgggtcctgagcctgttcgatggcatcgccaccggtctgctggtgctgaaggacctgggcatccaggtggataggtacattgcctccgaggtgtgcgaggactccatcaccgtgggaatggtgcgtcatcagggcaagatcatgtacgtgggcgacgtgcggagcgtgacacagaagcatatccaggagtggggccctttcgacctggtgatcggcggcagcccttgcaatgacctgagcatcgtgaacccagcccggaagggcctgtacgagggaaccggcagactgttcttcgagttttacagactgctgcacgacgcccggcctaaggaaggcgacgaccggcccttcttttggctgttcgagaatgtggtggccatgggagtcagcgacaagcgggatattagccggttcctggagagcaaccccgtgatgatcgatgccaaggaagtgagcgccgcccaccgggccagatacttctggggcaatctgcctggcatgaacagacccctggccagcaccgtgaacgacaagctggagctgcaggagtgcctggagcacggccggatcgccaagttcagcaaggtgagaaccatcaccacccgaagcaacagcatcaaacaaggcaaggaccagcactttcctgtgttcatgaacgagaaggaggacatcctgtggtgtaccgagatggagagagtgttcgggttcccagtccactacacagatgtcagcaacatgtctagactggccagacagagactgctgggaagaagctggtccgtccctgtgatcagacacctgttcgcccctctgaaggagtacttcgcctgcgtgagcagcggcaacagcaacgccaacagccggggccccagcttctctagcggcctggtgccactgtccctgagagggagccacatgggccccatggagatctacaaaaccgtgagcgcctggaagcggcagcctgtgcgcgtgctgagcctgtttcggaatatcgataaagtcctgaaaagcctgggattcctggagagcggctctggctccggcggtggcaccctgaagtacgtggaggatgtgacaaacgtggtcagacgggatgtggagaagtggggccccttcgatctggtgtacggcagcacccaacccctgggcagctcttgtgaccggtgccctggctggtacatgtttcagttccaccggatcctgcagtacgccctgccgagacaggagtcccagcggccattcttttggattttcatggacaacttgctgctgaccgaggatgaccaggaaactaccactcggttcctgcagaccgaagccgtgaccctgcaggacgtgagaggccgggactaccagaacgccatgcgggtgtggtccaacatccctggactgaaaagcaagcacgcacctctgacccctaaagaagaggagtacctgcaggcccaggtgcggagcagaagcaagctggacgcccctaaggtggatctgctggtgaagaattgcctcctgcccctgagagagtacttcaagtatttcagccagaatagtctgcccctgggaggcagcggcggcggcagccagaaggccctgaccttccaggacgtggccgtggagttcacccaggaggagtggggcctgctggagcccgcccagaagaacatgcacagggacgtgatgctggagaactacgagaacttcgtgagcctgggcctgcccgtgcccaagagcgccctgatcttccacctggagaggagggagaccccctggctgcccagcggcgaggtgctgaggaacacctaccccgactacctggtgcagggcggcccaagcagcggcgcccctcctcccagcggcggcaggcggcccaagcagcggcgcccctcctcccagcggcggcagcccagccggctccccaacctctaccgaggagggcacctctgagtccgccacccccgagagcggccctggcacctccaccgagcccagcgagggcagcgcacccggcagccctgccggcagccccacctccacagaggagggaaccagcaccgagcccagcgaaggcagcgccccaggcaccagcaccgagcctagtgagcaggagattaaacggatcaacaagatcagaagaagacttgtgaaagacagcaacaccaagaaggccggcaagacaggccccatgaaaaccctgctggttagagtgatgacacccgatctgagagagcggctggaaaacctgagaaagaagcctgaaaatatcccccagcccatcagcaatacatctagagccaacctgaataagctgctgaccgattacaccgaaatgaagaaggcgatcctgcatgtgtactgggaagagttccagaaggaccctgtgggcctgatgagccgggtggcccagcctgccagcaagaagatcgatcagaacaagctgaaacctgagatggacgagaagggcaacctgaccaccgccggctttgcctgctctcagtgtggccagcccctgttcgtgtacaagctggagcaggtgtctgagaagggcaaggcttacaccaactacttcggacggtgcaatgtggccgagcacgaaaagctgatcctgctggcccagctgaagcccgagaaggatagcgacgaagccgtgacatatagcctgggaaagtttgggcagagggccctggatttctacagcattcatgtgaccaaggagtccacccaccccgtgaagcccctggcccagatcgccggaaacagatacgcctccggacctgtgggaaaggccctgagcgacgcatgtatgggcacaatcgcctccttcctgtctaagtaccaggacatcatcatcgaacaccagaaggtggtgaagggcaaccagaagagactggagagcctgcgggagctggccggcaaggaaaacctggaataccctagcgtgaccctgccacctcagcctcacaccaaggagggcgttgatgcctacaacgaagtgatcgcccgggtgcgaatgtgggtgaacctgaacctgtggcagaagctgaagctaagcagagatgatgccaagcctctgctgagactgaagggattcccttcctttcctctggtcgagagacaggccaacgaagtggactggtgggacatggtgtgtaacgtgaagaagctgatcaacgagaaaaaggaggatggcaaggtgttttggcagaatctggctggctacaagagacaggaagccctgagaccatacctgagcagcgaggaagatcggaagaagggaaagaaattcgctcggtaccagctgggcgacctgctgctgcacctggaaaagaagcacggcgaggactggggaaaggtgtacgacgaggcctgggagcggattgacaagaaagtggaaggcctgagcaagcacatcaagctggaagaggaacggagaagcgaggacgcccagagcaaggccgccctgaccgactggctgcgggctaaggccagcttcgtgatcgagggcctgaaggaggccgacaaggacgagttctgcagatgcgagctgaagctgcagaagtggtacggggacctgcggggaaagcccttcgccatcgaagccgagaacagcatcctggacatcagcggcttcagcaagcagtacaactgtgccttcatctggcagaaggacggcgtgaagaagctgaacctgtacctgatcatcaactacttcaagggcggcaagctgcggttcaagaagatcaaacctgaagccttcgaagccaacagattctacaccgtgatcaacaaaaagagcggcgagatcgtgcccatggaggtgaacttcaacttcgacgaccccaacctgatcatcctgcctctggcctttggcaagagacagggcagagaattcatctggaacgacctgctgtccctggaaaccggcagcctgaagctggccaacggaagagtgatcgagaagacactgtacaacagaagaacccggcaggatgagcctgccctgttcgtggccctgaccttcgagcggcgggaggtcctggactcctccaatatcaaaccaatgaacctgatcggcgtggcaagaggcgaaaacatccccgccgtgatcgccctgaccgaccccgagggctgcccactgagccggtttaaggatagcctgggaaacccaacccacatcctgagaatcggcgagagctataaggagaagcagcggaccatccaggccaagaaggaggtggagcagcggagagccggcggctacagccggaagtacgccagcaaagccaagaatctggcagacgatatggtgagaaacaccgctagagatctgctgtactacgccgtgacccaggatgccatgctgatcttcgccaacctgagccggggcttcggccggcagggcaagcggaccttcatggccgagagacagtacacacggatggaggactggctgaccgccaagctggcctacgagggcctgagcaagacctacctgtccaagacactggcccagtacacctccaagacatgcagcaactgtgggtttaccatcaccagcgccgactacgacagggtgctggagaagctgaagaagacagcaacaggctggatgaccacaattaacggcaaggagctgaaggtggagggccagattacctactacaacagatacaagagacagaacgtagtcaaggacctgtccgtcgagctggatagactgagcgaagaatctgtgaacaacgacatctcctcctggacaaagggcagaagcggagaagctctgagcctcctgaagaaaagattctcccatagacccgtgcaggagaagttcgtgtgcctgaactgcggcttcgagacacacgcagccgagcaagccgccctgaacatcgccagatcctggctgttcctgcggagccaggagtacaagaaataccagacaaacaagacaaccggcaacaccgataagagagccttcgtcgagacctggcagtccttttaccggaagaagcttaaggaggtgtggaaacctgccgtgcggtctggcggatctggcggaggctccaccagccccaagaaaaagagaaaagtctaagctgccttctgcggggcttgccttctggccatgcccttcttctctcccttgcacctgtacctcttggtctttgaataaagcctgagtaggaaggctagcaaaaaaaaaaaaaaaaaaaaaaaaaaaaaaaaaaaaaaaaaaaaaaaaaaaaaaaaaaaaaaaaaaaaaaaaaaaaaaaagcccagccggctccccaacctctaccgaggagggcacctctgagtccgccacccccgagagcggccctggcacctccaccgagcccagcgagggcagcgcacccggcagccctgccggcagccccacctccacagaggagggaaccagcaccgagcccagcgaaggcagcgccccaggcaccagcaccgagcctagtgagcaggagattaaacggatcaacaagatcagaagaagacttgtgaaagacagcaacaccaagaaggccggcaagacaggccccatgaaaaccctgctggttagagtgatgacacccgatctgagagagcggctggaaaacctgagaaagaagcctgaaaatatcccccagcccatcagcaatacatctagagccaacctgaataagctgctgaccgattacaccgaaatgaagaaggcgatcctgcatgtgtactgggaagagttccagaaggaccctgtgggcctgatgagccgggtggcccagcctgccagcaagaagatcgatcagaacaagctgaaacctgagatggacgagaagggcaacctgaccaccgccggctttgcctgctctcagtgtggccagcccctgttcgtgtacaagctggagcaggtgtctgagaagggcaaggcttacaccaactacttcggacggtgcaatgtggccgagcacgaaaagctgatcctgctggcccagctgaagcccgagaaggatagcgacgaagccgtgacatatagcctgggaaagtttgggcagagggccctggatttctacagcattcatgtgaccaaggagtccacccaccccgtgaagcccctggcccagatcgccggaaacagatacgcctccggacctgtgggaaaggccctgagcgacgcatgtatgggcacaatcgcctccttcctgtctaagtaccaggacatcatcatcgaacaccagaaggtggtgaagggcaaccagaagagactggagagcctgcgggagctggccggcaaggaaaacctggaataccctagcgtgaccctgccacctcagcctcacaccaaggagggcgttgatgcctacaacgaagtgatcgcccgggtgcgaatgtgggtgaacctgaacctgtggcagaagctgaagctaagcagagatgatgccaagcctctgctgagactgaagggattcccttcctttcctctggtcgagagacaggccaacgaagtggactggtgggacatggtgtgtaacgtgaagaagctgatcaacgagaaaaaggaggatggcaaggtgttttggcagaatctggctggctacaagagacaggaagccctgagaccatacctgagcagcgaggaagatcggaagaagggaaagaaattcgctcggtaccagctgggcgacctgctgctgcacctggaaaagaagcacggcgaggactggggaaaggtgtacgacgaggcctgggagcggattgacaagaaagtggaaggcctgagcaagcacatcaagctggaagaggaacggagaagcgaggacgcccagagcaaggccgccctgaccgactggctgcgggctaaggccagcttcgtgatcgagggcctgaaggaggccgacaaggacgagttctgcagatgcgagctgaagctgcagaagtggtacggggacctgcggggaaagcccttcgccatcgaagccgagaacagcatcctggacatcagcggcttcagcaagcagtacaactgtgccttcatctggcagaaggacggcgtgaagaagctgaacctgtacctgatcatcaactacttcaagggcggcaagctgcggttcaagaagatcaaacctgaagccttcgaagccaacagattctacaccgtgatcaacaaaaagagcggcgagatcgtgcccatggaggtgaacttcaacttcgacgaccccaacctgatcatcctgcctctggcctttggcaagagacagggcagagaattcatctggaacgacctgctgtccctggaaaccggcagcctgaagctggccaacggaagagtgatcgagaagacactgtacaacagaagaacccggcaggatgagcctgccctgttcgtggccctgaccttcgagcggcgggaggtcctggactcctccaatatcaaaccaatgaacctgatcggcgtggcaagaggcgaaaacatccccgccgtgatcgccctgaccgaccccgagggctgcccactgagccggtttaaggatagcctgggaaacccaacccacatcctgagaatcggcgagagctataaggagaagcagcggaccatccaggccaagaaggaggtggagcagcggagagccggcggctacagccggaagtacgccagcaaagccaagaatctggcagacgatatggtgagaaacaccgctagagatctgctgtactacgccgtgacccaggatgccatgctgatcttcgccaacctgagccggggcttcggccggcagggcaagcggaccttcatggccgagagacagtacacacggatggaggactggctgaccgccaagctggcctacgagggcctgagcaagacctacctgtccaagacactggcccagtacacctccaagacatgcagcaactgtgggtttaccatcaccagcgccgactacgacagggtgctggagaagctgaagaagacagcaacaggctggatgaccacaattaacggcaaggagctgaaggtggagggccagattacctactacaacagatacaagagacagaacgtagtcaaggacctgtccgtcgagctggatagactgagcgaagaatctgtgaacaacgacatctcctcctggacaaagggcagaagcggagaagctctgagcctcctgaagaaaagattctcccatagacccgtgcaggagaagttcgtgtgcctgaactgcggcttcgagacacacgcagccgagcaagccgccctgaacatcgccagatcctggctgttcctgcggagccaggagtacaagaaataccagacaaacaagacaaccggcaacaccgataagagagccttcgtcgagacctggcagtccttttaccggaagaagcttaaggaggtgtggaaacctgccgtgcggtctggcggatctggcggaggctccaccagccccaagaaaaagagaaaagtctaagctgccttctgcggggcttgccttctggccatgcccttcttctctcccttgcacctgtacctcttggtctttgaataaagcctgagtaggaaggctagcaaaaaaaaaaaaaaaaaaaaaaaaaaaaaaaaaaaaaaaaaaaaaaaaaaaaaaaaaaaaaaaaaaaaaaaaaaaaaaaa

SEQ ID NO: 9102 - RNA, 8787 nt, synthetic construct
  source 1..8787: mol_type = other RNA
aggaaataagagagaaaagaagagtaagaagaaatataagagccaccatggcccctaagaagaagcgtaaagtgagccggatgaaccacgaccaggagttcgacccccctaaggtgtaccctcccgtccccgccgagaagagaaagcccatccgggtcctgagcctgttcgatggcatcgccaccggtctgctggtgctgaaggacctgggcatccaggtggataggtacattgcctccgaggtgtgcgaggactccatcaccgtgggaatggtgcgtcatcagggcaagatcatgtacgtgggcgacgtgcggagcgtgacacagaagcatatccaggagtggggccctttcgacctggtgatcggcggcagcccttgcaatgacctgagcatcgtgaacccagcccggaagggcctgtacgagggaaccggcagactgttcttcgagttttacagactgctgcacgacgcccggcctaaggaaggcgacgaccggcccttcttttggctgttcgagaatgtggtggccatgggagtcagcgacaagcgggatattagccggttcctggagagcaaccccgtgatgatcgatgccaaggaagtgagcgccgcccaccgggccagatacttctggggcaatctgcctggcatgaacagacccctggccagcaccgtgaacgacaagctggagctgcaggagtgcctggagcacggccggatcgccaagttcagcaaggtgagaaccatcaccacccgaagcaacagcatcaaacaaggcaaggaccagcactttcctgtgttcatgaacgagaaggaggacatcctgtggtgtaccgagatggagagagtgttcgggttcccagtccactacacagatgtcagcaacatgtctagactggccagacagagactgctgggaagaagctggtccgtccctgtgatcagacacctgttcgcccctctgaaggagtacttcgcctgcgtgagcagcggcaacagcaacgccaacagccggggccccagcttctctagcggcctggtgccactgtccctgagagggagccacatgggccccatggagatctacaaaaccgtgagcgcctggaagcggcagcctgtgcgcgtgctgagcctgtttcggaatatcgataaagtcctgaaaagcctgggattcctggagagcggctctggctccggcggtggcaccctgaagtacgtggaggatgtgacaaacgtggtcagacgggatgtggagaagtggggccccttcgatctggtgtacggcagcacccaacccctgggcagctcttgtgaccggtgccctggctggtacatgtttcagttccaccggatcctgcagtacgccctgccgagacaggagtcccagcggccattcttttggattttcatggacaacttgctgctgaccgaggatgaccaggaaactaccactcggttcctgcagaccgaagccgtgaccctgcaggacgtgagaggccgggactaccagaacgccatgcgggtgtggtccaacatccctggactgaaaagcaagcacgcacctctgacccctaaagaagaggagtacctgcaggcccaggtgcggagcagaagcaagctggacgcccctaaggtggatctgctggtgaagaattgcctcctgcccctgagagagtacttcaagtatttcagccagaatagtctgcccctgggaggcagcggcggcggcccccaggagcccgtgaccttcgaggacgtggccgtgtacttcacccagaaccagtgggccagcctggaccccacccagagggccctgtacagggaggtgatgctggagaactacgccagcgtggccagcctggtggtgttccccttccccaagcccgacctggtgagccagctggagagggaggaggccccctggggccccgacccctgggaggccgaggtgctgaggggcatctgccccggcggcggcccaagcagcggcgcccctcctcccagcggcggcaggcggcccaagcagcggcgcccctcctcccagcggcggcagcccagccggctccccaacctctaccgaggagggcacctctgagtccgccacccccgagagcggccctggcacctccaccgagcccagcgagggcagcgcacccggcagccctgccggcagccccacctccacagaggagggaaccagcaccgagcccagcgaaggcagcgccccaggcaccagcaccgagcctagtgagcaggagattaaacggatcaacaagatcagaagaagacttgtgaaagacagcaacaccaagaaggccggcaagacaggccccatgaaaaccctgctggttagagtgatgacacccgatctgagagagcggctggaaaacctgagaaagaagcctgaaaatatcccccagcccatcagcaatacatctagagccaacctgaataagctgctgaccgattacaccgaaatgaagaaggcgatcctgcatgtgtactgggaagagttccagaaggaccctgtgggcctgatgagccgggtggcccagcctgccagcaagaagatcgatcagaacaagctgaaacctgagatggacgagaagggcaacctgaccaccgccggctttgcctgctctcagtgtggccagcccctgttcgtgtacaagctggagcaggtgtctgagaagggcaaggcttacaccaactacttcggacggtgcaatgtggccgagcacgaaaagctgatcctgctggcccagctgaagcccgagaaggatagcgacgaagccgtgacatatagcctgggaaagtttgggcagagggccctggatttctacagcattcatgtgaccaaggagtccacccaccccgtgaagcccctggcccagatcgccggaaacagatacgcctccggacctgtgggaaaggccctgagcgacgcatgtatgggcacaatcgcctccttcctgtctaagtaccaggacatcatcatcgaacaccagaaggtggtgaagggcaaccagaagagactggagagcctgcgggagctggccggcaaggaaaacctggaataccctagcgtgaccctgccacctcagcctcacaccaaggagggcgttgatgcctacaacgaagtgatcgcccgggtgcgaatgtgggtgaacctgaacctgtggcagaagctgaagctaagcagagatgatgccaagcctctgctgagactgaagggattcccttcctttcctctggtcgagagacaggccaacgaagtggactggtgggacatggtgtgtaacgtgaagaagctgatcaacgagaaaaaggaggatggcaaggtgttttggcagaatctggctggctacaagagacaggaagccctgagaccatacctgagcagcgaggaagatcggaagaagggaaagaaattcgctcggtaccagctgggcgacctgctgctgcacctggaaaagaagcacggcgaggactggggaaaggtgtacgacgaggcctgggagcggattgacaagaaagtggaaggcctgagcaagcacatcaagctggaagaggaacggagaagcgaggacgcccagagcaaggccgccctgaccgactggctgcgggctaaggccagcttcgtgatcgagggcctgaaggaggccgacaaggacgagttctgcagatgcgagctgaagctgcagaagtggtacggggacctgcggggaaagcccttcgccatcgaagccgagaacagcatcctggacatcagcggcttcagcaagcagtacaactgtgccttcatctggcagaaggacggcgtgaagaagctgaacctgtacctgatcatcaactacttcaagggcggcaagctgcggttcaagaagatcaaacctgaagccttcgaagccaacagattctacaccgtgatcaacaaaaagagcggcgagatcgtgcccatggaggtgaacttcaacttcgacgaccccaacctgatcatcctgcctctggcctttggcaagagacagggcagagaattcatctggaacgacctgctgtccctggaaaccggcagcctgaagctggccaacggaagagtgatcgagaagacactgtacaacagaagaacccggcaggatgagcctgccctgttcgtggccctgaccttcgagcggcgggaggtcctggactcctccaatatcaaaccaatgaacctgatcggcgtggcaagaggcgaaaacatccccgccgtgatcgccctgaccgaccccgagggctgcccactgagccggtttaaggatagcctgggaaacccaacccacatcctgagaatcggcgagagctataaggagaagcagcggaccatccaggccaagaaggaggtggagcagcggagagccggcggctacagccggaagtacgccagcaaagccaagaatctggcagacgatatggtgagaaacaccgctagagatctgctgtactacgccgtgacccaggatgccatgctgatcttcgccaacctgagccggggcttcggccggcagggcaagcggaccttcatggccgagagacagtacacacggatggaggactggctgaccgccaagctggcctacgagggcctgagcaagacctacctgtccaagacactggcccagtacacctccaagacatgcagcaactgtgggtttaccatcaccagcgccgactacgacagggtgctggagaagctgaagaagacagcaacaggctggatgaccacaattaacggcaaggagctgaaggtggagggccagattacctactacaacagatacaagagacagaacgtagtcaaggacctgtccgtcgagctggatagactgagcgaagaatctgtgaacaacgacatctcctcctggacaaagggcagaagcggagaagctctgagcctcctgaagaaaagattctcccatagacccgtgcaggagaagttcgtgtgcctgaactgcggcttcgagacacacgcagccgagcaagccgccctgaacatcgccagatcctggctgttcctgcggagccaggagtacaagaaataccagacaaacaagacaaccggcaacaccgataagagagccttcgtcgagacctggcagtccttttaccggaagaagcttaaggaggtgtggaaacctgccgtgcggtctggcggatctggcggaggctccaccagccccaagaaaaagagaaaagtctaagctgccttctgcggggcttgccttctggccatgcccttcttctctcccttgcacctgtacctcttggtctttgaataaagcctgagtaggaaggctagcaaaaaaaaaaaaaaaaaaaaaaaaaaaaaaaaaaaaaaaaaaaaaaaaaaaaaaaaaaaaaaaaaaaaaaaaaaaaaaaagcccagccggctccccaacctctaccgaggagggcacctctgagtccgccacccccgagagcggccctggcacctccaccgagcccagcgagggcagcgcacccggcagccctgccggcagccccacctccacagaggagggaaccagcaccgagcccagcgaaggcagcgccccaggcaccagcaccgagcctagtgagcaggagattaaacggatcaacaagatcagaagaagacttgtgaaagacagcaacaccaagaaggccggcaagacaggccccatgaaaaccctgctggttagagtgatgacacccgatctgagagagcggctggaaaacctgagaaagaagcctgaaaatatcccccagcccatcagcaatacatctagagccaacctgaataagctgctgaccgattacaccgaaatgaagaaggcgatcctgcatgtgtactgggaagagttccagaaggaccctgtgggcctgatgagccgggtggcccagcctgccagcaagaagatcgatcagaacaagctgaaacctgagatggacgagaagggcaacctgaccaccgccggctttgcctgctctcagtgtggccagcccctgttcgtgtacaagctggagcaggtgtctgagaagggcaaggcttacaccaactacttcggacggtgcaatgtggccgagcacgaaaagctgatcctgctggcccagctgaagcccgagaaggatagcgacgaagccgtgacatatagcctgggaaagtttgggcagagggccctggatttctacagcattcatgtgaccaaggagtccacccaccccgtgaagcccctggcccagatcgccggaaacagatacgcctccggacctgtgggaaaggccctgagcgacgcatgtatgggcacaatcgcctccttcctgtctaagtaccaggacatcatcatcgaacaccagaaggtggtgaagggcaaccagaagagactggagagcctgcgggagctggccggcaaggaaaacctggaataccctagcgtgaccctgccacctcagcctcacaccaaggagggcgttgatgcctacaacgaagtgatcgcccgggtgcgaatgtgggtgaacctgaacctgtggcagaagctgaagctaagcagagatgatgccaagcctctgctgagactgaagggattcccttcctttcctctggtcgagagacaggccaacgaagtggactggtgggacatggtgtgtaacgtgaagaagctgatcaacgagaaaaaggaggatggcaaggtgttttggcagaatctggctggctacaagagacaggaagccctgagaccatacctgagcagcgaggaagatcggaagaagggaaagaaattcgctcggtaccagctgggcgacctgctgctgcacctggaaaagaagcacggcgaggactggggaaaggtgtacgacgaggcctgggagcggattgacaagaaagtggaaggcctgagcaagcacatcaagctggaagaggaacggagaagcgaggacgcccagagcaaggccgccctgaccgactggctgcgggctaaggccagcttcgtgatcgagggcctgaaggaggccgacaaggacgagttctgcagatgcgagctgaagctgcagaagtggtacggggacctgcggggaaagcccttcgccatcgaagccgagaacagcatcctggacatcagcggcttcagcaagcagtacaactgtgccttcatctggcagaaggacggcgtgaagaagctgaacctgtacctgatcatcaactacttcaagggcggcaagctgcggttcaagaagatcaaacctgaagccttcgaagccaacagattctacaccgtgatcaacaaaaagagcggcgagatcgtgcccatggaggtgaacttcaacttcgacgaccccaacctgatcatcctgcctctggcctttggcaagagacagggcagagaattcatctggaacgacctgctgtccctggaaaccggcagcctgaagctggccaacggaagagtgatcgagaagacactgtacaacagaagaacccggcaggatgagcctgccctgttcgtggccctgaccttcgagcggcgggaggtcctggactcctccaatatcaaaccaatgaacctgatcggcgtggcaagaggcgaaaacatccccgccgtgatcgccctgaccgaccccgagggctgcccactgagccggtttaaggatagcctgggaaacccaacccacatcctgagaatcggcgagagctataaggagaagcagcggaccatccaggccaagaaggaggtggagcagcggagagccggcggctacagccggaagtacgccagcaaagccaagaatctggcagacgatatggtgagaaacaccgctagagatctgctgtactacgccgtgacccaggatgccatgctgatcttcgccaacctgagccggggcttcggccggcagggcaagcggaccttcatggccgagagacagtacacacggatggaggactggctgaccgccaagctggcctacgagggcctgagcaagacctacctgtccaagacactggcccagtacacctccaagacatgcagcaactgtgggtttaccatcaccagcgccgactacgacagggtgctggagaagctgaagaagacagcaacaggctggatgaccacaattaacggcaaggagctgaaggtggagggccagattacctactacaacagatacaagagacagaacgtagtcaaggacctgtccgtcgagctggatagactgagcgaagaatctgtgaacaacgacatctcctcctggacaaagggcagaagcggagaagctctgagcctcctgaagaaaagattctcccatagacccgtgcaggagaagttcgtgtgcctgaactgcggcttcgagacacacgcagccgagcaagccgccctgaacatcgccagatcctggctgttcctgcggagccaggagtacaagaaataccagacaaacaagacaaccggcaacaccgataagagagccttcgtcgagacctggcagtccttttaccggaagaagcttaaggaggtgtggaaacctgccgtgcggtctggcggatctggcggaggctccaccagccccaagaaaaagagaaaagtctaagctgccttctgcggggcttgccttctggccatgcccttcttctctcccttgcacctgtacctcttggtctttgaataaagcctgagtaggaaggctagcaaaaaaaaaaaaaaaaaaaaaaaaaaaaaaaaaaaaaaaaaaaaaaaaaaaaaaaaaaaaaaaaaaaaaaaaaaaaaaaa

SEQ ID NO: 9103 - RNA, 8787 nt, synthetic construct
  source 1..8787: mol_type = other RNA
aggaaataagagagaaaagaagagtaagaagaaatataagagccaccatggcccctaagaagaagcgtaaagtgagccggatgaaccacgaccaggagttcgacccccctaaggtgtaccctcccgtccccgccgagaagagaaagcccatccgggtcctgagcctgttcgatggcatcgccaccggtctgctggtgctgaaggacctgggcatccaggtggataggtacattgcctccgaggtgtgcgaggactccatcaccgtgggaatggtgcgtcatcagggcaagatcatgtacgtgggcgacgtgcggagcgtgacacagaagcatatccaggagtggggccctttcgacctggtgatcggcggcagcccttgcaatgacctgagcatcgtgaacccagcccggaagggcctgtacgagggaaccggcagactgttcttcgagttttacagactgctgcacgacgcccggcctaaggaaggcgacgaccggcccttcttttggctgttcgagaatgtggtggccatgggagtcagcgacaagcgggatattagccggttcctggagagcaaccccgtgatgatcgatgccaaggaagtgagcgccgcccaccgggccagatacttctggggcaatctgcctggcatgaacagacccctggccagcaccgtgaacgacaagctggagctgcaggagtgcctggagcacggccggatcgccaagttcagcaaggtgagaaccatcaccacccgaagcaacagcatcaaacaaggcaaggaccagcactttcctgtgttcatgaacgagaaggaggacatcctgtggtgtaccgagatggagagagtgttcgggttcccagtccactacacagatgtcagcaacatgtctagactggccagacagagactgctgggaagaagctggtccgtccctgtgatcagacacctgttcgcccctctgaaggagtacttcgcctgcgtgagcagcggcaacagcaacgccaacagccggggccccagcttctctagcggcctggtgccactgtccctgagagggagccacatgggccccatggagatctacaaaaccgtgagcgcctggaagcggcagcctgtgcgcgtgctgagcctgtttcggaatatcgataaagtcctgaaaagcctgggattcctggagagcggctctggctccggcggtggcaccctgaagtacgtggaggatgtgacaaacgtggtcagacgggatgtggagaagtggggccccttcgatctggtgtacggcagcacccaacccctgggcagctcttgtgaccggtgccctggctggtacatgtttcagttccaccggatcctgcagtacgccctgccgagacaggagtcccagcggccattcttttggattttcatggacaacttgctgctgaccgaggatgaccaggaaactaccactcggttcctgcagaccgaagccgtgaccctgcaggacgtgagaggccgggactaccagaacgccatgcgggtgtggtccaacatccctggactgaaaagcaagcacgcacctctgacccctaaagaagaggagtacctgcaggcccaggtgcggagcagaagcaagctggacgcccctaaggtggatctgctggtgaagaattgcctcctgcccctgagagagtacttcaagtatttcagccagaatagtctgcccctgggaggcagcggcggcggcttccagcacctggtgatgttcagggacgtggccgtggacttcagccaggaggagtgggagtgcctgaacagctaccagaggaacctgtacagggacgtgatcctggagaactacagcaacctggtgagcgtggccggctgcagcatcagcaagcccgacgtgatcaccctgctggagcagggcaaggagccctggatggtggtgagggacgagaggaggaggagcctggacctggagagcaggggcggcccaagcagcggcgcccctcctcccagcggcggcaggcggcccaagcagcggcgcccctcctcccagcggcggcagcccagccggctccccaacctctaccgaggagggcacctctgagtccgccacccccgagagcggccctggcacctccaccgagcccagcgagggcagcgcacccggcagccctgccggcagccccacctccacagaggagggaaccagcaccgagcccagcgaaggcagcgccccaggcaccagcaccgagcctagtgagcaggagattaaacggatcaacaagatcagaagaagacttgtgaaagacagcaacaccaagaaggccggcaagacaggccccatgaaaaccctgctggttagagtgatgacacccgatctgagagagcggctggaaaacctgagaaagaagcctgaaaatatcccccagcccatcagcaatacatctagagccaacctgaataagctgctgaccgattacaccgaaatgaagaaggcgatcctgcatgtgtactgggaagagttccagaaggaccctgtgggcctgatgagccgggtggcccagcctgccagcaagaagatcgatcagaacaagctgaaacctgagatggacgagaagggcaacctgaccaccgccggctttgcctgctctcagtgtggccagcccctgttcgtgtacaagctggagcaggtgtctgagaagggcaaggcttacaccaactacttcggacggtgcaatgtggccgagcacgaaaagctgatcctgctggcccagctgaagcccgagaaggatagcgacgaagccgtgacatatagcctgggaaagtttgggcagagggccctggatttctacagcattcatgtgaccaaggagtccacccaccccgtgaagcccctggcccagatcgccggaaacagatacgcctccggacctgtgggaaaggccctgagcgacgcatgtatgggcacaatcgcctccttcctgtctaagtaccaggacatcatcatcgaacaccagaaggtggtgaagggcaaccagaagagactggagagcctgcgggagctggccggcaaggaaaacctggaataccctagcgtgaccctgccacctcagcctcacaccaaggagggcgttgatgcctacaacgaagtgatcgcccgggtgcgaatgtgggtgaacctgaacctgtggcagaagctgaagctaagcagagatgatgccaagcctctgctgagactgaagggattcccttcctttcctctggtcgagagacaggccaacgaagtggactggtgggacatggtgtgtaacgtgaagaagctgatcaacgagaaaaaggaggatggcaaggtgttttggcagaatctggctggctacaagagacaggaagccctgagaccatacctgagcagcgaggaagatcggaagaagggaaagaaattcgctcggtaccagctgggcgacctgctgctgcacctggaaaagaagcacggcgaggactggggaaaggtgtacgacgaggcctgggagcggattgacaagaaagtggaaggcctgagcaagcacatcaagctggaagaggaacggagaagcgaggacgcccagagcaaggccgccctgaccgactggctgcgggctaaggccagcttcgtgatcgagggcctgaaggaggccgacaaggacgagttctgcagatgcgagctgaagctgcagaagtggtacggggacctgcggggaaagcccttcgccatcgaagccgagaacagcatcctggacatcagcggcttcagcaagcagtacaactgtgccttcatctggcagaaggacggcgtgaagaagctgaacctgtacctgatcatcaactacttcaagggcggcaagctgcggttcaagaagatcaaacctgaagccttcgaagccaacagattctacaccgtgatcaacaaaaagagcggcgagatcgtgcccatggaggtgaacttcaacttcgacgaccccaacctgatcatcctgcctctggcctttggcaagagacagggcagagaattcatctggaacgacctgctgtccctggaaaccggcagcctgaagctggccaacggaagagtgatcgagaagacactgtacaacagaagaacccggcaggatgagcctgccctgttcgtggccctgaccttcgagcggcgggaggtcctggactcctccaatatcaaaccaatgaacctgatcggcgtggcaagaggcgaaaacatccccgccgtgatcgccctgaccgaccccgagggctgcccactgagccggtttaaggatagcctgggaaacccaacccacatcctgagaatcggcgagagctataaggagaagcagcggaccatccaggccaagaaggaggtggagcagcggagagccggcggctacagccggaagtacgccagcaaagccaagaatctggcagacgatatggtgagaaacaccgctagagatctgctgtactacgccgtgacccaggatgccatgctgatcttcgccaacctgagccggggcttcggccggcagggcaagcggaccttcatggccgagagacagtacacacggatggaggactggctgaccgccaagctggcctacgagggcctgagcaagacctacctgtccaagacactggcccagtacacctccaagacatgcagcaactgtgggtttaccatcaccagcgccgactacgacagggtgctggagaagctgaagaagacagcaacaggctggatgaccacaattaacggcaaggagctgaaggtggagggccagattacctactacaacagatacaagagacagaacgtagtcaaggacctgtccgtcgagctggatagactgagcgaagaatctgtgaacaacgacatctcctcctggacaaagggcagaagcggagaagctctgagcctcctgaagaaaagattctcccatagacccgtgcaggagaagttcgtgtgcctgaactgcggcttcgagacacacgcagccgagcaagccgccctgaacatcgccagatcctggctgttcctgcggagccaggagtacaagaaataccagacaaacaagacaaccggcaacaccgataagagagccttcgtcgagacctggcagtccttttaccggaagaagcttaaggaggtgtggaaacctgccgtgcggtctggcggatctggcggaggctccaccagccccaagaaaaagagaaaagtctaagctgccttctgcggggcttgccttctggccatgcccttcttctctcccttgcacctgtacctcttggtctttgaataaagcctgagtaggaaggctagcaaaaaaaaaaaaaaaaaaaaaaaaaaaaaaaaaaaaaaaaaaaaaaaaaaaaaaaaaaaaaaaaaaaaaaaaaaaaaaaagcccagccggctccccaacctctaccgaggagggcacctctgagtccgccacccccgagagcggccctggcacctccaccgagcccagcgagggcagcgcacccggcagccctgccggcagccccacctccacagaggagggaaccagcaccgagcccagcgaaggcagcgccccaggcaccagcaccgagcctagtgagcaggagattaaacggatcaacaagatcagaagaagacttgtgaaagacagcaacaccaagaaggccggcaagacaggccccatgaaaaccctgctggttagagtgatgacacccgatctgagagagcggctggaaaacctgagaaagaagcctgaaaatatcccccagcccatcagcaatacatctagagccaacctgaataagctgctgaccgattacaccgaaatgaagaaggcgatcctgcatgtgtactgggaagagttccagaaggaccctgtgggcctgatgagccgggtggcccagcctgccagcaagaagatcgatcagaacaagctgaaacctgagatggacgagaagggcaacctgaccaccgccggctttgcctgctctcagtgtggccagcccctgttcgtgtacaagctggagcaggtgtctgagaagggcaaggcttacaccaactacttcggacggtgcaatgtggccgagcacgaaaagctgatcctgctggcccagctgaagcccgagaaggatagcgacgaagccgtgacatatagcctgggaaagtttgggcagagggccctggatttctacagcattcatgtgaccaaggagtccacccaccccgtgaagcccctggcccagatcgccggaaacagatacgcctccggacctgtgggaaaggccctgagcgacgcatgtatgggcacaatcgcctccttcctgtctaagtaccaggacatcatcatcgaacaccagaaggtggtgaagggcaaccagaagagactggagagcctgcgggagctggccggcaaggaaaacctggaataccctagcgtgaccctgccacctcagcctcacaccaaggagggcgttgatgcctacaacgaagtgatcgcccgggtgcgaatgtgggtgaacctgaacctgtggcagaagctgaagctaagcagagatgatgccaagcctctgctgagactgaagggattcccttcctttcctctggtcgagagacaggccaacgaagtggactggtgggacatggtgtgtaacgtgaagaagctgatcaacgagaaaaaggaggatggcaaggtgttttggcagaatctggctggctacaagagacaggaagccctgagaccatacctgagcagcgaggaagatcggaagaagggaaagaaattcgctcggtaccagctgggcgacctgctgctgcacctggaaaagaagcacggcgaggactggggaaaggtgtacgacgaggcctgggagcggattgacaagaaagtggaaggcctgagcaagcacatcaagctggaagaggaacggagaagcgaggacgcccagagcaaggccgccctgaccgactggctgcgggctaaggccagcttcgtgatcgagggcctgaaggaggccgacaaggacgagttctgcagatgcgagctgaagctgcagaagtggtacggggacctgcggggaaagcccttcgccatcgaagccgagaacagcatcctggacatcagcggcttcagcaagcagtacaactgtgccttcatctggcagaaggacggcgtgaagaagctgaacctgtacctgatcatcaactacttcaagggcggcaagctgcggttcaagaagatcaaacctgaagccttcgaagccaacagattctacaccgtgatcaacaaaaagagcggcgagatcgtgcccatggaggtgaacttcaacttcgacgaccccaacctgatcatcctgcctctggcctttggcaagagacagggcagagaattcatctggaacgacctgctgtccctggaaaccggcagcctgaagctggccaacggaagagtgatcgagaagacactgtacaacagaagaacccggcaggatgagcctgccctgttcgtggccctgaccttcgagcggcgggaggtcctggactcctccaatatcaaaccaatgaacctgatcggcgtggcaagaggcgaaaacatccccgccgtgatcgccctgaccgaccccgagggctgcccactgagccggtttaaggatagcctgggaaacccaacccacatcctgagaatcggcgagagctataaggagaagcagcggaccatccaggccaagaaggaggtggagcagcggagagccggcggctacagccggaagtacgccagcaaagccaagaatctggcagacgatatggtgagaaacaccgctagagatctgctgtactacgccgtgacccaggatgccatgctgatcttcgccaacctgagccggggcttcggccggcagggcaagcggaccttcatggccgagagacagtacacacggatggaggactggctgaccgccaagctggcctacgagggcctgagcaagacctacctgtccaagacactggcccagtacacctccaagacatgcagcaactgtgggtttaccatcaccagcgccgactacgacagggtgctggagaagctgaagaagacagcaacaggctggatgaccacaattaacggcaaggagctgaaggtggagggccagattacctactacaacagatacaagagacagaacgtagtcaaggacctgtccgtcgagctggatagactgagcgaagaatctgtgaacaacgacatctcctcctggacaaagggcagaagcggagaagctctgagcctcctgaagaaaagattctcccatagacccgtgcaggagaagttcgtgtgcctgaactgcggcttcgagacacacgcagccgagcaagccgccctgaacatcgccagatcctggctgttcctgcggagccaggagtacaagaaataccagacaaacaagacaaccggcaacaccgataagagagccttcgtcgagacctggcagtccttttaccggaagaagcttaaggaggtgtggaaacctgccgtgcggtctggcggatctggcggaggctccaccagccccaagaaaaagagaaaagtctaagctgccttctgcggggcttgccttctggccatgcccttcttctctcccttgcacctgtacctcttggtctttgaataaagcctgagtaggaaggctagcaaaaaaaaaaaaaaaaaaaaaaaaaaaaaaaaaaaaaaaaaaaaaaaaaaaaaaaaaaaaaaaaaaaaaaaaaaaaaaaa

SEQ ID NO: 9104 - RNA, 8787 nt, synthetic construct
  source 1..8787: mol_type = other RNA
aggaaataagagagaaaagaagagtaagaagaaatataagagccaccatggcccctaagaagaagcgtaaagtgagccggatgaaccacgaccaggagttcgacccccctaaggtgtaccctcccgtccccgccgagaagagaaagcccatccgggtcctgagcctgttcgatggcatcgccaccggtctgctggtgctgaaggacctgggcatccaggtggataggtacattgcctccgaggtgtgcgaggactccatcaccgtgggaatggtgcgtcatcagggcaagatcatgtacgtgggcgacgtgcggagcgtgacacagaagcatatccaggagtggggccctttcgacctggtgatcggcggcagcccttgcaatgacctgagcatcgtgaacccagcccggaagggcctgtacgagggaaccggcagactgttcttcgagttttacagactgctgcacgacgcccggcctaaggaaggcgacgaccggcccttcttttggctgttcgagaatgtggtggccatgggagtcagcgacaagcgggatattagccggttcctggagagcaaccccgtgatgatcgatgccaaggaagtgagcgccgcccaccgggccagatacttctggggcaatctgcctggcatgaacagacccctggccagcaccgtgaacgacaagctggagctgcaggagtgcctggagcacggccggatcgccaagttcagcaaggtgagaaccatcaccacccgaagcaacagcatcaaacaaggcaaggaccagcactttcctgtgttcatgaacgagaaggaggacatcctgtggtgtaccgagatggagagagtgttcgggttcccagtccactacacagatgtcagcaacatgtctagactggccagacagagactgctgggaagaagctggtccgtccctgtgatcagacacctgttcgcccctctgaaggagtacttcgcctgcgtgagcagcggcaacagcaacgccaacagccggggccccagcttctctagcggcctggtgccactgtccctgagagggagccacatgggccccatggagatctacaaaaccgtgagcgcctggaagcggcagcctgtgcgcgtgctgagcctgtttcggaatatcgataaagtcctgaaaagcctgggattcctggagagcggctctggctccggcggtggcaccctgaagtacgtggaggatgtgacaaacgtggtcagacgggatgtggagaagtggggccccttcgatctggtgtacggcagcacccaacccctgggcagctcttgtgaccggtgccctggctggtacatgtttcagttccaccggatcctgcagtacgccctgccgagacaggagtcccagcggccattcttttggattttcatggacaacttgctgctgaccgaggatgaccaggaaactaccactcggttcctgcagaccgaagccgtgaccctgcaggacgtgagaggccgggactaccagaacgccatgcgggtgtggtccaacatccctggactgaaaagcaagcacgcacctctgacccctaaagaagaggagtacctgcaggcccaggtgcggagcagaagcaagctggacgcccctaaggtggatctgctggtgaagaattgcctcctgcccctgagagagtacttcaagtatttcagccagaatagtctgcccctgggaggcagcggcggcggcccccaggagcccgtgaccttcaaggacgtggccgtggacttcagccaggaggagtggggcctgctgggccccgcccagaggcacctgtacagggacgtgatgctggagaactacaggaacctggtgagcctgggcctgatcctggccaagcccgaggtggtgtgccacctggagcagggcggcgagctgtggaagcccgagcacggcgtgctgtgcagcggcgacggcgagctgtgggtgaggggcggcccaagcagcggcgcccctcctcccagcggcggcaggcggcccaagcagcggcgcccctcctcccagcggcggcagcccagccggctccccaacctctaccgaggagggcacctctgagtccgccacccccgagagcggccctggcacctccaccgagcccagcgagggcagcgcacccggcagccctgccggcagccccacctccacagaggagggaaccagcaccgagcccagcgaaggcagcgccccaggcaccagcaccgagcctagtgagcaggagattaaacggatcaacaagatcagaagaagacttgtgaaagacagcaacaccaagaaggccggcaagacaggccccatgaaaaccctgctggttagagtgatgacacccgatctgagagagcggctggaaaacctgagaaagaagcctgaaaatatcccccagcccatcagcaatacatctagagccaacctgaataagctgctgaccgattacaccgaaatgaagaaggcgatcctgcatgtgtactgggaagagttccagaaggaccctgtgggcctgatgagccgggtggcccagcctgccagcaagaagatcgatcagaacaagctgaaacctgagatggacgagaagggcaacctgaccaccgccggctttgcctgctctcagtgtggccagcccctgttcgtgtacaagctggagcaggtgtctgagaagggcaaggcttacaccaactacttcggacggtgcaatgtggccgagcacgaaaagctgatcctgctggcccagctgaagcccgagaaggatagcgacgaagccgtgacatatagcctgggaaagtttgggcagagggccctggatttctacagcattcatgtgaccaaggagtccacccaccccgtgaagcccctggcccagatcgccggaaacagatacgcctccggacctgtgggaaaggccctgagcgacgcatgtatgggcacaatcgcctccttcctgtctaagtaccaggacatcatcatcgaacaccagaaggtggtgaagggcaaccagaagagactggagagcctgcgggagctggccggcaaggaaaacctggaataccctagcgtgaccctgccacctcagcctcacaccaaggagggcgttgatgcctacaacgaagtgatcgcccgggtgcgaatgtgggtgaacctgaacctgtggcagaagctgaagctaagcagagatgatgccaagcctctgctgagactgaagggattcccttcctttcctctggtcgagagacaggccaacgaagtggactggtgggacatggtgtgtaacgtgaagaagctgatcaacgagaaaaaggaggatggcaaggtgttttggcagaatctggctggctacaagagacaggaagccctgagaccatacctgagcagcgaggaagatcggaagaagggaaagaaattcgctcggtaccagctgggcgacctgctgctgcacctggaaaagaagcacggcgaggactggggaaaggtgtacgacgaggcctgggagcggattgacaagaaagtggaaggcctgagcaagcacatcaagctggaagaggaacggagaagcgaggacgcccagagcaaggccgccctgaccgactggctgcgggctaaggccagcttcgtgatcgagggcctgaaggaggccgacaaggacgagttctgcagatgcgagctgaagctgcagaagtggtacggggacctgcggggaaagcccttcgccatcgaagccgagaacagcatcctggacatcagcggcttcagcaagcagtacaactgtgccttcatctggcagaaggacggcgtgaagaagctgaacctgtacctgatcatcaactacttcaagggcggcaagctgcggttcaagaagatcaaacctgaagccttcgaagccaacagattctacaccgtgatcaacaaaaagagcggcgagatcgtgcccatggaggtgaacttcaacttcgacgaccccaacctgatcatcctgcctctggcctttggcaagagacagggcagagaattcatctggaacgacctgctgtccctggaaaccggcagcctgaagctggccaacggaagagtgatcgagaagacactgtacaacagaagaacccggcaggatgagcctgccctgttcgtggccctgaccttcgagcggcgggaggtcctggactcctccaatatcaaaccaatgaacctgatcggcgtggcaagaggcgaaaacatccccgccgtgatcgccctgaccgaccccgagggctgcccactgagccggtttaaggatagcctgggaaacccaacccacatcctgagaatcggcgagagctataaggagaagcagcggaccatccaggccaagaaggaggtggagcagcggagagccggcggctacagccggaagtacgccagcaaagccaagaatctggcagacgatatggtgagaaacaccgctagagatctgctgtactacgccgtgacccaggatgccatgctgatcttcgccaacctgagccggggcttcggccggcagggcaagcggaccttcatggccgagagacagtacacacggatggaggactggctgaccgccaagctggcctacgagggcctgagcaagacctacctgtccaagacactggcccagtacacctccaagacatgcagcaactgtgggtttaccatcaccagcgccgactacgacagggtgctggagaagctgaagaagacagcaacaggctggatgaccacaattaacggcaaggagctgaaggtggagggccagattacctactacaacagatacaagagacagaacgtagtcaaggacctgtccgtcgagctggatagactgagcgaagaatctgtgaacaacgacatctcctcctggacaaagggcagaagcggagaagctctgagcctcctgaagaaaagattctcccatagacccgtgcaggagaagttcgtgtgcctgaactgcggcttcgagacacacgcagccgagcaagccgccctgaacatcgccagatcctggctgttcctgcggagccaggagtacaagaaataccagacaaacaagacaaccggcaacaccgataagagagccttcgtcgagacctggcagtccttttaccggaagaagcttaaggaggtgtggaaacctgccgtgcggtctggcggatctggcggaggctccaccagccccaagaaaaagagaaaagtctaagctgccttctgcggggcttgccttctggccatgcccttcttctctcccttgcacctgtacctcttggtctttgaataaagcctgagtaggaaggctagcaaaaaaaaaaaaaaaaaaaaaaaaaaaaaaaaaaaaaaaaaaaaaaaaaaaaaaaaaaaaaaaaaaaaaaaaaaaaaaaagcccagccggctccccaacctctaccgaggagggcacctctgagtccgccacccccgagagcggccctggcacctccaccgagcccagcgagggcagcgcacccggcagccctgccggcagccccacctccacagaggagggaaccagcaccgagcccagcgaaggcagcgccccaggcaccagcaccgagcctagtgagcaggagattaaacggatcaacaagatcagaagaagacttgtgaaagacagcaacaccaagaaggccggcaagacaggccccatgaaaaccctgctggttagagtgatgacacccgatctgagagagcggctggaaaacctgagaaagaagcctgaaaatatcccccagcccatcagcaatacatctagagccaacctgaataagctgctgaccgattacaccgaaatgaagaaggcgatcctgcatgtgtactgggaagagttccagaaggaccctgtgggcctgatgagccgggtggcccagcctgccagcaagaagatcgatcagaacaagctgaaacctgagatggacgagaagggcaacctgaccaccgccggctttgcctgctctcagtgtggccagcccctgttcgtgtacaagctggagcaggtgtctgagaagggcaaggcttacaccaactacttcggacggtgcaatgtggccgagcacgaaaagctgatcctgctggcccagctgaagcccgagaaggatagcgacgaagccgtgacatatagcctgggaaagtttgggcagagggccctggatttctacagcattcatgtgaccaaggagtccacccaccccgtgaagcccctggcccagatcgccggaaacagatacgcctccggacctgtgggaaaggccctgagcgacgcatgtatgggcacaatcgcctccttcctgtctaagtaccaggacatcatcatcgaacaccagaaggtggtgaagggcaaccagaagagactggagagcctgcgggagctggccggcaaggaaaacctggaataccctagcgtgaccctgccacctcagcctcacaccaaggagggcgttgatgcctacaacgaagtgatcgcccgggtgcgaatgtgggtgaacctgaacctgtggcagaagctgaagctaagcagagatgatgccaagcctctgctgagactgaagggattcccttcctttcctctggtcgagagacaggccaacgaagtggactggtgggacatggtgtgtaacgtgaagaagctgatcaacgagaaaaaggaggatggcaaggtgttttggcagaatctggctggctacaagagacaggaagccctgagaccatacctgagcagcgaggaagatcggaagaagggaaagaaattcgctcggtaccagctgggcgacctgctgctgcacctggaaaagaagcacggcgaggactggggaaaggtgtacgacgaggcctgggagcggattgacaagaaagtggaaggcctgagcaagcacatcaagctggaagaggaacggagaagcgaggacgcccagagcaaggccgccctgaccgactggctgcgggctaaggccagcttcgtgatcgagggcctgaaggaggccgacaaggacgagttctgcagatgcgagctgaagctgcagaagtggtacggggacctgcggggaaagcccttcgccatcgaagccgagaacagcatcctggacatcagcggcttcagcaagcagtacaactgtgccttcatctggcagaaggacggcgtgaagaagctgaacctgtacctgatcatcaactacttcaagggcggcaagctgcggttcaagaagatcaaacctgaagccttcgaagccaacagattctacaccgtgatcaacaaaaagagcggcgagatcgtgcccatggaggtgaacttcaacttcgacgaccccaacctgatcatcctgcctctggcctttggcaagagacagggcagagaattcatctggaacgacctgctgtccctggaaaccggcagcctgaagctggccaacggaagagtgatcgagaagacactgtacaacagaagaacccggcaggatgagcctgccctgttcgtggccctgaccttcgagcggcgggaggtcctggactcctccaatatcaaaccaatgaacctgatcggcgtggcaagaggcgaaaacatccccgccgtgatcgccctgaccgaccccgagggctgcccactgagccggtttaaggatagcctgggaaacccaacccacatcctgagaatcggcgagagctataaggagaagcagcggaccatccaggccaagaaggaggtggagcagcggagagccggcggctacagccggaagtacgccagcaaagccaagaatctggcagacgatatggtgagaaacaccgctagagatctgctgtactacgccgtgacccaggatgccatgctgatcttcgccaacctgagccggggcttcggccggcagggcaagcggaccttcatggccgagagacagtacacacggatggaggactggctgaccgccaagctggcctacgagggcctgagcaagacctacctgtccaagacactggcccagtacacctccaagacatgcagcaactgtgggtttaccatcaccagcgccgactacgacagggtgctggagaagctgaagaagacagcaacaggctggatgaccacaattaacggcaaggagctgaaggtggagggccagattacctactacaacagatacaagagacagaacgtagtcaaggacctgtccgtcgagctggatagactgagcgaagaatctgtgaacaacgacatctcctcctggacaaagggcagaagcggagaagctctgagcctcctgaagaaaagattctcccatagacccgtgcaggagaagttcgtgtgcctgaactgcggcttcgagacacacgcagccgagcaagccgccctgaacatcgccagatcctggctgttcctgcggagccaggagtacaagaaataccagacaaacaagacaaccggcaacaccgataagagagccttcgtcgagacctggcagtccttttaccggaagaagcttaaggaggtgtggaaacctgccgtgcggtctggcggatctggcggaggctccaccagccccaagaaaaagagaaaagtctaagctgccttctgcggggcttgccttctggccatgcccttcttctctcccttgcacctgtacctcttggtctttgaataaagcctgagtaggaaggctagcaaaaaaaaaaaaaaaaaaaaaaaaaaaaaaaaaaaaaaaaaaaaaaaaaaaaaaaaaaaaaaaaaaaaaaaaaaaaaaaa

SEQ ID NO: 9105 - RNA, 8787 nt, synthetic construct
  source 1..8787: mol_type = other RNA
aggaaataagagagaaaagaagagtaagaagaaatataagagccaccatggcccctaagaagaagcgtaaagtgagccggatgaaccacgaccaggagttcgacccccctaaggtgtaccctcccgtccccgccgagaagagaaagcccatccgggtcctgagcctgttcgatggcatcgccaccggtctgctggtgctgaaggacctgggcatccaggtggataggtacattgcctccgaggtgtgcgaggactccatcaccgtgggaatggtgcgtcatcagggcaagatcatgtacgtgggcgacgtgcggagcgtgacacagaagcatatccaggagtggggccctttcgacctggtgatcggcggcagcccttgcaatgacctgagcatcgtgaacccagcccggaagggcctgtacgagggaaccggcagactgttcttcgagttttacagactgctgcacgacgcccggcctaaggaaggcgacgaccggcccttcttttggctgttcgagaatgtggtggccatgggagtcagcgacaagcgggatattagccggttcctggagagcaaccccgtgatgatcgatgccaaggaagtgagcgccgcccaccgggccagatacttctggggcaatctgcctggcatgaacagacccctggccagcaccgtgaacgacaagctggagctgcaggagtgcctggagcacggccggatcgccaagttcagcaaggtgagaaccatcaccacccgaagcaacagcatcaaacaaggcaaggaccagcactttcctgtgttcatgaacgagaaggaggacatcctgtggtgtaccgagatggagagagtgttcgggttcccagtccactacacagatgtcagcaacatgtctagactggccagacagagactgctgggaagaagctggtccgtccctgtgatcagacacctgttcgcccctctgaaggagtacttcgcctgcgtgagcagcggcaacagcaacgccaacagccggggccccagcttctctagcggcctggtgccactgtccctgagagggagccacatgggccccatggagatctacaaaaccgtgagcgcctggaagcggcagcctgtgcgcgtgctgagcctgtttcggaatatcgataaagtcctgaaaagcctgggattcctggagagcggctctggctccggcggtggcaccctgaagtacgtggaggatgtgacaaacgtggtcagacgggatgtggagaagtggggccccttcgatctggtgtacggcagcacccaacccctgggcagctcttgtgaccggtgccctggctggtacatgtttcagttccaccggatcctgcagtacgccctgccgagacaggagtcccagcggccattcttttggattttcatggacaacttgctgctgaccgaggatgaccaggaaactaccactcggttcctgcagaccgaagccgtgaccctgcaggacgtgagaggccgggactaccagaacgccatgcgggtgtggtccaacatccctggactgaaaagcaagcacgcacctctgacccctaaagaagaggagtacctgcaggcccaggtgcggagcagaagcaagctggacgcccctaaggtggatctgctggtgaagaattgcctcctgcccctgagagagtacttcaagtatttcagccagaatagtctgcccctgggaggcagcggcggcggcaagcccaggaccgtgagcttcgccgacgtggccgtgtacttcagcagggaggagtggggctgcctgaggcccgcccagagggccctgtacagggacgtgatgagggagacctacggccacctgggcgccctgggcttccccggccccaagcccgccctgatcagctggatggagcaggagaccgaggcctggagccccgccgcccaggaccccgagaagggcgagaggctgggcggcgccaggggcggcccaagcagcggcgcccctcctcccagcggcggcaggcggcccaagcagcggcgcccctcctcccagcggcggcagcccagccggctccccaacctctaccgaggagggcacctctgagtccgccacccccgagagcggccctggcacctccaccgagcccagcgagggcagcgcacccggcagccctgccggcagccccacctccacagaggagggaaccagcaccgagcccagcgaaggcagcgccccaggcaccagcaccgagcctagtgagcaggagattaaacggatcaacaagatcagaagaagacttgtgaaagacagcaacaccaagaaggccggcaagacaggccccatgaaaaccctgctggttagagtgatgacacccgatctgagagagcggctggaaaacctgagaaagaagcctgaaaatatcccccagcccatcagcaatacatctagagccaacctgaataagctgctgaccgattacaccgaaatgaagaaggcgatcctgcatgtgtactgggaagagttccagaaggaccctgtgggcctgatgagccgggtggcccagcctgccagcaagaagatcgatcagaacaagctgaaacctgagatggacgagaagggcaacctgaccaccgccggctttgcctgctctcagtgtggccagcccctgttcgtgtacaagctggagcaggtgtctgagaagggcaaggcttacaccaactacttcggacggtgcaatgtggccgagcacgaaaagctgatcctgctggcccagctgaagcccgagaaggatagcgacgaagccgtgacatatagcctgggaaagtttgggcagagggccctggatttctacagcattcatgtgaccaaggagtccacccaccccgtgaagcccctggcccagatcgccggaaacagatacgcctccggacctgtgggaaaggccctgagcgacgcatgtatgggcacaatcgcctccttcctgtctaagtaccaggacatcatcatcgaacaccagaaggtggtgaagggcaaccagaagagactggagagcctgcgggagctggccggcaaggaaaacctggaataccctagcgtgaccctgccacctcagcctcacaccaaggagggcgttgatgcctacaacgaagtgatcgcccgggtgcgaatgtgggtgaacctgaacctgtggcagaagctgaagctaagcagagatgatgccaagcctctgctgagactgaagggattcccttcctttcctctggtcgagagacaggccaacgaagtggactggtgggacatggtgtgtaacgtgaagaagctgatcaacgagaaaaaggaggatggcaaggtgttttggcagaatctggctggctacaagagacaggaagccctgagaccatacctgagcagcgaggaagatcggaagaagggaaagaaattcgctcggtaccagctgggcgacctgctgctgcacctggaaaagaagcacggcgaggactggggaaaggtgtacgacgaggcctgggagcggattgacaagaaagtggaaggcctgagcaagcacatcaagctggaagaggaacggagaagcgaggacgcccagagcaaggccgccctgaccgactggctgcgggctaaggccagcttcgtgatcgagggcctgaaggaggccgacaaggacgagttctgcagatgcgagctgaagctgcagaagtggtacggggacctgcggggaaagcccttcgccatcgaagccgagaacagcatcctggacatcagcggcttcagcaagcagtacaactgtgccttcatctggcagaaggacggcgtgaagaagctgaacctgtacctgatcatcaactacttcaagggcggcaagctgcggttcaagaagatcaaacctgaagccttcgaagccaacagattctacaccgtgatcaacaaaaagagcggcgagatcgtgcccatggaggtgaacttcaacttcgacgaccccaacctgatcatcctgcctctggcctttggcaagagacagggcagagaattcatctggaacgacctgctgtccctggaaaccggcagcctgaagctggccaacggaagagtgatcgagaagacactgtacaacagaagaacccggcaggatgagcctgccctgttcgtggccctgaccttcgagcggcgggaggtcctggactcctccaatatcaaaccaatgaacctgatcggcgtggcaagaggcgaaaacatccccgccgtgatcgccctgaccgaccccgagggctgcccactgagccggtttaaggatagcctgggaaacccaacccacatcctgagaatcggcgagagctataaggagaagcagcggaccatccaggccaagaaggaggtggagcagcggagagccggcggctacagccggaagtacgccagcaaagccaagaatctggcagacgatatggtgagaaacaccgctagagatctgctgtactacgccgtgacccaggatgccatgctgatcttcgccaacctgagccggggcttcggccggcagggcaagcggaccttcatggccgagagacagtacacacggatggaggactggctgaccgccaagctggcctacgagggcctgagcaagacctacctgtccaagacactggcccagtacacctccaagacatgcagcaactgtgggtttaccatcaccagcgccgactacgacagggtgctggagaagctgaagaagacagcaacaggctggatgaccacaattaacggcaaggagctgaaggtggagggccagattacctactacaacagatacaagagacagaacgtagtcaaggacctgtccgtcgagctggatagactgagcgaagaatctgtgaacaacgacatctcctcctggacaaagggcagaagcggagaagctctgagcctcctgaagaaaagattctcccatagacccgtgcaggagaagttcgtgtgcctgaactgcggcttcgagacacacgcagccgagcaagccgccctgaacatcgccagatcctggctgttcctgcggagccaggagtacaagaaataccagacaaacaagacaaccggcaacaccgataagagagccttcgtcgagacctggcagtccttttaccggaagaagcttaaggaggtgtggaaacctgccgtgcggtctggcggatctggcggaggctccaccagccccaagaaaaagagaaaagtctaagctgccttctgcggggcttgccttctggccatgcccttcttctctcccttgcacctgtacctcttggtctttgaataaagcctgagtaggaaggctagcaaaaaaaaaaaaaaaaaaaaaaaaaaaaaaaaaaaaaaaaaaaaaaaaaaaaaaaaaaaaaaaaaaaaaaaaaaaaaaaagcccagccggctccccaacctctaccgaggagggcacctctgagtccgccacccccgagagcggccctggcacctccaccgagcccagcgagggcagcgcacccggcagccctgccggcagccccacctccacagaggagggaaccagcaccgagcccagcgaaggcagcgccccaggcaccagcaccgagcctagtgagcaggagattaaacggatcaacaagatcagaagaagacttgtgaaagacagcaacaccaagaaggccggcaagacaggccccatgaaaaccctgctggttagagtgatgacacccgatctgagagagcggctggaaaacctgagaaagaagcctgaaaatatcccccagcccatcagcaatacatctagagccaacctgaataagctgctgaccgattacaccgaaatgaagaaggcgatcctgcatgtgtactgggaagagttccagaaggaccctgtgggcctgatgagccgggtggcccagcctgccagcaagaagatcgatcagaacaagctgaaacctgagatggacgagaagggcaacctgaccaccgccggctttgcctgctctcagtgtggccagcccctgttcgtgtacaagctggagcaggtgtctgagaagggcaaggcttacaccaactacttcggacggtgcaatgtggccgagcacgaaaagctgatcctgctggcccagctgaagcccgagaaggatagcgacgaagccgtgacatatagcctgggaaagtttgggcagagggccctggatttctacagcattcatgtgaccaaggagtccacccaccccgtgaagcccctggcccagatcgccggaaacagatacgcctccggacctgtgggaaaggccctgagcgacgcatgtatgggcacaatcgcctccttcctgtctaagtaccaggacatcatcatcgaacaccagaaggtggtgaagggcaaccagaagagactggagagcctgcgggagctggccggcaaggaaaacctggaataccctagcgtgaccctgccacctcagcctcacaccaaggagggcgttgatgcctacaacgaagtgatcgcccgggtgcgaatgtgggtgaacctgaacctgtggcagaagctgaagctaagcagagatgatgccaagcctctgctgagactgaagggattcccttcctttcctctggtcgagagacaggccaacgaagtggactggtgggacatggtgtgtaacgtgaagaagctgatcaacgagaaaaaggaggatggcaaggtgttttggcagaatctggctggctacaagagacaggaagccctgagaccatacctgagcagcgaggaagatcggaagaagggaaagaaattcgctcggtaccagctgggcgacctgctgctgcacctggaaaagaagcacggcgaggactggggaaaggtgtacgacgaggcctgggagcggattgacaagaaagtggaaggcctgagcaagcacatcaagctggaagaggaacggagaagcgaggacgcccagagcaaggccgccctgaccgactggctgcgggctaaggccagcttcgtgatcgagggcctgaaggaggccgacaaggacgagttctgcagatgcgagctgaagctgcagaagtggtacggggacctgcggggaaagcccttcgccatcgaagccgagaacagcatcctggacatcagcggcttcagcaagcagtacaactgtgccttcatctggcagaaggacggcgtgaagaagctgaacctgtacctgatcatcaactacttcaagggcggcaagctgcggttcaagaagatcaaacctgaagccttcgaagccaacagattctacaccgtgatcaacaaaaagagcggcgagatcgtgcccatggaggtgaacttcaacttcgacgaccccaacctgatcatcctgcctctggcctttggcaagagacagggcagagaattcatctggaacgacctgctgtccctggaaaccggcagcctgaagctggccaacggaagagtgatcgagaagacactgtacaacagaagaacccggcaggatgagcctgccctgttcgtggccctgaccttcgagcggcgggaggtcctggactcctccaatatcaaaccaatgaacctgatcggcgtggcaagaggcgaaaacatccccgccgtgatcgccctgaccgaccccgagggctgcccactgagccggtttaaggatagcctgggaaacccaacccacatcctgagaatcggcgagagctataaggagaagcagcggaccatccaggccaagaaggaggtggagcagcggagagccggcggctacagccggaagtacgccagcaaagccaagaatctggcagacgatatggtgagaaacaccgctagagatctgctgtactacgccgtgacccaggatgccatgctgatcttcgccaacctgagccggggcttcggccggcagggcaagcggaccttcatggccgagagacagtacacacggatggaggactggctgaccgccaagctggcctacgagggcctgagcaagacctacctgtccaagacactggcccagtacacctccaagacatgcagcaactgtgggtttaccatcaccagcgccgactacgacagggtgctggagaagctgaagaagacagcaacaggctggatgaccacaattaacggcaaggagctgaaggtggagggccagattacctactacaacagatacaagagacagaacgtagtcaaggacctgtccgtcgagctggatagactgagcgaagaatctgtgaacaacgacatctcctcctggacaaagggcagaagcggagaagctctgagcctcctgaagaaaagattctcccatagacccgtgcaggagaagttcgtgtgcctgaactgcggcttcgagacacacgcagccgagcaagccgccctgaacatcgccagatcctggctgttcctgcggagccaggagtacaagaaataccagacaaacaagacaaccggcaacaccgataagagagccttcgtcgagacctggcagtccttttaccggaagaagcttaaggaggtgtggaaacctgccgtgcggtctggcggatctggcggaggctccaccagccccaagaaaaagagaaaagtctaagctgccttctgcggggcttgccttctggccatgcccttcttctctcccttgcacctgtacctcttggtctttgaataaagcctgagtaggaaggctagcaaaaaaaaaaaaaaaaaaaaaaaaaaaaaaaaaaaaaaaaaaaaaaaaaaaaaaaaaaaaaaaaaaaaaaaaaaaaaaaa

SEQ ID NO: 9106 - RNA, 8787 nt, synthetic construct
  source 1..8787: mol_type = other RNA
aggaaataagagagaaaagaagagtaagaagaaatataagagccaccatggcccctaagaagaagcgtaaagtgagccggatgaaccacgaccaggagttcgacccccctaaggtgtaccctcccgtccccgccgagaagagaaagcccatccgggtcctgagcctgttcgatggcatcgccaccggtctgctggtgctgaaggacctgggcatccaggtggataggtacattgcctccgaggtgtgcgaggactccatcaccgtgggaatggtgcgtcatcagggcaagatcatgtacgtgggcgacgtgcggagcgtgacacagaagcatatccaggagtggggccctttcgacctggtgatcggcggcagcccttgcaatgacctgagcatcgtgaacccagcccggaagggcctgtacgagggaaccggcagactgttcttcgagttttacagactgctgcacgacgcccggcctaaggaaggcgacgaccggcccttcttttggctgttcgagaatgtggtggccatgggagtcagcgacaagcgggatattagccggttcctggagagcaaccccgtgatgatcgatgccaaggaagtgagcgccgcccaccgggccagatacttctggggcaatctgcctggcatgaacagacccctggccagcaccgtgaacgacaagctggagctgcaggagtgcctggagcacggccggatcgccaagttcagcaaggtgagaaccatcaccacccgaagcaacagcatcaaacaaggcaaggaccagcactttcctgtgttcatgaacgagaaggaggacatcctgtggtgtaccgagatggagagagtgttcgggttcccagtccactacacagatgtcagcaacatgtctagactggccagacagagactgctgggaagaagctggtccgtccctgtgatcagacacctgttcgcccctctgaaggagtacttcgcctgcgtgagcagcggcaacagcaacgccaacagccggggccccagcttctctagcggcctggtgccactgtccctgagagggagccacatgggccccatggagatctacaaaaccgtgagcgcctggaagcggcagcctgtgcgcgtgctgagcctgtttcggaatatcgataaagtcctgaaaagcctgggattcctggagagcggctctggctccggcggtggcaccctgaagtacgtggaggatgtgacaaacgtggtcagacgggatgtggagaagtggggccccttcgatctggtgtacggcagcacccaacccctgggcagctcttgtgaccggtgccctggctggtacatgtttcagttccaccggatcctgcagtacgccctgccgagacaggagtcccagcggccattcttttggattttcatggacaacttgctgctgaccgaggatgaccaggaaactaccactcggttcctgcagaccgaagccgtgaccctgcaggacgtgagaggccgggactaccagaacgccatgcgggtgtggtccaacatccctggactgaaaagcaagcacgcacctctgacccctaaagaagaggagtacctgcaggcccaggtgcggagcagaagcaagctggacgcccctaaggtggatctgctggtgaagaattgcctcctgcccctgagagagtacttcaagtatttcagccagaatagtctgcccctgggaggcagcggcggcggctgccaggccctggtgaccttcgaggacgtggccgtgaccttcaccgacgacgagtggaagaggctggtgcccgtgcagagggccctgtacaaggccgtgatgctggagaactacgagagcatcatcagcctgggcctgcccgtgcccaggcccgacctgatcctgcagttcaagaggaggggcgagccctggatgaggggcttccacggcagcgaggagaaggcctggcccgagagcgtgagcggcggcccaagcagcggcgcccctcctcccagcggcggcaggcggcccaagcagcggcgcccctcctcccagcggcggcagcccagccggctccccaacctctaccgaggagggcacctctgagtccgccacccccgagagcggccctggcacctccaccgagcccagcgagggcagcgcacccggcagccctgccggcagccccacctccacagaggagggaaccagcaccgagcccagcgaaggcagcgccccaggcaccagcaccgagcctagtgagcaggagattaaacggatcaacaagatcagaagaagacttgtgaaagacagcaacaccaagaaggccggcaagacaggccccatgaaaaccctgctggttagagtgatgacacccgatctgagagagcggctggaaaacctgagaaagaagcctgaaaatatcccccagcccatcagcaatacatctagagccaacctgaataagctgctgaccgattacaccgaaatgaagaaggcgatcctgcatgtgtactgggaagagttccagaaggaccctgtgggcctgatgagccgggtggcccagcctgccagcaagaagatcgatcagaacaagctgaaacctgagatggacgagaagggcaacctgaccaccgccggctttgcctgctctcagtgtggccagcccctgttcgtgtacaagctggagcaggtgtctgagaagggcaaggcttacaccaactacttcggacggtgcaatgtggccgagcacgaaaagctgatcctgctggcccagctgaagcccgagaaggatagcgacgaagccgtgacatatagcctgggaaagtttgggcagagggccctggatttctacagcattcatgtgaccaaggagtccacccaccccgtgaagcccctggcccagatcgccggaaacagatacgcctccggacctgtgggaaaggccctgagcgacgcatgtatgggcacaatcgcctccttcctgtctaagtaccaggacatcatcatcgaacaccagaaggtggtgaagggcaaccagaagagactggagagcctgcgggagctggccggcaaggaaaacctggaataccctagcgtgaccctgccacctcagcctcacaccaaggagggcgttgatgcctacaacgaagtgatcgcccgggtgcgaatgtgggtgaacctgaacctgtggcagaagctgaagctaagcagagatgatgccaagcctctgctgagactgaagggattcccttcctttcctctggtcgagagacaggccaacgaagtggactggtgggacatggtgtgtaacgtgaagaagctgatcaacgagaaaaaggaggatggcaaggtgttttggcagaatctggctggctacaagagacaggaagccctgagaccatacctgagcagcgaggaagatcggaagaagggaaagaaattcgctcggtaccagctgggcgacctgctgctgcacctggaaaagaagcacggcgaggactggggaaaggtgtacgacgaggcctgggagcggattgacaagaaagtggaaggcctgagcaagcacatcaagctggaagaggaacggagaagcgaggacgcccagagcaaggccgccctgaccgactggctgcgggctaaggccagcttcgtgatcgagggcctgaaggaggccgacaaggacgagttctgcagatgcgagctgaagctgcagaagtggtacggggacctgcggggaaagcccttcgccatcgaagccgagaacagcatcctggacatcagcggcttcagcaagcagtacaactgtgccttcatctggcagaaggacggcgtgaagaagctgaacctgtacctgatcatcaactacttcaagggcggcaagctgcggttcaagaagatcaaacctgaagccttcgaagccaacagattctacaccgtgatcaacaaaaagagcggcgagatcgtgcccatggaggtgaacttcaacttcgacgaccccaacctgatcatcctgcctctggcctttggcaagagacagggcagagaattcatctggaacgacctgctgtccctggaaaccggcagcctgaagctggccaacggaagagtgatcgagaagacactgtacaacagaagaacccggcaggatgagcctgccctgttcgtggccctgaccttcgagcggcgggaggtcctggactcctccaatatcaaaccaatgaacctgatcggcgtggcaagaggcgaaaacatccccgccgtgatcgccctgaccgaccccgagggctgcccactgagccggtttaaggatagcctgggaaacccaacccacatcctgagaatcggcgagagctataaggagaagcagcggaccatccaggccaagaaggaggtggagcagcggagagccggcggctacagccggaagtacgccagcaaagccaagaatctggcagacgatatggtgagaaacaccgctagagatctgctgtactacgccgtgacccaggatgccatgctgatcttcgccaacctgagccggggcttcggccggcagggcaagcggaccttcatggccgagagacagtacacacggatggaggactggctgaccgccaagctggcctacgagggcctgagcaagacctacctgtccaagacactggcccagtacacctccaagacatgcagcaactgtgggtttaccatcaccagcgccgactacgacagggtgctggagaagctgaagaagacagcaacaggctggatgaccacaattaacggcaaggagctgaaggtggagggccagattacctactacaacagatacaagagacagaacgtagtcaaggacctgtccgtcgagctggatagactgagcgaagaatctgtgaacaacgacatctcctcctggacaaagggcagaagcggagaagctctgagcctcctgaagaaaagattctcccatagacccgtgcaggagaagttcgtgtgcctgaactgcggcttcgagacacacgcagccgagcaagccgccctgaacatcgccagatcctggctgttcctgcggagccaggagtacaagaaataccagacaaacaagacaaccggcaacaccgataagagagccttcgtcgagacctggcagtccttttaccggaagaagcttaaggaggtgtggaaacctgccgtgcggtctggcggatctggcggaggctccaccagccccaagaaaaagagaaaagtctaagctgccttctgcggggcttgccttctggccatgcccttcttctctcccttgcacctgtacctcttggtctttgaataaagcctgagtaggaaggctagcaaaaaaaaaaaaaaaaaaaaaaaaaaaaaaaaaaaaaaaaaaaaaaaaaaaaaaaaaaaaaaaaaaaaaaaaaaaaaaaagcccagccggctccccaacctctaccgaggagggcacctctgagtccgccacccccgagagcggccctggcacctccaccgagcccagcgagggcagcgcacccggcagccctgccggcagccccacctccacagaggagggaaccagcaccgagcccagcgaaggcagcgccccaggcaccagcaccgagcctagtgagcaggagattaaacggatcaacaagatcagaagaagacttgtgaaagacagcaacaccaagaaggccggcaagacaggccccatgaaaaccctgctggttagagtgatgacacccgatctgagagagcggctggaaaacctgagaaagaagcctgaaaatatcccccagcccatcagcaatacatctagagccaacctgaataagctgctgaccgattacaccgaaatgaagaaggcgatcctgcatgtgtactgggaagagttccagaaggaccctgtgggcctgatgagccgggtggcccagcctgccagcaagaagatcgatcagaacaagctgaaacctgagatggacgagaagggcaacctgaccaccgccggctttgcctgctctcagtgtggccagcccctgttcgtgtacaagctggagcaggtgtctgagaagggcaaggcttacaccaactacttcggacggtgcaatgtggccgagcacgaaaagctgatcctgctggcccagctgaagcccgagaaggatagcgacgaagccgtgacatatagcctgggaaagtttgggcagagggccctggatttctacagcattcatgtgaccaaggagtccacccaccccgtgaagcccctggcccagatcgccggaaacagatacgcctccggacctgtgggaaaggccctgagcgacgcatgtatgggcacaatcgcctccttcctgtctaagtaccaggacatcatcatcgaacaccagaaggtggtgaagggcaaccagaagagactggagagcctgcgggagctggccggcaaggaaaacctggaataccctagcgtgaccctgccacctcagcctcacaccaaggagggcgttgatgcctacaacgaagtgatcgcccgggtgcgaatgtgggtgaacctgaacctgtggcagaagctgaagctaagcagagatgatgccaagcctctgctgagactgaagggattcccttcctttcctctggtcgagagacaggccaacgaagtggactggtgggacatggtgtgtaacgtgaagaagctgatcaacgagaaaaaggaggatggcaaggtgttttggcagaatctggctggctacaagagacaggaagccctgagaccatacctgagcagcgaggaagatcggaagaagggaaagaaattcgctcggtaccagctgggcgacctgctgctgcacctggaaaagaagcacggcgaggactggggaaaggtgtacgacgaggcctgggagcggattgacaagaaagtggaaggcctgagcaagcacatcaagctggaagaggaacggagaagcgaggacgcccagagcaaggccgccctgaccgactggctgcgggctaaggccagcttcgtgatcgagggcctgaaggaggccgacaaggacgagttctgcagatgcgagctgaagctgcagaagtggtacggggacctgcggggaaagcccttcgccatcgaagccgagaacagcatcctggacatcagcggcttcagcaagcagtacaactgtgccttcatctggcagaaggacggcgtgaagaagctgaacctgtacctgatcatcaactacttcaagggcggcaagctgcggttcaagaagatcaaacctgaagccttcgaagccaacagattctacaccgtgatcaacaaaaagagcggcgagatcgtgcccatggaggtgaacttcaacttcgacgaccccaacctgatcatcctgcctctggcctttggcaagagacagggcagagaattcatctggaacgacctgctgtccctggaaaccggcagcctgaagctggccaacggaagagtgatcgagaagacactgtacaacagaagaacccggcaggatgagcctgccctgttcgtggccctgaccttcgagcggcgggaggtcctggactcctccaatatcaaaccaatgaacctgatcggcgtggcaagaggcgaaaacatccccgccgtgatcgccctgaccgaccccgagggctgcccactgagccggtttaaggatagcctgggaaacccaacccacatcctgagaatcggcgagagctataaggagaagcagcggaccatccaggccaagaaggaggtggagcagcggagagccggcggctacagccggaagtacgccagcaaagccaagaatctggcagacgatatggtgagaaacaccgctagagatctgctgtactacgccgtgacccaggatgccatgctgatcttcgccaacctgagccggggcttcggccggcagggcaagcggaccttcatggccgagagacagtacacacggatggaggactggctgaccgccaagctggcctacgagggcctgagcaagacctacctgtccaagacactggcccagtacacctccaagacatgcagcaactgtgggtttaccatcaccagcgccgactacgacagggtgctggagaagctgaagaagacagcaacaggctggatgaccacaattaacggcaaggagctgaaggtggagggccagattacctactacaacagatacaagagacagaacgtagtcaaggacctgtccgtcgagctggatagactgagcgaagaatctgtgaacaacgacatctcctcctggacaaagggcagaagcggagaagctctgagcctcctgaagaaaagattctcccatagacccgtgcaggagaagttcgtgtgcctgaactgcggcttcgagacacacgcagccgagcaagccgccctgaacatcgccagatcctggctgttcctgcggagccaggagtacaagaaataccagacaaacaagacaaccggcaacaccgataagagagccttcgtcgagacctggcagtccttttaccggaagaagcttaaggaggtgtggaaacctgccgtgcggtctggcggatctggcggaggctccaccagccccaagaaaaagagaaaagtctaagctgccttctgcggggcttgccttctggccatgcccttcttctctcccttgcacctgtacctcttggtctttgaataaagcctgagtaggaaggctagcaaaaaaaaaaaaaaaaaaaaaaaaaaaaaaaaaaaaaaaaaaaaaaaaaaaaaaaaaaaaaaaaaaaaaaaaaaaaaaaa

SEQ ID NO: 9107 - RNA, 8787 nt, synthetic construct
  source 1..8787: mol_type = other RNA
aggaaataagagagaaaagaagagtaagaagaaatataagagccaccatggcccctaagaagaagcgtaaagtgagccggatgaaccacgaccaggagttcgacccccctaaggtgtaccctcccgtccccgccgagaagagaaagcccatccgggtcctgagcctgttcgatggcatcgccaccggtctgctggtgctgaaggacctgggcatccaggtggataggtacattgcctccgaggtgtgcgaggactccatcaccgtgggaatggtgcgtcatcagggcaagatcatgtacgtgggcgacgtgcggagcgtgacacagaagcatatccaggagtggggccctttcgacctggtgatcggcggcagcccttgcaatgacctgagcatcgtgaacccagcccggaagggcctgtacgagggaaccggcagactgttcttcgagttttacagactgctgcacgacgcccggcctaaggaaggcgacgaccggcccttcttttggctgttcgagaatgtggtggccatgggagtcagcgacaagcgggatattagccggttcctggagagcaaccccgtgatgatcgatgccaaggaagtgagcgccgcccaccgggccagatacttctggggcaatctgcctggcatgaacagacccctggccagcaccgtgaacgacaagctggagctgcaggagtgcctggagcacggccggatcgccaagttcagcaaggtgagaaccatcaccacccgaagcaacagcatcaaacaaggcaaggaccagcactttcctgtgttcatgaacgagaaggaggacatcctgtggtgtaccgagatggagagagtgttcgggttcccagtccactacacagatgtcagcaacatgtctagactggccagacagagactgctgggaagaagctggtccgtccctgtgatcagacacctgttcgcccctctgaaggagtacttcgcctgcgtgagcagcggcaacagcaacgccaacagccggggccccagcttctctagcggcctggtgccactgtccctgagagggagccacatgggccccatggagatctacaaaaccgtgagcgcctggaagcggcagcctgtgcgcgtgctgagcctgtttcggaatatcgataaagtcctgaaaagcctgggattcctggagagcggctctggctccggcggtggcaccctgaagtacgtggaggatgtgacaaacgtggtcagacgggatgtggagaagtggggccccttcgatctggtgtacggcagcacccaacccctgggcagctcttgtgaccggtgccctggctggtacatgtttcagttccaccggatcctgcagtacgccctgccgagacaggagtcccagcggccattcttttggattttcatggacaacttgctgctgaccgaggatgaccaggaaactaccactcggttcctgcagaccgaagccgtgaccctgcaggacgtgagaggccgggactaccagaacgccatgcgggtgtggtccaacatccctggactgaaaagcaagcacgcacctctgacccctaaagaagaggagtacctgcaggcccaggtgcggagcagaagcaagctggacgcccctaaggtggatctgctggtgaagaattgcctcctgcccctgagagagtacttcaagtatttcagccagaatagtctgcccctgggaggcagcggcggcggccaggccgaggtgaccttcgaggacgtggccgtgctgttcagcagggaggagtggggcaggctgggccccgcccagaggggcctgtacagggacgtgatgctggagacctacaggaacctggtgagcctgggcgccggccccgccggccccaagcccggcgtgatcacccagctggagaggggcgacgagccctgggtgctggacacccagggcgccaagggcaaggagaggctgagggtgagcggcggcccaagcagcggcgcccctcctcccagcggcggcaggcggcccaagcagcggcgcccctcctcccagcggcggcagcccagccggctccccaacctctaccgaggagggcacctctgagtccgccacccccgagagcggccctggcacctccaccgagcccagcgagggcagcgcacccggcagccctgccggcagccccacctccacagaggagggaaccagcaccgagcccagcgaaggcagcgccccaggcaccagcaccgagcctagtgagcaggagattaaacggatcaacaagatcagaagaagacttgtgaaagacagcaacaccaagaaggccggcaagacaggccccatgaaaaccctgctggttagagtgatgacacccgatctgagagagcggctggaaaacctgagaaagaagcctgaaaatatcccccagcccatcagcaatacatctagagccaacctgaataagctgctgaccgattacaccgaaatgaagaaggcgatcctgcatgtgtactgggaagagttccagaaggaccctgtgggcctgatgagccgggtggcccagcctgccagcaagaagatcgatcagaacaagctgaaacctgagatggacgagaagggcaacctgaccaccgccggctttgcctgctctcagtgtggccagcccctgttcgtgtacaagctggagcaggtgtctgagaagggcaaggcttacaccaactacttcggacggtgcaatgtggccgagcacgaaaagctgatcctgctggcccagctgaagcccgagaaggatagcgacgaagccgtgacatatagcctgggaaagtttgggcagagggccctggatttctacagcattcatgtgaccaaggagtccacccaccccgtgaagcccctggcccagatcgccggaaacagatacgcctccggacctgtgggaaaggccctgagcgacgcatgtatgggcacaatcgcctccttcctgtctaagtaccaggacatcatcatcgaacaccagaaggtggtgaagggcaaccagaagagactggagagcctgcgggagctggccggcaaggaaaacctggaataccctagcgtgaccctgccacctcagcctcacaccaaggagggcgttgatgcctacaacgaagtgatcgcccgggtgcgaatgtgggtgaacctgaacctgtggcagaagctgaagctaagcagagatgatgccaagcctctgctgagactgaagggattcccttcctttcctctggtcgagagacaggccaacgaagtggactggtgggacatggtgtgtaacgtgaagaagctgatcaacgagaaaaaggaggatggcaaggtgttttggcagaatctggctggctacaagagacaggaagccctgagaccatacctgagcagcgaggaagatcggaagaagggaaagaaattcgctcggtaccagctgggcgacctgctgctgcacctggaaaagaagcacggcgaggactggggaaaggtgtacgacgaggcctgggagcggattgacaagaaagtggaaggcctgagcaagcacatcaagctggaagaggaacggagaagcgaggacgcccagagcaaggccgccctgaccgactggctgcgggctaaggccagcttcgtgatcgagggcctgaaggaggccgacaaggacgagttctgcagatgcgagctgaagctgcagaagtggtacggggacctgcggggaaagcccttcgccatcgaagccgagaacagcatcctggacatcagcggcttcagcaagcagtacaactgtgccttcatctggcagaaggacggcgtgaagaagctgaacctgtacctgatcatcaactacttcaagggcggcaagctgcggttcaagaagatcaaacctgaagccttcgaagccaacagattctacaccgtgatcaacaaaaagagcggcgagatcgtgcccatggaggtgaacttcaacttcgacgaccccaacctgatcatcctgcctctggcctttggcaagagacagggcagagaattcatctggaacgacctgctgtccctggaaaccggcagcctgaagctggccaacggaagagtgatcgagaagacactgtacaacagaagaacccggcaggatgagcctgccctgttcgtggccctgaccttcgagcggcgggaggtcctggactcctccaatatcaaaccaatgaacctgatcggcgtggcaagaggcgaaaacatccccgccgtgatcgccctgaccgaccccgagggctgcccactgagccggtttaaggatagcctgggaaacccaacccacatcctgagaatcggcgagagctataaggagaagcagcggaccatccaggccaagaaggaggtggagcagcggagagccggcggctacagccggaagtacgccagcaaagccaagaatctggcagacgatatggtgagaaacaccgctagagatctgctgtactacgccgtgacccaggatgccatgctgatcttcgccaacctgagccggggcttcggccggcagggcaagcggaccttcatggccgagagacagtacacacggatggaggactggctgaccgccaagctggcctacgagggcctgagcaagacctacctgtccaagacactggcccagtacacctccaagacatgcagcaactgtgggtttaccatcaccagcgccgactacgacagggtgctggagaagctgaagaagacagcaacaggctggatgaccacaattaacggcaaggagctgaaggtggagggccagattacctactacaacagatacaagagacagaacgtagtcaaggacctgtccgtcgagctggatagactgagcgaagaatctgtgaacaacgacatctcctcctggacaaagggcagaagcggagaagctctgagcctcctgaagaaaagattctcccatagacccgtgcaggagaagttcgtgtgcctgaactgcggcttcgagacacacgcagccgagcaagccgccctgaacatcgccagatcctggctgttcctgcggagccaggagtacaagaaataccagacaaacaagacaaccggcaacaccgataagagagccttcgtcgagacctggcagtccttttaccggaagaagcttaaggaggtgtggaaacctgccgtgcggtctggcggatctggcggaggctccaccagccccaagaaaaagagaaaagtctaagctgccttctgcggggcttgccttctggccatgcccttcttctctcccttgcacctgtacctcttggtctttgaataaagcctgagtaggaaggctagcaaaaaaaaaaaaaaaaaaaaaaaaaaaaaaaaaaaaaaaaaaaaaaaaaaaaaaaaaaaaaaaaaaaaaaaaaaaaaaaagcccagccggctccccaacctctaccgaggagggcacctctgagtccgccacccccgagagcggccctggcacctccaccgagcccagcgagggcagcgcacccggcagccctgccggcagccccacctccacagaggagggaaccagcaccgagcccagcgaaggcagcgccccaggcaccagcaccgagcctagtgagcaggagattaaacggatcaacaagatcagaagaagacttgtgaaagacagcaacaccaagaaggccggcaagacaggccccatgaaaaccctgctggttagagtgatgacacccgatctgagagagcggctggaaaacctgagaaagaagcctgaaaatatcccccagcccatcagcaatacatctagagccaacctgaataagctgctgaccgattacaccgaaatgaagaaggcgatcctgcatgtgtactgggaagagttccagaaggaccctgtgggcctgatgagccgggtggcccagcctgccagcaagaagatcgatcagaacaagctgaaacctgagatggacgagaagggcaacctgaccaccgccggctttgcctgctctcagtgtggccagcccctgttcgtgtacaagctggagcaggtgtctgagaagggcaaggcttacaccaactacttcggacggtgcaatgtggccgagcacgaaaagctgatcctgctggcccagctgaagcccgagaaggatagcgacgaagccgtgacatatagcctgggaaagtttgggcagagggccctggatttctacagcattcatgtgaccaaggagtccacccaccccgtgaagcccctggcccagatcgccggaaacagatacgcctccggacctgtgggaaaggccctgagcgacgcatgtatgggcacaatcgcctccttcctgtctaagtaccaggacatcatcatcgaacaccagaaggtggtgaagggcaaccagaagagactggagagcctgcgggagctggccggcaaggaaaacctggaataccctagcgtgaccctgccacctcagcctcacaccaaggagggcgttgatgcctacaacgaagtgatcgcccgggtgcgaatgtgggtgaacctgaacctgtggcagaagctgaagctaagcagagatgatgccaagcctctgctgagactgaagggattcccttcctttcctctggtcgagagacaggccaacgaagtggactggtgggacatggtgtgtaacgtgaagaagctgatcaacgagaaaaaggaggatggcaaggtgttttggcagaatctggctggctacaagagacaggaagccctgagaccatacctgagcagcgaggaagatcggaagaagggaaagaaattcgctcggtaccagctgggcgacctgctgctgcacctggaaaagaagcacggcgaggactggggaaaggtgtacgacgaggcctgggagcggattgacaagaaagtggaaggcctgagcaagcacatcaagctggaagaggaacggagaagcgaggacgcccagagcaaggccgccctgaccgactggctgcgggctaaggccagcttcgtgatcgagggcctgaaggaggccgacaaggacgagttctgcagatgcgagctgaagctgcagaagtggtacggggacctgcggggaaagcccttcgccatcgaagccgagaacagcatcctggacatcagcggcttcagcaagcagtacaactgtgccttcatctggcagaaggacggcgtgaagaagctgaacctgtacctgatcatcaactacttcaagggcggcaagctgcggttcaagaagatcaaacctgaagccttcgaagccaacagattctacaccgtgatcaacaaaaagagcggcgagatcgtgcccatggaggtgaacttcaacttcgacgaccccaacctgatcatcctgcctctggcctttggcaagagacagggcagagaattcatctggaacgacctgctgtccctggaaaccggcagcctgaagctggccaacggaagagtgatcgagaagacactgtacaacagaagaacccggcaggatgagcctgccctgttcgtggccctgaccttcgagcggcgggaggtcctggactcctccaatatcaaaccaatgaacctgatcggcgtggcaagaggcgaaaacatccccgccgtgatcgccctgaccgaccccgagggctgcccactgagccggtttaaggatagcctgggaaacccaacccacatcctgagaatcggcgagagctataaggagaagcagcggaccatccaggccaagaaggaggtggagcagcggagagccggcggctacagccggaagtacgccagcaaagccaagaatctggcagacgatatggtgagaaacaccgctagagatctgctgtactacgccgtgacccaggatgccatgctgatcttcgccaacctgagccggggcttcggccggcagggcaagcggaccttcatggccgagagacagtacacacggatggaggactggctgaccgccaagctggcctacgagggcctgagcaagacctacctgtccaagacactggcccagtacacctccaagacatgcagcaactgtgggtttaccatcaccagcgccgactacgacagggtgctggagaagctgaagaagacagcaacaggctggatgaccacaattaacggcaaggagctgaaggtggagggccagattacctactacaacagatacaagagacagaacgtagtcaaggacctgtccgtcgagctggatagactgagcgaagaatctgtgaacaacgacatctcctcctggacaaagggcagaagcggagaagctctgagcctcctgaagaaaagattctcccatagacccgtgcaggagaagttcgtgtgcctgaactgcggcttcgagacacacgcagccgagcaagccgccctgaacatcgccagatcctggctgttcctgcggagccaggagtacaagaaataccagacaaacaagacaaccggcaacaccgataagagagccttcgtcgagacctggcagtccttttaccggaagaagcttaaggaggtgtggaaacctgccgtgcggtctggcggatctggcggaggctccaccagccccaagaaaaagagaaaagtctaagctgccttctgcggggcttgccttctggccatgcccttcttctctcccttgcacctgtacctcttggtctttgaataaagcctgagtaggaaggctagcaaaaaaaaaaaaaaaaaaaaaaaaaaaaaaaaaaaaaaaaaaaaaaaaaaaaaaaaaaaaaaaaaaaaaaaaaaaaaaaa

SEQ ID NO: 9108 - RNA, 8787 nt, synthetic construct
  source 1..8787: mol_type = other RNA
aggaaataagagagaaaagaagagtaagaagaaatataagagccaccatggcccctaagaagaagcgtaaagtgagccggatgaaccacgaccaggagttcgacccccctaaggtgtaccctcccgtccccgccgagaagagaaagcccatccgggtcctgagcctgttcgatggcatcgccaccggtctgctggtgctgaaggacctgggcatccaggtggataggtacattgcctccgaggtgtgcgaggactccatcaccgtgggaatggtgcgtcatcagggcaagatcatgtacgtgggcgacgtgcggagcgtgacacagaagcatatccaggagtggggccctttcgacctggtgatcggcggcagcccttgcaatgacctgagcatcgtgaacccagcccggaagggcctgtacgagggaaccggcagactgttcttcgagttttacagactgctgcacgacgcccggcctaaggaaggcgacgaccggcccttcttttggctgttcgagaatgtggtggccatgggagtcagcgacaagcgggatattagccggttcctggagagcaaccccgtgatgatcgatgccaaggaagtgagcgccgcccaccgggccagatacttctggggcaatctgcctggcatgaacagacccctggccagcaccgtgaacgacaagctggagctgcaggagtgcctggagcacggccggatcgccaagttcagcaaggtgagaaccatcaccacccgaagcaacagcatcaaacaaggcaaggaccagcactttcctgtgttcatgaacgagaaggaggacatcctgtggtgtaccgagatggagagagtgttcgggttcccagtccactacacagatgtcagcaacatgtctagactggccagacagagactgctgggaagaagctggtccgtccctgtgatcagacacctgttcgcccctctgaaggagtacttcgcctgcgtgagcagcggcaacagcaacgccaacagccggggccccagcttctctagcggcctggtgccactgtccctgagagggagccacatgggccccatggagatctacaaaaccgtgagcgcctggaagcggcagcctgtgcgcgtgctgagcctgtttcggaatatcgataaagtcctgaaaagcctgggattcctggagagcggctctggctccggcggtggcaccctgaagtacgtggaggatgtgacaaacgtggtcagacgggatgtggagaagtggggccccttcgatctggtgtacggcagcacccaacccctgggcagctcttgtgaccggtgccctggctggtacatgtttcagttccaccggatcctgcagtacgccctgccgagacaggagtcccagcggccattcttttggattttcatggacaacttgctgctgaccgaggatgaccaggaaactaccactcggttcctgcagaccgaagccgtgaccctgcaggacgtgagaggccgggactaccagaacgccatgcgggtgtggtccaacatccctggactgaaaagcaagcacgcacctctgacccctaaagaagaggagtacctgcaggcccaggtgcggagcagaagcaagctggacgcccctaaggtggatctgctggtgaagaattgcctcctgcccctgagagagtacttcaagtatttcagccagaatagtctgcccctgggaggcagcggcggcggcaagcccggcgccctgagcttcgccgacgtggccgtgtacttcagcagcgaggagtggggctgcctgaggcccgcccagagggccctgtacagggacgtgatgagggagacctacggccacctgggcgccctgggcttcgccggccccaagcccgccctgatcagctggatggagaggaagaaggaggcctggagccccgaggccgaggaccccgaggacagggccagcaggatcagggccaagggcggcccaagcagcggcgcccctcctcccagcggcggcaggcggcccaagcagcggcgcccctcctcccagcggcggcagcccagccggctccccaacctctaccgaggagggcacctctgagtccgccacccccgagagcggccctggcacctccaccgagcccagcgagggcagcgcacccggcagccctgccggcagccccacctccacagaggagggaaccagcaccgagcccagcgaaggcagcgccccaggcaccagcaccgagcctagtgagcaggagattaaacggatcaacaagatcagaagaagacttgtgaaagacagcaacaccaagaaggccggcaagacaggccccatgaaaaccctgctggttagagtgatgacacccgatctgagagagcggctggaaaacctgagaaagaagcctgaaaatatcccccagcccatcagcaatacatctagagccaacctgaataagctgctgaccgattacaccgaaatgaagaaggcgatcctgcatgtgtactgggaagagttccagaaggaccctgtgggcctgatgagccgggtggcccagcctgccagcaagaagatcgatcagaacaagctgaaacctgagatggacgagaagggcaacctgaccaccgccggctttgcctgctctcagtgtggccagcccctgttcgtgtacaagctggagcaggtgtctgagaagggcaaggcttacaccaactacttcggacggtgcaatgtggccgagcacgaaaagctgatcctgctggcccagctgaagcccgagaaggatagcgacgaagccgtgacatatagcctgggaaagtttgggcagagggccctggatttctacagcattcatgtgaccaaggagtccacccaccccgtgaagcccctggcccagatcgccggaaacagatacgcctccggacctgtgggaaaggccctgagcgacgcatgtatgggcacaatcgcctccttcctgtctaagtaccaggacatcatcatcgaacaccagaaggtggtgaagggcaaccagaagagactggagagcctgcgggagctggccggcaaggaaaacctggaataccctagcgtgaccctgccacctcagcctcacaccaaggagggcgttgatgcctacaacgaagtgatcgcccgggtgcgaatgtgggtgaacctgaacctgtggcagaagctgaagctaagcagagatgatgccaagcctctgctgagactgaagggattcccttcctttcctctggtcgagagacaggccaacgaagtggactggtgggacatggtgtgtaacgtgaagaagctgatcaacgagaaaaaggaggatggcaaggtgttttggcagaatctggctggctacaagagacaggaagccctgagaccatacctgagcagcgaggaagatcggaagaagggaaagaaattcgctcggtaccagctgggcgacctgctgctgcacctggaaaagaagcacggcgaggactggggaaaggtgtacgacgaggcctgggagcggattgacaagaaagtggaaggcctgagcaagcacatcaagctggaagaggaacggagaagcgaggacgcccagagcaaggccgccctgaccgactggctgcgggctaaggccagcttcgtgatcgagggcctgaaggaggccgacaaggacgagttctgcagatgcgagctgaagctgcagaagtggtacggggacctgcggggaaagcccttcgccatcgaagccgagaacagcatcctggacatcagcggcttcagcaagcagtacaactgtgccttcatctggcagaaggacggcgtgaagaagctgaacctgtacctgatcatcaactacttcaagggcggcaagctgcggttcaagaagatcaaacctgaagccttcgaagccaacagattctacaccgtgatcaacaaaaagagcggcgagatcgtgcccatggaggtgaacttcaacttcgacgaccccaacctgatcatcctgcctctggcctttggcaagagacagggcagagaattcatctggaacgacctgctgtccctggaaaccggcagcctgaagctggccaacggaagagtgatcgagaagacactgtacaacagaagaacccggcaggatgagcctgccctgttcgtggccctgaccttcgagcggcgggaggtcctggactcctccaatatcaaaccaatgaacctgatcggcgtggcaagaggcgaaaacatccccgccgtgatcgccctgaccgaccccgagggctgcccactgagccggtttaaggatagcctgggaaacccaacccacatcctgagaatcggcgagagctataaggagaagcagcggaccatccaggccaagaaggaggtggagcagcggagagccggcggctacagccggaagtacgccagcaaagccaagaatctggcagacgatatggtgagaaacaccgctagagatctgctgtactacgccgtgacccaggatgccatgctgatcttcgccaacctgagccggggcttcggccggcagggcaagcggaccttcatggccgagagacagtacacacggatggaggactggctgaccgccaagctggcctacgagggcctgagcaagacctacctgtccaagacactggcccagtacacctccaagacatgcagcaactgtgggtttaccatcaccagcgccgactacgacagggtgctggagaagctgaagaagacagcaacaggctggatgaccacaattaacggcaaggagctgaaggtggagggccagattacctactacaacagatacaagagacagaacgtagtcaaggacctgtccgtcgagctggatagactgagcgaagaatctgtgaacaacgacatctcctcctggacaaagggcagaagcggagaagctctgagcctcctgaagaaaagattctcccatagacccgtgcaggagaagttcgtgtgcctgaactgcggcttcgagacacacgcagccgagcaagccgccctgaacatcgccagatcctggctgttcctgcggagccaggagtacaagaaataccagacaaacaagacaaccggcaacaccgataagagagccttcgtcgagacctggcagtccttttaccggaagaagcttaaggaggtgtggaaacctgccgtgcggtctggcggatctggcggaggctccaccagccccaagaaaaagagaaaagtctaagctgccttctgcggggcttgccttctggccatgcccttcttctctcccttgcacctgtacctcttggtctttgaataaagcctgagtaggaaggctagcaaaaaaaaaaaaaaaaaaaaaaaaaaaaaaaaaaaaaaaaaaaaaaaaaaaaaaaaaaaaaaaaaaaaaaaaaaaaaaaagcccagccggctccccaacctctaccgaggagggcacctctgagtccgccacccccgagagcggccctggcacctccaccgagcccagcgagggcagcgcacccggcagccctgccggcagccccacctccacagaggagggaaccagcaccgagcccagcgaaggcagcgccccaggcaccagcaccgagcctagtgagcaggagattaaacggatcaacaagatcagaagaagacttgtgaaagacagcaacaccaagaaggccggcaagacaggccccatgaaaaccctgctggttagagtgatgacacccgatctgagagagcggctggaaaacctgagaaagaagcctgaaaatatcccccagcccatcagcaatacatctagagccaacctgaataagctgctgaccgattacaccgaaatgaagaaggcgatcctgcatgtgtactgggaagagttccagaaggaccctgtgggcctgatgagccgggtggcccagcctgccagcaagaagatcgatcagaacaagctgaaacctgagatggacgagaagggcaacctgaccaccgccggctttgcctgctctcagtgtggccagcccctgttcgtgtacaagctggagcaggtgtctgagaagggcaaggcttacaccaactacttcggacggtgcaatgtggccgagcacgaaaagctgatcctgctggcccagctgaagcccgagaaggatagcgacgaagccgtgacatatagcctgggaaagtttgggcagagggccctggatttctacagcattcatgtgaccaaggagtccacccaccccgtgaagcccctggcccagatcgccggaaacagatacgcctccggacctgtgggaaaggccctgagcgacgcatgtatgggcacaatcgcctccttcctgtctaagtaccaggacatcatcatcgaacaccagaaggtggtgaagggcaaccagaagagactggagagcctgcgggagctggccggcaaggaaaacctggaataccctagcgtgaccctgccacctcagcctcacaccaaggagggcgttgatgcctacaacgaagtgatcgcccgggtgcgaatgtgggtgaacctgaacctgtggcagaagctgaagctaagcagagatgatgccaagcctctgctgagactgaagggattcccttcctttcctctggtcgagagacaggccaacgaagtggactggtgggacatggtgtgtaacgtgaagaagctgatcaacgagaaaaaggaggatggcaaggtgttttggcagaatctggctggctacaagagacaggaagccctgagaccatacctgagcagcgaggaagatcggaagaagggaaagaaattcgctcggtaccagctgggcgacctgctgctgcacctggaaaagaagcacggcgaggactggggaaaggtgtacgacgaggcctgggagcggattgacaagaaagtggaaggcctgagcaagcacatcaagctggaagaggaacggagaagcgaggacgcccagagcaaggccgccctgaccgactggctgcgggctaaggccagcttcgtgatcgagggcctgaaggaggccgacaaggacgagttctgcagatgcgagctgaagctgcagaagtggtacggggacctgcggggaaagcccttcgccatcgaagccgagaacagcatcctggacatcagcggcttcagcaagcagtacaactgtgccttcatctggcagaaggacggcgtgaagaagctgaacctgtacctgatcatcaactacttcaagggcggcaagctgcggttcaagaagatcaaacctgaagccttcgaagccaacagattctacaccgtgatcaacaaaaagagcggcgagatcgtgcccatggaggtgaacttcaacttcgacgaccccaacctgatcatcctgcctctggcctttggcaagagacagggcagagaattcatctggaacgacctgctgtccctggaaaccggcagcctgaagctggccaacggaagagtgatcgagaagacactgtacaacagaagaacccggcaggatgagcctgccctgttcgtggccctgaccttcgagcggcgggaggtcctggactcctccaatatcaaaccaatgaacctgatcggcgtggcaagaggcgaaaacatccccgccgtgatcgccctgaccgaccccgagggctgcccactgagccggtttaaggatagcctgggaaacccaacccacatcctgagaatcggcgagagctataaggagaagcagcggaccatccaggccaagaaggaggtggagcagcggagagccggcggctacagccggaagtacgccagcaaagccaagaatctggcagacgatatggtgagaaacaccgctagagatctgctgtactacgccgtgacccaggatgccatgctgatcttcgccaacctgagccggggcttcggccggcagggcaagcggaccttcatggccgagagacagtacacacggatggaggactggctgaccgccaagctggcctacgagggcctgagcaagacctacctgtccaagacactggcccagtacacctccaagacatgcagcaactgtgggtttaccatcaccagcgccgactacgacagggtgctggagaagctgaagaagacagcaacaggctggatgaccacaattaacggcaaggagctgaaggtggagggccagattacctactacaacagatacaagagacagaacgtagtcaaggacctgtccgtcgagctggatagactgagcgaagaatctgtgaacaacgacatctcctcctggacaaagggcagaagcggagaagctctgagcctcctgaagaaaagattctcccatagacccgtgcaggagaagttcgtgtgcctgaactgcggcttcgagacacacgcagccgagcaagccgccctgaacatcgccagatcctggctgttcctgcggagccaggagtacaagaaataccagacaaacaagacaaccggcaacaccgataagagagccttcgtcgagacctggcagtccttttaccggaagaagcttaaggaggtgtggaaacctgccgtgcggtctggcggatctggcggaggctccaccagccccaagaaaaagagaaaagtctaagctgccttctgcggggcttgccttctggccatgcccttcttctctcccttgcacctgtacctcttggtctttgaataaagcctgagtaggaaggctagcaaaaaaaaaaaaaaaaaaaaaaaaaaaaaaaaaaaaaaaaaaaaaaaaaaaaaaaaaaaaaaaaaaaaaaaaaaaaaaaa

SEQ ID NO: 9109 - RNA, 8787 nt, synthetic construct
  source 1..8787: mol_type = other RNA
aggaaataagagagaaaagaagagtaagaagaaatataagagccaccatggcccctaagaagaagcgtaaagtgagccggatgaaccacgaccaggagttcgacccccctaaggtgtaccctcccgtccccgccgagaagagaaagcccatccgggtcctgagcctgttcgatggcatcgccaccggtctgctggtgctgaaggacctgggcatccaggtggataggtacattgcctccgaggtgtgcgaggactccatcaccgtgggaatggtgcgtcatcagggcaagatcatgtacgtgggcgacgtgcggagcgtgacacagaagcatatccaggagtggggccctttcgacctggtgatcggcggcagcccttgcaatgacctgagcatcgtgaacccagcccggaagggcctgtacgagggaaccggcagactgttcttcgagttttacagactgctgcacgacgcccggcctaaggaaggcgacgaccggcccttcttttggctgttcgagaatgtggtggccatgggagtcagcgacaagcgggatattagccggttcctggagagcaaccccgtgatgatcgatgccaaggaagtgagcgccgcccaccgggccagatacttctggggcaatctgcctggcatgaacagacccctggccagcaccgtgaacgacaagctggagctgcaggagtgcctggagcacggccggatcgccaagttcagcaaggtgagaaccatcaccacccgaagcaacagcatcaaacaaggcaaggaccagcactttcctgtgttcatgaacgagaaggaggacatcctgtggtgtaccgagatggagagagtgttcgggttcccagtccactacacagatgtcagcaacatgtctagactggccagacagagactgctgggaagaagctggtccgtccctgtgatcagacacctgttcgcccctctgaaggagtacttcgcctgcgtgagcagcggcaacagcaacgccaacagccggggccccagcttctctagcggcctggtgccactgtccctgagagggagccacatgggccccatggagatctacaaaaccgtgagcgcctggaagcggcagcctgtgcgcgtgctgagcctgtttcggaatatcgataaagtcctgaaaagcctgggattcctggagagcggctctggctccggcggtggcaccctgaagtacgtggaggatgtgacaaacgtggtcagacgggatgtggagaagtggggccccttcgatctggtgtacggcagcacccaacccctgggcagctcttgtgaccggtgccctggctggtacatgtttcagttccaccggatcctgcagtacgccctgccgagacaggagtcccagcggccattcttttggattttcatggacaacttgctgctgaccgaggatgaccaggaaactaccactcggttcctgcagaccgaagccgtgaccctgcaggacgtgagaggccgggactaccagaacgccatgcgggtgtggtccaacatccctggactgaaaagcaagcacgcacctctgacccctaaagaagaggagtacctgcaggcccaggtgcggagcagaagcaagctggacgcccctaaggtggatctgctggtgaagaattgcctcctgcccctgagagagtacttcaagtatttcagccagaatagtctgcccctgggaggcagcggcggcggcttccaggagagcgtgaccttcgaggacgtggccgtgtacttcacccagagccagtgggccagcctgggccccctgcagagggccctgtacagggaggtgatgctggagaactacgccaacgtggccagcctggccttccccttccccaagcccgtgctgatcagccagctggagagggaggaggcccccctgggccccgacccctgggagaccgaggtgctgagggacatctgccccggcggcggcggcccaagcagcggcgcccctcctcccagcggcggcaggcggcccaagcagcggcgcccctcctcccagcggcggcagcccagccggctccccaacctctaccgaggagggcacctctgagtccgccacccccgagagcggccctggcacctccaccgagcccagcgagggcagcgcacccggcagccctgccggcagccccacctccacagaggagggaaccagcaccgagcccagcgaaggcagcgccccaggcaccagcaccgagcctagtgagcaggagattaaacggatcaacaagatcagaagaagacttgtgaaagacagcaacaccaagaaggccggcaagacaggccccatgaaaaccctgctggttagagtgatgacacccgatctgagagagcggctggaaaacctgagaaagaagcctgaaaatatcccccagcccatcagcaatacatctagagccaacctgaataagctgctgaccgattacaccgaaatgaagaaggcgatcctgcatgtgtactgggaagagttccagaaggaccctgtgggcctgatgagccgggtggcccagcctgccagcaagaagatcgatcagaacaagctgaaacctgagatggacgagaagggcaacctgaccaccgccggctttgcctgctctcagtgtggccagcccctgttcgtgtacaagctggagcaggtgtctgagaagggcaaggcttacaccaactacttcggacggtgcaatgtggccgagcacgaaaagctgatcctgctggcccagctgaagcccgagaaggatagcgacgaagccgtgacatatagcctgggaaagtttgggcagagggccctggatttctacagcattcatgtgaccaaggagtccacccaccccgtgaagcccctggcccagatcgccggaaacagatacgcctccggacctgtgggaaaggccctgagcgacgcatgtatgggcacaatcgcctccttcctgtctaagtaccaggacatcatcatcgaacaccagaaggtggtgaagggcaaccagaagagactggagagcctgcgggagctggccggcaaggaaaacctggaataccctagcgtgaccctgccacctcagcctcacaccaaggagggcgttgatgcctacaacgaagtgatcgcccgggtgcgaatgtgggtgaacctgaacctgtggcagaagctgaagctaagcagagatgatgccaagcctctgctgagactgaagggattcccttcctttcctctggtcgagagacaggccaacgaagtggactggtgggacatggtgtgtaacgtgaagaagctgatcaacgagaaaaaggaggatggcaaggtgttttggcagaatctggctggctacaagagacaggaagccctgagaccatacctgagcagcgaggaagatcggaagaagggaaagaaattcgctcggtaccagctgggcgacctgctgctgcacctggaaaagaagcacggcgaggactggggaaaggtgtacgacgaggcctgggagcggattgacaagaaagtggaaggcctgagcaagcacatcaagctggaagaggaacggagaagcgaggacgcccagagcaaggccgccctgaccgactggctgcgggctaaggccagcttcgtgatcgagggcctgaaggaggccgacaaggacgagttctgcagatgcgagctgaagctgcagaagtggtacggggacctgcggggaaagcccttcgccatcgaagccgagaacagcatcctggacatcagcggcttcagcaagcagtacaactgtgccttcatctggcagaaggacggcgtgaagaagctgaacctgtacctgatcatcaactacttcaagggcggcaagctgcggttcaagaagatcaaacctgaagccttcgaagccaacagattctacaccgtgatcaacaaaaagagcggcgagatcgtgcccatggaggtgaacttcaacttcgacgaccccaacctgatcatcctgcctctggcctttggcaagagacagggcagagaattcatctggaacgacctgctgtccctggaaaccggcagcctgaagctggccaacggaagagtgatcgagaagacactgtacaacagaagaacccggcaggatgagcctgccctgttcgtggccctgaccttcgagcggcgggaggtcctggactcctccaatatcaaaccaatgaacctgatcggcgtggcaagaggcgaaaacatccccgccgtgatcgccctgaccgaccccgagggctgcccactgagccggtttaaggatagcctgggaaacccaacccacatcctgagaatcggcgagagctataaggagaagcagcggaccatccaggccaagaaggaggtggagcagcggagagccggcggctacagccggaagtacgccagcaaagccaagaatctggcagacgatatggtgagaaacaccgctagagatctgctgtactacgccgtgacccaggatgccatgctgatcttcgccaacctgagccggggcttcggccggcagggcaagcggaccttcatggccgagagacagtacacacggatggaggactggctgaccgccaagctggcctacgagggcctgagcaagacctacctgtccaagacactggcccagtacacctccaagacatgcagcaactgtgggtttaccatcaccagcgccgactacgacagggtgctggagaagctgaagaagacagcaacaggctggatgaccacaattaacggcaaggagctgaaggtggagggccagattacctactacaacagatacaagagacagaacgtagtcaaggacctgtccgtcgagctggatagactgagcgaagaatctgtgaacaacgacatctcctcctggacaaagggcagaagcggagaagctctgagcctcctgaagaaaagattctcccatagacccgtgcaggagaagttcgtgtgcctgaactgcggcttcgagacacacgcagccgagcaagccgccctgaacatcgccagatcctggctgttcctgcggagccaggagtacaagaaataccagacaaacaagacaaccggcaacaccgataagagagccttcgtcgagacctggcagtccttttaccggaagaagcttaaggaggtgtggaaacctgccgtgcggtctggcggatctggcggaggctccaccagccccaagaaaaagagaaaagtctaagctgccttctgcggggcttgccttctggccatgcccttcttctctcccttgcacctgtacctcttggtctttgaataaagcctgagtaggaaggctagcaaaaaaaaaaaaaaaaaaaaaaaaaaaaaaaaaaaaaaaaaaaaaaaaaaaaaaaaaaaaaaaaaaaaaaaaaaaaaaaagcccagccggctccccaacctctaccgaggagggcacctctgagtccgccacccccgagagcggccctggcacctccaccgagcccagcgagggcagcgcacccggcagccctgccggcagccccacctccacagaggagggaaccagcaccgagcccagcgaaggcagcgccccaggcaccagcaccgagcctagtgagcaggagattaaacggatcaacaagatcagaagaagacttgtgaaagacagcaacaccaagaaggccggcaagacaggccccatgaaaaccctgctggttagagtgatgacacccgatctgagagagcggctggaaaacctgagaaagaagcctgaaaatatcccccagcccatcagcaatacatctagagccaacctgaataagctgctgaccgattacaccgaaatgaagaaggcgatcctgcatgtgtactgggaagagttccagaaggaccctgtgggcctgatgagccgggtggcccagcctgccagcaagaagatcgatcagaacaagctgaaacctgagatggacgagaagggcaacctgaccaccgccggctttgcctgctctcagtgtggccagcccctgttcgtgtacaagctggagcaggtgtctgagaagggcaaggcttacaccaactacttcggacggtgcaatgtggccgagcacgaaaagctgatcctgctggcccagctgaagcccgagaaggatagcgacgaagccgtgacatatagcctgggaaagtttgggcagagggccctggatttctacagcattcatgtgaccaaggagtccacccaccccgtgaagcccctggcccagatcgccggaaacagatacgcctccggacctgtgggaaaggccctgagcgacgcatgtatgggcacaatcgcctccttcctgtctaagtaccaggacatcatcatcgaacaccagaaggtggtgaagggcaaccagaagagactggagagcctgcgggagctggccggcaaggaaaacctggaataccctagcgtgaccctgccacctcagcctcacaccaaggagggcgttgatgcctacaacgaagtgatcgcccgggtgcgaatgtgggtgaacctgaacctgtggcagaagctgaagctaagcagagatgatgccaagcctctgctgagactgaagggattcccttcctttcctctggtcgagagacaggccaacgaagtggactggtgggacatggtgtgtaacgtgaagaagctgatcaacgagaaaaaggaggatggcaaggtgttttggcagaatctggctggctacaagagacaggaagccctgagaccatacctgagcagcgaggaagatcggaagaagggaaagaaattcgctcggtaccagctgggcgacctgctgctgcacctggaaaagaagcacggcgaggactggggaaaggtgtacgacgaggcctgggagcggattgacaagaaagtggaaggcctgagcaagcacatcaagctggaagaggaacggagaagcgaggacgcccagagcaaggccgccctgaccgactggctgcgggctaaggccagcttcgtgatcgagggcctgaaggaggccgacaaggacgagttctgcagatgcgagctgaagctgcagaagtggtacggggacctgcggggaaagcccttcgccatcgaagccgagaacagcatcctggacatcagcggcttcagcaagcagtacaactgtgccttcatctggcagaaggacggcgtgaagaagctgaacctgtacctgatcatcaactacttcaagggcggcaagctgcggttcaagaagatcaaacctgaagccttcgaagccaacagattctacaccgtgatcaacaaaaagagcggcgagatcgtgcccatggaggtgaacttcaacttcgacgaccccaacctgatcatcctgcctctggcctttggcaagagacagggcagagaattcatctggaacgacctgctgtccctggaaaccggcagcctgaagctggccaacggaagagtgatcgagaagacactgtacaacagaagaacccggcaggatgagcctgccctgttcgtggccctgaccttcgagcggcgggaggtcctggactcctccaatatcaaaccaatgaacctgatcggcgtggcaagaggcgaaaacatccccgccgtgatcgccctgaccgaccccgagggctgcccactgagccggtttaaggatagcctgggaaacccaacccacatcctgagaatcggcgagagctataaggagaagcagcggaccatccaggccaagaaggaggtggagcagcggagagccggcggctacagccggaagtacgccagcaaagccaagaatctggcagacgatatggtgagaaacaccgctagagatctgctgtactacgccgtgacccaggatgccatgctgatcttcgccaacctgagccggggcttcggccggcagggcaagcggaccttcatggccgagagacagtacacacggatggaggactggctgaccgccaagctggcctacgagggcctgagcaagacctacctgtccaagacactggcccagtacacctccaagacatgcagcaactgtgggtttaccatcaccagcgccgactacgacagggtgctggagaagctgaagaagacagcaacaggctggatgaccacaattaacggcaaggagctgaaggtggagggccagattacctactacaacagatacaagagacagaacgtagtcaaggacctgtccgtcgagctggatagactgagcgaagaatctgtgaacaacgacatctcctcctggacaaagggcagaagcggagaagctctgagcctcctgaagaaaagattctcccatagacccgtgcaggagaagttcgtgtgcctgaactgcggcttcgagacacacgcagccgagcaagccgccctgaacatcgccagatcctggctgttcctgcggagccaggagtacaagaaataccagacaaacaagacaaccggcaacaccgataagagagccttcgtcgagacctggcagtccttttaccggaagaagcttaaggaggtgtggaaacctgccgtgcggtctggcggatctggcggaggctccaccagccccaagaaaaagagaaaagtctaagctgccttctgcggggcttgccttctggccatgcccttcttctctcccttgcacctgtacctcttggtctttgaataaagcctgagtaggaaggctagcaaaaaaaaaaaaaaaaaaaaaaaaaaaaaaaaaaaaaaaaaaaaaaaaaaaaaaaaaaaaaaaaaaaaaaaaaaaaaaaa

SEQ ID NO: 9110 - RNA, 8787 nt, synthetic construct
  source 1..8787: mol_type = other RNA
aggaaataagagagaaaagaagagtaagaagaaatataagagccaccatggcccctaagaagaagcgtaaagtgagccggatgaaccacgaccaggagttcgacccccctaaggtgtaccctcccgtccccgccgagaagagaaagcccatccgggtcctgagcctgttcgatggcatcgccaccggtctgctggtgctgaaggacctgggcatccaggtggataggtacattgcctccgaggtgtgcgaggactccatcaccgtgggaatggtgcgtcatcagggcaagatcatgtacgtgggcgacgtgcggagcgtgacacagaagcatatccaggagtggggccctttcgacctggtgatcggcggcagcccttgcaatgacctgagcatcgtgaacccagcccggaagggcctgtacgagggaaccggcagactgttcttcgagttttacagactgctgcacgacgcccggcctaaggaaggcgacgaccggcccttcttttggctgttcgagaatgtggtggccatgggagtcagcgacaagcgggatattagccggttcctggagagcaaccccgtgatgatcgatgccaaggaagtgagcgccgcccaccgggccagatacttctggggcaatctgcctggcatgaacagacccctggccagcaccgtgaacgacaagctggagctgcaggagtgcctggagcacggccggatcgccaagttcagcaaggtgagaaccatcaccacccgaagcaacagcatcaaacaaggcaaggaccagcactttcctgtgttcatgaacgagaaggaggacatcctgtggtgtaccgagatggagagagtgttcgggttcccagtccactacacagatgtcagcaacatgtctagactggccagacagagactgctgggaagaagctggtccgtccctgtgatcagacacctgttcgcccctctgaaggagtacttcgcctgcgtgagcagcggcaacagcaacgccaacagccggggccccagcttctctagcggcctggtgccactgtccctgagagggagccacatgggccccatggagatctacaaaaccgtgagcgcctggaagcggcagcctgtgcgcgtgctgagcctgtttcggaatatcgataaagtcctgaaaagcctgggattcctggagagcggctctggctccggcggtggcaccctgaagtacgtggaggatgtgacaaacgtggtcagacgggatgtggagaagtggggccccttcgatctggtgtacggcagcacccaacccctgggcagctcttgtgaccggtgccctggctggtacatgtttcagttccaccggatcctgcagtacgccctgccgagacaggagtcccagcggccattcttttggattttcatggacaacttgctgctgaccgaggatgaccaggaaactaccactcggttcctgcagaccgaagccgtgaccctgcaggacgtgagaggccgggactaccagaacgccatgcgggtgtggtccaacatccctggactgaaaagcaagcacgcacctctgacccctaaagaagaggagtacctgcaggcccaggtgcggagcagaagcaagctggacgcccctaaggtggatctgctggtgaagaattgcctcctgcccctgagagagtacttcaagtatttcagccagaatagtctgcccctgggaggcagcggcggcggcctgaacagcgccgtgacctacgacgacgtgaacgtgaacttcaccagggaggagtgggccctgctggacagcagccagaagagcctgtacaaggacgtgatgctggagacctacaggaacctgaccgccatcggctacaactgggagggccacaacatcgaggagcactgccagagcagcaggaggcacgccaggacccacaagaggacccacaccggcgagaagagctacgagtgcgaccagggcggcccaagcagcggcgcccctcctcccagcggcggcaggcggcccaagcagcggcgcccctcctcccagcggcggcagcccagccggctccccaacctctaccgaggagggcacctctgagtccgccacccccgagagcggccctggcacctccaccgagcccagcgagggcagcgcacccggcagccctgccggcagccccacctccacagaggagggaaccagcaccgagcccagcgaaggcagcgccccaggcaccagcaccgagcctagtgagcaggagattaaacggatcaacaagatcagaagaagacttgtgaaagacagcaacaccaagaaggccggcaagacaggccccatgaaaaccctgctggttagagtgatgacacccgatctgagagagcggctggaaaacctgagaaagaagcctgaaaatatcccccagcccatcagcaatacatctagagccaacctgaataagctgctgaccgattacaccgaaatgaagaaggcgatcctgcatgtgtactgggaagagttccagaaggaccctgtgggcctgatgagccgggtggcccagcctgccagcaagaagatcgatcagaacaagctgaaacctgagatggacgagaagggcaacctgaccaccgccggctttgcctgctctcagtgtggccagcccctgttcgtgtacaagctggagcaggtgtctgagaagggcaaggcttacaccaactacttcggacggtgcaatgtggccgagcacgaaaagctgatcctgctggcccagctgaagcccgagaaggatagcgacgaagccgtgacatatagcctgggaaagtttgggcagagggccctggatttctacagcattcatgtgaccaaggagtccacccaccccgtgaagcccctggcccagatcgccggaaacagatacgcctccggacctgtgggaaaggccctgagcgacgcatgtatgggcacaatcgcctccttcctgtctaagtaccaggacatcatcatcgaacaccagaaggtggtgaagggcaaccagaagagactggagagcctgcgggagctggccggcaaggaaaacctggaataccctagcgtgaccctgccacctcagcctcacaccaaggagggcgttgatgcctacaacgaagtgatcgcccgggtgcgaatgtgggtgaacctgaacctgtggcagaagctgaagctaagcagagatgatgccaagcctctgctgagactgaagggattcccttcctttcctctggtcgagagacaggccaacgaagtggactggtgggacatggtgtgtaacgtgaagaagctgatcaacgagaaaaaggaggatggcaaggtgttttggcagaatctggctggctacaagagacaggaagccctgagaccatacctgagcagcgaggaagatcggaagaagggaaagaaattcgctcggtaccagctgggcgacctgctgctgcacctggaaaagaagcacggcgaggactggggaaaggtgtacgacgaggcctgggagcggattgacaagaaagtggaaggcctgagcaagcacatcaagctggaagaggaacggagaagcgaggacgcccagagcaaggccgccctgaccgactggctgcgggctaaggccagcttcgtgatcgagggcctgaaggaggccgacaaggacgagttctgcagatgcgagctgaagctgcagaagtggtacggggacctgcggggaaagcccttcgccatcgaagccgagaacagcatcctggacatcagcggcttcagcaagcagtacaactgtgccttcatctggcagaaggacggcgtgaagaagctgaacctgtacctgatcatcaactacttcaagggcggcaagctgcggttcaagaagatcaaacctgaagccttcgaagccaacagattctacaccgtgatcaacaaaaagagcggcgagatcgtgcccatggaggtgaacttcaacttcgacgaccccaacctgatcatcctgcctctggcctttggcaagagacagggcagagaattcatctggaacgacctgctgtccctggaaaccggcagcctgaagctggccaacggaagagtgatcgagaagacactgtacaacagaagaacccggcaggatgagcctgccctgttcgtggccctgaccttcgagcggcgggaggtcctggactcctccaatatcaaaccaatgaacctgatcggcgtggcaagaggcgaaaacatccccgccgtgatcgccctgaccgaccccgagggctgcccactgagccggtttaaggatagcctgggaaacccaacccacatcctgagaatcggcgagagctataaggagaagcagcggaccatccaggccaagaaggaggtggagcagcggagagccggcggctacagccggaagtacgccagcaaagccaagaatctggcagacgatatggtgagaaacaccgctagagatctgctgtactacgccgtgacccaggatgccatgctgatcttcgccaacctgagccggggcttcggccggcagggcaagcggaccttcatggccgagagacagtacacacggatggaggactggctgaccgccaagctggcctacgagggcctgagcaagacctacctgtccaagacactggcccagtacacctccaagacatgcagcaactgtgggtttaccatcaccagcgccgactacgacagggtgctggagaagctgaagaagacagcaacaggctggatgaccacaattaacggcaaggagctgaaggtggagggccagattacctactacaacagatacaagagacagaacgtagtcaaggacctgtccgtcgagctggatagactgagcgaagaatctgtgaacaacgacatctcctcctggacaaagggcagaagcggagaagctctgagcctcctgaagaaaagattctcccatagacccgtgcaggagaagttcgtgtgcctgaactgcggcttcgagacacacgcagccgagcaagccgccctgaacatcgccagatcctggctgttcctgcggagccaggagtacaagaaataccagacaaacaagacaaccggcaacaccgataagagagccttcgtcgagacctggcagtccttttaccggaagaagcttaaggaggtgtggaaacctgccgtgcggtctggcggatctggcggaggctccaccagccccaagaaaaagagaaaagtctaagctgccttctgcggggcttgccttctggccatgcccttcttctctcccttgcacctgtacctcttggtctttgaataaagcctgagtaggaaggctagcaaaaaaaaaaaaaaaaaaaaaaaaaaaaaaaaaaaaaaaaaaaaaaaaaaaaaaaaaaaaaaaaaaaaaaaaaaaaaaaagcccagccggctccccaacctctaccgaggagggcacctctgagtccgccacccccgagagcggccctggcacctccaccgagcccagcgagggcagcgcacccggcagccctgccggcagccccacctccacagaggagggaaccagcaccgagcccagcgaaggcagcgccccaggcaccagcaccgagcctagtgagcaggagattaaacggatcaacaagatcagaagaagacttgtgaaagacagcaacaccaagaaggccggcaagacaggccccatgaaaaccctgctggttagagtgatgacacccgatctgagagagcggctggaaaacctgagaaagaagcctgaaaatatcccccagcccatcagcaatacatctagagccaacctgaataagctgctgaccgattacaccgaaatgaagaaggcgatcctgcatgtgtactgggaagagttccagaaggaccctgtgggcctgatgagccgggtggcccagcctgccagcaagaagatcgatcagaacaagctgaaacctgagatggacgagaagggcaacctgaccaccgccggctttgcctgctctcagtgtggccagcccctgttcgtgtacaagctggagcaggtgtctgagaagggcaaggcttacaccaactacttcggacggtgcaatgtggccgagcacgaaaagctgatcctgctggcccagctgaagcccgagaaggatagcgacgaagccgtgacatatagcctgggaaagtttgggcagagggccctggatttctacagcattcatgtgaccaaggagtccacccaccccgtgaagcccctggcccagatcgccggaaacagatacgcctccggacctgtgggaaaggccctgagcgacgcatgtatgggcacaatcgcctccttcctgtctaagtaccaggacatcatcatcgaacaccagaaggtggtgaagggcaaccagaagagactggagagcctgcgggagctggccggcaaggaaaacctggaataccctagcgtgaccctgccacctcagcctcacaccaaggagggcgttgatgcctacaacgaagtgatcgcccgggtgcgaatgtgggtgaacctgaacctgtggcagaagctgaagctaagcagagatgatgccaagcctctgctgagactgaagggattcccttcctttcctctggtcgagagacaggccaacgaagtggactggtgggacatggtgtgtaacgtgaagaagctgatcaacgagaaaaaggaggatggcaaggtgttttggcagaatctggctggctacaagagacaggaagccctgagaccatacctgagcagcgaggaagatcggaagaagggaaagaaattcgctcggtaccagctgggcgacctgctgctgcacctggaaaagaagcacggcgaggactggggaaaggtgtacgacgaggcctgggagcggattgacaagaaagtggaaggcctgagcaagcacatcaagctggaagaggaacggagaagcgaggacgcccagagcaaggccgccctgaccgactggctgcgggctaaggccagcttcgtgatcgagggcctgaaggaggccgacaaggacgagttctgcagatgcgagctgaagctgcagaagtggtacggggacctgcggggaaagcccttcgccatcgaagccgagaacagcatcctggacatcagcggcttcagcaagcagtacaactgtgccttcatctggcagaaggacggcgtgaagaagctgaacctgtacctgatcatcaactacttcaagggcggcaagctgcggttcaagaagatcaaacctgaagccttcgaagccaacagattctacaccgtgatcaacaaaaagagcggcgagatcgtgcccatggaggtgaacttcaacttcgacgaccccaacctgatcatcctgcctctggcctttggcaagagacagggcagagaattcatctggaacgacctgctgtccctggaaaccggcagcctgaagctggccaacggaagagtgatcgagaagacactgtacaacagaagaacccggcaggatgagcctgccctgttcgtggccctgaccttcgagcggcgggaggtcctggactcctccaatatcaaaccaatgaacctgatcggcgtggcaagaggcgaaaacatccccgccgtgatcgccctgaccgaccccgagggctgcccactgagccggtttaaggatagcctgggaaacccaacccacatcctgagaatcggcgagagctataaggagaagcagcggaccatccaggccaagaaggaggtggagcagcggagagccggcggctacagccggaagtacgccagcaaagccaagaatctggcagacgatatggtgagaaacaccgctagagatctgctgtactacgccgtgacccaggatgccatgctgatcttcgccaacctgagccggggcttcggccggcagggcaagcggaccttcatggccgagagacagtacacacggatggaggactggctgaccgccaagctggcctacgagggcctgagcaagacctacctgtccaagacactggcccagtacacctccaagacatgcagcaactgtgggtttaccatcaccagcgccgactacgacagggtgctggagaagctgaagaagacagcaacaggctggatgaccacaattaacggcaaggagctgaaggtggagggccagattacctactacaacagatacaagagacagaacgtagtcaaggacctgtccgtcgagctggatagactgagcgaagaatctgtgaacaacgacatctcctcctggacaaagggcagaagcggagaagctctgagcctcctgaagaaaagattctcccatagacccgtgcaggagaagttcgtgtgcctgaactgcggcttcgagacacacgcagccgagcaagccgccctgaacatcgccagatcctggctgttcctgcggagccaggagtacaagaaataccagacaaacaagacaaccggcaacaccgataagagagccttcgtcgagacctggcagtccttttaccggaagaagcttaaggaggtgtggaaacctgccgtgcggtctggcggatctggcggaggctccaccagccccaagaaaaagagaaaagtctaagctgccttctgcggggcttgccttctggccatgcccttcttctctcccttgcacctgtacctcttggtctttgaataaagcctgagtaggaaggctagcaaaaaaaaaaaaaaaaaaaaaaaaaaaaaaaaaaaaaaaaaaaaaaaaaaaaaaaaaaaaaaaaaaaaaaaaaaaaaaaa

SEQ ID NO: 9111 - RNA, 8784 nt, synthetic construct
  source 1..8784: mol_type = other RNA
aggaaataagagagaaaagaagagtaagaagaaatataagagccaccatggcccctaagaagaagcgtaaagtgagccggatgaaccacgaccaggagttcgacccccctaaggtgtaccctcccgtccccgccgagaagagaaagcccatccgggtcctgagcctgttcgatggcatcgccaccggtctgctggtgctgaaggacctgggcatccaggtggataggtacattgcctccgaggtgtgcgaggactccatcaccgtgggaatggtgcgtcatcagggcaagatcatgtacgtgggcgacgtgcggagcgtgacacagaagcatatccaggagtggggccctttcgacctggtgatcggcggcagcccttgcaatgacctgagcatcgtgaacccagcccggaagggcctgtacgagggaaccggcagactgttcttcgagttttacagactgctgcacgacgcccggcctaaggaaggcgacgaccggcccttcttttggctgttcgagaatgtggtggccatgggagtcagcgacaagcgggatattagccggttcctggagagcaaccccgtgatgatcgatgccaaggaagtgagcgccgcccaccgggccagatacttctggggcaatctgcctggcatgaacagacccctggccagcaccgtgaacgacaagctggagctgcaggagtgcctggagcacggccggatcgccaagttcagcaaggtgagaaccatcaccacccgaagcaacagcatcaaacaaggcaaggaccagcactttcctgtgttcatgaacgagaaggaggacatcctgtggtgtaccgagatggagagagtgttcgggttcccagtccactacacagatgtcagcaacatgtctagactggccagacagagactgctgggaagaagctggtccgtccctgtgatcagacacctgttcgcccctctgaaggagtacttcgcctgcgtgagcagcggcaacagcaacgccaacagccggggccccagcttctctagcggcctggtgccactgtccctgagagggagccacatgggccccatggagatctacaaaaccgtgagcgcctggaagcggcagcctgtgcgcgtgctgagcctgtttcggaatatcgataaagtcctgaaaagcctgggattcctggagagcggctctggctccggcggtggcaccctgaagtacgtggaggatgtgacaaacgtggtcagacgggatgtggagaagtggggccccttcgatctggtgtacggcagcacccaacccctgggcagctcttgtgaccggtgccctggctggtacatgtttcagttccaccggatcctgcagtacgccctgccgagacaggagtcccagcggccattcttttggattttcatggacaacttgctgctgaccgaggatgaccaggaaactaccactcggttcctgcagaccgaagccgtgaccctgcaggacgtgagaggccgggactaccagaacgccatgcgggtgtggtccaacatccctggactgaaaagcaagcacgcacctctgacccctaaagaagaggagtacctgcaggcccaggtgcggagcagaagcaagctggacgcccctaaggtggatctgctggtgaagaattgcctcctgcccctgagagagtacttcaagtatttcagccagaatagtctgcccctgggaggcagcggcggcggcgccttcgaggacgtggccgtgtacttcagccaggaggagtggggcctgctggacaccgcccagagagccctgtacagaagagtgatgctggacaacttcgccctggtggccagcctgggcctgagcaccagcagacccagagtggtgatccagctggagagaggcgaggagccctgggtgcccagcggcaccgacaccaccctgagcagaaccacctacagaagaagaaaccccggcagcggcggcccaagcagcggcgcccctcctcccagcggcggcaggcggcccaagcagcggcgcccctcctcccagcggcggcagcccagccggctccccaacctctaccgaggagggcacctctgagtccgccacccccgagagcggccctggcacctccaccgagcccagcgagggcagcgcacccggcagccctgccggcagccccacctccacagaggagggaaccagcaccgagcccagcgaaggcagcgccccaggcaccagcaccgagcctagtgagcaggagattaaacggatcaacaagatcagaagaagacttgtgaaagacagcaacaccaagaaggccggcaagacaggccccatgaaaaccctgctggttagagtgatgacacccgatctgagagagcggctggaaaacctgagaaagaagcctgaaaatatcccccagcccatcagcaatacatctagagccaacctgaataagctgctgaccgattacaccgaaatgaagaaggcgatcctgcatgtgtactgggaagagttccagaaggaccctgtgggcctgatgagccgggtggcccagcctgccagcaagaagatcgatcagaacaagctgaaacctgagatggacgagaagggcaacctgaccaccgccggctttgcctgctctcagtgtggccagcccctgttcgtgtacaagctggagcaggtgtctgagaagggcaaggcttacaccaactacttcggacggtgcaatgtggccgagcacgaaaagctgatcctgctggcccagctgaagcccgagaaggatagcgacgaagccgtgacatatagcctgggaaagtttgggcagagggccctggatttctacagcattcatgtgaccaaggagtccacccaccccgtgaagcccctggcccagatcgccggaaacagatacgcctccggacctgtgggaaaggccctgagcgacgcatgtatgggcacaatcgcctccttcctgtctaagtaccaggacatcatcatcgaacaccagaaggtggtgaagggcaaccagaagagactggagagcctgcgggagctggccggcaaggaaaacctggaataccctagcgtgaccctgccacctcagcctcacaccaaggagggcgttgatgcctacaacgaagtgatcgcccgggtgcgaatgtgggtgaacctgaacctgtggcagaagctgaagctaagcagagatgatgccaagcctctgctgagactgaagggattcccttcctttcctctggtcgagagacaggccaacgaagtggactggtgggacatggtgtgtaacgtgaagaagctgatcaacgagaaaaaggaggatggcaaggtgttttggcagaatctggctggctacaagagacaggaagccctgagaccatacctgagcagcgaggaagatcggaagaagggaaagaaattcgctcggtaccagctgggcgacctgctgctgcacctggaaaagaagcacggcgaggactggggaaaggtgtacgacgaggcctgggagcggattgacaagaaagtggaaggcctgagcaagcacatcaagctggaagaggaacggagaagcgaggacgcccagagcaaggccgccctgaccgactggctgcgggctaaggccagcttcgtgatcgagggcctgaaggaggccgacaaggacgagttctgcagatgcgagctgaagctgcagaagtggtacggggacctgcggggaaagcccttcgccatcgaagccgagaacagcatcctggacatcagcggcttcagcaagcagtacaactgtgccttcatctggcagaaggacggcgtgaagaagctgaacctgtacctgatcatcaactacttcaagggcggcaagctgcggttcaagaagatcaaacctgaagccttcgaagccaacagattctacaccgtgatcaacaaaaagagcggcgagatcgtgcccatggaggtgaacttcaacttcgacgaccccaacctgatcatcctgcctctggcctttggcaagagacagggcagagaattcatctggaacgacctgctgtccctggaaaccggcagcctgaagctggccaacggaagagtgatcgagaagacactgtacaacagaagaacccggcaggatgagcctgccctgttcgtggccctgaccttcgagcggcgggaggtcctggactcctccaatatcaaaccaatgaacctgatcggcgtggcaagaggcgaaaacatccccgccgtgatcgccctgaccgaccccgagggctgcccactgagccggtttaaggatagcctgggaaacccaacccacatcctgagaatcggcgagagctataaggagaagcagcggaccatccaggccaagaaggaggtggagcagcggagagccggcggctacagccggaagtacgccagcaaagccaagaatctggcagacgatatggtgagaaacaccgctagagatctgctgtactacgccgtgacccaggatgccatgctgatcttcgccaacctgagccggggcttcggccggcagggcaagcggaccttcatggccgagagacagtacacacggatggaggactggctgaccgccaagctggcctacgagggcctgagcaagacctacctgtccaagacactggcccagtacacctccaagacatgcagcaactgtgggtttaccatcaccagcgccgactacgacagggtgctggagaagctgaagaagacagcaacaggctggatgaccacaattaacggcaaggagctgaaggtggagggccagattacctactacaacagatacaagagacagaacgtagtcaaggacctgtccgtcgagctggatagactgagcgaagaatctgtgaacaacgacatctcctcctggacaaagggcagaagcggagaagctctgagcctcctgaagaaaagattctcccatagacccgtgcaggagaagttcgtgtgcctgaactgcggcttcgagacacacgcagccgagcaagccgccctgaacatcgccagatcctggctgttcctgcggagccaggagtacaagaaataccagacaaacaagacaaccggcaacaccgataagagagccttcgtcgagacctggcagtccttttaccggaagaagcttaaggaggtgtggaaacctgccgtgcggtctggcggatctggcggaggctccaccagccccaagaaaaagagaaaagtctaagctgccttctgcggggcttgccttctggccatgcccttcttctctcccttgcacctgtacctcttggtctttgaataaagcctgagtaggaaggctagcaaaaaaaaaaaaaaaaaaaaaaaaaaaaaaaaaaaaaaaaaaaaaaaaaaaaaaaaaaaaaaaaaaaaaaaaaaaaaaaagcccagccggctccccaacctctaccgaggagggcacctctgagtccgccacccccgagagcggccctggcacctccaccgagcccagcgagggcagcgcacccggcagccctgccggcagccccacctccacagaggagggaaccagcaccgagcccagcgaaggcagcgccccaggcaccagcaccgagcctagtgagcaggagattaaacggatcaacaagatcagaagaagacttgtgaaagacagcaacaccaagaaggccggcaagacaggccccatgaaaaccctgctggttagagtgatgacacccgatctgagagagcggctggaaaacctgagaaagaagcctgaaaatatcccccagcccatcagcaatacatctagagccaacctgaataagctgctgaccgattacaccgaaatgaagaaggcgatcctgcatgtgtactgggaagagttccagaaggaccctgtgggcctgatgagccgggtggcccagcctgccagcaagaagatcgatcagaacaagctgaaacctgagatggacgagaagggcaacctgaccaccgccggctttgcctgctctcagtgtggccagcccctgttcgtgtacaagctggagcaggtgtctgagaagggcaaggcttacaccaactacttcggacggtgcaatgtggccgagcacgaaaagctgatcctgctggcccagctgaagcccgagaaggatagcgacgaagccgtgacatatagcctgggaaagtttgggcagagggccctggatttctacagcattcatgtgaccaaggagtccacccaccccgtgaagcccctggcccagatcgccggaaacagatacgcctccggacctgtgggaaaggccctgagcgacgcatgtatgggcacaatcgcctccttcctgtctaagtaccaggacatcatcatcgaacaccagaaggtggtgaagggcaaccagaagagactggagagcctgcgggagctggccggcaaggaaaacctggaataccctagcgtgaccctgccacctcagcctcacaccaaggagggcgttgatgcctacaacgaagtgatcgcccgggtgcgaatgtgggtgaacctgaacctgtggcagaagctgaagctaagcagagatgatgccaagcctctgctgagactgaagggattcccttcctttcctctggtcgagagacaggccaacgaagtggactggtgggacatggtgtgtaacgtgaagaagctgatcaacgagaaaaaggaggatggcaaggtgttttggcagaatctggctggctacaagagacaggaagccctgagaccatacctgagcagcgaggaagatcggaagaagggaaagaaattcgctcggtaccagctgggcgacctgctgctgcacctggaaaagaagcacggcgaggactggggaaaggtgtacgacgaggcctgggagcggattgacaagaaagtggaaggcctgagcaagcacatcaagctggaagaggaacggagaagcgaggacgcccagagcaaggccgccctgaccgactggctgcgggctaaggccagcttcgtgatcgagggcctgaaggaggccgacaaggacgagttctgcagatgcgagctgaagctgcagaagtggtacggggacctgcggggaaagcccttcgccatcgaagccgagaacagcatcctggacatcagcggcttcagcaagcagtacaactgtgccttcatctggcagaaggacggcgtgaagaagctgaacctgtacctgatcatcaactacttcaagggcggcaagctgcggttcaagaagatcaaacctgaagccttcgaagccaacagattctacaccgtgatcaacaaaaagagcggcgagatcgtgcccatggaggtgaacttcaacttcgacgaccccaacctgatcatcctgcctctggcctttggcaagagacagggcagagaattcatctggaacgacctgctgtccctggaaaccggcagcctgaagctggccaacggaagagtgatcgagaagacactgtacaacagaagaacccggcaggatgagcctgccctgttcgtggccctgaccttcgagcggcgggaggtcctggactcctccaatatcaaaccaatgaacctgatcggcgtggcaagaggcgaaaacatccccgccgtgatcgccctgaccgaccccgagggctgcccactgagccggtttaaggatagcctgggaaacccaacccacatcctgagaatcggcgagagctataaggagaagcagcggaccatccaggccaagaaggaggtggagcagcggagagccggcggctacagccggaagtacgccagcaaagccaagaatctggcagacgatatggtgagaaacaccgctagagatctgctgtactacgccgtgacccaggatgccatgctgatcttcgccaacctgagccggggcttcggccggcagggcaagcggaccttcatggccgagagacagtacacacggatggaggactggctgaccgccaagctggcctacgagggcctgagcaagacctacctgtccaagacactggcccagtacacctccaagacatgcagcaactgtgggtttaccatcaccagcgccgactacgacagggtgctggagaagctgaagaagacagcaacaggctggatgaccacaattaacggcaaggagctgaaggtggagggccagattacctactacaacagatacaagagacagaacgtagtcaaggacctgtccgtcgagctggatagactgagcgaagaatctgtgaacaacgacatctcctcctggacaaagggcagaagcggagaagctctgagcctcctgaagaaaagattctcccatagacccgtgcaggagaagttcgtgtgcctgaactgcggcttcgagacacacgcagccgagcaagccgccctgaacatcgccagatcctggctgttcctgcggagccaggagtacaagaaataccagacaaacaagacaaccggcaacaccgataagagagccttcgtcgagacctggcagtccttttaccggaagaagcttaaggaggtgtggaaacctgccgtgcggtctggcggatctggcggaggctccaccagccccaagaaaaagagaaaagtctaagctgccttctgcggggcttgccttctggccatgcccttcttctctcccttgcacctgtacctcttggtctttgaataaagcctgagtaggaaggctagcaaaaaaaaaaaaaaaaaaaaaaaaaaaaaaaaaaaaaaaaaaaaaaaaaaaaaaaaaaaaaaaaaaaaaaaaaaaaaaaa

SEQ ID NO: 9112 - RNA, 8787 nt, synthetic construct
  source 1..8787: mol_type = other RNA
aggaaataagagagaaaagaagagtaagaagaaatataagagccaccatggcccctaagaagaagcgtaaagtgagccggatgaaccacgaccaggagttcgacccccctaaggtgtaccctcccgtccccgccgagaagagaaagcccatccgggtcctgagcctgttcgatggcatcgccaccggtctgctggtgctgaaggacctgggcatccaggtggataggtacattgcctccgaggtgtgcgaggactccatcaccgtgggaatggtgcgtcatcagggcaagatcatgtacgtgggcgacgtgcggagcgtgacacagaagcatatccaggagtggggccctttcgacctggtgatcggcggcagcccttgcaatgacctgagcatcgtgaacccagcccggaagggcctgtacgagggaaccggcagactgttcttcgagttttacagactgctgcacgacgcccggcctaaggaaggcgacgaccggcccttcttttggctgttcgagaatgtggtggccatgggagtcagcgacaagcgggatattagccggttcctggagagcaaccccgtgatgatcgatgccaaggaagtgagcgccgcccaccgggccagatacttctggggcaatctgcctggcatgaacagacccctggccagcaccgtgaacgacaagctggagctgcaggagtgcctggagcacggccggatcgccaagttcagcaaggtgagaaccatcaccacccgaagcaacagcatcaaacaaggcaaggaccagcactttcctgtgttcatgaacgagaaggaggacatcctgtggtgtaccgagatggagagagtgttcgggttcccagtccactacacagatgtcagcaacatgtctagactggccagacagagactgctgggaagaagctggtccgtccctgtgatcagacacctgttcgcccctctgaaggagtacttcgcctgcgtgagcagcggcaacagcaacgccaacagccggggccccagcttctctagcggcctggtgccactgtccctgagagggagccacatgggccccatggagatctacaaaaccgtgagcgcctggaagcggcagcctgtgcgcgtgctgagcctgtttcggaatatcgataaagtcctgaaaagcctgggattcctggagagcggctctggctccggcggtggcaccctgaagtacgtggaggatgtgacaaacgtggtcagacgggatgtggagaagtggggccccttcgatctggtgtacggcagcacccaacccctgggcagctcttgtgaccggtgccctggctggtacatgtttcagttccaccggatcctgcagtacgccctgccgagacaggagtcccagcggccattcttttggattttcatggacaacttgctgctgaccgaggatgaccaggaaactaccactcggttcctgcagaccgaagccgtgaccctgcaggacgtgagaggccgggactaccagaacgccatgcgggtgtggtccaacatccctggactgaaaagcaagcacgcacctctgacccctaaagaagaggagtacctgcaggcccaggtgcggagcagaagcaagctggacgcccctaaggtggatctgctggtgaagaattgcctcctgcccctgagagagtacttcaagtatttcagccagaatagtctgcccctgggaggcagcggcggcggcttccaggagagcgtgaccttcagggacgtggccatcgccttcagccagcaggagtggcagagcctggacagcagccagagggacctgtacagggacgtgatgctggagaactacaggaacctggtgagcctgggccacagcctgagcaagccccacgtgatcaccctgctggagcagtggaaggacccctgggagaccggcaggaaggacaagaggaggaggtgcgccgacctgcagctggagggcggcccaagcagcggcgcccctcctcccagcggcggcaggcggcccaagcagcggcgcccctcctcccagcggcggcagcccagccggctccccaacctctaccgaggagggcacctctgagtccgccacccccgagagcggccctggcacctccaccgagcccagcgagggcagcgcacccggcagccctgccggcagccccacctccacagaggagggaaccagcaccgagcccagcgaaggcagcgccccaggcaccagcaccgagcctagtgagcaggagattaaacggatcaacaagatcagaagaagacttgtgaaagacagcaacaccaagaaggccggcaagacaggccccatgaaaaccctgctggttagagtgatgacacccgatctgagagagcggctggaaaacctgagaaagaagcctgaaaatatcccccagcccatcagcaatacatctagagccaacctgaataagctgctgaccgattacaccgaaatgaagaaggcgatcctgcatgtgtactgggaagagttccagaaggaccctgtgggcctgatgagccgggtggcccagcctgccagcaagaagatcgatcagaacaagctgaaacctgagatggacgagaagggcaacctgaccaccgccggctttgcctgctctcagtgtggccagcccctgttcgtgtacaagctggagcaggtgtctgagaagggcaaggcttacaccaactacttcggacggtgcaatgtggccgagcacgaaaagctgatcctgctggcccagctgaagcccgagaaggatagcgacgaagccgtgacatatagcctgggaaagtttgggcagagggccctggatttctacagcattcatgtgaccaaggagtccacccaccccgtgaagcccctggcccagatcgccggaaacagatacgcctccggacctgtgggaaaggccctgagcgacgcatgtatgggcacaatcgcctccttcctgtctaagtaccaggacatcatcatcgaacaccagaaggtggtgaagggcaaccagaagagactggagagcctgcgggagctggccggcaaggaaaacctggaataccctagcgtgaccctgccacctcagcctcacaccaaggagggcgttgatgcctacaacgaagtgatcgcccgggtgcgaatgtgggtgaacctgaacctgtggcagaagctgaagctaagcagagatgatgccaagcctctgctgagactgaagggattcccttcctttcctctggtcgagagacaggccaacgaagtggactggtgggacatggtgtgtaacgtgaagaagctgatcaacgagaaaaaggaggatggcaaggtgttttggcagaatctggctggctacaagagacaggaagccctgagaccatacctgagcagcgaggaagatcggaagaagggaaagaaattcgctcggtaccagctgggcgacctgctgctgcacctggaaaagaagcacggcgaggactggggaaaggtgtacgacgaggcctgggagcggattgacaagaaagtggaaggcctgagcaagcacatcaagctggaagaggaacggagaagcgaggacgcccagagcaaggccgccctgaccgactggctgcgggctaaggccagcttcgtgatcgagggcctgaaggaggccgacaaggacgagttctgcagatgcgagctgaagctgcagaagtggtacggggacctgcggggaaagcccttcgccatcgaagccgagaacagcatcctggacatcagcggcttcagcaagcagtacaactgtgccttcatctggcagaaggacggcgtgaagaagctgaacctgtacctgatcatcaactacttcaagggcggcaagctgcggttcaagaagatcaaacctgaagccttcgaagccaacagattctacaccgtgatcaacaaaaagagcggcgagatcgtgcccatggaggtgaacttcaacttcgacgaccccaacctgatcatcctgcctctggcctttggcaagagacagggcagagaattcatctggaacgacctgctgtccctggaaaccggcagcctgaagctggccaacggaagagtgatcgagaagacactgtacaacagaagaacccggcaggatgagcctgccctgttcgtggccctgaccttcgagcggcgggaggtcctggactcctccaatatcaaaccaatgaacctgatcggcgtggcaagaggcgaaaacatccccgccgtgatcgccctgaccgaccccgagggctgcccactgagccggtttaaggatagcctgggaaacccaacccacatcctgagaatcggcgagagctataaggagaagcagcggaccatccaggccaagaaggaggtggagcagcggagagccggcggctacagccggaagtacgccagcaaagccaagaatctggcagacgatatggtgagaaacaccgctagagatctgctgtactacgccgtgacccaggatgccatgctgatcttcgccaacctgagccggggcttcggccggcagggcaagcggaccttcatggccgagagacagtacacacggatggaggactggctgaccgccaagctggcctacgagggcctgagcaagacctacctgtccaagacactggcccagtacacctccaagacatgcagcaactgtgggtttaccatcaccagcgccgactacgacagggtgctggagaagctgaagaagacagcaacaggctggatgaccacaattaacggcaaggagctgaaggtggagggccagattacctactacaacagatacaagagacagaacgtagtcaaggacctgtccgtcgagctggatagactgagcgaagaatctgtgaacaacgacatctcctcctggacaaagggcagaagcggagaagctctgagcctcctgaagaaaagattctcccatagacccgtgcaggagaagttcgtgtgcctgaactgcggcttcgagacacacgcagccgagcaagccgccctgaacatcgccagatcctggctgttcctgcggagccaggagtacaagaaataccagacaaacaagacaaccggcaacaccgataagagagccttcgtcgagacctggcagtccttttaccggaagaagcttaaggaggtgtggaaacctgccgtgcggtctggcggatctggcggaggctccaccagccccaagaaaaagagaaaagtctaagctgccttctgcggggcttgccttctggccatgcccttcttctctcccttgcacctgtacctcttggtctttgaataaagcctgagtaggaaggctagcaaaaaaaaaaaaaaaaaaaaaaaaaaaaaaaaaaaaaaaaaaaaaaaaaaaaaaaaaaaaaaaaaaaaaaaaaaaaaaaagcccagccggctccccaacctctaccgaggagggcacctctgagtccgccacccccgagagcggccctggcacctccaccgagcccagcgagggcagcgcacccggcagccctgccggcagccccacctccacagaggagggaaccagcaccgagcccagcgaaggcagcgccccaggcaccagcaccgagcctagtgagcaggagattaaacggatcaacaagatcagaagaagacttgtgaaagacagcaacaccaagaaggccggcaagacaggccccatgaaaaccctgctggttagagtgatgacacccgatctgagagagcggctggaaaacctgagaaagaagcctgaaaatatcccccagcccatcagcaatacatctagagccaacctgaataagctgctgaccgattacaccgaaatgaagaaggcgatcctgcatgtgtactgggaagagttccagaaggaccctgtgggcctgatgagccgggtggcccagcctgccagcaagaagatcgatcagaacaagctgaaacctgagatggacgagaagggcaacctgaccaccgccggctttgcctgctctcagtgtggccagcccctgttcgtgtacaagctggagcaggtgtctgagaagggcaaggcttacaccaactacttcggacggtgcaatgtggccgagcacgaaaagctgatcctgctggcccagctgaagcccgagaaggatagcgacgaagccgtgacatatagcctgggaaagtttgggcagagggccctggatttctacagcattcatgtgaccaaggagtccacccaccccgtgaagcccctggcccagatcgccggaaacagatacgcctccggacctgtgggaaaggccctgagcgacgcatgtatgggcacaatcgcctccttcctgtctaagtaccaggacatcatcatcgaacaccagaaggtggtgaagggcaaccagaagagactggagagcctgcgggagctggccggcaaggaaaacctggaataccctagcgtgaccctgccacctcagcctcacaccaaggagggcgttgatgcctacaacgaagtgatcgcccgggtgcgaatgtgggtgaacctgaacctgtggcagaagctgaagctaagcagagatgatgccaagcctctgctgagactgaagggattcccttcctttcctctggtcgagagacaggccaacgaagtggactggtgggacatggtgtgtaacgtgaagaagctgatcaacgagaaaaaggaggatggcaaggtgttttggcagaatctggctggctacaagagacaggaagccctgagaccatacctgagcagcgaggaagatcggaagaagggaaagaaattcgctcggtaccagctgggcgacctgctgctgcacctggaaaagaagcacggcgaggactggggaaaggtgtacgacgaggcctgggagcggattgacaagaaagtggaaggcctgagcaagcacatcaagctggaagaggaacggagaagcgaggacgcccagagcaaggccgccctgaccgactggctgcgggctaaggccagcttcgtgatcgagggcctgaaggaggccgacaaggacgagttctgcagatgcgagctgaagctgcagaagtggtacggggacctgcggggaaagcccttcgccatcgaagccgagaacagcatcctggacatcagcggcttcagcaagcagtacaactgtgccttcatctggcagaaggacggcgtgaagaagctgaacctgtacctgatcatcaactacttcaagggcggcaagctgcggttcaagaagatcaaacctgaagccttcgaagccaacagattctacaccgtgatcaacaaaaagagcggcgagatcgtgcccatggaggtgaacttcaacttcgacgaccccaacctgatcatcctgcctctggcctttggcaagagacagggcagagaattcatctggaacgacctgctgtccctggaaaccggcagcctgaagctggccaacggaagagtgatcgagaagacactgtacaacagaagaacccggcaggatgagcctgccctgttcgtggccctgaccttcgagcggcgggaggtcctggactcctccaatatcaaaccaatgaacctgatcggcgtggcaagaggcgaaaacatccccgccgtgatcgccctgaccgaccccgagggctgcccactgagccggtttaaggatagcctgggaaacccaacccacatcctgagaatcggcgagagctataaggagaagcagcggaccatccaggccaagaaggaggtggagcagcggagagccggcggctacagccggaagtacgccagcaaagccaagaatctggcagacgatatggtgagaaacaccgctagagatctgctgtactacgccgtgacccaggatgccatgctgatcttcgccaacctgagccggggcttcggccggcagggcaagcggaccttcatggccgagagacagtacacacggatggaggactggctgaccgccaagctggcctacgagggcctgagcaagacctacctgtccaagacactggcccagtacacctccaagacatgcagcaactgtgggtttaccatcaccagcgccgactacgacagggtgctggagaagctgaagaagacagcaacaggctggatgaccacaattaacggcaaggagctgaaggtggagggccagattacctactacaacagatacaagagacagaacgtagtcaaggacctgtccgtcgagctggatagactgagcgaagaatctgtgaacaacgacatctcctcctggacaaagggcagaagcggagaagctctgagcctcctgaagaaaagattctcccatagacccgtgcaggagaagttcgtgtgcctgaactgcggcttcgagacacacgcagccgagcaagccgccctgaacatcgccagatcctggctgttcctgcggagccaggagtacaagaaataccagacaaacaagacaaccggcaacaccgataagagagccttcgtcgagacctggcagtccttttaccggaagaagcttaaggaggtgtggaaacctgccgtgcggtctggcggatctggcggaggctccaccagccccaagaaaaagagaaaagtctaagctgccttctgcggggcttgccttctggccatgcccttcttctctcccttgcacctgtacctcttggtctttgaataaagcctgagtaggaaggctagcaaaaaaaaaaaaaaaaaaaaaaaaaaaaaaaaaaaaaaaaaaaaaaaaaaaaaaaaaaaaaaaaaaaaaaaaaaaaaaaa

SEQ ID NO: 9113 - RNA, 8787 nt, synthetic construct
  source 1..8787: mol_type = other RNA
aggaaataagagagaaaagaagagtaagaagaaatataagagccaccatggcccctaagaagaagcgtaaagtgagccggatgaaccacgaccaggagttcgacccccctaaggtgtaccctcccgtccccgccgagaagagaaagcccatccgggtcctgagcctgttcgatggcatcgccaccggtctgctggtgctgaaggacctgggcatccaggtggataggtacattgcctccgaggtgtgcgaggactccatcaccgtgggaatggtgcgtcatcagggcaagatcatgtacgtgggcgacgtgcggagcgtgacacagaagcatatccaggagtggggccctttcgacctggtgatcggcggcagcccttgcaatgacctgagcatcgtgaacccagcccggaagggcctgtacgagggaaccggcagactgttcttcgagttttacagactgctgcacgacgcccggcctaaggaaggcgacgaccggcccttcttttggctgttcgagaatgtggtggccatgggagtcagcgacaagcgggatattagccggttcctggagagcaaccccgtgatgatcgatgccaaggaagtgagcgccgcccaccgggccagatacttctggggcaatctgcctggcatgaacagacccctggccagcaccgtgaacgacaagctggagctgcaggagtgcctggagcacggccggatcgccaagttcagcaaggtgagaaccatcaccacccgaagcaacagcatcaaacaaggcaaggaccagcactttcctgtgttcatgaacgagaaggaggacatcctgtggtgtaccgagatggagagagtgttcgggttcccagtccactacacagatgtcagcaacatgtctagactggccagacagagactgctgggaagaagctggtccgtccctgtgatcagacacctgttcgcccctctgaaggagtacttcgcctgcgtgagcagcggcaacagcaacgccaacagccggggccccagcttctctagcggcctggtgccactgtccctgagagggagccacatgggccccatggagatctacaaaaccgtgagcgcctggaagcggcagcctgtgcgcgtgctgagcctgtttcggaatatcgataaagtcctgaaaagcctgggattcctggagagcggctctggctccggcggtggcaccctgaagtacgtggaggatgtgacaaacgtggtcagacgggatgtggagaagtggggccccttcgatctggtgtacggcagcacccaacccctgggcagctcttgtgaccggtgccctggctggtacatgtttcagttccaccggatcctgcagtacgccctgccgagacaggagtcccagcggccattcttttggattttcatggacaacttgctgctgaccgaggatgaccaggaaactaccactcggttcctgcagaccgaagccgtgaccctgcaggacgtgagaggccgggactaccagaacgccatgcgggtgtggtccaacatccctggactgaaaagcaagcacgcacctctgacccctaaagaagaggagtacctgcaggcccaggtgcggagcagaagcaagctggacgcccctaaggtggatctgctggtgaagaattgcctcctgcccctgagagagtacttcaagtatttcagccagaatagtctgcccctgggaggcagcggcggcggcttccaggagagcgtgaccttcgaggacgtggccgtgtacttcacccagaaccagtgggccagcctggaccccgtgcagagggccctgtacagggacgtgatgctggagaactacgccaacgtggccgccctggtggccttccccgcccccaagcccgacctgatcagccagctggagaggggcagcgccccctggaggcccgacccctgggaggccgaggtgctgaggggcatctgccccggcggcggcccaagcagcggcgcccctcctcccagcggcggcaggcggcccaagcagcggcgcccctcctcccagcggcggcagcccagccggctccccaacctctaccgaggagggcacctctgagtccgccacccccgagagcggccctggcacctccaccgagcccagcgagggcagcgcacccggcagccctgccggcagccccacctccacagaggagggaaccagcaccgagcccagcgaaggcagcgccccaggcaccagcaccgagcctagtgagcaggagattaaacggatcaacaagatcagaagaagacttgtgaaagacagcaacaccaagaaggccggcaagacaggccccatgaaaaccctgctggttagagtgatgacacccgatctgagagagcggctggaaaacctgagaaagaagcctgaaaatatcccccagcccatcagcaatacatctagagccaacctgaataagctgctgaccgattacaccgaaatgaagaaggcgatcctgcatgtgtactgggaagagttccagaaggaccctgtgggcctgatgagccgggtggcccagcctgccagcaagaagatcgatcagaacaagctgaaacctgagatggacgagaagggcaacctgaccaccgccggctttgcctgctctcagtgtggccagcccctgttcgtgtacaagctggagcaggtgtctgagaagggcaaggcttacaccaactacttcggacggtgcaatgtggccgagcacgaaaagctgatcctgctggcccagctgaagcccgagaaggatagcgacgaagccgtgacatatagcctgggaaagtttgggcagagggccctggatttctacagcattcatgtgaccaaggagtccacccaccccgtgaagcccctggcccagatcgccggaaacagatacgcctccggacctgtgggaaaggccctgagcgacgcatgtatgggcacaatcgcctccttcctgtctaagtaccaggacatcatcatcgaacaccagaaggtggtgaagggcaaccagaagagactggagagcctgcgggagctggccggcaaggaaaacctggaataccctagcgtgaccctgccacctcagcctcacaccaaggagggcgttgatgcctacaacgaagtgatcgcccgggtgcgaatgtgggtgaacctgaacctgtggcagaagctgaagctaagcagagatgatgccaagcctctgctgagactgaagggattcccttcctttcctctggtcgagagacaggccaacgaagtggactggtgggacatggtgtgtaacgtgaagaagctgatcaacgagaaaaaggaggatggcaaggtgttttggcagaatctggctggctacaagagacaggaagccctgagaccatacctgagcagcgaggaagatcggaagaagggaaagaaattcgctcggtaccagctgggcgacctgctgctgcacctggaaaagaagcacggcgaggactggggaaaggtgtacgacgaggcctgggagcggattgacaagaaagtggaaggcctgagcaagcacatcaagctggaagaggaacggagaagcgaggacgcccagagcaaggccgccctgaccgactggctgcgggctaaggccagcttcgtgatcgagggcctgaaggaggccgacaaggacgagttctgcagatgcgagctgaagctgcagaagtggtacggggacctgcggggaaagcccttcgccatcgaagccgagaacagcatcctggacatcagcggcttcagcaagcagtacaactgtgccttcatctggcagaaggacggcgtgaagaagctgaacctgtacctgatcatcaactacttcaagggcggcaagctgcggttcaagaagatcaaacctgaagccttcgaagccaacagattctacaccgtgatcaacaaaaagagcggcgagatcgtgcccatggaggtgaacttcaacttcgacgaccccaacctgatcatcctgcctctggcctttggcaagagacagggcagagaattcatctggaacgacctgctgtccctggaaaccggcagcctgaagctggccaacggaagagtgatcgagaagacactgtacaacagaagaacccggcaggatgagcctgccctgttcgtggccctgaccttcgagcggcgggaggtcctggactcctccaatatcaaaccaatgaacctgatcggcgtggcaagaggcgaaaacatccccgccgtgatcgccctgaccgaccccgagggctgcccactgagccggtttaaggatagcctgggaaacccaacccacatcctgagaatcggcgagagctataaggagaagcagcggaccatccaggccaagaaggaggtggagcagcggagagccggcggctacagccggaagtacgccagcaaagccaagaatctggcagacgatatggtgagaaacaccgctagagatctgctgtactacgccgtgacccaggatgccatgctgatcttcgccaacctgagccggggcttcggccggcagggcaagcggaccttcatggccgagagacagtacacacggatggaggactggctgaccgccaagctggcctacgagggcctgagcaagacctacctgtccaagacactggcccagtacacctccaagacatgcagcaactgtgggtttaccatcaccagcgccgactacgacagggtgctggagaagctgaagaagacagcaacaggctggatgaccacaattaacggcaaggagctgaaggtggagggccagattacctactacaacagatacaagagacagaacgtagtcaaggacctgtccgtcgagctggatagactgagcgaagaatctgtgaacaacgacatctcctcctggacaaagggcagaagcggagaagctctgagcctcctgaagaaaagattctcccatagacccgtgcaggagaagttcgtgtgcctgaactgcggcttcgagacacacgcagccgagcaagccgccctgaacatcgccagatcctggctgttcctgcggagccaggagtacaagaaataccagacaaacaagacaaccggcaacaccgataagagagccttcgtcgagacctggcagtccttttaccggaagaagcttaaggaggtgtggaaacctgccgtgcggtctggcggatctggcggaggctccaccagccccaagaaaaagagaaaagtctaagctgccttctgcggggcttgccttctggccatgcccttcttctctcccttgcacctgtacctcttggtctttgaataaagcctgagtaggaaggctagcaaaaaaaaaaaaaaaaaaaaaaaaaaaaaaaaaaaaaaaaaaaaaaaaaaaaaaaaaaaaaaaaaaaaaaaaaaaaaaaagcccagccggctccccaacctctaccgaggagggcacctctgagtccgccacccccgagagcggccctggcacctccaccgagcccagcgagggcagcgcacccggcagccctgccggcagccccacctccacagaggagggaaccagcaccgagcccagcgaaggcagcgccccaggcaccagcaccgagcctagtgagcaggagattaaacggatcaacaagatcagaagaagacttgtgaaagacagcaacaccaagaaggccggcaagacaggccccatgaaaaccctgctggttagagtgatgacacccgatctgagagagcggctggaaaacctgagaaagaagcctgaaaatatcccccagcccatcagcaatacatctagagccaacctgaataagctgctgaccgattacaccgaaatgaagaaggcgatcctgcatgtgtactgggaagagttccagaaggaccctgtgggcctgatgagccgggtggcccagcctgccagcaagaagatcgatcagaacaagctgaaacctgagatggacgagaagggcaacctgaccaccgccggctttgcctgctctcagtgtggccagcccctgttcgtgtacaagctggagcaggtgtctgagaagggcaaggcttacaccaactacttcggacggtgcaatgtggccgagcacgaaaagctgatcctgctggcccagctgaagcccgagaaggatagcgacgaagccgtgacatatagcctgggaaagtttgggcagagggccctggatttctacagcattcatgtgaccaaggagtccacccaccccgtgaagcccctggcccagatcgccggaaacagatacgcctccggacctgtgggaaaggccctgagcgacgcatgtatgggcacaatcgcctccttcctgtctaagtaccaggacatcatcatcgaacaccagaaggtggtgaagggcaaccagaagagactggagagcctgcgggagctggccggcaaggaaaacctggaataccctagcgtgaccctgccacctcagcctcacaccaaggagggcgttgatgcctacaacgaagtgatcgcccgggtgcgaatgtgggtgaacctgaacctgtggcagaagctgaagctaagcagagatgatgccaagcctctgctgagactgaagggattcccttcctttcctctggtcgagagacaggccaacgaagtggactggtgggacatggtgtgtaacgtgaagaagctgatcaacgagaaaaaggaggatggcaaggtgttttggcagaatctggctggctacaagagacaggaagccctgagaccatacctgagcagcgaggaagatcggaagaagggaaagaaattcgctcggtaccagctgggcgacctgctgctgcacctggaaaagaagcacggcgaggactggggaaaggtgtacgacgaggcctgggagcggattgacaagaaagtggaaggcctgagcaagcacatcaagctggaagaggaacggagaagcgaggacgcccagagcaaggccgccctgaccgactggctgcgggctaaggccagcttcgtgatcgagggcctgaaggaggccgacaaggacgagttctgcagatgcgagctgaagctgcagaagtggtacggggacctgcggggaaagcccttcgccatcgaagccgagaacagcatcctggacatcagcggcttcagcaagcagtacaactgtgccttcatctggcagaaggacggcgtgaagaagctgaacctgtacctgatcatcaactacttcaagggcggcaagctgcggttcaagaagatcaaacctgaagccttcgaagccaacagattctacaccgtgatcaacaaaaagagcggcgagatcgtgcccatggaggtgaacttcaacttcgacgaccccaacctgatcatcctgcctctggcctttggcaagagacagggcagagaattcatctggaacgacctgctgtccctggaaaccggcagcctgaagctggccaacggaagagtgatcgagaagacactgtacaacagaagaacccggcaggatgagcctgccctgttcgtggccctgaccttcgagcggcgggaggtcctggactcctccaatatcaaaccaatgaacctgatcggcgtggcaagaggcgaaaacatccccgccgtgatcgccctgaccgaccccgagggctgcccactgagccggtttaaggatagcctgggaaacccaacccacatcctgagaatcggcgagagctataaggagaagcagcggaccatccaggccaagaaggaggtggagcagcggagagccggcggctacagccggaagtacgccagcaaagccaagaatctggcagacgatatggtgagaaacaccgctagagatctgctgtactacgccgtgacccaggatgccatgctgatcttcgccaacctgagccggggcttcggccggcagggcaagcggaccttcatggccgagagacagtacacacggatggaggactggctgaccgccaagctggcctacgagggcctgagcaagacctacctgtccaagacactggcccagtacacctccaagacatgcagcaactgtgggtttaccatcaccagcgccgactacgacagggtgctggagaagctgaagaagacagcaacaggctggatgaccacaattaacggcaaggagctgaaggtggagggccagattacctactacaacagatacaagagacagaacgtagtcaaggacctgtccgtcgagctggatagactgagcgaagaatctgtgaacaacgacatctcctcctggacaaagggcagaagcggagaagctctgagcctcctgaagaaaagattctcccatagacccgtgcaggagaagttcgtgtgcctgaactgcggcttcgagacacacgcagccgagcaagccgccctgaacatcgccagatcctggctgttcctgcggagccaggagtacaagaaataccagacaaacaagacaaccggcaacaccgataagagagccttcgtcgagacctggcagtccttttaccggaagaagcttaaggaggtgtggaaacctgccgtgcggtctggcggatctggcggaggctccaccagccccaagaaaaagagaaaagtctaagctgccttctgcggggcttgccttctggccatgcccttcttctctcccttgcacctgtacctcttggtctttgaataaagcctgagtaggaaggctagcaaaaaaaaaaaaaaaaaaaaaaaaaaaaaaaaaaaaaaaaaaaaaaaaaaaaaaaaaaaaaaaaaaaaaaaaaaaaaaaa

SEQ ID NO: 9114 - RNA, 8787 nt, synthetic construct
  source 1..8787: mol_type = other RNA
aggaaataagagagaaaagaagagtaagaagaaatataagagccaccatggcccctaagaagaagcgtaaagtgagccggatgaaccacgaccaggagttcgacccccctaaggtgtaccctcccgtccccgccgagaagagaaagcccatccgggtcctgagcctgttcgatggcatcgccaccggtctgctggtgctgaaggacctgggcatccaggtggataggtacattgcctccgaggtgtgcgaggactccatcaccgtgggaatggtgcgtcatcagggcaagatcatgtacgtgggcgacgtgcggagcgtgacacagaagcatatccaggagtggggccctttcgacctggtgatcggcggcagcccttgcaatgacctgagcatcgtgaacccagcccggaagggcctgtacgagggaaccggcagactgttcttcgagttttacagactgctgcacgacgcccggcctaaggaaggcgacgaccggcccttcttttggctgttcgagaatgtggtggccatgggagtcagcgacaagcgggatattagccggttcctggagagcaaccccgtgatgatcgatgccaaggaagtgagcgccgcccaccgggccagatacttctggggcaatctgcctggcatgaacagacccctggccagcaccgtgaacgacaagctggagctgcaggagtgcctggagcacggccggatcgccaagttcagcaaggtgagaaccatcaccacccgaagcaacagcatcaaacaaggcaaggaccagcactttcctgtgttcatgaacgagaaggaggacatcctgtggtgtaccgagatggagagagtgttcgggttcccagtccactacacagatgtcagcaacatgtctagactggccagacagagactgctgggaagaagctggtccgtccctgtgatcagacacctgttcgcccctctgaaggagtacttcgcctgcgtgagcagcggcaacagcaacgccaacagccggggccccagcttctctagcggcctggtgccactgtccctgagagggagccacatgggccccatggagatctacaaaaccgtgagcgcctggaagcggcagcctgtgcgcgtgctgagcctgtttcggaatatcgataaagtcctgaaaagcctgggattcctggagagcggctctggctccggcggtggcaccctgaagtacgtggaggatgtgacaaacgtggtcagacgggatgtggagaagtggggccccttcgatctggtgtacggcagcacccaacccctgggcagctcttgtgaccggtgccctggctggtacatgtttcagttccaccggatcctgcagtacgccctgccgagacaggagtcccagcggccattcttttggattttcatggacaacttgctgctgaccgaggatgaccaggaaactaccactcggttcctgcagaccgaagccgtgaccctgcaggacgtgagaggccgggactaccagaacgccatgcgggtgtggtccaacatccctggactgaaaagcaagcacgcacctctgacccctaaagaagaggagtacctgcaggcccaggtgcggagcagaagcaagctggacgcccctaaggtggatctgctggtgaagaattgcctcctgcccctgagagagtacttcaagtatttcagccagaatagtctgcccctgggaggcagcggcggcggcctgctgaccttcgaggacgtggccgtgcacttcagcgaggaggagtggcagctgctggaccccaaccagaagaccctgtacaacgaggtgatgtgggacatctgcgaggccgccagcttcgtgggcctgaagttcaagaacgacaccggcaacgccgagcccagcagcgtgagcgccctggagatccaggccgccgagaggcagggcagcaagaccaggaagaacgtggccaggaagaggaagggcggcccaagcagcggcgcccctcctcccagcggcggcaggcggcccaagcagcggcgcccctcctcccagcggcggcagcccagccggctccccaacctctaccgaggagggcacctctgagtccgccacccccgagagcggccctggcacctccaccgagcccagcgagggcagcgcacccggcagccctgccggcagccccacctccacagaggagggaaccagcaccgagcccagcgaaggcagcgccccaggcaccagcaccgagcctagtgagcaggagattaaacggatcaacaagatcagaagaagacttgtgaaagacagcaacaccaagaaggccggcaagacaggccccatgaaaaccctgctggttagagtgatgacacccgatctgagagagcggctggaaaacctgagaaagaagcctgaaaatatcccccagcccatcagcaatacatctagagccaacctgaataagctgctgaccgattacaccgaaatgaagaaggcgatcctgcatgtgtactgggaagagttccagaaggaccctgtgggcctgatgagccgggtggcccagcctgccagcaagaagatcgatcagaacaagctgaaacctgagatggacgagaagggcaacctgaccaccgccggctttgcctgctctcagtgtggccagcccctgttcgtgtacaagctggagcaggtgtctgagaagggcaaggcttacaccaactacttcggacggtgcaatgtggccgagcacgaaaagctgatcctgctggcccagctgaagcccgagaaggatagcgacgaagccgtgacatatagcctgggaaagtttgggcagagggccctggatttctacagcattcatgtgaccaaggagtccacccaccccgtgaagcccctggcccagatcgccggaaacagatacgcctccggacctgtgggaaaggccctgagcgacgcatgtatgggcacaatcgcctccttcctgtctaagtaccaggacatcatcatcgaacaccagaaggtggtgaagggcaaccagaagagactggagagcctgcgggagctggccggcaaggaaaacctggaataccctagcgtgaccctgccacctcagcctcacaccaaggagggcgttgatgcctacaacgaagtgatcgcccgggtgcgaatgtgggtgaacctgaacctgtggcagaagctgaagctaagcagagatgatgccaagcctctgctgagactgaagggattcccttcctttcctctggtcgagagacaggccaacgaagtggactggtgggacatggtgtgtaacgtgaagaagctgatcaacgagaaaaaggaggatggcaaggtgttttggcagaatctggctggctacaagagacaggaagccctgagaccatacctgagcagcgaggaagatcggaagaagggaaagaaattcgctcggtaccagctgggcgacctgctgctgcacctggaaaagaagcacggcgaggactggggaaaggtgtacgacgaggcctgggagcggattgacaagaaagtggaaggcctgagcaagcacatcaagctggaagaggaacggagaagcgaggacgcccagagcaaggccgccctgaccgactggctgcgggctaaggccagcttcgtgatcgagggcctgaaggaggccgacaaggacgagttctgcagatgcgagctgaagctgcagaagtggtacggggacctgcggggaaagcccttcgccatcgaagccgagaacagcatcctggacatcagcggcttcagcaagcagtacaactgtgccttcatctggcagaaggacggcgtgaagaagctgaacctgtacctgatcatcaactacttcaagggcggcaagctgcggttcaagaagatcaaacctgaagccttcgaagccaacagattctacaccgtgatcaacaaaaagagcggcgagatcgtgcccatggaggtgaacttcaacttcgacgaccccaacctgatcatcctgcctctggcctttggcaagagacagggcagagaattcatctggaacgacctgctgtccctggaaaccggcagcctgaagctggccaacggaagagtgatcgagaagacactgtacaacagaagaacccggcaggatgagcctgccctgttcgtggccctgaccttcgagcggcgggaggtcctggactcctccaatatcaaaccaatgaacctgatcggcgtggcaagaggcgaaaacatccccgccgtgatcgccctgaccgaccccgagggctgcccactgagccggtttaaggatagcctgggaaacccaacccacatcctgagaatcggcgagagctataaggagaagcagcggaccatccaggccaagaaggaggtggagcagcggagagccggcggctacagccggaagtacgccagcaaagccaagaatctggcagacgatatggtgagaaacaccgctagagatctgctgtactacgccgtgacccaggatgccatgctgatcttcgccaacctgagccggggcttcggccggcagggcaagcggaccttcatggccgagagacagtacacacggatggaggactggctgaccgccaagctggcctacgagggcctgagcaagacctacctgtccaagacactggcccagtacacctccaagacatgcagcaactgtgggtttaccatcaccagcgccgactacgacagggtgctggagaagctgaagaagacagcaacaggctggatgaccacaattaacggcaaggagctgaaggtggagggccagattacctactacaacagatacaagagacagaacgtagtcaaggacctgtccgtcgagctggatagactgagcgaagaatctgtgaacaacgacatctcctcctggacaaagggcagaagcggagaagctctgagcctcctgaagaaaagattctcccatagacccgtgcaggagaagttcgtgtgcctgaactgcggcttcgagacacacgcagccgagcaagccgccctgaacatcgccagatcctggctgttcctgcggagccaggagtacaagaaataccagacaaacaagacaaccggcaacaccgataagagagccttcgtcgagacctggcagtccttttaccggaagaagcttaaggaggtgtggaaacctgccgtgcggtctggcggatctggcggaggctccaccagccccaagaaaaagagaaaagtctaagctgccttctgcggggcttgccttctggccatgcccttcttctctcccttgcacctgtacctcttggtctttgaataaagcctgagtaggaaggctagcaaaaaaaaaaaaaaaaaaaaaaaaaaaaaaaaaaaaaaaaaaaaaaaaaaaaaaaaaaaaaaaaaaaaaaaaaaaaaaaagcccagccggctccccaacctctaccgaggagggcacctctgagtccgccacccccgagagcggccctggcacctccaccgagcccagcgagggcagcgcacccggcagccctgccggcagccccacctccacagaggagggaaccagcaccgagcccagcgaaggcagcgccccaggcaccagcaccgagcctagtgagcaggagattaaacggatcaacaagatcagaagaagacttgtgaaagacagcaacaccaagaaggccggcaagacaggccccatgaaaaccctgctggttagagtgatgacacccgatctgagagagcggctggaaaacctgagaaagaagcctgaaaatatcccccagcccatcagcaatacatctagagccaacctgaataagctgctgaccgattacaccgaaatgaagaaggcgatcctgcatgtgtactgggaagagttccagaaggaccctgtgggcctgatgagccgggtggcccagcctgccagcaagaagatcgatcagaacaagctgaaacctgagatggacgagaagggcaacctgaccaccgccggctttgcctgctctcagtgtggccagcccctgttcgtgtacaagctggagcaggtgtctgagaagggcaaggcttacaccaactacttcggacggtgcaatgtggccgagcacgaaaagctgatcctgctggcccagctgaagcccgagaaggatagcgacgaagccgtgacatatagcctgggaaagtttgggcagagggccctggatttctacagcattcatgtgaccaaggagtccacccaccccgtgaagcccctggcccagatcgccggaaacagatacgcctccggacctgtgggaaaggccctgagcgacgcatgtatgggcacaatcgcctccttcctgtctaagtaccaggacatcatcatcgaacaccagaaggtggtgaagggcaaccagaagagactggagagcctgcgggagctggccggcaaggaaaacctggaataccctagcgtgaccctgccacctcagcctcacaccaaggagggcgttgatgcctacaacgaagtgatcgcccgggtgcgaatgtgggtgaacctgaacctgtggcagaagctgaagctaagcagagatgatgccaagcctctgctgagactgaagggattcccttcctttcctctggtcgagagacaggccaacgaagtggactggtgggacatggtgtgtaacgtgaagaagctgatcaacgagaaaaaggaggatggcaaggtgttttggcagaatctggctggctacaagagacaggaagccctgagaccatacctgagcagcgaggaagatcggaagaagggaaagaaattcgctcggtaccagctgggcgacctgctgctgcacctggaaaagaagcacggcgaggactggggaaaggtgtacgacgaggcctgggagcggattgacaagaaagtggaaggcctgagcaagcacatcaagctggaagaggaacggagaagcgaggacgcccagagcaaggccgccctgaccgactggctgcgggctaaggccagcttcgtgatcgagggcctgaaggaggccgacaaggacgagttctgcagatgcgagctgaagctgcagaagtggtacggggacctgcggggaaagcccttcgccatcgaagccgagaacagcatcctggacatcagcggcttcagcaagcagtacaactgtgccttcatctggcagaaggacggcgtgaagaagctgaacctgtacctgatcatcaactacttcaagggcggcaagctgcggttcaagaagatcaaacctgaagccttcgaagccaacagattctacaccgtgatcaacaaaaagagcggcgagatcgtgcccatggaggtgaacttcaacttcgacgaccccaacctgatcatcctgcctctggcctttggcaagagacagggcagagaattcatctggaacgacctgctgtccctggaaaccggcagcctgaagctggccaacggaagagtgatcgagaagacactgtacaacagaagaacccggcaggatgagcctgccctgttcgtggccctgaccttcgagcggcgggaggtcctggactcctccaatatcaaaccaatgaacctgatcggcgtggcaagaggcgaaaacatccccgccgtgatcgccctgaccgaccccgagggctgcccactgagccggtttaaggatagcctgggaaacccaacccacatcctgagaatcggcgagagctataaggagaagcagcggaccatccaggccaagaaggaggtggagcagcggagagccggcggctacagccggaagtacgccagcaaagccaagaatctggcagacgatatggtgagaaacaccgctagagatctgctgtactacgccgtgacccaggatgccatgctgatcttcgccaacctgagccggggcttcggccggcagggcaagcggaccttcatggccgagagacagtacacacggatggaggactggctgaccgccaagctggcctacgagggcctgagcaagacctacctgtccaagacactggcccagtacacctccaagacatgcagcaactgtgggtttaccatcaccagcgccgactacgacagggtgctggagaagctgaagaagacagcaacaggctggatgaccacaattaacggcaaggagctgaaggtggagggccagattacctactacaacagatacaagagacagaacgtagtcaaggacctgtccgtcgagctggatagactgagcgaagaatctgtgaacaacgacatctcctcctggacaaagggcagaagcggagaagctctgagcctcctgaagaaaagattctcccatagacccgtgcaggagaagttcgtgtgcctgaactgcggcttcgagacacacgcagccgagcaagccgccctgaacatcgccagatcctggctgttcctgcggagccaggagtacaagaaataccagacaaacaagacaaccggcaacaccgataagagagccttcgtcgagacctggcagtccttttaccggaagaagcttaaggaggtgtggaaacctgccgtgcggtctggcggatctggcggaggctccaccagccccaagaaaaagagaaaagtctaagctgccttctgcggggcttgccttctggccatgcccttcttctctcccttgcacctgtacctcttggtctttgaataaagcctgagtaggaaggctagcaaaaaaaaaaaaaaaaaaaaaaaaaaaaaaaaaaaaaaaaaaaaaaaaaaaaaaaaaaaaaaaaaaaaaaaaaaaaaaaa

SEQ ID NO: 9115 - RNA, 8787 nt, synthetic construct
  source 1..8787: mol_type = other RNA
aggaaataagagagaaaagaagagtaagaagaaatataagagccaccatggcccctaagaagaagcgtaaagtgagccggatgaaccacgaccaggagttcgacccccctaaggtgtaccctcccgtccccgccgagaagagaaagcccatccgggtcctgagcctgttcgatggcatcgccaccggtctgctggtgctgaaggacctgggcatccaggtggataggtacattgcctccgaggtgtgcgaggactccatcaccgtgggaatggtgcgtcatcagggcaagatcatgtacgtgggcgacgtgcggagcgtgacacagaagcatatccaggagtggggccctttcgacctggtgatcggcggcagcccttgcaatgacctgagcatcgtgaacccagcccggaagggcctgtacgagggaaccggcagactgttcttcgagttttacagactgctgcacgacgcccggcctaaggaaggcgacgaccggcccttcttttggctgttcgagaatgtggtggccatgggagtcagcgacaagcgggatattagccggttcctggagagcaaccccgtgatgatcgatgccaaggaagtgagcgccgcccaccgggccagatacttctggggcaatctgcctggcatgaacagacccctggccagcaccgtgaacgacaagctggagctgcaggagtgcctggagcacggccggatcgccaagttcagcaaggtgagaaccatcaccacccgaagcaacagcatcaaacaaggcaaggaccagcactttcctgtgttcatgaacgagaaggaggacatcctgtggtgtaccgagatggagagagtgttcgggttcccagtccactacacagatgtcagcaacatgtctagactggccagacagagactgctgggaagaagctggtccgtccctgtgatcagacacctgttcgcccctctgaaggagtacttcgcctgcgtgagcagcggcaacagcaacgccaacagccggggccccagcttctctagcggcctggtgccactgtccctgagagggagccacatgggccccatggagatctacaaaaccgtgagcgcctggaagcggcagcctgtgcgcgtgctgagcctgtttcggaatatcgataaagtcctgaaaagcctgggattcctggagagcggctctggctccggcggtggcaccctgaagtacgtggaggatgtgacaaacgtggtcagacgggatgtggagaagtggggccccttcgatctggtgtacggcagcacccaacccctgggcagctcttgtgaccggtgccctggctggtacatgtttcagttccaccggatcctgcagtacgccctgccgagacaggagtcccagcggccattcttttggattttcatggacaacttgctgctgaccgaggatgaccaggaaactaccactcggttcctgcagaccgaagccgtgaccctgcaggacgtgagaggccgggactaccagaacgccatgcgggtgtggtccaacatccctggactgaaaagcaagcacgcacctctgacccctaaagaagaggagtacctgcaggcccaggtgcggagcagaagcaagctggacgcccctaaggtggatctgctggtgaagaattgcctcctgcccctgagagagtacttcaagtatttcagccagaatagtctgcccctgggaggcagcggcggcggcatggccttcgaggacgtggccgtgcacttcagccaggaggagtggggcctgctggacaccgcccagaggagcctgtacaggagggtgatgctggagaacttcgccctgctggccagcctgggcctgagcgtgagcaggccccacgtggtgacccagctggagaggggcgaggagccctgggtgctgagcggcgtggacgtgaccctgcccagggacgcccagaggaggccccacaggggcagcggcggcccaagcagcggcgcccctcctcccagcggcggcaggcggcccaagcagcggcgcccctcctcccagcggcggcagcccagccggctccccaacctctaccgaggagggcacctctgagtccgccacccccgagagcggccctggcacctccaccgagcccagcgagggcagcgcacccggcagccctgccggcagccccacctccacagaggagggaaccagcaccgagcccagcgaaggcagcgccccaggcaccagcaccgagcctagtgagcaggagattaaacggatcaacaagatcagaagaagacttgtgaaagacagcaacaccaagaaggccggcaagacaggccccatgaaaaccctgctggttagagtgatgacacccgatctgagagagcggctggaaaacctgagaaagaagcctgaaaatatcccccagcccatcagcaatacatctagagccaacctgaataagctgctgaccgattacaccgaaatgaagaaggcgatcctgcatgtgtactgggaagagttccagaaggaccctgtgggcctgatgagccgggtggcccagcctgccagcaagaagatcgatcagaacaagctgaaacctgagatggacgagaagggcaacctgaccaccgccggctttgcctgctctcagtgtggccagcccctgttcgtgtacaagctggagcaggtgtctgagaagggcaaggcttacaccaactacttcggacggtgcaatgtggccgagcacgaaaagctgatcctgctggcccagctgaagcccgagaaggatagcgacgaagccgtgacatatagcctgggaaagtttgggcagagggccctggatttctacagcattcatgtgaccaaggagtccacccaccccgtgaagcccctggcccagatcgccggaaacagatacgcctccggacctgtgggaaaggccctgagcgacgcatgtatgggcacaatcgcctccttcctgtctaagtaccaggacatcatcatcgaacaccagaaggtggtgaagggcaaccagaagagactggagagcctgcgggagctggccggcaaggaaaacctggaataccctagcgtgaccctgccacctcagcctcacaccaaggagggcgttgatgcctacaacgaagtgatcgcccgggtgcgaatgtgggtgaacctgaacctgtggcagaagctgaagctaagcagagatgatgccaagcctctgctgagactgaagggattcccttcctttcctctggtcgagagacaggccaacgaagtggactggtgggacatggtgtgtaacgtgaagaagctgatcaacgagaaaaaggaggatggcaaggtgttttggcagaatctggctggctacaagagacaggaagccctgagaccatacctgagcagcgaggaagatcggaagaagggaaagaaattcgctcggtaccagctgggcgacctgctgctgcacctggaaaagaagcacggcgaggactggggaaaggtgtacgacgaggcctgggagcggattgacaagaaagtggaaggcctgagcaagcacatcaagctggaagaggaacggagaagcgaggacgcccagagcaaggccgccctgaccgactggctgcgggctaaggccagcttcgtgatcgagggcctgaaggaggccgacaaggacgagttctgcagatgcgagctgaagctgcagaagtggtacggggacctgcggggaaagcccttcgccatcgaagccgagaacagcatcctggacatcagcggcttcagcaagcagtacaactgtgccttcatctggcagaaggacggcgtgaagaagctgaacctgtacctgatcatcaactacttcaagggcggcaagctgcggttcaagaagatcaaacctgaagccttcgaagccaacagattctacaccgtgatcaacaaaaagagcggcgagatcgtgcccatggaggtgaacttcaacttcgacgaccccaacctgatcatcctgcctctggcctttggcaagagacagggcagagaattcatctggaacgacctgctgtccctggaaaccggcagcctgaagctggccaacggaagagtgatcgagaagacactgtacaacagaagaacccggcaggatgagcctgccctgttcgtggccctgaccttcgagcggcgggaggtcctggactcctccaatatcaaaccaatgaacctgatcggcgtggcaagaggcgaaaacatccccgccgtgatcgccctgaccgaccccgagggctgcccactgagccggtttaaggatagcctgggaaacccaacccacatcctgagaatcggcgagagctataaggagaagcagcggaccatccaggccaagaaggaggtggagcagcggagagccggcggctacagccggaagtacgccagcaaagccaagaatctggcagacgatatggtgagaaacaccgctagagatctgctgtactacgccgtgacccaggatgccatgctgatcttcgccaacctgagccggggcttcggccggcagggcaagcggaccttcatggccgagagacagtacacacggatggaggactggctgaccgccaagctggcctacgagggcctgagcaagacctacctgtccaagacactggcccagtacacctccaagacatgcagcaactgtgggtttaccatcaccagcgccgactacgacagggtgctggagaagctgaagaagacagcaacaggctggatgaccacaattaacggcaaggagctgaaggtggagggccagattacctactacaacagatacaagagacagaacgtagtcaaggacctgtccgtcgagctggatagactgagcgaagaatctgtgaacaacgacatctcctcctggacaaagggcagaagcggagaagctctgagcctcctgaagaaaagattctcccatagacccgtgcaggagaagttcgtgtgcctgaactgcggcttcgagacacacgcagccgagcaagccgccctgaacatcgccagatcctggctgttcctgcggagccaggagtacaagaaataccagacaaacaagacaaccggcaacaccgataagagagccttcgtcgagacctggcagtccttttaccggaagaagcttaaggaggtgtggaaacctgccgtgcggtctggcggatctggcggaggctccaccagccccaagaaaaagagaaaagtctaagctgccttctgcggggcttgccttctggccatgcccttcttctctcccttgcacctgtacctcttggtctttgaataaagcctgagtaggaaggctagcaaaaaaaaaaaaaaaaaaaaaaaaaaaaaaaaaaaaaaaaaaaaaaaaaaaaaaaaaaaaaaaaaaaaaaaaaaaaaaaagcccagccggctccccaacctctaccgaggagggcacctctgagtccgccacccccgagagcggccctggcacctccaccgagcccagcgagggcagcgcacccggcagccctgccggcagccccacctccacagaggagggaaccagcaccgagcccagcgaaggcagcgccccaggcaccagcaccgagcctagtgagcaggagattaaacggatcaacaagatcagaagaagacttgtgaaagacagcaacaccaagaaggccggcaagacaggccccatgaaaaccctgctggttagagtgatgacacccgatctgagagagcggctggaaaacctgagaaagaagcctgaaaatatcccccagcccatcagcaatacatctagagccaacctgaataagctgctgaccgattacaccgaaatgaagaaggcgatcctgcatgtgtactgggaagagttccagaaggaccctgtgggcctgatgagccgggtggcccagcctgccagcaagaagatcgatcagaacaagctgaaacctgagatggacgagaagggcaacctgaccaccgccggctttgcctgctctcagtgtggccagcccctgttcgtgtacaagctggagcaggtgtctgagaagggcaaggcttacaccaactacttcggacggtgcaatgtggccgagcacgaaaagctgatcctgctggcccagctgaagcccgagaaggatagcgacgaagccgtgacatatagcctgggaaagtttgggcagagggccctggatttctacagcattcatgtgaccaaggagtccacccaccccgtgaagcccctggcccagatcgccggaaacagatacgcctccggacctgtgggaaaggccctgagcgacgcatgtatgggcacaatcgcctccttcctgtctaagtaccaggacatcatcatcgaacaccagaaggtggtgaagggcaaccagaagagactggagagcctgcgggagctggccggcaaggaaaacctggaataccctagcgtgaccctgccacctcagcctcacaccaaggagggcgttgatgcctacaacgaagtgatcgcccgggtgcgaatgtgggtgaacctgaacctgtggcagaagctgaagctaagcagagatgatgccaagcctctgctgagactgaagggattcccttcctttcctctggtcgagagacaggccaacgaagtggactggtgggacatggtgtgtaacgtgaagaagctgatcaacgagaaaaaggaggatggcaaggtgttttggcagaatctggctggctacaagagacaggaagccctgagaccatacctgagcagcgaggaagatcggaagaagggaaagaaattcgctcggtaccagctgggcgacctgctgctgcacctggaaaagaagcacggcgaggactggggaaaggtgtacgacgaggcctgggagcggattgacaagaaagtggaaggcctgagcaagcacatcaagctggaagaggaacggagaagcgaggacgcccagagcaaggccgccctgaccgactggctgcgggctaaggccagcttcgtgatcgagggcctgaaggaggccgacaaggacgagttctgcagatgcgagctgaagctgcagaagtggtacggggacctgcggggaaagcccttcgccatcgaagccgagaacagcatcctggacatcagcggcttcagcaagcagtacaactgtgccttcatctggcagaaggacggcgtgaagaagctgaacctgtacctgatcatcaactacttcaagggcggcaagctgcggttcaagaagatcaaacctgaagccttcgaagccaacagattctacaccgtgatcaacaaaaagagcggcgagatcgtgcccatggaggtgaacttcaacttcgacgaccccaacctgatcatcctgcctctggcctttggcaagagacagggcagagaattcatctggaacgacctgctgtccctggaaaccggcagcctgaagctggccaacggaagagtgatcgagaagacactgtacaacagaagaacccggcaggatgagcctgccctgttcgtggccctgaccttcgagcggcgggaggtcctggactcctccaatatcaaaccaatgaacctgatcggcgtggcaagaggcgaaaacatccccgccgtgatcgccctgaccgaccccgagggctgcccactgagccggtttaaggatagcctgggaaacccaacccacatcctgagaatcggcgagagctataaggagaagcagcggaccatccaggccaagaaggaggtggagcagcggagagccggcggctacagccggaagtacgccagcaaagccaagaatctggcagacgatatggtgagaaacaccgctagagatctgctgtactacgccgtgacccaggatgccatgctgatcttcgccaacctgagccggggcttcggccggcagggcaagcggaccttcatggccgagagacagtacacacggatggaggactggctgaccgccaagctggcctacgagggcctgagcaagacctacctgtccaagacactggcccagtacacctccaagacatgcagcaactgtgggtttaccatcaccagcgccgactacgacagggtgctggagaagctgaagaagacagcaacaggctggatgaccacaattaacggcaaggagctgaaggtggagggccagattacctactacaacagatacaagagacagaacgtagtcaaggacctgtccgtcgagctggatagactgagcgaagaatctgtgaacaacgacatctcctcctggacaaagggcagaagcggagaagctctgagcctcctgaagaaaagattctcccatagacccgtgcaggagaagttcgtgtgcctgaactgcggcttcgagacacacgcagccgagcaagccgccctgaacatcgccagatcctggctgttcctgcggagccaggagtacaagaaataccagacaaacaagacaaccggcaacaccgataagagagccttcgtcgagacctggcagtccttttaccggaagaagcttaaggaggtgtggaaacctgccgtgcggtctggcggatctggcggaggctccaccagccccaagaaaaagagaaaagtctaagctgccttctgcggggcttgccttctggccatgcccttcttctctcccttgcacctgtacctcttggtctttgaataaagcctgagtaggaaggctagcaaaaaaaaaaaaaaaaaaaaaaaaaaaaaaaaaaaaaaaaaaaaaaaaaaaaaaaaaaaaaaaaaaaaaaaaaaaaaaaa

SEQ ID NO: 9116 - RNA, 8787 nt, synthetic construct
  source 1..8787: mol_type = other RNA
aggaaataagagagaaaagaagagtaagaagaaatataagagccaccatggcccctaagaagaagcgtaaagtgagccggatgaaccacgaccaggagttcgacccccctaaggtgtaccctcccgtccccgccgagaagagaaagcccatccgggtcctgagcctgttcgatggcatcgccaccggtctgctggtgctgaaggacctgggcatccaggtggataggtacattgcctccgaggtgtgcgaggactccatcaccgtgggaatggtgcgtcatcagggcaagatcatgtacgtgggcgacgtgcggagcgtgacacagaagcatatccaggagtggggccctttcgacctggtgatcggcggcagcccttgcaatgacctgagcatcgtgaacccagcccggaagggcctgtacgagggaaccggcagactgttcttcgagttttacagactgctgcacgacgcccggcctaaggaaggcgacgaccggcccttcttttggctgttcgagaatgtggtggccatgggagtcagcgacaagcgggatattagccggttcctggagagcaaccccgtgatgatcgatgccaaggaagtgagcgccgcccaccgggccagatacttctggggcaatctgcctggcatgaacagacccctggccagcaccgtgaacgacaagctggagctgcaggagtgcctggagcacggccggatcgccaagttcagcaaggtgagaaccatcaccacccgaagcaacagcatcaaacaaggcaaggaccagcactttcctgtgttcatgaacgagaaggaggacatcctgtggtgtaccgagatggagagagtgttcgggttcccagtccactacacagatgtcagcaacatgtctagactggccagacagagactgctgggaagaagctggtccgtccctgtgatcagacacctgttcgcccctctgaaggagtacttcgcctgcgtgagcagcggcaacagcaacgccaacagccggggccccagcttctctagcggcctggtgccactgtccctgagagggagccacatgggccccatggagatctacaaaaccgtgagcgcctggaagcggcagcctgtgcgcgtgctgagcctgtttcggaatatcgataaagtcctgaaaagcctgggattcctggagagcggctctggctccggcggtggcaccctgaagtacgtggaggatgtgacaaacgtggtcagacgggatgtggagaagtggggccccttcgatctggtgtacggcagcacccaacccctgggcagctcttgtgaccggtgccctggctggtacatgtttcagttccaccggatcctgcagtacgccctgccgagacaggagtcccagcggccattcttttggattttcatggacaacttgctgctgaccgaggatgaccaggaaactaccactcggttcctgcagaccgaagccgtgaccctgcaggacgtgagaggccgggactaccagaacgccatgcgggtgtggtccaacatccctggactgaaaagcaagcacgcacctctgacccctaaagaagaggagtacctgcaggcccaggtgcggagcagaagcaagctggacgcccctaaggtggatctgctggtgaagaattgcctcctgcccctgagagagtacttcaagtatttcagccagaatagtctgcccctgggaggcagcggcggcggcatgatcgagtaccagatccccgtgagcttcaaggacgtggtggtgggcttcacccaggaggagtggcaccagctgagccccgcccagagggccctgtacagggacgtgatgctggagacctacagcaacctggtgagcgtgggctacgagggcaccaagcccgacgtgatcctgaggctggagcaggaggaggccccctggatcggcgaggccgcctgcctgggctgccactgctgggaggacggcggcccaagcagcggcgcccctcctcccagcggcggcaggcggcccaagcagcggcgcccctcctcccagcggcggcagcccagccggctccccaacctctaccgaggagggcacctctgagtccgccacccccgagagcggccctggcacctccaccgagcccagcgagggcagcgcacccggcagccctgccggcagccccacctccacagaggagggaaccagcaccgagcccagcgaaggcagcgccccaggcaccagcaccgagcctagtgagcaggagattaaacggatcaacaagatcagaagaagacttgtgaaagacagcaacaccaagaaggccggcaagacaggccccatgaaaaccctgctggttagagtgatgacacccgatctgagagagcggctggaaaacctgagaaagaagcctgaaaatatcccccagcccatcagcaatacatctagagccaacctgaataagctgctgaccgattacaccgaaatgaagaaggcgatcctgcatgtgtactgggaagagttccagaaggaccctgtgggcctgatgagccgggtggcccagcctgccagcaagaagatcgatcagaacaagctgaaacctgagatggacgagaagggcaacctgaccaccgccggctttgcctgctctcagtgtggccagcccctgttcgtgtacaagctggagcaggtgtctgagaagggcaaggcttacaccaactacttcggacggtgcaatgtggccgagcacgaaaagctgatcctgctggcccagctgaagcccgagaaggatagcgacgaagccgtgacatatagcctgggaaagtttgggcagagggccctggatttctacagcattcatgtgaccaaggagtccacccaccccgtgaagcccctggcccagatcgccggaaacagatacgcctccggacctgtgggaaaggccctgagcgacgcatgtatgggcacaatcgcctccttcctgtctaagtaccaggacatcatcatcgaacaccagaaggtggtgaagggcaaccagaagagactggagagcctgcgggagctggccggcaaggaaaacctggaataccctagcgtgaccctgccacctcagcctcacaccaaggagggcgttgatgcctacaacgaagtgatcgcccgggtgcgaatgtgggtgaacctgaacctgtggcagaagctgaagctaagcagagatgatgccaagcctctgctgagactgaagggattcccttcctttcctctggtcgagagacaggccaacgaagtggactggtgggacatggtgtgtaacgtgaagaagctgatcaacgagaaaaaggaggatggcaaggtgttttggcagaatctggctggctacaagagacaggaagccctgagaccatacctgagcagcgaggaagatcggaagaagggaaagaaattcgctcggtaccagctgggcgacctgctgctgcacctggaaaagaagcacggcgaggactggggaaaggtgtacgacgaggcctgggagcggattgacaagaaagtggaaggcctgagcaagcacatcaagctggaagaggaacggagaagcgaggacgcccagagcaaggccgccctgaccgactggctgcgggctaaggccagcttcgtgatcgagggcctgaaggaggccgacaaggacgagttctgcagatgcgagctgaagctgcagaagtggtacggggacctgcggggaaagcccttcgccatcgaagccgagaacagcatcctggacatcagcggcttcagcaagcagtacaactgtgccttcatctggcagaaggacggcgtgaagaagctgaacctgtacctgatcatcaactacttcaagggcggcaagctgcggttcaagaagatcaaacctgaagccttcgaagccaacagattctacaccgtgatcaacaaaaagagcggcgagatcgtgcccatggaggtgaacttcaacttcgacgaccccaacctgatcatcctgcctctggcctttggcaagagacagggcagagaattcatctggaacgacctgctgtccctggaaaccggcagcctgaagctggccaacggaagagtgatcgagaagacactgtacaacagaagaacccggcaggatgagcctgccctgttcgtggccctgaccttcgagcggcgggaggtcctggactcctccaatatcaaaccaatgaacctgatcggcgtggcaagaggcgaaaacatccccgccgtgatcgccctgaccgaccccgagggctgcccactgagccggtttaaggatagcctgggaaacccaacccacatcctgagaatcggcgagagctataaggagaagcagcggaccatccaggccaagaaggaggtggagcagcggagagccggcggctacagccggaagtacgccagcaaagccaagaatctggcagacgatatggtgagaaacaccgctagagatctgctgtactacgccgtgacccaggatgccatgctgatcttcgccaacctgagccggggcttcggccggcagggcaagcggaccttcatggccgagagacagtacacacggatggaggactggctgaccgccaagctggcctacgagggcctgagcaagacctacctgtccaagacactggcccagtacacctccaagacatgcagcaactgtgggtttaccatcaccagcgccgactacgacagggtgctggagaagctgaagaagacagcaacaggctggatgaccacaattaacggcaaggagctgaaggtggagggccagattacctactacaacagatacaagagacagaacgtagtcaaggacctgtccgtcgagctggatagactgagcgaagaatctgtgaacaacgacatctcctcctggacaaagggcagaagcggagaagctctgagcctcctgaagaaaagattctcccatagacccgtgcaggagaagttcgtgtgcctgaactgcggcttcgagacacacgcagccgagcaagccgccctgaacatcgccagatcctggctgttcctgcggagccaggagtacaagaaataccagacaaacaagacaaccggcaacaccgataagagagccttcgtcgagacctggcagtccttttaccggaagaagcttaaggaggtgtggaaacctgccgtgcggtctggcggatctggcggaggctccaccagccccaagaaaaagagaaaagtctaagctgccttctgcggggcttgccttctggccatgcccttcttctctcccttgcacctgtacctcttggtctttgaataaagcctgagtaggaaggctagcaaaaaaaaaaaaaaaaaaaaaaaaaaaaaaaaaaaaaaaaaaaaaaaaaaaaaaaaaaaaaaaaaaaaaaaaaaaaaaaagcccagccggctccccaacctctaccgaggagggcacctctgagtccgccacccccgagagcggccctggcacctccaccgagcccagcgagggcagcgcacccggcagccctgccggcagccccacctccacagaggagggaaccagcaccgagcccagcgaaggcagcgccccaggcaccagcaccgagcctagtgagcaggagattaaacggatcaacaagatcagaagaagacttgtgaaagacagcaacaccaagaaggccggcaagacaggccccatgaaaaccctgctggttagagtgatgacacccgatctgagagagcggctggaaaacctgagaaagaagcctgaaaatatcccccagcccatcagcaatacatctagagccaacctgaataagctgctgaccgattacaccgaaatgaagaaggcgatcctgcatgtgtactgggaagagttccagaaggaccctgtgggcctgatgagccgggtggcccagcctgccagcaagaagatcgatcagaacaagctgaaacctgagatggacgagaagggcaacctgaccaccgccggctttgcctgctctcagtgtggccagcccctgttcgtgtacaagctggagcaggtgtctgagaagggcaaggcttacaccaactacttcggacggtgcaatgtggccgagcacgaaaagctgatcctgctggcccagctgaagcccgagaaggatagcgacgaagccgtgacatatagcctgggaaagtttgggcagagggccctggatttctacagcattcatgtgaccaaggagtccacccaccccgtgaagcccctggcccagatcgccggaaacagatacgcctccggacctgtgggaaaggccctgagcgacgcatgtatgggcacaatcgcctccttcctgtctaagtaccaggacatcatcatcgaacaccagaaggtggtgaagggcaaccagaagagactggagagcctgcgggagctggccggcaaggaaaacctggaataccctagcgtgaccctgccacctcagcctcacaccaaggagggcgttgatgcctacaacgaagtgatcgcccgggtgcgaatgtgggtgaacctgaacctgtggcagaagctgaagctaagcagagatgatgccaagcctctgctgagactgaagggattcccttcctttcctctggtcgagagacaggccaacgaagtggactggtgggacatggtgtgtaacgtgaagaagctgatcaacgagaaaaaggaggatggcaaggtgttttggcagaatctggctggctacaagagacaggaagccctgagaccatacctgagcagcgaggaagatcggaagaagggaaagaaattcgctcggtaccagctgggcgacctgctgctgcacctggaaaagaagcacggcgaggactggggaaaggtgtacgacgaggcctgggagcggattgacaagaaagtggaaggcctgagcaagcacatcaagctggaagaggaacggagaagcgaggacgcccagagcaaggccgccctgaccgactggctgcgggctaaggccagcttcgtgatcgagggcctgaaggaggccgacaaggacgagttctgcagatgcgagctgaagctgcagaagtggtacggggacctgcggggaaagcccttcgccatcgaagccgagaacagcatcctggacatcagcggcttcagcaagcagtacaactgtgccttcatctggcagaaggacggcgtgaagaagctgaacctgtacctgatcatcaactacttcaagggcggcaagctgcggttcaagaagatcaaacctgaagccttcgaagccaacagattctacaccgtgatcaacaaaaagagcggcgagatcgtgcccatggaggtgaacttcaacttcgacgaccccaacctgatcatcctgcctctggcctttggcaagagacagggcagagaattcatctggaacgacctgctgtccctggaaaccggcagcctgaagctggccaacggaagagtgatcgagaagacactgtacaacagaagaacccggcaggatgagcctgccctgttcgtggccctgaccttcgagcggcgggaggtcctggactcctccaatatcaaaccaatgaacctgatcggcgtggcaagaggcgaaaacatccccgccgtgatcgccctgaccgaccccgagggctgcccactgagccggtttaaggatagcctgggaaacccaacccacatcctgagaatcggcgagagctataaggagaagcagcggaccatccaggccaagaaggaggtggagcagcggagagccggcggctacagccggaagtacgccagcaaagccaagaatctggcagacgatatggtgagaaacaccgctagagatctgctgtactacgccgtgacccaggatgccatgctgatcttcgccaacctgagccggggcttcggccggcagggcaagcggaccttcatggccgagagacagtacacacggatggaggactggctgaccgccaagctggcctacgagggcctgagcaagacctacctgtccaagacactggcccagtacacctccaagacatgcagcaactgtgggtttaccatcaccagcgccgactacgacagggtgctggagaagctgaagaagacagcaacaggctggatgaccacaattaacggcaaggagctgaaggtggagggccagattacctactacaacagatacaagagacagaacgtagtcaaggacctgtccgtcgagctggatagactgagcgaagaatctgtgaacaacgacatctcctcctggacaaagggcagaagcggagaagctctgagcctcctgaagaaaagattctcccatagacccgtgcaggagaagttcgtgtgcctgaactgcggcttcgagacacacgcagccgagcaagccgccctgaacatcgccagatcctggctgttcctgcggagccaggagtacaagaaataccagacaaacaagacaaccggcaacaccgataagagagccttcgtcgagacctggcagtccttttaccggaagaagcttaaggaggtgtggaaacctgccgtgcggtctggcggatctggcggaggctccaccagccccaagaaaaagagaaaagtctaagctgccttctgcggggcttgccttctggccatgcccttcttctctcccttgcacctgtacctcttggtctttgaataaagcctgagtaggaaggctagcaaaaaaaaaaaaaaaaaaaaaaaaaaaaaaaaaaaaaaaaaaaaaaaaaaaaaaaaaaaaaaaaaaaaaaaaaaaaaaaa

SEQ ID NO: 9117 - RNA, 8787 nt, synthetic construct
  source 1..8787: mol_type = other RNA
aggaaataagagagaaaagaagagtaagaagaaatataagagccaccatggcccctaagaagaagcgtaaagtgagccggatgaaccacgaccaggagttcgacccccctaaggtgtaccctcccgtccccgccgagaagagaaagcccatccgggtcctgagcctgttcgatggcatcgccaccggtctgctggtgctgaaggacctgggcatccaggtggataggtacattgcctccgaggtgtgcgaggactccatcaccgtgggaatggtgcgtcatcagggcaagatcatgtacgtgggcgacgtgcggagcgtgacacagaagcatatccaggagtggggccctttcgacctggtgatcggcggcagcccttgcaatgacctgagcatcgtgaacccagcccggaagggcctgtacgagggaaccggcagactgttcttcgagttttacagactgctgcacgacgcccggcctaaggaaggcgacgaccggcccttcttttggctgttcgagaatgtggtggccatgggagtcagcgacaagcgggatattagccggttcctggagagcaaccccgtgatgatcgatgccaaggaagtgagcgccgcccaccgggccagatacttctggggcaatctgcctggcatgaacagacccctggccagcaccgtgaacgacaagctggagctgcaggagtgcctggagcacggccggatcgccaagttcagcaaggtgagaaccatcaccacccgaagcaacagcatcaaacaaggcaaggaccagcactttcctgtgttcatgaacgagaaggaggacatcctgtggtgtaccgagatggagagagtgttcgggttcccagtccactacacagatgtcagcaacatgtctagactggccagacagagactgctgggaagaagctggtccgtccctgtgatcagacacctgttcgcccctctgaaggagtacttcgcctgcgtgagcagcggcaacagcaacgccaacagccggggccccagcttctctagcggcctggtgccactgtccctgagagggagccacatgggccccatggagatctacaaaaccgtgagcgcctggaagcggcagcctgtgcgcgtgctgagcctgtttcggaatatcgataaagtcctgaaaagcctgggattcctggagagcggctctggctccggcggtggcaccctgaagtacgtggaggatgtgacaaacgtggtcagacgggatgtggagaagtggggccccttcgatctggtgtacggcagcacccaacccctgggcagctcttgtgaccggtgccctggctggtacatgtttcagttccaccggatcctgcagtacgccctgccgagacaggagtcccagcggccattcttttggattttcatggacaacttgctgctgaccgaggatgaccaggaaactaccactcggttcctgcagaccgaagccgtgaccctgcaggacgtgagaggccgggactaccagaacgccatgcgggtgtggtccaacatccctggactgaaaagcaagcacgcacctctgacccctaaagaagaggagtacctgcaggcccaggtgcggagcagaagcaagctggacgcccctaaggtggatctgctggtgaagaattgcctcctgcccctgagagagtacttcaagtatttcagccagaatagtctgcccctgggaggcagcggcggcggcatggcccaggtgaccttcagcgacgtggccatcgacttcagccacgaggagtgggcctggctggacagcgcccagagggacctgtacaaggacgtgatggtgcagaactacgagaacctggtgagcgtgggcctgagcgtgaccaagccctacgtgatcaccctgctggaggacggcaaggagccctggatggtggagaagaagctgagcaagggcatgatccccgactgggagagcaggtggggcggcccaagcagcggcgcccctcctcccagcggcggcaggcggcccaagcagcggcgcccctcctcccagcggcggcagcccagccggctccccaacctctaccgaggagggcacctctgagtccgccacccccgagagcggccctggcacctccaccgagcccagcgagggcagcgcacccggcagccctgccggcagccccacctccacagaggagggaaccagcaccgagcccagcgaaggcagcgccccaggcaccagcaccgagcctagtgagcaggagattaaacggatcaacaagatcagaagaagacttgtgaaagacagcaacaccaagaaggccggcaagacaggccccatgaaaaccctgctggttagagtgatgacacccgatctgagagagcggctggaaaacctgagaaagaagcctgaaaatatcccccagcccatcagcaatacatctagagccaacctgaataagctgctgaccgattacaccgaaatgaagaaggcgatcctgcatgtgtactgggaagagttccagaaggaccctgtgggcctgatgagccgggtggcccagcctgccagcaagaagatcgatcagaacaagctgaaacctgagatggacgagaagggcaacctgaccaccgccggctttgcctgctctcagtgtggccagcccctgttcgtgtacaagctggagcaggtgtctgagaagggcaaggcttacaccaactacttcggacggtgcaatgtggccgagcacgaaaagctgatcctgctggcccagctgaagcccgagaaggatagcgacgaagccgtgacatatagcctgggaaagtttgggcagagggccctggatttctacagcattcatgtgaccaaggagtccacccaccccgtgaagcccctggcccagatcgccggaaacagatacgcctccggacctgtgggaaaggccctgagcgacgcatgtatgggcacaatcgcctccttcctgtctaagtaccaggacatcatcatcgaacaccagaaggtggtgaagggcaaccagaagagactggagagcctgcgggagctggccggcaaggaaaacctggaataccctagcgtgaccctgccacctcagcctcacaccaaggagggcgttgatgcctacaacgaagtgatcgcccgggtgcgaatgtgggtgaacctgaacctgtggcagaagctgaagctaagcagagatgatgccaagcctctgctgagactgaagggattcccttcctttcctctggtcgagagacaggccaacgaagtggactggtgggacatggtgtgtaacgtgaagaagctgatcaacgagaaaaaggaggatggcaaggtgttttggcagaatctggctggctacaagagacaggaagccctgagaccatacctgagcagcgaggaagatcggaagaagggaaagaaattcgctcggtaccagctgggcgacctgctgctgcacctggaaaagaagcacggcgaggactggggaaaggtgtacgacgaggcctgggagcggattgacaagaaagtggaaggcctgagcaagcacatcaagctggaagaggaacggagaagcgaggacgcccagagcaaggccgccctgaccgactggctgcgggctaaggccagcttcgtgatcgagggcctgaaggaggccgacaaggacgagttctgcagatgcgagctgaagctgcagaagtggtacggggacctgcggggaaagcccttcgccatcgaagccgagaacagcatcctggacatcagcggcttcagcaagcagtacaactgtgccttcatctggcagaaggacggcgtgaagaagctgaacctgtacctgatcatcaactacttcaagggcggcaagctgcggttcaagaagatcaaacctgaagccttcgaagccaacagattctacaccgtgatcaacaaaaagagcggcgagatcgtgcccatggaggtgaacttcaacttcgacgaccccaacctgatcatcctgcctctggcctttggcaagagacagggcagagaattcatctggaacgacctgctgtccctggaaaccggcagcctgaagctggccaacggaagagtgatcgagaagacactgtacaacagaagaacccggcaggatgagcctgccctgttcgtggccctgaccttcgagcggcgggaggtcctggactcctccaatatcaaaccaatgaacctgatcggcgtggcaagaggcgaaaacatccccgccgtgatcgccctgaccgaccccgagggctgcccactgagccggtttaaggatagcctgggaaacccaacccacatcctgagaatcggcgagagctataaggagaagcagcggaccatccaggccaagaaggaggtggagcagcggagagccggcggctacagccggaagtacgccagcaaagccaagaatctggcagacgatatggtgagaaacaccgctagagatctgctgtactacgccgtgacccaggatgccatgctgatcttcgccaacctgagccggggcttcggccggcagggcaagcggaccttcatggccgagagacagtacacacggatggaggactggctgaccgccaagctggcctacgagggcctgagcaagacctacctgtccaagacactggcccagtacacctccaagacatgcagcaactgtgggtttaccatcaccagcgccgactacgacagggtgctggagaagctgaagaagacagcaacaggctggatgaccacaattaacggcaaggagctgaaggtggagggccagattacctactacaacagatacaagagacagaacgtagtcaaggacctgtccgtcgagctggatagactgagcgaagaatctgtgaacaacgacatctcctcctggacaaagggcagaagcggagaagctctgagcctcctgaagaaaagattctcccatagacccgtgcaggagaagttcgtgtgcctgaactgcggcttcgagacacacgcagccgagcaagccgccctgaacatcgccagatcctggctgttcctgcggagccaggagtacaagaaataccagacaaacaagacaaccggcaacaccgataagagagccttcgtcgagacctggcagtccttttaccggaagaagcttaaggaggtgtggaaacctgccgtgcggtctggcggatctggcggaggctccaccagccccaagaaaaagagaaaagtctaagctgccttctgcggggcttgccttctggccatgcccttcttctctcccttgcacctgtacctcttggtctttgaataaagcctgagtaggaaggctagcaaaaaaaaaaaaaaaaaaaaaaaaaaaaaaaaaaaaaaaaaaaaaaaaaaaaaaaaaaaaaaaaaaaaaaaaaaaaaaaagcccagccggctccccaacctctaccgaggagggcacctctgagtccgccacccccgagagcggccctggcacctccaccgagcccagcgagggcagcgcacccggcagccctgccggcagccccacctccacagaggagggaaccagcaccgagcccagcgaaggcagcgccccaggcaccagcaccgagcctagtgagcaggagattaaacggatcaacaagatcagaagaagacttgtgaaagacagcaacaccaagaaggccggcaagacaggccccatgaaaaccctgctggttagagtgatgacacccgatctgagagagcggctggaaaacctgagaaagaagcctgaaaatatcccccagcccatcagcaatacatctagagccaacctgaataagctgctgaccgattacaccgaaatgaagaaggcgatcctgcatgtgtactgggaagagttccagaaggaccctgtgggcctgatgagccgggtggcccagcctgccagcaagaagatcgatcagaacaagctgaaacctgagatggacgagaagggcaacctgaccaccgccggctttgcctgctctcagtgtggccagcccctgttcgtgtacaagctggagcaggtgtctgagaagggcaaggcttacaccaactacttcggacggtgcaatgtggccgagcacgaaaagctgatcctgctggcccagctgaagcccgagaaggatagcgacgaagccgtgacatatagcctgggaaagtttgggcagagggccctggatttctacagcattcatgtgaccaaggagtccacccaccccgtgaagcccctggcccagatcgccggaaacagatacgcctccggacctgtgggaaaggccctgagcgacgcatgtatgggcacaatcgcctccttcctgtctaagtaccaggacatcatcatcgaacaccagaaggtggtgaagggcaaccagaagagactggagagcctgcgggagctggccggcaaggaaaacctggaataccctagcgtgaccctgccacctcagcctcacaccaaggagggcgttgatgcctacaacgaagtgatcgcccgggtgcgaatgtgggtgaacctgaacctgtggcagaagctgaagctaagcagagatgatgccaagcctctgctgagactgaagggattcccttcctttcctctggtcgagagacaggccaacgaagtggactggtgggacatggtgtgtaacgtgaagaagctgatcaacgagaaaaaggaggatggcaaggtgttttggcagaatctggctggctacaagagacaggaagccctgagaccatacctgagcagcgaggaagatcggaagaagggaaagaaattcgctcggtaccagctgggcgacctgctgctgcacctggaaaagaagcacggcgaggactggggaaaggtgtacgacgaggcctgggagcggattgacaagaaagtggaaggcctgagcaagcacatcaagctggaagaggaacggagaagcgaggacgcccagagcaaggccgccctgaccgactggctgcgggctaaggccagcttcgtgatcgagggcctgaaggaggccgacaaggacgagttctgcagatgcgagctgaagctgcagaagtggtacggggacctgcggggaaagcccttcgccatcgaagccgagaacagcatcctggacatcagcggcttcagcaagcagtacaactgtgccttcatctggcagaaggacggcgtgaagaagctgaacctgtacctgatcatcaactacttcaagggcggcaagctgcggttcaagaagatcaaacctgaagccttcgaagccaacagattctacaccgtgatcaacaaaaagagcggcgagatcgtgcccatggaggtgaacttcaacttcgacgaccccaacctgatcatcctgcctctggcctttggcaagagacagggcagagaattcatctggaacgacctgctgtccctggaaaccggcagcctgaagctggccaacggaagagtgatcgagaagacactgtacaacagaagaacccggcaggatgagcctgccctgttcgtggccctgaccttcgagcggcgggaggtcctggactcctccaatatcaaaccaatgaacctgatcggcgtggcaagaggcgaaaacatccccgccgtgatcgccctgaccgaccccgagggctgcccactgagccggtttaaggatagcctgggaaacccaacccacatcctgagaatcggcgagagctataaggagaagcagcggaccatccaggccaagaaggaggtggagcagcggagagccggcggctacagccggaagtacgccagcaaagccaagaatctggcagacgatatggtgagaaacaccgctagagatctgctgtactacgccgtgacccaggatgccatgctgatcttcgccaacctgagccggggcttcggccggcagggcaagcggaccttcatggccgagagacagtacacacggatggaggactggctgaccgccaagctggcctacgagggcctgagcaagacctacctgtccaagacactggcccagtacacctccaagacatgcagcaactgtgggtttaccatcaccagcgccgactacgacagggtgctggagaagctgaagaagacagcaacaggctggatgaccacaattaacggcaaggagctgaaggtggagggccagattacctactacaacagatacaagagacagaacgtagtcaaggacctgtccgtcgagctggatagactgagcgaagaatctgtgaacaacgacatctcctcctggacaaagggcagaagcggagaagctctgagcctcctgaagaaaagattctcccatagacccgtgcaggagaagttcgtgtgcctgaactgcggcttcgagacacacgcagccgagcaagccgccctgaacatcgccagatcctggctgttcctgcggagccaggagtacaagaaataccagacaaacaagacaaccggcaacaccgataagagagccttcgtcgagacctggcagtccttttaccggaagaagcttaaggaggtgtggaaacctgccgtgcggtctggcggatctggcggaggctccaccagccccaagaaaaagagaaaagtctaagctgccttctgcggggcttgccttctggccatgcccttcttctctcccttgcacctgtacctcttggtctttgaataaagcctgagtaggaaggctagcaaaaaaaaaaaaaaaaaaaaaaaaaaaaaaaaaaaaaaaaaaaaaaaaaaaaaaaaaaaaaaaaaaaaaaaaaaaaaaaa

SEQ ID NO: 9118 - RNA, 8787 nt, synthetic construct
  source 1..8787: mol_type = other RNA
aggaaataagagagaaaagaagagtaagaagaaatataagagccaccatggcccctaagaagaagcgtaaagtgagccggatgaaccacgaccaggagttcgacccccctaaggtgtaccctcccgtccccgccgagaagagaaagcccatccgggtcctgagcctgttcgatggcatcgccaccggtctgctggtgctgaaggacctgggcatccaggtggataggtacattgcctccgaggtgtgcgaggactccatcaccgtgggaatggtgcgtcatcagggcaagatcatgtacgtgggcgacgtgcggagcgtgacacagaagcatatccaggagtggggccctttcgacctggtgatcggcggcagcccttgcaatgacctgagcatcgtgaacccagcccggaagggcctgtacgagggaaccggcagactgttcttcgagttttacagactgctgcacgacgcccggcctaaggaaggcgacgaccggcccttcttttggctgttcgagaatgtggtggccatgggagtcagcgacaagcgggatattagccggttcctggagagcaaccccgtgatgatcgatgccaaggaagtgagcgccgcccaccgggccagatacttctggggcaatctgcctggcatgaacagacccctggccagcaccgtgaacgacaagctggagctgcaggagtgcctggagcacggccggatcgccaagttcagcaaggtgagaaccatcaccacccgaagcaacagcatcaaacaaggcaaggaccagcactttcctgtgttcatgaacgagaaggaggacatcctgtggtgtaccgagatggagagagtgttcgggttcccagtccactacacagatgtcagcaacatgtctagactggccagacagagactgctgggaagaagctggtccgtccctgtgatcagacacctgttcgcccctctgaaggagtacttcgcctgcgtgagcagcggcaacagcaacgccaacagccggggccccagcttctctagcggcctggtgccactgtccctgagagggagccacatgggccccatggagatctacaaaaccgtgagcgcctggaagcggcagcctgtgcgcgtgctgagcctgtttcggaatatcgataaagtcctgaaaagcctgggattcctggagagcggctctggctccggcggtggcaccctgaagtacgtggaggatgtgacaaacgtggtcagacgggatgtggagaagtggggccccttcgatctggtgtacggcagcacccaacccctgggcagctcttgtgaccggtgccctggctggtacatgtttcagttccaccggatcctgcagtacgccctgccgagacaggagtcccagcggccattcttttggattttcatggacaacttgctgctgaccgaggatgaccaggaaactaccactcggttcctgcagaccgaagccgtgaccctgcaggacgtgagaggccgggactaccagaacgccatgcgggtgtggtccaacatccctggactgaaaagcaagcacgcacctctgacccctaaagaagaggagtacctgcaggcccaggtgcggagcagaagcaagctggacgcccctaaggtggatctgctggtgaagaattgcctcctgcccctgagagagtacttcaagtatttcagccagaatagtctgcccctgggaggcagcggcggcggcaggctggagagcgtgaccttcgaggacgtggccgtgtacttcacccagaaccagtgggccagcctggaccccgcccagagggccctgtacggcgaggtgatgctggagaactacgccaacgtggccagcctggtggccttccccttccccaagcccgccctgatcagccacctggagaggggcgaggccccctggggccccgacccctgggacaccaagatccccaggggcatcagccagggcggcggcccaagcagcggcgcccctcctcccagcggcggcaggcggcccaagcagcggcgcccctcctcccagcggcggcagcccagccggctccccaacctctaccgaggagggcacctctgagtccgccacccccgagagcggccctggcacctccaccgagcccagcgagggcagcgcacccggcagccctgccggcagccccacctccacagaggagggaaccagcaccgagcccagcgaaggcagcgccccaggcaccagcaccgagcctagtgagcaggagattaaacggatcaacaagatcagaagaagacttgtgaaagacagcaacaccaagaaggccggcaagacaggccccatgaaaaccctgctggttagagtgatgacacccgatctgagagagcggctggaaaacctgagaaagaagcctgaaaatatcccccagcccatcagcaatacatctagagccaacctgaataagctgctgaccgattacaccgaaatgaagaaggcgatcctgcatgtgtactgggaagagttccagaaggaccctgtgggcctgatgagccgggtggcccagcctgccagcaagaagatcgatcagaacaagctgaaacctgagatggacgagaagggcaacctgaccaccgccggctttgcctgctctcagtgtggccagcccctgttcgtgtacaagctggagcaggtgtctgagaagggcaaggcttacaccaactacttcggacggtgcaatgtggccgagcacgaaaagctgatcctgctggcccagctgaagcccgagaaggatagcgacgaagccgtgacatatagcctgggaaagtttgggcagagggccctggatttctacagcattcatgtgaccaaggagtccacccaccccgtgaagcccctggcccagatcgccggaaacagatacgcctccggacctgtgggaaaggccctgagcgacgcatgtatgggcacaatcgcctccttcctgtctaagtaccaggacatcatcatcgaacaccagaaggtggtgaagggcaaccagaagagactggagagcctgcgggagctggccggcaaggaaaacctggaataccctagcgtgaccctgccacctcagcctcacaccaaggagggcgttgatgcctacaacgaagtgatcgcccgggtgcgaatgtgggtgaacctgaacctgtggcagaagctgaagctaagcagagatgatgccaagcctctgctgagactgaagggattcccttcctttcctctggtcgagagacaggccaacgaagtggactggtgggacatggtgtgtaacgtgaagaagctgatcaacgagaaaaaggaggatggcaaggtgttttggcagaatctggctggctacaagagacaggaagccctgagaccatacctgagcagcgaggaagatcggaagaagggaaagaaattcgctcggtaccagctgggcgacctgctgctgcacctggaaaagaagcacggcgaggactggggaaaggtgtacgacgaggcctgggagcggattgacaagaaagtggaaggcctgagcaagcacatcaagctggaagaggaacggagaagcgaggacgcccagagcaaggccgccctgaccgactggctgcgggctaaggccagcttcgtgatcgagggcctgaaggaggccgacaaggacgagttctgcagatgcgagctgaagctgcagaagtggtacggggacctgcggggaaagcccttcgccatcgaagccgagaacagcatcctggacatcagcggcttcagcaagcagtacaactgtgccttcatctggcagaaggacggcgtgaagaagctgaacctgtacctgatcatcaactacttcaagggcggcaagctgcggttcaagaagatcaaacctgaagccttcgaagccaacagattctacaccgtgatcaacaaaaagagcggcgagatcgtgcccatggaggtgaacttcaacttcgacgaccccaacctgatcatcctgcctctggcctttggcaagagacagggcagagaattcatctggaacgacctgctgtccctggaaaccggcagcctgaagctggccaacggaagagtgatcgagaagacactgtacaacagaagaacccggcaggatgagcctgccctgttcgtggccctgaccttcgagcggcgggaggtcctggactcctccaatatcaaaccaatgaacctgatcggcgtggcaagaggcgaaaacatccccgccgtgatcgccctgaccgaccccgagggctgcccactgagccggtttaaggatagcctgggaaacccaacccacatcctgagaatcggcgagagctataaggagaagcagcggaccatccaggccaagaaggaggtggagcagcggagagccggcggctacagccggaagtacgccagcaaagccaagaatctggcagacgatatggtgagaaacaccgctagagatctgctgtactacgccgtgacccaggatgccatgctgatcttcgccaacctgagccggggcttcggccggcagggcaagcggaccttcatggccgagagacagtacacacggatggaggactggctgaccgccaagctggcctacgagggcctgagcaagacctacctgtccaagacactggcccagtacacctccaagacatgcagcaactgtgggtttaccatcaccagcgccgactacgacagggtgctggagaagctgaagaagacagcaacaggctggatgaccacaattaacggcaaggagctgaaggtggagggccagattacctactacaacagatacaagagacagaacgtagtcaaggacctgtccgtcgagctggatagactgagcgaagaatctgtgaacaacgacatctcctcctggacaaagggcagaagcggagaagctctgagcctcctgaagaaaagattctcccatagacccgtgcaggagaagttcgtgtgcctgaactgcggcttcgagacacacgcagccgagcaagccgccctgaacatcgccagatcctggctgttcctgcggagccaggagtacaagaaataccagacaaacaagacaaccggcaacaccgataagagagccttcgtcgagacctggcagtccttttaccggaagaagcttaaggaggtgtggaaacctgccgtgcggtctggcggatctggcggaggctccaccagccccaagaaaaagagaaaagtctaagctgccttctgcggggcttgccttctggccatgcccttcttctctcccttgcacctgtacctcttggtctttgaataaagcctgagtaggaaggctagcaaaaaaaaaaaaaaaaaaaaaaaaaaaaaaaaaaaaaaaaaaaaaaaaaaaaaaaaaaaaaaaaaaaaaaaaaaaaaaaagcccagccggctccccaacctctaccgaggagggcacctctgagtccgccacccccgagagcggccctggcacctccaccgagcccagcgagggcagcgcacccggcagccctgccggcagccccacctccacagaggagggaaccagcaccgagcccagcgaaggcagcgccccaggcaccagcaccgagcctagtgagcaggagattaaacggatcaacaagatcagaagaagacttgtgaaagacagcaacaccaagaaggccggcaagacaggccccatgaaaaccctgctggttagagtgatgacacccgatctgagagagcggctggaaaacctgagaaagaagcctgaaaatatcccccagcccatcagcaatacatctagagccaacctgaataagctgctgaccgattacaccgaaatgaagaaggcgatcctgcatgtgtactgggaagagttccagaaggaccctgtgggcctgatgagccgggtggcccagcctgccagcaagaagatcgatcagaacaagctgaaacctgagatggacgagaagggcaacctgaccaccgccggctttgcctgctctcagtgtggccagcccctgttcgtgtacaagctggagcaggtgtctgagaagggcaaggcttacaccaactacttcggacggtgcaatgtggccgagcacgaaaagctgatcctgctggcccagctgaagcccgagaaggatagcgacgaagccgtgacatatagcctgggaaagtttgggcagagggccctggatttctacagcattcatgtgaccaaggagtccacccaccccgtgaagcccctggcccagatcgccggaaacagatacgcctccggacctgtgggaaaggccctgagcgacgcatgtatgggcacaatcgcctccttcctgtctaagtaccaggacatcatcatcgaacaccagaaggtggtgaagggcaaccagaagagactggagagcctgcgggagctggccggcaaggaaaacctggaataccctagcgtgaccctgccacctcagcctcacaccaaggagggcgttgatgcctacaacgaagtgatcgcccgggtgcgaatgtgggtgaacctgaacctgtggcagaagctgaagctaagcagagatgatgccaagcctctgctgagactgaagggattcccttcctttcctctggtcgagagacaggccaacgaagtggactggtgggacatggtgtgtaacgtgaagaagctgatcaacgagaaaaaggaggatggcaaggtgttttggcagaatctggctggctacaagagacaggaagccctgagaccatacctgagcagcgaggaagatcggaagaagggaaagaaattcgctcggtaccagctgggcgacctgctgctgcacctggaaaagaagcacggcgaggactggggaaaggtgtacgacgaggcctgggagcggattgacaagaaagtggaaggcctgagcaagcacatcaagctggaagaggaacggagaagcgaggacgcccagagcaaggccgccctgaccgactggctgcgggctaaggccagcttcgtgatcgagggcctgaaggaggccgacaaggacgagttctgcagatgcgagctgaagctgcagaagtggtacggggacctgcggggaaagcccttcgccatcgaagccgagaacagcatcctggacatcagcggcttcagcaagcagtacaactgtgccttcatctggcagaaggacggcgtgaagaagctgaacctgtacctgatcatcaactacttcaagggcggcaagctgcggttcaagaagatcaaacctgaagccttcgaagccaacagattctacaccgtgatcaacaaaaagagcggcgagatcgtgcccatggaggtgaacttcaacttcgacgaccccaacctgatcatcctgcctctggcctttggcaagagacagggcagagaattcatctggaacgacctgctgtccctggaaaccggcagcctgaagctggccaacggaagagtgatcgagaagacactgtacaacagaagaacccggcaggatgagcctgccctgttcgtggccctgaccttcgagcggcgggaggtcctggactcctccaatatcaaaccaatgaacctgatcggcgtggcaagaggcgaaaacatccccgccgtgatcgccctgaccgaccccgagggctgcccactgagccggtttaaggatagcctgggaaacccaacccacatcctgagaatcggcgagagctataaggagaagcagcggaccatccaggccaagaaggaggtggagcagcggagagccggcggctacagccggaagtacgccagcaaagccaagaatctggcagacgatatggtgagaaacaccgctagagatctgctgtactacgccgtgacccaggatgccatgctgatcttcgccaacctgagccggggcttcggccggcagggcaagcggaccttcatggccgagagacagtacacacggatggaggactggctgaccgccaagctggcctacgagggcctgagcaagacctacctgtccaagacactggcccagtacacctccaagacatgcagcaactgtgggtttaccatcaccagcgccgactacgacagggtgctggagaagctgaagaagacagcaacaggctggatgaccacaattaacggcaaggagctgaaggtggagggccagattacctactacaacagatacaagagacagaacgtagtcaaggacctgtccgtcgagctggatagactgagcgaagaatctgtgaacaacgacatctcctcctggacaaagggcagaagcggagaagctctgagcctcctgaagaaaagattctcccatagacccgtgcaggagaagttcgtgtgcctgaactgcggcttcgagacacacgcagccgagcaagccgccctgaacatcgccagatcctggctgttcctgcggagccaggagtacaagaaataccagacaaacaagacaaccggcaacaccgataagagagccttcgtcgagacctggcagtccttttaccggaagaagcttaaggaggtgtggaaacctgccgtgcggtctggcggatctggcggaggctccaccagccccaagaaaaagagaaaagtctaagctgccttctgcggggcttgccttctggccatgcccttcttctctcccttgcacctgtacctcttggtctttgaataaagcctgagtaggaaggctagcaaaaaaaaaaaaaaaaaaaaaaaaaaaaaaaaaaaaaaaaaaaaaaaaaaaaaaaaaaaaaaaaaaaaaaaaaaaaaaaa

SEQ ID NO: 9119 - RNA, 8787 nt, synthetic construct
  source 1..8787: mol_type = other RNA
aggaaataagagagaaaagaagagtaagaagaaatataagagccaccatggcccctaagaagaagcgtaaagtgagccggatgaaccacgaccaggagttcgacccccctaaggtgtaccctcccgtccccgccgagaagagaaagcccatccgggtcctgagcctgttcgatggcatcgccaccggtctgctggtgctgaaggacctgggcatccaggtggataggtacattgcctccgaggtgtgcgaggactccatcaccgtgggaatggtgcgtcatcagggcaagatcatgtacgtgggcgacgtgcggagcgtgacacagaagcatatccaggagtggggccctttcgacctggtgatcggcggcagcccttgcaatgacctgagcatcgtgaacccagcccggaagggcctgtacgagggaaccggcagactgttcttcgagttttacagactgctgcacgacgcccggcctaaggaaggcgacgaccggcccttcttttggctgttcgagaatgtggtggccatgggagtcagcgacaagcgggatattagccggttcctggagagcaaccccgtgatgatcgatgccaaggaagtgagcgccgcccaccgggccagatacttctggggcaatctgcctggcatgaacagacccctggccagcaccgtgaacgacaagctggagctgcaggagtgcctggagcacggccggatcgccaagttcagcaaggtgagaaccatcaccacccgaagcaacagcatcaaacaaggcaaggaccagcactttcctgtgttcatgaacgagaaggaggacatcctgtggtgtaccgagatggagagagtgttcgggttcccagtccactacacagatgtcagcaacatgtctagactggccagacagagactgctgggaagaagctggtccgtccctgtgatcagacacctgttcgcccctctgaaggagtacttcgcctgcgtgagcagcggcaacagcaacgccaacagccggggccccagcttctctagcggcctggtgccactgtccctgagagggagccacatgggccccatggagatctacaaaaccgtgagcgcctggaagcggcagcctgtgcgcgtgctgagcctgtttcggaatatcgataaagtcctgaaaagcctgggattcctggagagcggctctggctccggcggtggcaccctgaagtacgtggaggatgtgacaaacgtggtcagacgggatgtggagaagtggggccccttcgatctggtgtacggcagcacccaacccctgggcagctcttgtgaccggtgccctggctggtacatgtttcagttccaccggatcctgcagtacgccctgccgagacaggagtcccagcggccattcttttggattttcatggacaacttgctgctgaccgaggatgaccaggaaactaccactcggttcctgcagaccgaagccgtgaccctgcaggacgtgagaggccgggactaccagaacgccatgcgggtgtggtccaacatccctggactgaaaagcaagcacgcacctctgacccctaaagaagaggagtacctgcaggcccaggtgcggagcagaagcaagctggacgcccctaaggtggatctgctggtgaagaattgcctcctgcccctgagagagtacttcaagtatttcagccagaatagtctgcccctgggaggcagcggcggcggctgccaggagaccctgaccttcaaggacgtggccgtggacttcaccagggaggagtggggccagctgggccccgcccagagggacctgtacaaggaggtgatgctggacaactacaggaacctgatcagcctgggcctgcagggcagcaagcccgacgtgatcttctggctggagaggggccagagcccctggaccctgaagaggaggaagagcagggactgctgccccgagttccacctgcacggcggcccaagcagcggcgcccctcctcccagcggcggcaggcggcccaagcagcggcgcccctcctcccagcggcggcagcccagccggctccccaacctctaccgaggagggcacctctgagtccgccacccccgagagcggccctggcacctccaccgagcccagcgagggcagcgcacccggcagccctgccggcagccccacctccacagaggagggaaccagcaccgagcccagcgaaggcagcgccccaggcaccagcaccgagcctagtgagcaggagattaaacggatcaacaagatcagaagaagacttgtgaaagacagcaacaccaagaaggccggcaagacaggccccatgaaaaccctgctggttagagtgatgacacccgatctgagagagcggctggaaaacctgagaaagaagcctgaaaatatcccccagcccatcagcaatacatctagagccaacctgaataagctgctgaccgattacaccgaaatgaagaaggcgatcctgcatgtgtactgggaagagttccagaaggaccctgtgggcctgatgagccgggtggcccagcctgccagcaagaagatcgatcagaacaagctgaaacctgagatggacgagaagggcaacctgaccaccgccggctttgcctgctctcagtgtggccagcccctgttcgtgtacaagctggagcaggtgtctgagaagggcaaggcttacaccaactacttcggacggtgcaatgtggccgagcacgaaaagctgatcctgctggcccagctgaagcccgagaaggatagcgacgaagccgtgacatatagcctgggaaagtttgggcagagggccctggatttctacagcattcatgtgaccaaggagtccacccaccccgtgaagcccctggcccagatcgccggaaacagatacgcctccggacctgtgggaaaggccctgagcgacgcatgtatgggcacaatcgcctccttcctgtctaagtaccaggacatcatcatcgaacaccagaaggtggtgaagggcaaccagaagagactggagagcctgcgggagctggccggcaaggaaaacctggaataccctagcgtgaccctgccacctcagcctcacaccaaggagggcgttgatgcctacaacgaagtgatcgcccgggtgcgaatgtgggtgaacctgaacctgtggcagaagctgaagctaagcagagatgatgccaagcctctgctgagactgaagggattcccttcctttcctctggtcgagagacaggccaacgaagtggactggtgggacatggtgtgtaacgtgaagaagctgatcaacgagaaaaaggaggatggcaaggtgttttggcagaatctggctggctacaagagacaggaagccctgagaccatacctgagcagcgaggaagatcggaagaagggaaagaaattcgctcggtaccagctgggcgacctgctgctgcacctggaaaagaagcacggcgaggactggggaaaggtgtacgacgaggcctgggagcggattgacaagaaagtggaaggcctgagcaagcacatcaagctggaagaggaacggagaagcgaggacgcccagagcaaggccgccctgaccgactggctgcgggctaaggccagcttcgtgatcgagggcctgaaggaggccgacaaggacgagttctgcagatgcgagctgaagctgcagaagtggtacggggacctgcggggaaagcccttcgccatcgaagccgagaacagcatcctggacatcagcggcttcagcaagcagtacaactgtgccttcatctggcagaaggacggcgtgaagaagctgaacctgtacctgatcatcaactacttcaagggcggcaagctgcggttcaagaagatcaaacctgaagccttcgaagccaacagattctacaccgtgatcaacaaaaagagcggcgagatcgtgcccatggaggtgaacttcaacttcgacgaccccaacctgatcatcctgcctctggcctttggcaagagacagggcagagaattcatctggaacgacctgctgtccctggaaaccggcagcctgaagctggccaacggaagagtgatcgagaagacactgtacaacagaagaacccggcaggatgagcctgccctgttcgtggccctgaccttcgagcggcgggaggtcctggactcctccaatatcaaaccaatgaacctgatcggcgtggcaagaggcgaaaacatccccgccgtgatcgccctgaccgaccccgagggctgcccactgagccggtttaaggatagcctgggaaacccaacccacatcctgagaatcggcgagagctataaggagaagcagcggaccatccaggccaagaaggaggtggagcagcggagagccggcggctacagccggaagtacgccagcaaagccaagaatctggcagacgatatggtgagaaacaccgctagagatctgctgtactacgccgtgacccaggatgccatgctgatcttcgccaacctgagccggggcttcggccggcagggcaagcggaccttcatggccgagagacagtacacacggatggaggactggctgaccgccaagctggcctacgagggcctgagcaagacctacctgtccaagacactggcccagtacacctccaagacatgcagcaactgtgggtttaccatcaccagcgccgactacgacagggtgctggagaagctgaagaagacagcaacaggctggatgaccacaattaacggcaaggagctgaaggtggagggccagattacctactacaacagatacaagagacagaacgtagtcaaggacctgtccgtcgagctggatagactgagcgaagaatctgtgaacaacgacatctcctcctggacaaagggcagaagcggagaagctctgagcctcctgaagaaaagattctcccatagacccgtgcaggagaagttcgtgtgcctgaactgcggcttcgagacacacgcagccgagcaagccgccctgaacatcgccagatcctggctgttcctgcggagccaggagtacaagaaataccagacaaacaagacaaccggcaacaccgataagagagccttcgtcgagacctggcagtccttttaccggaagaagcttaaggaggtgtggaaacctgccgtgcggtctggcggatctggcggaggctccaccagccccaagaaaaagagaaaagtctaagctgccttctgcggggcttgccttctggccatgcccttcttctctcccttgcacctgtacctcttggtctttgaataaagcctgagtaggaaggctagcaaaaaaaaaaaaaaaaaaaaaaaaaaaaaaaaaaaaaaaaaaaaaaaaaaaaaaaaaaaaaaaaaaaaaaaaaaaaaaaagcccagccggctccccaacctctaccgaggagggcacctctgagtccgccacccccgagagcggccctggcacctccaccgagcccagcgagggcagcgcacccggcagccctgccggcagccccacctccacagaggagggaaccagcaccgagcccagcgaaggcagcgccccaggcaccagcaccgagcctagtgagcaggagattaaacggatcaacaagatcagaagaagacttgtgaaagacagcaacaccaagaaggccggcaagacaggccccatgaaaaccctgctggttagagtgatgacacccgatctgagagagcggctggaaaacctgagaaagaagcctgaaaatatcccccagcccatcagcaatacatctagagccaacctgaataagctgctgaccgattacaccgaaatgaagaaggcgatcctgcatgtgtactgggaagagttccagaaggaccctgtgggcctgatgagccgggtggcccagcctgccagcaagaagatcgatcagaacaagctgaaacctgagatggacgagaagggcaacctgaccaccgccggctttgcctgctctcagtgtggccagcccctgttcgtgtacaagctggagcaggtgtctgagaagggcaaggcttacaccaactacttcggacggtgcaatgtggccgagcacgaaaagctgatcctgctggcccagctgaagcccgagaaggatagcgacgaagccgtgacatatagcctgggaaagtttgggcagagggccctggatttctacagcattcatgtgaccaaggagtccacccaccccgtgaagcccctggcccagatcgccggaaacagatacgcctccggacctgtgggaaaggccctgagcgacgcatgtatgggcacaatcgcctccttcctgtctaagtaccaggacatcatcatcgaacaccagaaggtggtgaagggcaaccagaagagactggagagcctgcgggagctggccggcaaggaaaacctggaataccctagcgtgaccctgccacctcagcctcacaccaaggagggcgttgatgcctacaacgaagtgatcgcccgggtgcgaatgtgggtgaacctgaacctgtggcagaagctgaagctaagcagagatgatgccaagcctctgctgagactgaagggattcccttcctttcctctggtcgagagacaggccaacgaagtggactggtgggacatggtgtgtaacgtgaagaagctgatcaacgagaaaaaggaggatggcaaggtgttttggcagaatctggctggctacaagagacaggaagccctgagaccatacctgagcagcgaggaagatcggaagaagggaaagaaattcgctcggtaccagctgggcgacctgctgctgcacctggaaaagaagcacggcgaggactggggaaaggtgtacgacgaggcctgggagcggattgacaagaaagtggaaggcctgagcaagcacatcaagctggaagaggaacggagaagcgaggacgcccagagcaaggccgccctgaccgactggctgcgggctaaggccagcttcgtgatcgagggcctgaaggaggccgacaaggacgagttctgcagatgcgagctgaagctgcagaagtggtacggggacctgcggggaaagcccttcgccatcgaagccgagaacagcatcctggacatcagcggcttcagcaagcagtacaactgtgccttcatctggcagaaggacggcgtgaagaagctgaacctgtacctgatcatcaactacttcaagggcggcaagctgcggttcaagaagatcaaacctgaagccttcgaagccaacagattctacaccgtgatcaacaaaaagagcggcgagatcgtgcccatggaggtgaacttcaacttcgacgaccccaacctgatcatcctgcctctggcctttggcaagagacagggcagagaattcatctggaacgacctgctgtccctggaaaccggcagcctgaagctggccaacggaagagtgatcgagaagacactgtacaacagaagaacccggcaggatgagcctgccctgttcgtggccctgaccttcgagcggcgggaggtcctggactcctccaatatcaaaccaatgaacctgatcggcgtggcaagaggcgaaaacatccccgccgtgatcgccctgaccgaccccgagggctgcccactgagccggtttaaggatagcctgggaaacccaacccacatcctgagaatcggcgagagctataaggagaagcagcggaccatccaggccaagaaggaggtggagcagcggagagccggcggctacagccggaagtacgccagcaaagccaagaatctggcagacgatatggtgagaaacaccgctagagatctgctgtactacgccgtgacccaggatgccatgctgatcttcgccaacctgagccggggcttcggccggcagggcaagcggaccttcatggccgagagacagtacacacggatggaggactggctgaccgccaagctggcctacgagggcctgagcaagacctacctgtccaagacactggcccagtacacctccaagacatgcagcaactgtgggtttaccatcaccagcgccgactacgacagggtgctggagaagctgaagaagacagcaacaggctggatgaccacaattaacggcaaggagctgaaggtggagggccagattacctactacaacagatacaagagacagaacgtagtcaaggacctgtccgtcgagctggatagactgagcgaagaatctgtgaacaacgacatctcctcctggacaaagggcagaagcggagaagctctgagcctcctgaagaaaagattctcccatagacccgtgcaggagaagttcgtgtgcctgaactgcggcttcgagacacacgcagccgagcaagccgccctgaacatcgccagatcctggctgttcctgcggagccaggagtacaagaaataccagacaaacaagacaaccggcaacaccgataagagagccttcgtcgagacctggcagtccttttaccggaagaagcttaaggaggtgtggaaacctgccgtgcggtctggcggatctggcggaggctccaccagccccaagaaaaagagaaaagtctaagctgccttctgcggggcttgccttctggccatgcccttcttctctcccttgcacctgtacctcttggtctttgaataaagcctgagtaggaaggctagcaaaaaaaaaaaaaaaaaaaaaaaaaaaaaaaaaaaaaaaaaaaaaaaaaaaaaaaaaaaaaaaaaaaaaaaaaaaaaaaa

SEQ ID NO: 9120 - RNA, 8787 nt, synthetic construct
  source 1..8787: mol_type = other RNA
aggaaataagagagaaaagaagagtaagaagaaatataagagccaccatggcccctaagaagaagcgtaaagtgagccggatgaaccacgaccaggagttcgacccccctaaggtgtaccctcccgtccccgccgagaagagaaagcccatccgggtcctgagcctgttcgatggcatcgccaccggtctgctggtgctgaaggacctgggcatccaggtggataggtacattgcctccgaggtgtgcgaggactccatcaccgtgggaatggtgcgtcatcagggcaagatcatgtacgtgggcgacgtgcggagcgtgacacagaagcatatccaggagtggggccctttcgacctggtgatcggcggcagcccttgcaatgacctgagcatcgtgaacccagcccggaagggcctgtacgagggaaccggcagactgttcttcgagttttacagactgctgcacgacgcccggcctaaggaaggcgacgaccggcccttcttttggctgttcgagaatgtggtggccatgggagtcagcgacaagcgggatattagccggttcctggagagcaaccccgtgatgatcgatgccaaggaagtgagcgccgcccaccgggccagatacttctggggcaatctgcctggcatgaacagacccctggccagcaccgtgaacgacaagctggagctgcaggagtgcctggagcacggccggatcgccaagttcagcaaggtgagaaccatcaccacccgaagcaacagcatcaaacaaggcaaggaccagcactttcctgtgttcatgaacgagaaggaggacatcctgtggtgtaccgagatggagagagtgttcgggttcccagtccactacacagatgtcagcaacatgtctagactggccagacagagactgctgggaagaagctggtccgtccctgtgatcagacacctgttcgcccctctgaaggagtacttcgcctgcgtgagcagcggcaacagcaacgccaacagccggggccccagcttctctagcggcctggtgccactgtccctgagagggagccacatgggccccatggagatctacaaaaccgtgagcgcctggaagcggcagcctgtgcgcgtgctgagcctgtttcggaatatcgataaagtcctgaaaagcctgggattcctggagagcggctctggctccggcggtggcaccctgaagtacgtggaggatgtgacaaacgtggtcagacgggatgtggagaagtggggccccttcgatctggtgtacggcagcacccaacccctgggcagctcttgtgaccggtgccctggctggtacatgtttcagttccaccggatcctgcagtacgccctgccgagacaggagtcccagcggccattcttttggattttcatggacaacttgctgctgaccgaggatgaccaggaaactaccactcggttcctgcagaccgaagccgtgaccctgcaggacgtgagaggccgggactaccagaacgccatgcgggtgtggtccaacatccctggactgaaaagcaagcacgcacctctgacccctaaagaagaggagtacctgcaggcccaggtgcggagcagaagcaagctggacgcccctaaggtggatctgctggtgaagaattgcctcctgcccctgagagagtacttcaagtatttcagccagaatagtctgcccctgggaggcagcggcggcggcgcccaggagagcgtgatgttcagcgacgtgagcatcgacttcagccaggaggagtgggagtgcctgaacgacgaccagagggacctgtacagggacgtgatgctggagaactacagccacctggtgagcatgggccacagcgtgagcaagcccgacgtgatcagcttcctggagcagggcaaggagccctggctggtggacagggagctgaccagggaccagtggcccgtgctggagagcaggggcggcccaagcagcggcgcccctcctcccagcggcggcaggcggcccaagcagcggcgcccctcctcccagcggcggcagcccagccggctccccaacctctaccgaggagggcacctctgagtccgccacccccgagagcggccctggcacctccaccgagcccagcgagggcagcgcacccggcagccctgccggcagccccacctccacagaggagggaaccagcaccgagcccagcgaaggcagcgccccaggcaccagcaccgagcctagtgagcaggagattaaacggatcaacaagatcagaagaagacttgtgaaagacagcaacaccaagaaggccggcaagacaggccccatgaaaaccctgctggttagagtgatgacacccgatctgagagagcggctggaaaacctgagaaagaagcctgaaaatatcccccagcccatcagcaatacatctagagccaacctgaataagctgctgaccgattacaccgaaatgaagaaggcgatcctgcatgtgtactgggaagagttccagaaggaccctgtgggcctgatgagccgggtggcccagcctgccagcaagaagatcgatcagaacaagctgaaacctgagatggacgagaagggcaacctgaccaccgccggctttgcctgctctcagtgtggccagcccctgttcgtgtacaagctggagcaggtgtctgagaagggcaaggcttacaccaactacttcggacggtgcaatgtggccgagcacgaaaagctgatcctgctggcccagctgaagcccgagaaggatagcgacgaagccgtgacatatagcctgggaaagtttgggcagagggccctggatttctacagcattcatgtgaccaaggagtccacccaccccgtgaagcccctggcccagatcgccggaaacagatacgcctccggacctgtgggaaaggccctgagcgacgcatgtatgggcacaatcgcctccttcctgtctaagtaccaggacatcatcatcgaacaccagaaggtggtgaagggcaaccagaagagactggagagcctgcgggagctggccggcaaggaaaacctggaataccctagcgtgaccctgccacctcagcctcacaccaaggagggcgttgatgcctacaacgaagtgatcgcccgggtgcgaatgtgggtgaacctgaacctgtggcagaagctgaagctaagcagagatgatgccaagcctctgctgagactgaagggattcccttcctttcctctggtcgagagacaggccaacgaagtggactggtgggacatggtgtgtaacgtgaagaagctgatcaacgagaaaaaggaggatggcaaggtgttttggcagaatctggctggctacaagagacaggaagccctgagaccatacctgagcagcgaggaagatcggaagaagggaaagaaattcgctcggtaccagctgggcgacctgctgctgcacctggaaaagaagcacggcgaggactggggaaaggtgtacgacgaggcctgggagcggattgacaagaaagtggaaggcctgagcaagcacatcaagctggaagaggaacggagaagcgaggacgcccagagcaaggccgccctgaccgactggctgcgggctaaggccagcttcgtgatcgagggcctgaaggaggccgacaaggacgagttctgcagatgcgagctgaagctgcagaagtggtacggggacctgcggggaaagcccttcgccatcgaagccgagaacagcatcctggacatcagcggcttcagcaagcagtacaactgtgccttcatctggcagaaggacggcgtgaagaagctgaacctgtacctgatcatcaactacttcaagggcggcaagctgcggttcaagaagatcaaacctgaagccttcgaagccaacagattctacaccgtgatcaacaaaaagagcggcgagatcgtgcccatggaggtgaacttcaacttcgacgaccccaacctgatcatcctgcctctggcctttggcaagagacagggcagagaattcatctggaacgacctgctgtccctggaaaccggcagcctgaagctggccaacggaagagtgatcgagaagacactgtacaacagaagaacccggcaggatgagcctgccctgttcgtggccctgaccttcgagcggcgggaggtcctggactcctccaatatcaaaccaatgaacctgatcggcgtggcaagaggcgaaaacatccccgccgtgatcgccctgaccgaccccgagggctgcccactgagccggtttaaggatagcctgggaaacccaacccacatcctgagaatcggcgagagctataaggagaagcagcggaccatccaggccaagaaggaggtggagcagcggagagccggcggctacagccggaagtacgccagcaaagccaagaatctggcagacgatatggtgagaaacaccgctagagatctgctgtactacgccgtgacccaggatgccatgctgatcttcgccaacctgagccggggcttcggccggcagggcaagcggaccttcatggccgagagacagtacacacggatggaggactggctgaccgccaagctggcctacgagggcctgagcaagacctacctgtccaagacactggcccagtacacctccaagacatgcagcaactgtgggtttaccatcaccagcgccgactacgacagggtgctggagaagctgaagaagacagcaacaggctggatgaccacaattaacggcaaggagctgaaggtggagggccagattacctactacaacagatacaagagacagaacgtagtcaaggacctgtccgtcgagctggatagactgagcgaagaatctgtgaacaacgacatctcctcctggacaaagggcagaagcggagaagctctgagcctcctgaagaaaagattctcccatagacccgtgcaggagaagttcgtgtgcctgaactgcggcttcgagacacacgcagccgagcaagccgccctgaacatcgccagatcctggctgttcctgcggagccaggagtacaagaaataccagacaaacaagacaaccggcaacaccgataagagagccttcgtcgagacctggcagtccttttaccggaagaagcttaaggaggtgtggaaacctgccgtgcggtctggcggatctggcggaggctccaccagccccaagaaaaagagaaaagtctaagctgccttctgcggggcttgccttctggccatgcccttcttctctcccttgcacctgtacctcttggtctttgaataaagcctgagtaggaaggctagcaaaaaaaaaaaaaaaaaaaaaaaaaaaaaaaaaaaaaaaaaaaaaaaaaaaaaaaaaaaaaaaaaaaaaaaaaaaaaaaagcccagccggctccccaacctctaccgaggagggcacctctgagtccgccacccccgagagcggccctggcacctccaccgagcccagcgagggcagcgcacccggcagccctgccggcagccccacctccacagaggagggaaccagcaccgagcccagcgaaggcagcgccccaggcaccagcaccgagcctagtgagcaggagattaaacggatcaacaagatcagaagaagacttgtgaaagacagcaacaccaagaaggccggcaagacaggccccatgaaaaccctgctggttagagtgatgacacccgatctgagagagcggctggaaaacctgagaaagaagcctgaaaatatcccccagcccatcagcaatacatctagagccaacctgaataagctgctgaccgattacaccgaaatgaagaaggcgatcctgcatgtgtactgggaagagttccagaaggaccctgtgggcctgatgagccgggtggcccagcctgccagcaagaagatcgatcagaacaagctgaaacctgagatggacgagaagggcaacctgaccaccgccggctttgcctgctctcagtgtggccagcccctgttcgtgtacaagctggagcaggtgtctgagaagggcaaggcttacaccaactacttcggacggtgcaatgtggccgagcacgaaaagctgatcctgctggcccagctgaagcccgagaaggatagcgacgaagccgtgacatatagcctgggaaagtttgggcagagggccctggatttctacagcattcatgtgaccaaggagtccacccaccccgtgaagcccctggcccagatcgccggaaacagatacgcctccggacctgtgggaaaggccctgagcgacgcatgtatgggcacaatcgcctccttcctgtctaagtaccaggacatcatcatcgaacaccagaaggtggtgaagggcaaccagaagagactggagagcctgcgggagctggccggcaaggaaaacctggaataccctagcgtgaccctgccacctcagcctcacaccaaggagggcgttgatgcctacaacgaagtgatcgcccgggtgcgaatgtgggtgaacctgaacctgtggcagaagctgaagctaagcagagatgatgccaagcctctgctgagactgaagggattcccttcctttcctctggtcgagagacaggccaacgaagtggactggtgggacatggtgtgtaacgtgaagaagctgatcaacgagaaaaaggaggatggcaaggtgttttggcagaatctggctggctacaagagacaggaagccctgagaccatacctgagcagcgaggaagatcggaagaagggaaagaaattcgctcggtaccagctgggcgacctgctgctgcacctggaaaagaagcacggcgaggactggggaaaggtgtacgacgaggcctgggagcggattgacaagaaagtggaaggcctgagcaagcacatcaagctggaagaggaacggagaagcgaggacgcccagagcaaggccgccctgaccgactggctgcgggctaaggccagcttcgtgatcgagggcctgaaggaggccgacaaggacgagttctgcagatgcgagctgaagctgcagaagtggtacggggacctgcggggaaagcccttcgccatcgaagccgagaacagcatcctggacatcagcggcttcagcaagcagtacaactgtgccttcatctggcagaaggacggcgtgaagaagctgaacctgtacctgatcatcaactacttcaagggcggcaagctgcggttcaagaagatcaaacctgaagccttcgaagccaacagattctacaccgtgatcaacaaaaagagcggcgagatcgtgcccatggaggtgaacttcaacttcgacgaccccaacctgatcatcctgcctctggcctttggcaagagacagggcagagaattcatctggaacgacctgctgtccctggaaaccggcagcctgaagctggccaacggaagagtgatcgagaagacactgtacaacagaagaacccggcaggatgagcctgccctgttcgtggccctgaccttcgagcggcgggaggtcctggactcctccaatatcaaaccaatgaacctgatcggcgtggcaagaggcgaaaacatccccgccgtgatcgccctgaccgaccccgagggctgcccactgagccggtttaaggatagcctgggaaacccaacccacatcctgagaatcggcgagagctataaggagaagcagcggaccatccaggccaagaaggaggtggagcagcggagagccggcggctacagccggaagtacgccagcaaagccaagaatctggcagacgatatggtgagaaacaccgctagagatctgctgtactacgccgtgacccaggatgccatgctgatcttcgccaacctgagccggggcttcggccggcagggcaagcggaccttcatggccgagagacagtacacacggatggaggactggctgaccgccaagctggcctacgagggcctgagcaagacctacctgtccaagacactggcccagtacacctccaagacatgcagcaactgtgggtttaccatcaccagcgccgactacgacagggtgctggagaagctgaagaagacagcaacaggctggatgaccacaattaacggcaaggagctgaaggtggagggccagattacctactacaacagatacaagagacagaacgtagtcaaggacctgtccgtcgagctggatagactgagcgaagaatctgtgaacaacgacatctcctcctggacaaagggcagaagcggagaagctctgagcctcctgaagaaaagattctcccatagacccgtgcaggagaagttcgtgtgcctgaactgcggcttcgagacacacgcagccgagcaagccgccctgaacatcgccagatcctggctgttcctgcggagccaggagtacaagaaataccagacaaacaagacaaccggcaacaccgataagagagccttcgtcgagacctggcagtccttttaccggaagaagcttaaggaggtgtggaaacctgccgtgcggtctggcggatctggcggaggctccaccagccccaagaaaaagagaaaagtctaagctgccttctgcggggcttgccttctggccatgcccttcttctctcccttgcacctgtacctcttggtctttgaataaagcctgagtaggaaggctagcaaaaaaaaaaaaaaaaaaaaaaaaaaaaaaaaaaaaaaaaaaaaaaaaaaaaaaaaaaaaaaaaaaaaaaaaaaaaaaaa

SEQ ID NO: 9121 - RNA, 8787 nt, synthetic construct
  source 1..8787: mol_type = other RNA
aggaaataagagagaaaagaagagtaagaagaaatataagagccaccatggcccctaagaagaagcgtaaagtgagccggatgaaccacgaccaggagttcgacccccctaaggtgtaccctcccgtccccgccgagaagagaaagcccatccgggtcctgagcctgttcgatggcatcgccaccggtctgctggtgctgaaggacctgggcatccaggtggataggtacattgcctccgaggtgtgcgaggactccatcaccgtgggaatggtgcgtcatcagggcaagatcatgtacgtgggcgacgtgcggagcgtgacacagaagcatatccaggagtggggccctttcgacctggtgatcggcggcagcccttgcaatgacctgagcatcgtgaacccagcccggaagggcctgtacgagggaaccggcagactgttcttcgagttttacagactgctgcacgacgcccggcctaaggaaggcgacgaccggcccttcttttggctgttcgagaatgtggtggccatgggagtcagcgacaagcgggatattagccggttcctggagagcaaccccgtgatgatcgatgccaaggaagtgagcgccgcccaccgggccagatacttctggggcaatctgcctggcatgaacagacccctggccagcaccgtgaacgacaagctggagctgcaggagtgcctggagcacggccggatcgccaagttcagcaaggtgagaaccatcaccacccgaagcaacagcatcaaacaaggcaaggaccagcactttcctgtgttcatgaacgagaaggaggacatcctgtggtgtaccgagatggagagagtgttcgggttcccagtccactacacagatgtcagcaacatgtctagactggccagacagagactgctgggaagaagctggtccgtccctgtgatcagacacctgttcgcccctctgaaggagtacttcgcctgcgtgagcagcggcaacagcaacgccaacagccggggccccagcttctctagcggcctggtgccactgtccctgagagggagccacatgggccccatggagatctacaaaaccgtgagcgcctggaagcggcagcctgtgcgcgtgctgagcctgtttcggaatatcgataaagtcctgaaaagcctgggattcctggagagcggctctggctccggcggtggcaccctgaagtacgtggaggatgtgacaaacgtggtcagacgggatgtggagaagtggggccccttcgatctggtgtacggcagcacccaacccctgggcagctcttgtgaccggtgccctggctggtacatgtttcagttccaccggatcctgcagtacgccctgccgagacaggagtcccagcggccattcttttggattttcatggacaacttgctgctgaccgaggatgaccaggaaactaccactcggttcctgcagaccgaagccgtgaccctgcaggacgtgagaggccgggactaccagaacgccatgcgggtgtggtccaacatccctggactgaaaagcaagcacgcacctctgacccctaaagaagaggagtacctgcaggcccaggtgcggagcagaagcaagctggacgcccctaaggtggatctgctggtgaagaattgcctcctgcccctgagagagtacttcaagtatttcagccagaatagtctgcccctgggaggcagcggcggcggcatgatcgagtaccagatccccgtgagcttcaaggacgtggtggtgggcttcacccaggaggagtggcaccagctgagccccgcccagagggccctgtacagggacgtgatgctggagacctacagcaacctggtgagcgtgggctacgagggcaccaagcccgacgtgatcctgaggctggagcaggaggaggccccctggatcggcgaggccgcctgcctgggctgccactgctggggcatcggcggcccaagcagcggcgcccctcctcccagcggcggcaggcggcccaagcagcggcgcccctcctcccagcggcggcagcccagccggctccccaacctctaccgaggagggcacctctgagtccgccacccccgagagcggccctggcacctccaccgagcccagcgagggcagcgcacccggcagccctgccggcagccccacctccacagaggagggaaccagcaccgagcccagcgaaggcagcgccccaggcaccagcaccgagcctagtgagcaggagattaaacggatcaacaagatcagaagaagacttgtgaaagacagcaacaccaagaaggccggcaagacaggccccatgaaaaccctgctggttagagtgatgacacccgatctgagagagcggctggaaaacctgagaaagaagcctgaaaatatcccccagcccatcagcaatacatctagagccaacctgaataagctgctgaccgattacaccgaaatgaagaaggcgatcctgcatgtgtactgggaagagttccagaaggaccctgtgggcctgatgagccgggtggcccagcctgccagcaagaagatcgatcagaacaagctgaaacctgagatggacgagaagggcaacctgaccaccgccggctttgcctgctctcagtgtggccagcccctgttcgtgtacaagctggagcaggtgtctgagaagggcaaggcttacaccaactacttcggacggtgcaatgtggccgagcacgaaaagctgatcctgctggcccagctgaagcccgagaaggatagcgacgaagccgtgacatatagcctgggaaagtttgggcagagggccctggatttctacagcattcatgtgaccaaggagtccacccaccccgtgaagcccctggcccagatcgccggaaacagatacgcctccggacctgtgggaaaggccctgagcgacgcatgtatgggcacaatcgcctccttcctgtctaagtaccaggacatcatcatcgaacaccagaaggtggtgaagggcaaccagaagagactggagagcctgcgggagctggccggcaaggaaaacctggaataccctagcgtgaccctgccacctcagcctcacaccaaggagggcgttgatgcctacaacgaagtgatcgcccgggtgcgaatgtgggtgaacctgaacctgtggcagaagctgaagctaagcagagatgatgccaagcctctgctgagactgaagggattcccttcctttcctctggtcgagagacaggccaacgaagtggactggtgggacatggtgtgtaacgtgaagaagctgatcaacgagaaaaaggaggatggcaaggtgttttggcagaatctggctggctacaagagacaggaagccctgagaccatacctgagcagcgaggaagatcggaagaagggaaagaaattcgctcggtaccagctgggcgacctgctgctgcacctggaaaagaagcacggcgaggactggggaaaggtgtacgacgaggcctgggagcggattgacaagaaagtggaaggcctgagcaagcacatcaagctggaagaggaacggagaagcgaggacgcccagagcaaggccgccctgaccgactggctgcgggctaaggccagcttcgtgatcgagggcctgaaggaggccgacaaggacgagttctgcagatgcgagctgaagctgcagaagtggtacggggacctgcggggaaagcccttcgccatcgaagccgagaacagcatcctggacatcagcggcttcagcaagcagtacaactgtgccttcatctggcagaaggacggcgtgaagaagctgaacctgtacctgatcatcaactacttcaagggcggcaagctgcggttcaagaagatcaaacctgaagccttcgaagccaacagattctacaccgtgatcaacaaaaagagcggcgagatcgtgcccatggaggtgaacttcaacttcgacgaccccaacctgatcatcctgcctctggcctttggcaagagacagggcagagaattcatctggaacgacctgctgtccctggaaaccggcagcctgaagctggccaacggaagagtgatcgagaagacactgtacaacagaagaacccggcaggatgagcctgccctgttcgtggccctgaccttcgagcggcgggaggtcctggactcctccaatatcaaaccaatgaacctgatcggcgtggcaagaggcgaaaacatccccgccgtgatcgccctgaccgaccccgagggctgcccactgagccggtttaaggatagcctgggaaacccaacccacatcctgagaatcggcgagagctataaggagaagcagcggaccatccaggccaagaaggaggtggagcagcggagagccggcggctacagccggaagtacgccagcaaagccaagaatctggcagacgatatggtgagaaacaccgctagagatctgctgtactacgccgtgacccaggatgccatgctgatcttcgccaacctgagccggggcttcggccggcagggcaagcggaccttcatggccgagagacagtacacacggatggaggactggctgaccgccaagctggcctacgagggcctgagcaagacctacctgtccaagacactggcccagtacacctccaagacatgcagcaactgtgggtttaccatcaccagcgccgactacgacagggtgctggagaagctgaagaagacagcaacaggctggatgaccacaattaacggcaaggagctgaaggtggagggccagattacctactacaacagatacaagagacagaacgtagtcaaggacctgtccgtcgagctggatagactgagcgaagaatctgtgaacaacgacatctcctcctggacaaagggcagaagcggagaagctctgagcctcctgaagaaaagattctcccatagacccgtgcaggagaagttcgtgtgcctgaactgcggcttcgagacacacgcagccgagcaagccgccctgaacatcgccagatcctggctgttcctgcggagccaggagtacaagaaataccagacaaacaagacaaccggcaacaccgataagagagccttcgtcgagacctggcagtccttttaccggaagaagcttaaggaggtgtggaaacctgccgtgcggtctggcggatctggcggaggctccaccagccccaagaaaaagagaaaagtctaagctgccttctgcggggcttgccttctggccatgcccttcttctctcccttgcacctgtacctcttggtctttgaataaagcctgagtaggaaggctagcaaaaaaaaaaaaaaaaaaaaaaaaaaaaaaaaaaaaaaaaaaaaaaaaaaaaaaaaaaaaaaaaaaaaaaaaaaaaaaaagcccagccggctccccaacctctaccgaggagggcacctctgagtccgccacccccgagagcggccctggcacctccaccgagcccagcgagggcagcgcacccggcagccctgccggcagccccacctccacagaggagggaaccagcaccgagcccagcgaaggcagcgccccaggcaccagcaccgagcctagtgagcaggagattaaacggatcaacaagatcagaagaagacttgtgaaagacagcaacaccaagaaggccggcaagacaggccccatgaaaaccctgctggttagagtgatgacacccgatctgagagagcggctggaaaacctgagaaagaagcctgaaaatatcccccagcccatcagcaatacatctagagccaacctgaataagctgctgaccgattacaccgaaatgaagaaggcgatcctgcatgtgtactgggaagagttccagaaggaccctgtgggcctgatgagccgggtggcccagcctgccagcaagaagatcgatcagaacaagctgaaacctgagatggacgagaagggcaacctgaccaccgccggctttgcctgctctcagtgtggccagcccctgttcgtgtacaagctggagcaggtgtctgagaagggcaaggcttacaccaactacttcggacggtgcaatgtggccgagcacgaaaagctgatcctgctggcccagctgaagcccgagaaggatagcgacgaagccgtgacatatagcctgggaaagtttgggcagagggccctggatttctacagcattcatgtgaccaaggagtccacccaccccgtgaagcccctggcccagatcgccggaaacagatacgcctccggacctgtgggaaaggccctgagcgacgcatgtatgggcacaatcgcctccttcctgtctaagtaccaggacatcatcatcgaacaccagaaggtggtgaagggcaaccagaagagactggagagcctgcgggagctggccggcaaggaaaacctggaataccctagcgtgaccctgccacctcagcctcacaccaaggagggcgttgatgcctacaacgaagtgatcgcccgggtgcgaatgtgggtgaacctgaacctgtggcagaagctgaagctaagcagagatgatgccaagcctctgctgagactgaagggattcccttcctttcctctggtcgagagacaggccaacgaagtggactggtgggacatggtgtgtaacgtgaagaagctgatcaacgagaaaaaggaggatggcaaggtgttttggcagaatctggctggctacaagagacaggaagccctgagaccatacctgagcagcgaggaagatcggaagaagggaaagaaattcgctcggtaccagctgggcgacctgctgctgcacctggaaaagaagcacggcgaggactggggaaaggtgtacgacgaggcctgggagcggattgacaagaaagtggaaggcctgagcaagcacatcaagctggaagaggaacggagaagcgaggacgcccagagcaaggccgccctgaccgactggctgcgggctaaggccagcttcgtgatcgagggcctgaaggaggccgacaaggacgagttctgcagatgcgagctgaagctgcagaagtggtacggggacctgcggggaaagcccttcgccatcgaagccgagaacagcatcctggacatcagcggcttcagcaagcagtacaactgtgccttcatctggcagaaggacggcgtgaagaagctgaacctgtacctgatcatcaactacttcaagggcggcaagctgcggttcaagaagatcaaacctgaagccttcgaagccaacagattctacaccgtgatcaacaaaaagagcggcgagatcgtgcccatggaggtgaacttcaacttcgacgaccccaacctgatcatcctgcctctggcctttggcaagagacagggcagagaattcatctggaacgacctgctgtccctggaaaccggcagcctgaagctggccaacggaagagtgatcgagaagacactgtacaacagaagaacccggcaggatgagcctgccctgttcgtggccctgaccttcgagcggcgggaggtcctggactcctccaatatcaaaccaatgaacctgatcggcgtggcaagaggcgaaaacatccccgccgtgatcgccctgaccgaccccgagggctgcccactgagccggtttaaggatagcctgggaaacccaacccacatcctgagaatcggcgagagctataaggagaagcagcggaccatccaggccaagaaggaggtggagcagcggagagccggcggctacagccggaagtacgccagcaaagccaagaatctggcagacgatatggtgagaaacaccgctagagatctgctgtactacgccgtgacccaggatgccatgctgatcttcgccaacctgagccggggcttcggccggcagggcaagcggaccttcatggccgagagacagtacacacggatggaggactggctgaccgccaagctggcctacgagggcctgagcaagacctacctgtccaagacactggcccagtacacctccaagacatgcagcaactgtgggtttaccatcaccagcgccgactacgacagggtgctggagaagctgaagaagacagcaacaggctggatgaccacaattaacggcaaggagctgaaggtggagggccagattacctactacaacagatacaagagacagaacgtagtcaaggacctgtccgtcgagctggatagactgagcgaagaatctgtgaacaacgacatctcctcctggacaaagggcagaagcggagaagctctgagcctcctgaagaaaagattctcccatagacccgtgcaggagaagttcgtgtgcctgaactgcggcttcgagacacacgcagccgagcaagccgccctgaacatcgccagatcctggctgttcctgcggagccaggagtacaagaaataccagacaaacaagacaaccggcaacaccgataagagagccttcgtcgagacctggcagtccttttaccggaagaagcttaaggaggtgtggaaacctgccgtgcggtctggcggatctggcggaggctccaccagccccaagaaaaagagaaaagtctaagctgccttctgcggggcttgccttctggccatgcccttcttctctcccttgcacctgtacctcttggtctttgaataaagcctgagtaggaaggctagcaaaaaaaaaaaaaaaaaaaaaaaaaaaaaaaaaaaaaaaaaaaaaaaaaaaaaaaaaaaaaaaaaaaaaaaaaaaaaaaa

SEQ ID NO: 9122 - RNA, 8787 nt, synthetic construct
  source 1..8787: mol_type = other RNA
aggaaataagagagaaaagaagagtaagaagaaatataagagccaccatggcccctaagaagaagcgtaaagtgagccggatgaaccacgaccaggagttcgacccccctaaggtgtaccctcccgtccccgccgagaagagaaagcccatccgggtcctgagcctgttcgatggcatcgccaccggtctgctggtgctgaaggacctgggcatccaggtggataggtacattgcctccgaggtgtgcgaggactccatcaccgtgggaatggtgcgtcatcagggcaagatcatgtacgtgggcgacgtgcggagcgtgacacagaagcatatccaggagtggggccctttcgacctggtgatcggcggcagcccttgcaatgacctgagcatcgtgaacccagcccggaagggcctgtacgagggaaccggcagactgttcttcgagttttacagactgctgcacgacgcccggcctaaggaaggcgacgaccggcccttcttttggctgttcgagaatgtggtggccatgggagtcagcgacaagcgggatattagccggttcctggagagcaaccccgtgatgatcgatgccaaggaagtgagcgccgcccaccgggccagatacttctggggcaatctgcctggcatgaacagacccctggccagcaccgtgaacgacaagctggagctgcaggagtgcctggagcacggccggatcgccaagttcagcaaggtgagaaccatcaccacccgaagcaacagcatcaaacaaggcaaggaccagcactttcctgtgttcatgaacgagaaggaggacatcctgtggtgtaccgagatggagagagtgttcgggttcccagtccactacacagatgtcagcaacatgtctagactggccagacagagactgctgggaagaagctggtccgtccctgtgatcagacacctgttcgcccctctgaaggagtacttcgcctgcgtgagcagcggcaacagcaacgccaacagccggggccccagcttctctagcggcctggtgccactgtccctgagagggagccacatgggccccatggagatctacaaaaccgtgagcgcctggaagcggcagcctgtgcgcgtgctgagcctgtttcggaatatcgataaagtcctgaaaagcctgggattcctggagagcggctctggctccggcggtggcaccctgaagtacgtggaggatgtgacaaacgtggtcagacgggatgtggagaagtggggccccttcgatctggtgtacggcagcacccaacccctgggcagctcttgtgaccggtgccctggctggtacatgtttcagttccaccggatcctgcagtacgccctgccgagacaggagtcccagcggccattcttttggattttcatggacaacttgctgctgaccgaggatgaccaggaaactaccactcggttcctgcagaccgaagccgtgaccctgcaggacgtgagaggccgggactaccagaacgccatgcgggtgtggtccaacatccctggactgaaaagcaagcacgcacctctgacccctaaagaagaggagtacctgcaggcccaggtgcggagcagaagcaagctggacgcccctaaggtggatctgctggtgaagaattgcctcctgcccctgagagagtacttcaagtatttcagccagaatagtctgcccctgggaggcagcggcggcggcgtgcaggagcccgtgaccttcaaggacgtggccgtggacttcacccaggaggagtggggccagctggacctggtgcagaggaccctgtacagggacgtgatgctggagacctacggccacctgctgagcgtgggcaaccagatcgccaagcccgaggtgatcagcctgctggagcagggcgaggagccctggagcgtggagcaggcctgcccccagaggacctgccccgagtgggtgaggaacggcggcccaagcagcggcgcccctcctcccagcggcggcaggcggcccaagcagcggcgcccctcctcccagcggcggcagcccagccggctccccaacctctaccgaggagggcacctctgagtccgccacccccgagagcggccctggcacctccaccgagcccagcgagggcagcgcacccggcagccctgccggcagccccacctccacagaggagggaaccagcaccgagcccagcgaaggcagcgccccaggcaccagcaccgagcctagtgagcaggagattaaacggatcaacaagatcagaagaagacttgtgaaagacagcaacaccaagaaggccggcaagacaggccccatgaaaaccctgctggttagagtgatgacacccgatctgagagagcggctggaaaacctgagaaagaagcctgaaaatatcccccagcccatcagcaatacatctagagccaacctgaataagctgctgaccgattacaccgaaatgaagaaggcgatcctgcatgtgtactgggaagagttccagaaggaccctgtgggcctgatgagccgggtggcccagcctgccagcaagaagatcgatcagaacaagctgaaacctgagatggacgagaagggcaacctgaccaccgccggctttgcctgctctcagtgtggccagcccctgttcgtgtacaagctggagcaggtgtctgagaagggcaaggcttacaccaactacttcggacggtgcaatgtggccgagcacgaaaagctgatcctgctggcccagctgaagcccgagaaggatagcgacgaagccgtgacatatagcctgggaaagtttgggcagagggccctggatttctacagcattcatgtgaccaaggagtccacccaccccgtgaagcccctggcccagatcgccggaaacagatacgcctccggacctgtgggaaaggccctgagcgacgcatgtatgggcacaatcgcctccttcctgtctaagtaccaggacatcatcatcgaacaccagaaggtggtgaagggcaaccagaagagactggagagcctgcgggagctggccggcaaggaaaacctggaataccctagcgtgaccctgccacctcagcctcacaccaaggagggcgttgatgcctacaacgaagtgatcgcccgggtgcgaatgtgggtgaacctgaacctgtggcagaagctgaagctaagcagagatgatgccaagcctctgctgagactgaagggattcccttcctttcctctggtcgagagacaggccaacgaagtggactggtgggacatggtgtgtaacgtgaagaagctgatcaacgagaaaaaggaggatggcaaggtgttttggcagaatctggctggctacaagagacaggaagccctgagaccatacctgagcagcgaggaagatcggaagaagggaaagaaattcgctcggtaccagctgggcgacctgctgctgcacctggaaaagaagcacggcgaggactggggaaaggtgtacgacgaggcctgggagcggattgacaagaaagtggaaggcctgagcaagcacatcaagctggaagaggaacggagaagcgaggacgcccagagcaaggccgccctgaccgactggctgcgggctaaggccagcttcgtgatcgagggcctgaaggaggccgacaaggacgagttctgcagatgcgagctgaagctgcagaagtggtacggggacctgcggggaaagcccttcgccatcgaagccgagaacagcatcctggacatcagcggcttcagcaagcagtacaactgtgccttcatctggcagaaggacggcgtgaagaagctgaacctgtacctgatcatcaactacttcaagggcggcaagctgcggttcaagaagatcaaacctgaagccttcgaagccaacagattctacaccgtgatcaacaaaaagagcggcgagatcgtgcccatggaggtgaacttcaacttcgacgaccccaacctgatcatcctgcctctggcctttggcaagagacagggcagagaattcatctggaacgacctgctgtccctggaaaccggcagcctgaagctggccaacggaagagtgatcgagaagacactgtacaacagaagaacccggcaggatgagcctgccctgttcgtggccctgaccttcgagcggcgggaggtcctggactcctccaatatcaaaccaatgaacctgatcggcgtggcaagaggcgaaaacatccccgccgtgatcgccctgaccgaccccgagggctgcccactgagccggtttaaggatagcctgggaaacccaacccacatcctgagaatcggcgagagctataaggagaagcagcggaccatccaggccaagaaggaggtggagcagcggagagccggcggctacagccggaagtacgccagcaaagccaagaatctggcagacgatatggtgagaaacaccgctagagatctgctgtactacgccgtgacccaggatgccatgctgatcttcgccaacctgagccggggcttcggccggcagggcaagcggaccttcatggccgagagacagtacacacggatggaggactggctgaccgccaagctggcctacgagggcctgagcaagacctacctgtccaagacactggcccagtacacctccaagacatgcagcaactgtgggtttaccatcaccagcgccgactacgacagggtgctggagaagctgaagaagacagcaacaggctggatgaccacaattaacggcaaggagctgaaggtggagggccagattacctactacaacagatacaagagacagaacgtagtcaaggacctgtccgtcgagctggatagactgagcgaagaatctgtgaacaacgacatctcctcctggacaaagggcagaagcggagaagctctgagcctcctgaagaaaagattctcccatagacccgtgcaggagaagttcgtgtgcctgaactgcggcttcgagacacacgcagccgagcaagccgccctgaacatcgccagatcctggctgttcctgcggagccaggagtacaagaaataccagacaaacaagacaaccggcaacaccgataagagagccttcgtcgagacctggcagtccttttaccggaagaagcttaaggaggtgtggaaacctgccgtgcggtctggcggatctggcggaggctccaccagccccaagaaaaagagaaaagtctaagctgccttctgcggggcttgccttctggccatgcccttcttctctcccttgcacctgtacctcttggtctttgaataaagcctgagtaggaaggctagcaaaaaaaaaaaaaaaaaaaaaaaaaaaaaaaaaaaaaaaaaaaaaaaaaaaaaaaaaaaaaaaaaaaaaaaaaaaaaaaagcccagccggctccccaacctctaccgaggagggcacctctgagtccgccacccccgagagcggccctggcacctccaccgagcccagcgagggcagcgcacccggcagccctgccggcagccccacctccacagaggagggaaccagcaccgagcccagcgaaggcagcgccccaggcaccagcaccgagcctagtgagcaggagattaaacggatcaacaagatcagaagaagacttgtgaaagacagcaacaccaagaaggccggcaagacaggccccatgaaaaccctgctggttagagtgatgacacccgatctgagagagcggctggaaaacctgagaaagaagcctgaaaatatcccccagcccatcagcaatacatctagagccaacctgaataagctgctgaccgattacaccgaaatgaagaaggcgatcctgcatgtgtactgggaagagttccagaaggaccctgtgggcctgatgagccgggtggcccagcctgccagcaagaagatcgatcagaacaagctgaaacctgagatggacgagaagggcaacctgaccaccgccggctttgcctgctctcagtgtggccagcccctgttcgtgtacaagctggagcaggtgtctgagaagggcaaggcttacaccaactacttcggacggtgcaatgtggccgagcacgaaaagctgatcctgctggcccagctgaagcccgagaaggatagcgacgaagccgtgacatatagcctgggaaagtttgggcagagggccctggatttctacagcattcatgtgaccaaggagtccacccaccccgtgaagcccctggcccagatcgccggaaacagatacgcctccggacctgtgggaaaggccctgagcgacgcatgtatgggcacaatcgcctccttcctgtctaagtaccaggacatcatcatcgaacaccagaaggtggtgaagggcaaccagaagagactggagagcctgcgggagctggccggcaaggaaaacctggaataccctagcgtgaccctgccacctcagcctcacaccaaggagggcgttgatgcctacaacgaagtgatcgcccgggtgcgaatgtgggtgaacctgaacctgtggcagaagctgaagctaagcagagatgatgccaagcctctgctgagactgaagggattcccttcctttcctctggtcgagagacaggccaacgaagtggactggtgggacatggtgtgtaacgtgaagaagctgatcaacgagaaaaaggaggatggcaaggtgttttggcagaatctggctggctacaagagacaggaagccctgagaccatacctgagcagcgaggaagatcggaagaagggaaagaaattcgctcggtaccagctgggcgacctgctgctgcacctggaaaagaagcacggcgaggactggggaaaggtgtacgacgaggcctgggagcggattgacaagaaagtggaaggcctgagcaagcacatcaagctggaagaggaacggagaagcgaggacgcccagagcaaggccgccctgaccgactggctgcgggctaaggccagcttcgtgatcgagggcctgaaggaggccgacaaggacgagttctgcagatgcgagctgaagctgcagaagtggtacggggacctgcggggaaagcccttcgccatcgaagccgagaacagcatcctggacatcagcggcttcagcaagcagtacaactgtgccttcatctggcagaaggacggcgtgaagaagctgaacctgtacctgatcatcaactacttcaagggcggcaagctgcggttcaagaagatcaaacctgaagccttcgaagccaacagattctacaccgtgatcaacaaaaagagcggcgagatcgtgcccatggaggtgaacttcaacttcgacgaccccaacctgatcatcctgcctctggcctttggcaagagacagggcagagaattcatctggaacgacctgctgtccctggaaaccggcagcctgaagctggccaacggaagagtgatcgagaagacactgtacaacagaagaacccggcaggatgagcctgccctgttcgtggccctgaccttcgagcggcgggaggtcctggactcctccaatatcaaaccaatgaacctgatcggcgtggcaagaggcgaaaacatccccgccgtgatcgccctgaccgaccccgagggctgcccactgagccggtttaaggatagcctgggaaacccaacccacatcctgagaatcggcgagagctataaggagaagcagcggaccatccaggccaagaaggaggtggagcagcggagagccggcggctacagccggaagtacgccagcaaagccaagaatctggcagacgatatggtgagaaacaccgctagagatctgctgtactacgccgtgacccaggatgccatgctgatcttcgccaacctgagccggggcttcggccggcagggcaagcggaccttcatggccgagagacagtacacacggatggaggactggctgaccgccaagctggcctacgagggcctgagcaagacctacctgtccaagacactggcccagtacacctccaagacatgcagcaactgtgggtttaccatcaccagcgccgactacgacagggtgctggagaagctgaagaagacagcaacaggctggatgaccacaattaacggcaaggagctgaaggtggagggccagattacctactacaacagatacaagagacagaacgtagtcaaggacctgtccgtcgagctggatagactgagcgaagaatctgtgaacaacgacatctcctcctggacaaagggcagaagcggagaagctctgagcctcctgaagaaaagattctcccatagacccgtgcaggagaagttcgtgtgcctgaactgcggcttcgagacacacgcagccgagcaagccgccctgaacatcgccagatcctggctgttcctgcggagccaggagtacaagaaataccagacaaacaagacaaccggcaacaccgataagagagccttcgtcgagacctggcagtccttttaccggaagaagcttaaggaggtgtggaaacctgccgtgcggtctggcggatctggcggaggctccaccagccccaagaaaaagagaaaagtctaagctgccttctgcggggcttgccttctggccatgcccttcttctctcccttgcacctgtacctcttggtctttgaataaagcctgagtaggaaggctagcaaaaaaaaaaaaaaaaaaaaaaaaaaaaaaaaaaaaaaaaaaaaaaaaaaaaaaaaaaaaaaaaaaaaaaaaaaaaaaaa

SEQ ID NO: 9123 - RNA, 8787 nt, synthetic construct
  source 1..8787: mol_type = other RNA
aggaaataagagagaaaagaagagtaagaagaaatataagagccaccatggcccctaagaagaagcgtaaagtgagccggatgaaccacgaccaggagttcgacccccctaaggtgtaccctcccgtccccgccgagaagagaaagcccatccgggtcctgagcctgttcgatggcatcgccaccggtctgctggtgctgaaggacctgggcatccaggtggataggtacattgcctccgaggtgtgcgaggactccatcaccgtgggaatggtgcgtcatcagggcaagatcatgtacgtgggcgacgtgcggagcgtgacacagaagcatatccaggagtggggccctttcgacctggtgatcggcggcagcccttgcaatgacctgagcatcgtgaacccagcccggaagggcctgtacgagggaaccggcagactgttcttcgagttttacagactgctgcacgacgcccggcctaaggaaggcgacgaccggcccttcttttggctgttcgagaatgtggtggccatgggagtcagcgacaagcgggatattagccggttcctggagagcaaccccgtgatgatcgatgccaaggaagtgagcgccgcccaccgggccagatacttctggggcaatctgcctggcatgaacagacccctggccagcaccgtgaacgacaagctggagctgcaggagtgcctggagcacggccggatcgccaagttcagcaaggtgagaaccatcaccacccgaagcaacagcatcaaacaaggcaaggaccagcactttcctgtgttcatgaacgagaaggaggacatcctgtggtgtaccgagatggagagagtgttcgggttcccagtccactacacagatgtcagcaacatgtctagactggccagacagagactgctgggaagaagctggtccgtccctgtgatcagacacctgttcgcccctctgaaggagtacttcgcctgcgtgagcagcggcaacagcaacgccaacagccggggccccagcttctctagcggcctggtgccactgtccctgagagggagccacatgggccccatggagatctacaaaaccgtgagcgcctggaagcggcagcctgtgcgcgtgctgagcctgtttcggaatatcgataaagtcctgaaaagcctgggattcctggagagcggctctggctccggcggtggcaccctgaagtacgtggaggatgtgacaaacgtggtcagacgggatgtggagaagtggggccccttcgatctggtgtacggcagcacccaacccctgggcagctcttgtgaccggtgccctggctggtacatgtttcagttccaccggatcctgcagtacgccctgccgagacaggagtcccagcggccattcttttggattttcatggacaacttgctgctgaccgaggatgaccaggaaactaccactcggttcctgcagaccgaagccgtgaccctgcaggacgtgagaggccgggactaccagaacgccatgcgggtgtggtccaacatccctggactgaaaagcaagcacgcacctctgacccctaaagaagaggagtacctgcaggcccaggtgcggagcagaagcaagctggacgcccctaaggtggatctgctggtgaagaattgcctcctgcccctgagagagtacttcaagtatttcagccagaatagtctgcccctgggaggcagcggcggcggcatgatcaactaccagacccccgtgagcttcagggacgtggtggtgggcttcacccaggaggagtggcacaggctgaaccccacccagagggccctgtacagggacgtgatgctggagacctacagcaacctggtgagcgtgggctacgagggcaccaagcccgacgtgatcctgaggctggagcaggaggaggccccctggatcggcgaggccgcctgcctgggctgccactgctggggcatcggcggcccaagcagcggcgcccctcctcccagcggcggcaggcggcccaagcagcggcgcccctcctcccagcggcggcagcccagccggctccccaacctctaccgaggagggcacctctgagtccgccacccccgagagcggccctggcacctccaccgagcccagcgagggcagcgcacccggcagccctgccggcagccccacctccacagaggagggaaccagcaccgagcccagcgaaggcagcgccccaggcaccagcaccgagcctagtgagcaggagattaaacggatcaacaagatcagaagaagacttgtgaaagacagcaacaccaagaaggccggcaagacaggccccatgaaaaccctgctggttagagtgatgacacccgatctgagagagcggctggaaaacctgagaaagaagcctgaaaatatcccccagcccatcagcaatacatctagagccaacctgaataagctgctgaccgattacaccgaaatgaagaaggcgatcctgcatgtgtactgggaagagttccagaaggaccctgtgggcctgatgagccgggtggcccagcctgccagcaagaagatcgatcagaacaagctgaaacctgagatggacgagaagggcaacctgaccaccgccggctttgcctgctctcagtgtggccagcccctgttcgtgtacaagctggagcaggtgtctgagaagggcaaggcttacaccaactacttcggacggtgcaatgtggccgagcacgaaaagctgatcctgctggcccagctgaagcccgagaaggatagcgacgaagccgtgacatatagcctgggaaagtttgggcagagggccctggatttctacagcattcatgtgaccaaggagtccacccaccccgtgaagcccctggcccagatcgccggaaacagatacgcctccggacctgtgggaaaggccctgagcgacgcatgtatgggcacaatcgcctccttcctgtctaagtaccaggacatcatcatcgaacaccagaaggtggtgaagggcaaccagaagagactggagagcctgcgggagctggccggcaaggaaaacctggaataccctagcgtgaccctgccacctcagcctcacaccaaggagggcgttgatgcctacaacgaagtgatcgcccgggtgcgaatgtgggtgaacctgaacctgtggcagaagctgaagctaagcagagatgatgccaagcctctgctgagactgaagggattcccttcctttcctctggtcgagagacaggccaacgaagtggactggtgggacatggtgtgtaacgtgaagaagctgatcaacgagaaaaaggaggatggcaaggtgttttggcagaatctggctggctacaagagacaggaagccctgagaccatacctgagcagcgaggaagatcggaagaagggaaagaaattcgctcggtaccagctgggcgacctgctgctgcacctggaaaagaagcacggcgaggactggggaaaggtgtacgacgaggcctgggagcggattgacaagaaagtggaaggcctgagcaagcacatcaagctggaagaggaacggagaagcgaggacgcccagagcaaggccgccctgaccgactggctgcgggctaaggccagcttcgtgatcgagggcctgaaggaggccgacaaggacgagttctgcagatgcgagctgaagctgcagaagtggtacggggacctgcggggaaagcccttcgccatcgaagccgagaacagcatcctggacatcagcggcttcagcaagcagtacaactgtgccttcatctggcagaaggacggcgtgaagaagctgaacctgtacctgatcatcaactacttcaagggcggcaagctgcggttcaagaagatcaaacctgaagccttcgaagccaacagattctacaccgtgatcaacaaaaagagcggcgagatcgtgcccatggaggtgaacttcaacttcgacgaccccaacctgatcatcctgcctctggcctttggcaagagacagggcagagaattcatctggaacgacctgctgtccctggaaaccggcagcctgaagctggccaacggaagagtgatcgagaagacactgtacaacagaagaacccggcaggatgagcctgccctgttcgtggccctgaccttcgagcggcgggaggtcctggactcctccaatatcaaaccaatgaacctgatcggcgtggcaagaggcgaaaacatccccgccgtgatcgccctgaccgaccccgagggctgcccactgagccggtttaaggatagcctgggaaacccaacccacatcctgagaatcggcgagagctataaggagaagcagcggaccatccaggccaagaaggaggtggagcagcggagagccggcggctacagccggaagtacgccagcaaagccaagaatctggcagacgatatggtgagaaacaccgctagagatctgctgtactacgccgtgacccaggatgccatgctgatcttcgccaacctgagccggggcttcggccggcagggcaagcggaccttcatggccgagagacagtacacacggatggaggactggctgaccgccaagctggcctacgagggcctgagcaagacctacctgtccaagacactggcccagtacacctccaagacatgcagcaactgtgggtttaccatcaccagcgccgactacgacagggtgctggagaagctgaagaagacagcaacaggctggatgaccacaattaacggcaaggagctgaaggtggagggccagattacctactacaacagatacaagagacagaacgtagtcaaggacctgtccgtcgagctggatagactgagcgaagaatctgtgaacaacgacatctcctcctggacaaagggcagaagcggagaagctctgagcctcctgaagaaaagattctcccatagacccgtgcaggagaagttcgtgtgcctgaactgcggcttcgagacacacgcagccgagcaagccgccctgaacatcgccagatcctggctgttcctgcggagccaggagtacaagaaataccagacaaacaagacaaccggcaacaccgataagagagccttcgtcgagacctggcagtccttttaccggaagaagcttaaggaggtgtggaaacctgccgtgcggtctggcggatctggcggaggctccaccagccccaagaaaaagagaaaagtctaagctgccttctgcggggcttgccttctggccatgcccttcttctctcccttgcacctgtacctcttggtctttgaataaagcctgagtaggaaggctagcaaaaaaaaaaaaaaaaaaaaaaaaaaaaaaaaaaaaaaaaaaaaaaaaaaaaaaaaaaaaaaaaaaaaaaaaaaaaaaaagcccagccggctccccaacctctaccgaggagggcacctctgagtccgccacccccgagagcggccctggcacctccaccgagcccagcgagggcagcgcacccggcagccctgccggcagccccacctccacagaggagggaaccagcaccgagcccagcgaaggcagcgccccaggcaccagcaccgagcctagtgagcaggagattaaacggatcaacaagatcagaagaagacttgtgaaagacagcaacaccaagaaggccggcaagacaggccccatgaaaaccctgctggttagagtgatgacacccgatctgagagagcggctggaaaacctgagaaagaagcctgaaaatatcccccagcccatcagcaatacatctagagccaacctgaataagctgctgaccgattacaccgaaatgaagaaggcgatcctgcatgtgtactgggaagagttccagaaggaccctgtgggcctgatgagccgggtggcccagcctgccagcaagaagatcgatcagaacaagctgaaacctgagatggacgagaagggcaacctgaccaccgccggctttgcctgctctcagtgtggccagcccctgttcgtgtacaagctggagcaggtgtctgagaagggcaaggcttacaccaactacttcggacggtgcaatgtggccgagcacgaaaagctgatcctgctggcccagctgaagcccgagaaggatagcgacgaagccgtgacatatagcctgggaaagtttgggcagagggccctggatttctacagcattcatgtgaccaaggagtccacccaccccgtgaagcccctggcccagatcgccggaaacagatacgcctccggacctgtgggaaaggccctgagcgacgcatgtatgggcacaatcgcctccttcctgtctaagtaccaggacatcatcatcgaacaccagaaggtggtgaagggcaaccagaagagactggagagcctgcgggagctggccggcaaggaaaacctggaataccctagcgtgaccctgccacctcagcctcacaccaaggagggcgttgatgcctacaacgaagtgatcgcccgggtgcgaatgtgggtgaacctgaacctgtggcagaagctgaagctaagcagagatgatgccaagcctctgctgagactgaagggattcccttcctttcctctggtcgagagacaggccaacgaagtggactggtgggacatggtgtgtaacgtgaagaagctgatcaacgagaaaaaggaggatggcaaggtgttttggcagaatctggctggctacaagagacaggaagccctgagaccatacctgagcagcgaggaagatcggaagaagggaaagaaattcgctcggtaccagctgggcgacctgctgctgcacctggaaaagaagcacggcgaggactggggaaaggtgtacgacgaggcctgggagcggattgacaagaaagtggaaggcctgagcaagcacatcaagctggaagaggaacggagaagcgaggacgcccagagcaaggccgccctgaccgactggctgcgggctaaggccagcttcgtgatcgagggcctgaaggaggccgacaaggacgagttctgcagatgcgagctgaagctgcagaagtggtacggggacctgcggggaaagcccttcgccatcgaagccgagaacagcatcctggacatcagcggcttcagcaagcagtacaactgtgccttcatctggcagaaggacggcgtgaagaagctgaacctgtacctgatcatcaactacttcaagggcggcaagctgcggttcaagaagatcaaacctgaagccttcgaagccaacagattctacaccgtgatcaacaaaaagagcggcgagatcgtgcccatggaggtgaacttcaacttcgacgaccccaacctgatcatcctgcctctggcctttggcaagagacagggcagagaattcatctggaacgacctgctgtccctggaaaccggcagcctgaagctggccaacggaagagtgatcgagaagacactgtacaacagaagaacccggcaggatgagcctgccctgttcgtggccctgaccttcgagcggcgggaggtcctggactcctccaatatcaaaccaatgaacctgatcggcgtggcaagaggcgaaaacatccccgccgtgatcgccctgaccgaccccgagggctgcccactgagccggtttaaggatagcctgggaaacccaacccacatcctgagaatcggcgagagctataaggagaagcagcggaccatccaggccaagaaggaggtggagcagcggagagccggcggctacagccggaagtacgccagcaaagccaagaatctggcagacgatatggtgagaaacaccgctagagatctgctgtactacgccgtgacccaggatgccatgctgatcttcgccaacctgagccggggcttcggccggcagggcaagcggaccttcatggccgagagacagtacacacggatggaggactggctgaccgccaagctggcctacgagggcctgagcaagacctacctgtccaagacactggcccagtacacctccaagacatgcagcaactgtgggtttaccatcaccagcgccgactacgacagggtgctggagaagctgaagaagacagcaacaggctggatgaccacaattaacggcaaggagctgaaggtggagggccagattacctactacaacagatacaagagacagaacgtagtcaaggacctgtccgtcgagctggatagactgagcgaagaatctgtgaacaacgacatctcctcctggacaaagggcagaagcggagaagctctgagcctcctgaagaaaagattctcccatagacccgtgcaggagaagttcgtgtgcctgaactgcggcttcgagacacacgcagccgagcaagccgccctgaacatcgccagatcctggctgttcctgcggagccaggagtacaagaaataccagacaaacaagacaaccggcaacaccgataagagagccttcgtcgagacctggcagtccttttaccggaagaagcttaaggaggtgtggaaacctgccgtgcggtctggcggatctggcggaggctccaccagccccaagaaaaagagaaaagtctaagctgccttctgcggggcttgccttctggccatgcccttcttctctcccttgcacctgtacctcttggtctttgaataaagcctgagtaggaaggctagcaaaaaaaaaaaaaaaaaaaaaaaaaaaaaaaaaaaaaaaaaaaaaaaaaaaaaaaaaaaaaaaaaaaaaaaaaaaaaaaa

SEQ ID NO: 9124 - RNA, 8787 nt, synthetic construct
  source 1..8787: mol_type = other RNA
aggaaataagagagaaaagaagagtaagaagaaatataagagccaccatggcccctaagaagaagcgtaaagtgagccggatgaaccacgaccaggagttcgacccccctaaggtgtaccctcccgtccccgccgagaagagaaagcccatccgggtcctgagcctgttcgatggcatcgccaccggtctgctggtgctgaaggacctgggcatccaggtggataggtacattgcctccgaggtgtgcgaggactccatcaccgtgggaatggtgcgtcatcagggcaagatcatgtacgtgggcgacgtgcggagcgtgacacagaagcatatccaggagtggggccctttcgacctggtgatcggcggcagcccttgcaatgacctgagcatcgtgaacccagcccggaagggcctgtacgagggaaccggcagactgttcttcgagttttacagactgctgcacgacgcccggcctaaggaaggcgacgaccggcccttcttttggctgttcgagaatgtggtggccatgggagtcagcgacaagcgggatattagccggttcctggagagcaaccccgtgatgatcgatgccaaggaagtgagcgccgcccaccgggccagatacttctggggcaatctgcctggcatgaacagacccctggccagcaccgtgaacgacaagctggagctgcaggagtgcctggagcacggccggatcgccaagttcagcaaggtgagaaccatcaccacccgaagcaacagcatcaaacaaggcaaggaccagcactttcctgtgttcatgaacgagaaggaggacatcctgtggtgtaccgagatggagagagtgttcgggttcccagtccactacacagatgtcagcaacatgtctagactggccagacagagactgctgggaagaagctggtccgtccctgtgatcagacacctgttcgcccctctgaaggagtacttcgcctgcgtgagcagcggcaacagcaacgccaacagccggggccccagcttctctagcggcctggtgccactgtccctgagagggagccacatgggccccatggagatctacaaaaccgtgagcgcctggaagcggcagcctgtgcgcgtgctgagcctgtttcggaatatcgataaagtcctgaaaagcctgggattcctggagagcggctctggctccggcggtggcaccctgaagtacgtggaggatgtgacaaacgtggtcagacgggatgtggagaagtggggccccttcgatctggtgtacggcagcacccaacccctgggcagctcttgtgaccggtgccctggctggtacatgtttcagttccaccggatcctgcagtacgccctgccgagacaggagtcccagcggccattcttttggattttcatggacaacttgctgctgaccgaggatgaccaggaaactaccactcggttcctgcagaccgaagccgtgaccctgcaggacgtgagaggccgggactaccagaacgccatgcgggtgtggtccaacatccctggactgaaaagcaagcacgcacctctgacccctaaagaagaggagtacctgcaggcccaggtgcggagcagaagcaagctggacgcccctaaggtggatctgctggtgaagaattgcctcctgcccctgagagagtacttcaagtatttcagccagaatagtctgcccctgggaggcagcggcggcggcagccaggagcccgtgaccttcgaggacgtggccgtgtacttcacccagaaccagtgggccagcctggaccccatgcagagggccctgtacctggaggtgatgctggagaactacgccaacatcaccagcctggccgccctgcccttccccaagcccgacctgatcctgcagctggagcagggcgaggccccctggggcctggacccctggacccccctggacggcgaggccctgggcggcgtgggcggcccaagcagcggcgcccctcctcccagcggcggcaggcggcccaagcagcggcgcccctcctcccagcggcggcagcccagccggctccccaacctctaccgaggagggcacctctgagtccgccacccccgagagcggccctggcacctccaccgagcccagcgagggcagcgcacccggcagccctgccggcagccccacctccacagaggagggaaccagcaccgagcccagcgaaggcagcgccccaggcaccagcaccgagcctagtgagcaggagattaaacggatcaacaagatcagaagaagacttgtgaaagacagcaacaccaagaaggccggcaagacaggccccatgaaaaccctgctggttagagtgatgacacccgatctgagagagcggctggaaaacctgagaaagaagcctgaaaatatcccccagcccatcagcaatacatctagagccaacctgaataagctgctgaccgattacaccgaaatgaagaaggcgatcctgcatgtgtactgggaagagttccagaaggaccctgtgggcctgatgagccgggtggcccagcctgccagcaagaagatcgatcagaacaagctgaaacctgagatggacgagaagggcaacctgaccaccgccggctttgcctgctctcagtgtggccagcccctgttcgtgtacaagctggagcaggtgtctgagaagggcaaggcttacaccaactacttcggacggtgcaatgtggccgagcacgaaaagctgatcctgctggcccagctgaagcccgagaaggatagcgacgaagccgtgacatatagcctgggaaagtttgggcagagggccctggatttctacagcattcatgtgaccaaggagtccacccaccccgtgaagcccctggcccagatcgccggaaacagatacgcctccggacctgtgggaaaggccctgagcgacgcatgtatgggcacaatcgcctccttcctgtctaagtaccaggacatcatcatcgaacaccagaaggtggtgaagggcaaccagaagagactggagagcctgcgggagctggccggcaaggaaaacctggaataccctagcgtgaccctgccacctcagcctcacaccaaggagggcgttgatgcctacaacgaagtgatcgcccgggtgcgaatgtgggtgaacctgaacctgtggcagaagctgaagctaagcagagatgatgccaagcctctgctgagactgaagggattcccttcctttcctctggtcgagagacaggccaacgaagtggactggtgggacatggtgtgtaacgtgaagaagctgatcaacgagaaaaaggaggatggcaaggtgttttggcagaatctggctggctacaagagacaggaagccctgagaccatacctgagcagcgaggaagatcggaagaagggaaagaaattcgctcggtaccagctgggcgacctgctgctgcacctggaaaagaagcacggcgaggactggggaaaggtgtacgacgaggcctgggagcggattgacaagaaagtggaaggcctgagcaagcacatcaagctggaagaggaacggagaagcgaggacgcccagagcaaggccgccctgaccgactggctgcgggctaaggccagcttcgtgatcgagggcctgaaggaggccgacaaggacgagttctgcagatgcgagctgaagctgcagaagtggtacggggacctgcggggaaagcccttcgccatcgaagccgagaacagcatcctggacatcagcggcttcagcaagcagtacaactgtgccttcatctggcagaaggacggcgtgaagaagctgaacctgtacctgatcatcaactacttcaagggcggcaagctgcggttcaagaagatcaaacctgaagccttcgaagccaacagattctacaccgtgatcaacaaaaagagcggcgagatcgtgcccatggaggtgaacttcaacttcgacgaccccaacctgatcatcctgcctctggcctttggcaagagacagggcagagaattcatctggaacgacctgctgtccctggaaaccggcagcctgaagctggccaacggaagagtgatcgagaagacactgtacaacagaagaacccggcaggatgagcctgccctgttcgtggccctgaccttcgagcggcgggaggtcctggactcctccaatatcaaaccaatgaacctgatcggcgtggcaagaggcgaaaacatccccgccgtgatcgccctgaccgaccccgagggctgcccactgagccggtttaaggatagcctgggaaacccaacccacatcctgagaatcggcgagagctataaggagaagcagcggaccatccaggccaagaaggaggtggagcagcggagagccggcggctacagccggaagtacgccagcaaagccaagaatctggcagacgatatggtgagaaacaccgctagagatctgctgtactacgccgtgacccaggatgccatgctgatcttcgccaacctgagccggggcttcggccggcagggcaagcggaccttcatggccgagagacagtacacacggatggaggactggctgaccgccaagctggcctacgagggcctgagcaagacctacctgtccaagacactggcccagtacacctccaagacatgcagcaactgtgggtttaccatcaccagcgccgactacgacagggtgctggagaagctgaagaagacagcaacaggctggatgaccacaattaacggcaaggagctgaaggtggagggccagattacctactacaacagatacaagagacagaacgtagtcaaggacctgtccgtcgagctggatagactgagcgaagaatctgtgaacaacgacatctcctcctggacaaagggcagaagcggagaagctctgagcctcctgaagaaaagattctcccatagacccgtgcaggagaagttcgtgtgcctgaactgcggcttcgagacacacgcagccgagcaagccgccctgaacatcgccagatcctggctgttcctgcggagccaggagtacaagaaataccagacaaacaagacaaccggcaacaccgataagagagccttcgtcgagacctggcagtccttttaccggaagaagcttaaggaggtgtggaaacctgccgtgcggtctggcggatctggcggaggctccaccagccccaagaaaaagagaaaagtctaagctgccttctgcggggcttgccttctggccatgcccttcttctctcccttgcacctgtacctcttggtctttgaataaagcctgagtaggaaggctagcaaaaaaaaaaaaaaaaaaaaaaaaaaaaaaaaaaaaaaaaaaaaaaaaaaaaaaaaaaaaaaaaaaaaaaaaaaaaaaaagcccagccggctccccaacctctaccgaggagggcacctctgagtccgccacccccgagagcggccctggcacctccaccgagcccagcgagggcagcgcacccggcagccctgccggcagccccacctccacagaggagggaaccagcaccgagcccagcgaaggcagcgccccaggcaccagcaccgagcctagtgagcaggagattaaacggatcaacaagatcagaagaagacttgtgaaagacagcaacaccaagaaggccggcaagacaggccccatgaaaaccctgctggttagagtgatgacacccgatctgagagagcggctggaaaacctgagaaagaagcctgaaaatatcccccagcccatcagcaatacatctagagccaacctgaataagctgctgaccgattacaccgaaatgaagaaggcgatcctgcatgtgtactgggaagagttccagaaggaccctgtgggcctgatgagccgggtggcccagcctgccagcaagaagatcgatcagaacaagctgaaacctgagatggacgagaagggcaacctgaccaccgccggctttgcctgctctcagtgtggccagcccctgttcgtgtacaagctggagcaggtgtctgagaagggcaaggcttacaccaactacttcggacggtgcaatgtggccgagcacgaaaagctgatcctgctggcccagctgaagcccgagaaggatagcgacgaagccgtgacatatagcctgggaaagtttgggcagagggccctggatttctacagcattcatgtgaccaaggagtccacccaccccgtgaagcccctggcccagatcgccggaaacagatacgcctccggacctgtgggaaaggccctgagcgacgcatgtatgggcacaatcgcctccttcctgtctaagtaccaggacatcatcatcgaacaccagaaggtggtgaagggcaaccagaagagactggagagcctgcgggagctggccggcaaggaaaacctggaataccctagcgtgaccctgccacctcagcctcacaccaaggagggcgttgatgcctacaacgaagtgatcgcccgggtgcgaatgtgggtgaacctgaacctgtggcagaagctgaagctaagcagagatgatgccaagcctctgctgagactgaagggattcccttcctttcctctggtcgagagacaggccaacgaagtggactggtgggacatggtgtgtaacgtgaagaagctgatcaacgagaaaaaggaggatggcaaggtgttttggcagaatctggctggctacaagagacaggaagccctgagaccatacctgagcagcgaggaagatcggaagaagggaaagaaattcgctcggtaccagctgggcgacctgctgctgcacctggaaaagaagcacggcgaggactggggaaaggtgtacgacgaggcctgggagcggattgacaagaaagtggaaggcctgagcaagcacatcaagctggaagaggaacggagaagcgaggacgcccagagcaaggccgccctgaccgactggctgcgggctaaggccagcttcgtgatcgagggcctgaaggaggccgacaaggacgagttctgcagatgcgagctgaagctgcagaagtggtacggggacctgcggggaaagcccttcgccatcgaagccgagaacagcatcctggacatcagcggcttcagcaagcagtacaactgtgccttcatctggcagaaggacggcgtgaagaagctgaacctgtacctgatcatcaactacttcaagggcggcaagctgcggttcaagaagatcaaacctgaagccttcgaagccaacagattctacaccgtgatcaacaaaaagagcggcgagatcgtgcccatggaggtgaacttcaacttcgacgaccccaacctgatcatcctgcctctggcctttggcaagagacagggcagagaattcatctggaacgacctgctgtccctggaaaccggcagcctgaagctggccaacggaagagtgatcgagaagacactgtacaacagaagaacccggcaggatgagcctgccctgttcgtggccctgaccttcgagcggcgggaggtcctggactcctccaatatcaaaccaatgaacctgatcggcgtggcaagaggcgaaaacatccccgccgtgatcgccctgaccgaccccgagggctgcccactgagccggtttaaggatagcctgggaaacccaacccacatcctgagaatcggcgagagctataaggagaagcagcggaccatccaggccaagaaggaggtggagcagcggagagccggcggctacagccggaagtacgccagcaaagccaagaatctggcagacgatatggtgagaaacaccgctagagatctgctgtactacgccgtgacccaggatgccatgctgatcttcgccaacctgagccggggcttcggccggcagggcaagcggaccttcatggccgagagacagtacacacggatggaggactggctgaccgccaagctggcctacgagggcctgagcaagacctacctgtccaagacactggcccagtacacctccaagacatgcagcaactgtgggtttaccatcaccagcgccgactacgacagggtgctggagaagctgaagaagacagcaacaggctggatgaccacaattaacggcaaggagctgaaggtggagggccagattacctactacaacagatacaagagacagaacgtagtcaaggacctgtccgtcgagctggatagactgagcgaagaatctgtgaacaacgacatctcctcctggacaaagggcagaagcggagaagctctgagcctcctgaagaaaagattctcccatagacccgtgcaggagaagttcgtgtgcctgaactgcggcttcgagacacacgcagccgagcaagccgccctgaacatcgccagatcctggctgttcctgcggagccaggagtacaagaaataccagacaaacaagacaaccggcaacaccgataagagagccttcgtcgagacctggcagtccttttaccggaagaagcttaaggaggtgtggaaacctgccgtgcggtctggcggatctggcggaggctccaccagccccaagaaaaagagaaaagtctaagctgccttctgcggggcttgccttctggccatgcccttcttctctcccttgcacctgtacctcttggtctttgaataaagcctgagtaggaaggctagcaaaaaaaaaaaaaaaaaaaaaaaaaaaaaaaaaaaaaaaaaaaaaaaaaaaaaaaaaaaaaaaaaaaaaaaaaaaaaaaa

SEQ ID NO: 9125 - RNA, 8787 nt, synthetic construct
  source 1..8787: mol_type = other RNA
aggaaataagagagaaaagaagagtaagaagaaatataagagccaccatggcccctaagaagaagcgtaaagtgagccggatgaaccacgaccaggagttcgacccccctaaggtgtaccctcccgtccccgccgagaagagaaagcccatccgggtcctgagcctgttcgatggcatcgccaccggtctgctggtgctgaaggacctgggcatccaggtggataggtacattgcctccgaggtgtgcgaggactccatcaccgtgggaatggtgcgtcatcagggcaagatcatgtacgtgggcgacgtgcggagcgtgacacagaagcatatccaggagtggggccctttcgacctggtgatcggcggcagcccttgcaatgacctgagcatcgtgaacccagcccggaagggcctgtacgagggaaccggcagactgttcttcgagttttacagactgctgcacgacgcccggcctaaggaaggcgacgaccggcccttcttttggctgttcgagaatgtggtggccatgggagtcagcgacaagcgggatattagccggttcctggagagcaaccccgtgatgatcgatgccaaggaagtgagcgccgcccaccgggccagatacttctggggcaatctgcctggcatgaacagacccctggccagcaccgtgaacgacaagctggagctgcaggagtgcctggagcacggccggatcgccaagttcagcaaggtgagaaccatcaccacccgaagcaacagcatcaaacaaggcaaggaccagcactttcctgtgttcatgaacgagaaggaggacatcctgtggtgtaccgagatggagagagtgttcgggttcccagtccactacacagatgtcagcaacatgtctagactggccagacagagactgctgggaagaagctggtccgtccctgtgatcagacacctgttcgcccctctgaaggagtacttcgcctgcgtgagcagcggcaacagcaacgccaacagccggggccccagcttctctagcggcctggtgccactgtccctgagagggagccacatgggccccatggagatctacaaaaccgtgagcgcctggaagcggcagcctgtgcgcgtgctgagcctgtttcggaatatcgataaagtcctgaaaagcctgggattcctggagagcggctctggctccggcggtggcaccctgaagtacgtggaggatgtgacaaacgtggtcagacgggatgtggagaagtggggccccttcgatctggtgtacggcagcacccaacccctgggcagctcttgtgaccggtgccctggctggtacatgtttcagttccaccggatcctgcagtacgccctgccgagacaggagtcccagcggccattcttttggattttcatggacaacttgctgctgaccgaggatgaccaggaaactaccactcggttcctgcagaccgaagccgtgaccctgcaggacgtgagaggccgggactaccagaacgccatgcgggtgtggtccaacatccctggactgaaaagcaagcacgcacctctgacccctaaagaagaggagtacctgcaggcccaggtgcggagcagaagcaagctggacgcccctaaggtggatctgctggtgaagaattgcctcctgcccctgagagagtacttcaagtatttcagccagaatagtctgcccctgggaggcagcggcggcggcaggcccagggccgtgaagttcgccgacgtggccgtgtacttcagccccgaggagtggggctgcctgaggcccgcccagagggccctgtacagggacgtgatgagggagacctacggccacctgggcgccctgggcttccccggccccaagcccgccctgatcagctggatggagcaggagagcgaggcctggagccccgacgcccaggaccccgaggagggcgagagcctgggcggcgccctgggcggcccaagcagcggcgcccctcctcccagcggcggcaggcggcccaagcagcggcgcccctcctcccagcggcggcagcccagccggctccccaacctctaccgaggagggcacctctgagtccgccacccccgagagcggccctggcacctccaccgagcccagcgagggcagcgcacccggcagccctgccggcagccccacctccacagaggagggaaccagcaccgagcccagcgaaggcagcgccccaggcaccagcaccgagcctagtgagcaggagattaaacggatcaacaagatcagaagaagacttgtgaaagacagcaacaccaagaaggccggcaagacaggccccatgaaaaccctgctggttagagtgatgacacccgatctgagagagcggctggaaaacctgagaaagaagcctgaaaatatcccccagcccatcagcaatacatctagagccaacctgaataagctgctgaccgattacaccgaaatgaagaaggcgatcctgcatgtgtactgggaagagttccagaaggaccctgtgggcctgatgagccgggtggcccagcctgccagcaagaagatcgatcagaacaagctgaaacctgagatggacgagaagggcaacctgaccaccgccggctttgcctgctctcagtgtggccagcccctgttcgtgtacaagctggagcaggtgtctgagaagggcaaggcttacaccaactacttcggacggtgcaatgtggccgagcacgaaaagctgatcctgctggcccagctgaagcccgagaaggatagcgacgaagccgtgacatatagcctgggaaagtttgggcagagggccctggatttctacagcattcatgtgaccaaggagtccacccaccccgtgaagcccctggcccagatcgccggaaacagatacgcctccggacctgtgggaaaggccctgagcgacgcatgtatgggcacaatcgcctccttcctgtctaagtaccaggacatcatcatcgaacaccagaaggtggtgaagggcaaccagaagagactggagagcctgcgggagctggccggcaaggaaaacctggaataccctagcgtgaccctgccacctcagcctcacaccaaggagggcgttgatgcctacaacgaagtgatcgcccgggtgcgaatgtgggtgaacctgaacctgtggcagaagctgaagctaagcagagatgatgccaagcctctgctgagactgaagggattcccttcctttcctctggtcgagagacaggccaacgaagtggactggtgggacatggtgtgtaacgtgaagaagctgatcaacgagaaaaaggaggatggcaaggtgttttggcagaatctggctggctacaagagacaggaagccctgagaccatacctgagcagcgaggaagatcggaagaagggaaagaaattcgctcggtaccagctgggcgacctgctgctgcacctggaaaagaagcacggcgaggactggggaaaggtgtacgacgaggcctgggagcggattgacaagaaagtggaaggcctgagcaagcacatcaagctggaagaggaacggagaagcgaggacgcccagagcaaggccgccctgaccgactggctgcgggctaaggccagcttcgtgatcgagggcctgaaggaggccgacaaggacgagttctgcagatgcgagctgaagctgcagaagtggtacggggacctgcggggaaagcccttcgccatcgaagccgagaacagcatcctggacatcagcggcttcagcaagcagtacaactgtgccttcatctggcagaaggacggcgtgaagaagctgaacctgtacctgatcatcaactacttcaagggcggcaagctgcggttcaagaagatcaaacctgaagccttcgaagccaacagattctacaccgtgatcaacaaaaagagcggcgagatcgtgcccatggaggtgaacttcaacttcgacgaccccaacctgatcatcctgcctctggcctttggcaagagacagggcagagaattcatctggaacgacctgctgtccctggaaaccggcagcctgaagctggccaacggaagagtgatcgagaagacactgtacaacagaagaacccggcaggatgagcctgccctgttcgtggccctgaccttcgagcggcgggaggtcctggactcctccaatatcaaaccaatgaacctgatcggcgtggcaagaggcgaaaacatccccgccgtgatcgccctgaccgaccccgagggctgcccactgagccggtttaaggatagcctgggaaacccaacccacatcctgagaatcggcgagagctataaggagaagcagcggaccatccaggccaagaaggaggtggagcagcggagagccggcggctacagccggaagtacgccagcaaagccaagaatctggcagacgatatggtgagaaacaccgctagagatctgctgtactacgccgtgacccaggatgccatgctgatcttcgccaacctgagccggggcttcggccggcagggcaagcggaccttcatggccgagagacagtacacacggatggaggactggctgaccgccaagctggcctacgagggcctgagcaagacctacctgtccaagacactggcccagtacacctccaagacatgcagcaactgtgggtttaccatcaccagcgccgactacgacagggtgctggagaagctgaagaagacagcaacaggctggatgaccacaattaacggcaaggagctgaaggtggagggccagattacctactacaacagatacaagagacagaacgtagtcaaggacctgtccgtcgagctggatagactgagcgaagaatctgtgaacaacgacatctcctcctggacaaagggcagaagcggagaagctctgagcctcctgaagaaaagattctcccatagacccgtgcaggagaagttcgtgtgcctgaactgcggcttcgagacacacgcagccgagcaagccgccctgaacatcgccagatcctggctgttcctgcggagccaggagtacaagaaataccagacaaacaagacaaccggcaacaccgataagagagccttcgtcgagacctggcagtccttttaccggaagaagcttaaggaggtgtggaaacctgccgtgcggtctggcggatctggcggaggctccaccagccccaagaaaaagagaaaagtctaagctgccttctgcggggcttgccttctggccatgcccttcttctctcccttgcacctgtacctcttggtctttgaataaagcctgagtaggaaggctagcaaaaaaaaaaaaaaaaaaaaaaaaaaaaaaaaaaaaaaaaaaaaaaaaaaaaaaaaaaaaaaaaaaaaaaaaaaaaaaaagcccagccggctccccaacctctaccgaggagggcacctctgagtccgccacccccgagagcggccctggcacctccaccgagcccagcgagggcagcgcacccggcagccctgccggcagccccacctccacagaggagggaaccagcaccgagcccagcgaaggcagcgccccaggcaccagcaccgagcctagtgagcaggagattaaacggatcaacaagatcagaagaagacttgtgaaagacagcaacaccaagaaggccggcaagacaggccccatgaaaaccctgctggttagagtgatgacacccgatctgagagagcggctggaaaacctgagaaagaagcctgaaaatatcccccagcccatcagcaatacatctagagccaacctgaataagctgctgaccgattacaccgaaatgaagaaggcgatcctgcatgtgtactgggaagagttccagaaggaccctgtgggcctgatgagccgggtggcccagcctgccagcaagaagatcgatcagaacaagctgaaacctgagatggacgagaagggcaacctgaccaccgccggctttgcctgctctcagtgtggccagcccctgttcgtgtacaagctggagcaggtgtctgagaagggcaaggcttacaccaactacttcggacggtgcaatgtggccgagcacgaaaagctgatcctgctggcccagctgaagcccgagaaggatagcgacgaagccgtgacatatagcctgggaaagtttgggcagagggccctggatttctacagcattcatgtgaccaaggagtccacccaccccgtgaagcccctggcccagatcgccggaaacagatacgcctccggacctgtgggaaaggccctgagcgacgcatgtatgggcacaatcgcctccttcctgtctaagtaccaggacatcatcatcgaacaccagaaggtggtgaagggcaaccagaagagactggagagcctgcgggagctggccggcaaggaaaacctggaataccctagcgtgaccctgccacctcagcctcacaccaaggagggcgttgatgcctacaacgaagtgatcgcccgggtgcgaatgtgggtgaacctgaacctgtggcagaagctgaagctaagcagagatgatgccaagcctctgctgagactgaagggattcccttcctttcctctggtcgagagacaggccaacgaagtggactggtgggacatggtgtgtaacgtgaagaagctgatcaacgagaaaaaggaggatggcaaggtgttttggcagaatctggctggctacaagagacaggaagccctgagaccatacctgagcagcgaggaagatcggaagaagggaaagaaattcgctcggtaccagctgggcgacctgctgctgcacctggaaaagaagcacggcgaggactggggaaaggtgtacgacgaggcctgggagcggattgacaagaaagtggaaggcctgagcaagcacatcaagctggaagaggaacggagaagcgaggacgcccagagcaaggccgccctgaccgactggctgcgggctaaggccagcttcgtgatcgagggcctgaaggaggccgacaaggacgagttctgcagatgcgagctgaagctgcagaagtggtacggggacctgcggggaaagcccttcgccatcgaagccgagaacagcatcctggacatcagcggcttcagcaagcagtacaactgtgccttcatctggcagaaggacggcgtgaagaagctgaacctgtacctgatcatcaactacttcaagggcggcaagctgcggttcaagaagatcaaacctgaagccttcgaagccaacagattctacaccgtgatcaacaaaaagagcggcgagatcgtgcccatggaggtgaacttcaacttcgacgaccccaacctgatcatcctgcctctggcctttggcaagagacagggcagagaattcatctggaacgacctgctgtccctggaaaccggcagcctgaagctggccaacggaagagtgatcgagaagacactgtacaacagaagaacccggcaggatgagcctgccctgttcgtggccctgaccttcgagcggcgggaggtcctggactcctccaatatcaaaccaatgaacctgatcggcgtggcaagaggcgaaaacatccccgccgtgatcgccctgaccgaccccgagggctgcccactgagccggtttaaggatagcctgggaaacccaacccacatcctgagaatcggcgagagctataaggagaagcagcggaccatccaggccaagaaggaggtggagcagcggagagccggcggctacagccggaagtacgccagcaaagccaagaatctggcagacgatatggtgagaaacaccgctagagatctgctgtactacgccgtgacccaggatgccatgctgatcttcgccaacctgagccggggcttcggccggcagggcaagcggaccttcatggccgagagacagtacacacggatggaggactggctgaccgccaagctggcctacgagggcctgagcaagacctacctgtccaagacactggcccagtacacctccaagacatgcagcaactgtgggtttaccatcaccagcgccgactacgacagggtgctggagaagctgaagaagacagcaacaggctggatgaccacaattaacggcaaggagctgaaggtggagggccagattacctactacaacagatacaagagacagaacgtagtcaaggacctgtccgtcgagctggatagactgagcgaagaatctgtgaacaacgacatctcctcctggacaaagggcagaagcggagaagctctgagcctcctgaagaaaagattctcccatagacccgtgcaggagaagttcgtgtgcctgaactgcggcttcgagacacacgcagccgagcaagccgccctgaacatcgccagatcctggctgttcctgcggagccaggagtacaagaaataccagacaaacaagacaaccggcaacaccgataagagagccttcgtcgagacctggcagtccttttaccggaagaagcttaaggaggtgtggaaacctgccgtgcggtctggcggatctggcggaggctccaccagccccaagaaaaagagaaaagtctaagctgccttctgcggggcttgccttctggccatgcccttcttctctcccttgcacctgtacctcttggtctttgaataaagcctgagtaggaaggctagcaaaaaaaaaaaaaaaaaaaaaaaaaaaaaaaaaaaaaaaaaaaaaaaaaaaaaaaaaaaaaaaaaaaaaaaaaaaaaaaa

SEQ ID NO: 9126 - RNA, 8787 nt, synthetic construct
  source 1..8787: mol_type = other RNA
aggaaataagagagaaaagaagagtaagaagaaatataagagccaccatggcccctaagaagaagcgtaaagtgagccggatgaaccacgaccaggagttcgacccccctaaggtgtaccctcccgtccccgccgagaagagaaagcccatccgggtcctgagcctgttcgatggcatcgccaccggtctgctggtgctgaaggacctgggcatccaggtggataggtacattgcctccgaggtgtgcgaggactccatcaccgtgggaatggtgcgtcatcagggcaagatcatgtacgtgggcgacgtgcggagcgtgacacagaagcatatccaggagtggggccctttcgacctggtgatcggcggcagcccttgcaatgacctgagcatcgtgaacccagcccggaagggcctgtacgagggaaccggcagactgttcttcgagttttacagactgctgcacgacgcccggcctaaggaaggcgacgaccggcccttcttttggctgttcgagaatgtggtggccatgggagtcagcgacaagcgggatattagccggttcctggagagcaaccccgtgatgatcgatgccaaggaagtgagcgccgcccaccgggccagatacttctggggcaatctgcctggcatgaacagacccctggccagcaccgtgaacgacaagctggagctgcaggagtgcctggagcacggccggatcgccaagttcagcaaggtgagaaccatcaccacccgaagcaacagcatcaaacaaggcaaggaccagcactttcctgtgttcatgaacgagaaggaggacatcctgtggtgtaccgagatggagagagtgttcgggttcccagtccactacacagatgtcagcaacatgtctagactggccagacagagactgctgggaagaagctggtccgtccctgtgatcagacacctgttcgcccctctgaaggagtacttcgcctgcgtgagcagcggcaacagcaacgccaacagccggggccccagcttctctagcggcctggtgccactgtccctgagagggagccacatgggccccatggagatctacaaaaccgtgagcgcctggaagcggcagcctgtgcgcgtgctgagcctgtttcggaatatcgataaagtcctgaaaagcctgggattcctggagagcggctctggctccggcggtggcaccctgaagtacgtggaggatgtgacaaacgtggtcagacgggatgtggagaagtggggccccttcgatctggtgtacggcagcacccaacccctgggcagctcttgtgaccggtgccctggctggtacatgtttcagttccaccggatcctgcagtacgccctgccgagacaggagtcccagcggccattcttttggattttcatggacaacttgctgctgaccgaggatgaccaggaaactaccactcggttcctgcagaccgaagccgtgaccctgcaggacgtgagaggccgggactaccagaacgccatgcgggtgtggtccaacatccctggactgaaaagcaagcacgcacctctgacccctaaagaagaggagtacctgcaggcccaggtgcggagcagaagcaagctggacgcccctaaggtggatctgctggtgaagaattgcctcctgcccctgagagagtacttcaagtatttcagccagaatagtctgcccctgggaggcagcggcggcggccagcccgacctggtgaccttcggcgacgtggccgtggacttcagccaggaggagtgggagtggctgaaccccgcccagaggagcctgtacaggaccgtgatgctggacaactacaggagcctggtgagcctgggcgtgagcgccagcaagcccgacgtgatcagcctgctggagcagggcaaggagccctggctggtgaaggaggagggccccaggggcgccaggcccgacagcagccccaccggcggcccaagcagcggcgcccctcctcccagcggcggcaggcggcccaagcagcggcgcccctcctcccagcggcggcagcccagccggctccccaacctctaccgaggagggcacctctgagtccgccacccccgagagcggccctggcacctccaccgagcccagcgagggcagcgcacccggcagccctgccggcagccccacctccacagaggagggaaccagcaccgagcccagcgaaggcagcgccccaggcaccagcaccgagcctagtgagcaggagattaaacggatcaacaagatcagaagaagacttgtgaaagacagcaacaccaagaaggccggcaagacaggccccatgaaaaccctgctggttagagtgatgacacccgatctgagagagcggctggaaaacctgagaaagaagcctgaaaatatcccccagcccatcagcaatacatctagagccaacctgaataagctgctgaccgattacaccgaaatgaagaaggcgatcctgcatgtgtactgggaagagttccagaaggaccctgtgggcctgatgagccgggtggcccagcctgccagcaagaagatcgatcagaacaagctgaaacctgagatggacgagaagggcaacctgaccaccgccggctttgcctgctctcagtgtggccagcccctgttcgtgtacaagctggagcaggtgtctgagaagggcaaggcttacaccaactacttcggacggtgcaatgtggccgagcacgaaaagctgatcctgctggcccagctgaagcccgagaaggatagcgacgaagccgtgacatatagcctgggaaagtttgggcagagggccctggatttctacagcattcatgtgaccaaggagtccacccaccccgtgaagcccctggcccagatcgccggaaacagatacgcctccggacctgtgggaaaggccctgagcgacgcatgtatgggcacaatcgcctccttcctgtctaagtaccaggacatcatcatcgaacaccagaaggtggtgaagggcaaccagaagagactggagagcctgcgggagctggccggcaaggaaaacctggaataccctagcgtgaccctgccacctcagcctcacaccaaggagggcgttgatgcctacaacgaagtgatcgcccgggtgcgaatgtgggtgaacctgaacctgtggcagaagctgaagctaagcagagatgatgccaagcctctgctgagactgaagggattcccttcctttcctctggtcgagagacaggccaacgaagtggactggtgggacatggtgtgtaacgtgaagaagctgatcaacgagaaaaaggaggatggcaaggtgttttggcagaatctggctggctacaagagacaggaagccctgagaccatacctgagcagcgaggaagatcggaagaagggaaagaaattcgctcggtaccagctgggcgacctgctgctgcacctggaaaagaagcacggcgaggactggggaaaggtgtacgacgaggcctgggagcggattgacaagaaagtggaaggcctgagcaagcacatcaagctggaagaggaacggagaagcgaggacgcccagagcaaggccgccctgaccgactggctgcgggctaaggccagcttcgtgatcgagggcctgaaggaggccgacaaggacgagttctgcagatgcgagctgaagctgcagaagtggtacggggacctgcggggaaagcccttcgccatcgaagccgagaacagcatcctggacatcagcggcttcagcaagcagtacaactgtgccttcatctggcagaaggacggcgtgaagaagctgaacctgtacctgatcatcaactacttcaagggcggcaagctgcggttcaagaagatcaaacctgaagccttcgaagccaacagattctacaccgtgatcaacaaaaagagcggcgagatcgtgcccatggaggtgaacttcaacttcgacgaccccaacctgatcatcctgcctctggcctttggcaagagacagggcagagaattcatctggaacgacctgctgtccctggaaaccggcagcctgaagctggccaacggaagagtgatcgagaagacactgtacaacagaagaacccggcaggatgagcctgccctgttcgtggccctgaccttcgagcggcgggaggtcctggactcctccaatatcaaaccaatgaacctgatcggcgtggcaagaggcgaaaacatccccgccgtgatcgccctgaccgaccccgagggctgcccactgagccggtttaaggatagcctgggaaacccaacccacatcctgagaatcggcgagagctataaggagaagcagcggaccatccaggccaagaaggaggtggagcagcggagagccggcggctacagccggaagtacgccagcaaagccaagaatctggcagacgatatggtgagaaacaccgctagagatctgctgtactacgccgtgacccaggatgccatgctgatcttcgccaacctgagccggggcttcggccggcagggcaagcggaccttcatggccgagagacagtacacacggatggaggactggctgaccgccaagctggcctacgagggcctgagcaagacctacctgtccaagacactggcccagtacacctccaagacatgcagcaactgtgggtttaccatcaccagcgccgactacgacagggtgctggagaagctgaagaagacagcaacaggctggatgaccacaattaacggcaaggagctgaaggtggagggccagattacctactacaacagatacaagagacagaacgtagtcaaggacctgtccgtcgagctggatagactgagcgaagaatctgtgaacaacgacatctcctcctggacaaagggcagaagcggagaagctctgagcctcctgaagaaaagattctcccatagacccgtgcaggagaagttcgtgtgcctgaactgcggcttcgagacacacgcagccgagcaagccgccctgaacatcgccagatcctggctgttcctgcggagccaggagtacaagaaataccagacaaacaagacaaccggcaacaccgataagagagccttcgtcgagacctggcagtccttttaccggaagaagcttaaggaggtgtggaaacctgccgtgcggtctggcggatctggcggaggctccaccagccccaagaaaaagagaaaagtctaagctgccttctgcggggcttgccttctggccatgcccttcttctctcccttgcacctgtacctcttggtctttgaataaagcctgagtaggaaggctagcaaaaaaaaaaaaaaaaaaaaaaaaaaaaaaaaaaaaaaaaaaaaaaaaaaaaaaaaaaaaaaaaaaaaaaaaaaaaaaaagcccagccggctccccaacctctaccgaggagggcacctctgagtccgccacccccgagagcggccctggcacctccaccgagcccagcgagggcagcgcacccggcagccctgccggcagccccacctccacagaggagggaaccagcaccgagcccagcgaaggcagcgccccaggcaccagcaccgagcctagtgagcaggagattaaacggatcaacaagatcagaagaagacttgtgaaagacagcaacaccaagaaggccggcaagacaggccccatgaaaaccctgctggttagagtgatgacacccgatctgagagagcggctggaaaacctgagaaagaagcctgaaaatatcccccagcccatcagcaatacatctagagccaacctgaataagctgctgaccgattacaccgaaatgaagaaggcgatcctgcatgtgtactgggaagagttccagaaggaccctgtgggcctgatgagccgggtggcccagcctgccagcaagaagatcgatcagaacaagctgaaacctgagatggacgagaagggcaacctgaccaccgccggctttgcctgctctcagtgtggccagcccctgttcgtgtacaagctggagcaggtgtctgagaagggcaaggcttacaccaactacttcggacggtgcaatgtggccgagcacgaaaagctgatcctgctggcccagctgaagcccgagaaggatagcgacgaagccgtgacatatagcctgggaaagtttgggcagagggccctggatttctacagcattcatgtgaccaaggagtccacccaccccgtgaagcccctggcccagatcgccggaaacagatacgcctccggacctgtgggaaaggccctgagcgacgcatgtatgggcacaatcgcctccttcctgtctaagtaccaggacatcatcatcgaacaccagaaggtggtgaagggcaaccagaagagactggagagcctgcgggagctggccggcaaggaaaacctggaataccctagcgtgaccctgccacctcagcctcacaccaaggagggcgttgatgcctacaacgaagtgatcgcccgggtgcgaatgtgggtgaacctgaacctgtggcagaagctgaagctaagcagagatgatgccaagcctctgctgagactgaagggattcccttcctttcctctggtcgagagacaggccaacgaagtggactggtgggacatggtgtgtaacgtgaagaagctgatcaacgagaaaaaggaggatggcaaggtgttttggcagaatctggctggctacaagagacaggaagccctgagaccatacctgagcagcgaggaagatcggaagaagggaaagaaattcgctcggtaccagctgggcgacctgctgctgcacctggaaaagaagcacggcgaggactggggaaaggtgtacgacgaggcctgggagcggattgacaagaaagtggaaggcctgagcaagcacatcaagctggaagaggaacggagaagcgaggacgcccagagcaaggccgccctgaccgactggctgcgggctaaggccagcttcgtgatcgagggcctgaaggaggccgacaaggacgagttctgcagatgcgagctgaagctgcagaagtggtacggggacctgcggggaaagcccttcgccatcgaagccgagaacagcatcctggacatcagcggcttcagcaagcagtacaactgtgccttcatctggcagaaggacggcgtgaagaagctgaacctgtacctgatcatcaactacttcaagggcggcaagctgcggttcaagaagatcaaacctgaagccttcgaagccaacagattctacaccgtgatcaacaaaaagagcggcgagatcgtgcccatggaggtgaacttcaacttcgacgaccccaacctgatcatcctgcctctggcctttggcaagagacagggcagagaattcatctggaacgacctgctgtccctggaaaccggcagcctgaagctggccaacggaagagtgatcgagaagacactgtacaacagaagaacccggcaggatgagcctgccctgttcgtggccctgaccttcgagcggcgggaggtcctggactcctccaatatcaaaccaatgaacctgatcggcgtggcaagaggcgaaaacatccccgccgtgatcgccctgaccgaccccgagggctgcccactgagccggtttaaggatagcctgggaaacccaacccacatcctgagaatcggcgagagctataaggagaagcagcggaccatccaggccaagaaggaggtggagcagcggagagccggcggctacagccggaagtacgccagcaaagccaagaatctggcagacgatatggtgagaaacaccgctagagatctgctgtactacgccgtgacccaggatgccatgctgatcttcgccaacctgagccggggcttcggccggcagggcaagcggaccttcatggccgagagacagtacacacggatggaggactggctgaccgccaagctggcctacgagggcctgagcaagacctacctgtccaagacactggcccagtacacctccaagacatgcagcaactgtgggtttaccatcaccagcgccgactacgacagggtgctggagaagctgaagaagacagcaacaggctggatgaccacaattaacggcaaggagctgaaggtggagggccagattacctactacaacagatacaagagacagaacgtagtcaaggacctgtccgtcgagctggatagactgagcgaagaatctgtgaacaacgacatctcctcctggacaaagggcagaagcggagaagctctgagcctcctgaagaaaagattctcccatagacccgtgcaggagaagttcgtgtgcctgaactgcggcttcgagacacacgcagccgagcaagccgccctgaacatcgccagatcctggctgttcctgcggagccaggagtacaagaaataccagacaaacaagacaaccggcaacaccgataagagagccttcgtcgagacctggcagtccttttaccggaagaagcttaaggaggtgtggaaacctgccgtgcggtctggcggatctggcggaggctccaccagccccaagaaaaagagaaaagtctaagctgccttctgcggggcttgccttctggccatgcccttcttctctcccttgcacctgtacctcttggtctttgaataaagcctgagtaggaaggctagcaaaaaaaaaaaaaaaaaaaaaaaaaaaaaaaaaaaaaaaaaaaaaaaaaaaaaaaaaaaaaaaaaaaaaaaaaaaaaaaa

SEQ ID NO: 9127 - RNA, 8787 nt, synthetic construct
  source 1..8787: mol_type = other RNA
aggaaataagagagaaaagaagagtaagaagaaatataagagccaccatggcccctaagaagaagcgtaaagtgagccggatgaaccacgaccaggagttcgacccccctaaggtgtaccctcccgtccccgccgagaagagaaagcccatccgggtcctgagcctgttcgatggcatcgccaccggtctgctggtgctgaaggacctgggcatccaggtggataggtacattgcctccgaggtgtgcgaggactccatcaccgtgggaatggtgcgtcatcagggcaagatcatgtacgtgggcgacgtgcggagcgtgacacagaagcatatccaggagtggggccctttcgacctggtgatcggcggcagcccttgcaatgacctgagcatcgtgaacccagcccggaagggcctgtacgagggaaccggcagactgttcttcgagttttacagactgctgcacgacgcccggcctaaggaaggcgacgaccggcccttcttttggctgttcgagaatgtggtggccatgggagtcagcgacaagcgggatattagccggttcctggagagcaaccccgtgatgatcgatgccaaggaagtgagcgccgcccaccgggccagatacttctggggcaatctgcctggcatgaacagacccctggccagcaccgtgaacgacaagctggagctgcaggagtgcctggagcacggccggatcgccaagttcagcaaggtgagaaccatcaccacccgaagcaacagcatcaaacaaggcaaggaccagcactttcctgtgttcatgaacgagaaggaggacatcctgtggtgtaccgagatggagagagtgttcgggttcccagtccactacacagatgtcagcaacatgtctagactggccagacagagactgctgggaagaagctggtccgtccctgtgatcagacacctgttcgcccctctgaaggagtacttcgcctgcgtgagcagcggcaacagcaacgccaacagccggggccccagcttctctagcggcctggtgccactgtccctgagagggagccacatgggccccatggagatctacaaaaccgtgagcgcctggaagcggcagcctgtgcgcgtgctgagcctgtttcggaatatcgataaagtcctgaaaagcctgggattcctggagagcggctctggctccggcggtggcaccctgaagtacgtggaggatgtgacaaacgtggtcagacgggatgtggagaagtggggccccttcgatctggtgtacggcagcacccaacccctgggcagctcttgtgaccggtgccctggctggtacatgtttcagttccaccggatcctgcagtacgccctgccgagacaggagtcccagcggccattcttttggattttcatggacaacttgctgctgaccgaggatgaccaggaaactaccactcggttcctgcagaccgaagccgtgaccctgcaggacgtgagaggccgggactaccagaacgccatgcgggtgtggtccaacatccctggactgaaaagcaagcacgcacctctgacccctaaagaagaggagtacctgcaggcccaggtgcggagcagaagcaagctggacgcccctaaggtggatctgctggtgaagaattgcctcctgcccctgagagagtacttcaagtatttcagccagaatagtctgcccctgggaggcagcggcggcggcagcaaggcccccgtgaccttcggcgacctggccgtgtacttcacccaggccgagtgggagtggctgagccccgtgcagaaggccctgtaccaggacgtgatgctggagaactaccaggtgctggtgagcctgggcctgtgcctgaggaggcccaacctgatcagcctgctggagaagggcaaggccccctgggtggccgagcccgtgaggaggaggaggggccccgacagcgccagcaagttcggcggcccaagcagcggcgcccctcctcccagcggcggcaggcggcccaagcagcggcgcccctcctcccagcggcggcagcccagccggctccccaacctctaccgaggagggcacctctgagtccgccacccccgagagcggccctggcacctccaccgagcccagcgagggcagcgcacccggcagccctgccggcagccccacctccacagaggagggaaccagcaccgagcccagcgaaggcagcgccccaggcaccagcaccgagcctagtgagcaggagattaaacggatcaacaagatcagaagaagacttgtgaaagacagcaacaccaagaaggccggcaagacaggccccatgaaaaccctgctggttagagtgatgacacccgatctgagagagcggctggaaaacctgagaaagaagcctgaaaatatcccccagcccatcagcaatacatctagagccaacctgaataagctgctgaccgattacaccgaaatgaagaaggcgatcctgcatgtgtactgggaagagttccagaaggaccctgtgggcctgatgagccgggtggcccagcctgccagcaagaagatcgatcagaacaagctgaaacctgagatggacgagaagggcaacctgaccaccgccggctttgcctgctctcagtgtggccagcccctgttcgtgtacaagctggagcaggtgtctgagaagggcaaggcttacaccaactacttcggacggtgcaatgtggccgagcacgaaaagctgatcctgctggcccagctgaagcccgagaaggatagcgacgaagccgtgacatatagcctgggaaagtttgggcagagggccctggatttctacagcattcatgtgaccaaggagtccacccaccccgtgaagcccctggcccagatcgccggaaacagatacgcctccggacctgtgggaaaggccctgagcgacgcatgtatgggcacaatcgcctccttcctgtctaagtaccaggacatcatcatcgaacaccagaaggtggtgaagggcaaccagaagagactggagagcctgcgggagctggccggcaaggaaaacctggaataccctagcgtgaccctgccacctcagcctcacaccaaggagggcgttgatgcctacaacgaagtgatcgcccgggtgcgaatgtgggtgaacctgaacctgtggcagaagctgaagctaagcagagatgatgccaagcctctgctgagactgaagggattcccttcctttcctctggtcgagagacaggccaacgaagtggactggtgggacatggtgtgtaacgtgaagaagctgatcaacgagaaaaaggaggatggcaaggtgttttggcagaatctggctggctacaagagacaggaagccctgagaccatacctgagcagcgaggaagatcggaagaagggaaagaaattcgctcggtaccagctgggcgacctgctgctgcacctggaaaagaagcacggcgaggactggggaaaggtgtacgacgaggcctgggagcggattgacaagaaagtggaaggcctgagcaagcacatcaagctggaagaggaacggagaagcgaggacgcccagagcaaggccgccctgaccgactggctgcgggctaaggccagcttcgtgatcgagggcctgaaggaggccgacaaggacgagttctgcagatgcgagctgaagctgcagaagtggtacggggacctgcggggaaagcccttcgccatcgaagccgagaacagcatcctggacatcagcggcttcagcaagcagtacaactgtgccttcatctggcagaaggacggcgtgaagaagctgaacctgtacctgatcatcaactacttcaagggcggcaagctgcggttcaagaagatcaaacctgaagccttcgaagccaacagattctacaccgtgatcaacaaaaagagcggcgagatcgtgcccatggaggtgaacttcaacttcgacgaccccaacctgatcatcctgcctctggcctttggcaagagacagggcagagaattcatctggaacgacctgctgtccctggaaaccggcagcctgaagctggccaacggaagagtgatcgagaagacactgtacaacagaagaacccggcaggatgagcctgccctgttcgtggccctgaccttcgagcggcgggaggtcctggactcctccaatatcaaaccaatgaacctgatcggcgtggcaagaggcgaaaacatccccgccgtgatcgccctgaccgaccccgagggctgcccactgagccggtttaaggatagcctgggaaacccaacccacatcctgagaatcggcgagagctataaggagaagcagcggaccatccaggccaagaaggaggtggagcagcggagagccggcggctacagccggaagtacgccagcaaagccaagaatctggcagacgatatggtgagaaacaccgctagagatctgctgtactacgccgtgacccaggatgccatgctgatcttcgccaacctgagccggggcttcggccggcagggcaagcggaccttcatggccgagagacagtacacacggatggaggactggctgaccgccaagctggcctacgagggcctgagcaagacctacctgtccaagacactggcccagtacacctccaagacatgcagcaactgtgggtttaccatcaccagcgccgactacgacagggtgctggagaagctgaagaagacagcaacaggctggatgaccacaattaacggcaaggagctgaaggtggagggccagattacctactacaacagatacaagagacagaacgtagtcaaggacctgtccgtcgagctggatagactgagcgaagaatctgtgaacaacgacatctcctcctggacaaagggcagaagcggagaagctctgagcctcctgaagaaaagattctcccatagacccgtgcaggagaagttcgtgtgcctgaactgcggcttcgagacacacgcagccgagcaagccgccctgaacatcgccagatcctggctgttcctgcggagccaggagtacaagaaataccagacaaacaagacaaccggcaacaccgataagagagccttcgtcgagacctggcagtccttttaccggaagaagcttaaggaggtgtggaaacctgccgtgcggtctggcggatctggcggaggctccaccagccccaagaaaaagagaaaagtctaagctgccttctgcggggcttgccttctggccatgcccttcttctctcccttgcacctgtacctcttggtctttgaataaagcctgagtaggaaggctagcaaaaaaaaaaaaaaaaaaaaaaaaaaaaaaaaaaaaaaaaaaaaaaaaaaaaaaaaaaaaaaaaaaaaaaaaaaaaaaaagcccagccggctccccaacctctaccgaggagggcacctctgagtccgccacccccgagagcggccctggcacctccaccgagcccagcgagggcagcgcacccggcagccctgccggcagccccacctccacagaggagggaaccagcaccgagcccagcgaaggcagcgccccaggcaccagcaccgagcctagtgagcaggagattaaacggatcaacaagatcagaagaagacttgtgaaagacagcaacaccaagaaggccggcaagacaggccccatgaaaaccctgctggttagagtgatgacacccgatctgagagagcggctggaaaacctgagaaagaagcctgaaaatatcccccagcccatcagcaatacatctagagccaacctgaataagctgctgaccgattacaccgaaatgaagaaggcgatcctgcatgtgtactgggaagagttccagaaggaccctgtgggcctgatgagccgggtggcccagcctgccagcaagaagatcgatcagaacaagctgaaacctgagatggacgagaagggcaacctgaccaccgccggctttgcctgctctcagtgtggccagcccctgttcgtgtacaagctggagcaggtgtctgagaagggcaaggcttacaccaactacttcggacggtgcaatgtggccgagcacgaaaagctgatcctgctggcccagctgaagcccgagaaggatagcgacgaagccgtgacatatagcctgggaaagtttgggcagagggccctggatttctacagcattcatgtgaccaaggagtccacccaccccgtgaagcccctggcccagatcgccggaaacagatacgcctccggacctgtgggaaaggccctgagcgacgcatgtatgggcacaatcgcctccttcctgtctaagtaccaggacatcatcatcgaacaccagaaggtggtgaagggcaaccagaagagactggagagcctgcgggagctggccggcaaggaaaacctggaataccctagcgtgaccctgccacctcagcctcacaccaaggagggcgttgatgcctacaacgaagtgatcgcccgggtgcgaatgtgggtgaacctgaacctgtggcagaagctgaagctaagcagagatgatgccaagcctctgctgagactgaagggattcccttcctttcctctggtcgagagacaggccaacgaagtggactggtgggacatggtgtgtaacgtgaagaagctgatcaacgagaaaaaggaggatggcaaggtgttttggcagaatctggctggctacaagagacaggaagccctgagaccatacctgagcagcgaggaagatcggaagaagggaaagaaattcgctcggtaccagctgggcgacctgctgctgcacctggaaaagaagcacggcgaggactggggaaaggtgtacgacgaggcctgggagcggattgacaagaaagtggaaggcctgagcaagcacatcaagctggaagaggaacggagaagcgaggacgcccagagcaaggccgccctgaccgactggctgcgggctaaggccagcttcgtgatcgagggcctgaaggaggccgacaaggacgagttctgcagatgcgagctgaagctgcagaagtggtacggggacctgcggggaaagcccttcgccatcgaagccgagaacagcatcctggacatcagcggcttcagcaagcagtacaactgtgccttcatctggcagaaggacggcgtgaagaagctgaacctgtacctgatcatcaactacttcaagggcggcaagctgcggttcaagaagatcaaacctgaagccttcgaagccaacagattctacaccgtgatcaacaaaaagagcggcgagatcgtgcccatggaggtgaacttcaacttcgacgaccccaacctgatcatcctgcctctggcctttggcaagagacagggcagagaattcatctggaacgacctgctgtccctggaaaccggcagcctgaagctggccaacggaagagtgatcgagaagacactgtacaacagaagaacccggcaggatgagcctgccctgttcgtggccctgaccttcgagcggcgggaggtcctggactcctccaatatcaaaccaatgaacctgatcggcgtggcaagaggcgaaaacatccccgccgtgatcgccctgaccgaccccgagggctgcccactgagccggtttaaggatagcctgggaaacccaacccacatcctgagaatcggcgagagctataaggagaagcagcggaccatccaggccaagaaggaggtggagcagcggagagccggcggctacagccggaagtacgccagcaaagccaagaatctggcagacgatatggtgagaaacaccgctagagatctgctgtactacgccgtgacccaggatgccatgctgatcttcgccaacctgagccggggcttcggccggcagggcaagcggaccttcatggccgagagacagtacacacggatggaggactggctgaccgccaagctggcctacgagggcctgagcaagacctacctgtccaagacactggcccagtacacctccaagacatgcagcaactgtgggtttaccatcaccagcgccgactacgacagggtgctggagaagctgaagaagacagcaacaggctggatgaccacaattaacggcaaggagctgaaggtggagggccagattacctactacaacagatacaagagacagaacgtagtcaaggacctgtccgtcgagctggatagactgagcgaagaatctgtgaacaacgacatctcctcctggacaaagggcagaagcggagaagctctgagcctcctgaagaaaagattctcccatagacccgtgcaggagaagttcgtgtgcctgaactgcggcttcgagacacacgcagccgagcaagccgccctgaacatcgccagatcctggctgttcctgcggagccaggagtacaagaaataccagacaaacaagacaaccggcaacaccgataagagagccttcgtcgagacctggcagtccttttaccggaagaagcttaaggaggtgtggaaacctgccgtgcggtctggcggatctggcggaggctccaccagccccaagaaaaagagaaaagtctaagctgccttctgcggggcttgccttctggccatgcccttcttctctcccttgcacctgtacctcttggtctttgaataaagcctgagtaggaaggctagcaaaaaaaaaaaaaaaaaaaaaaaaaaaaaaaaaaaaaaaaaaaaaaaaaaaaaaaaaaaaaaaaaaaaaaaaaaaaaaaa

SEQ ID NO: 9128 - RNA, 8787 nt, synthetic construct
  source 1..8787: mol_type = other RNA
aggaaataagagagaaaagaagagtaagaagaaatataagagccaccatggcccctaagaagaagcgtaaagtgagccggatgaaccacgaccaggagttcgacccccctaaggtgtaccctcccgtccccgccgagaagagaaagcccatccgggtcctgagcctgttcgatggcatcgccaccggtctgctggtgctgaaggacctgggcatccaggtggataggtacattgcctccgaggtgtgcgaggactccatcaccgtgggaatggtgcgtcatcagggcaagatcatgtacgtgggcgacgtgcggagcgtgacacagaagcatatccaggagtggggccctttcgacctggtgatcggcggcagcccttgcaatgacctgagcatcgtgaacccagcccggaagggcctgtacgagggaaccggcagactgttcttcgagttttacagactgctgcacgacgcccggcctaaggaaggcgacgaccggcccttcttttggctgttcgagaatgtggtggccatgggagtcagcgacaagcgggatattagccggttcctggagagcaaccccgtgatgatcgatgccaaggaagtgagcgccgcccaccgggccagatacttctggggcaatctgcctggcatgaacagacccctggccagcaccgtgaacgacaagctggagctgcaggagtgcctggagcacggccggatcgccaagttcagcaaggtgagaaccatcaccacccgaagcaacagcatcaaacaaggcaaggaccagcactttcctgtgttcatgaacgagaaggaggacatcctgtggtgtaccgagatggagagagtgttcgggttcccagtccactacacagatgtcagcaacatgtctagactggccagacagagactgctgggaagaagctggtccgtccctgtgatcagacacctgttcgcccctctgaaggagtacttcgcctgcgtgagcagcggcaacagcaacgccaacagccggggccccagcttctctagcggcctggtgccactgtccctgagagggagccacatgggccccatggagatctacaaaaccgtgagcgcctggaagcggcagcctgtgcgcgtgctgagcctgtttcggaatatcgataaagtcctgaaaagcctgggattcctggagagcggctctggctccggcggtggcaccctgaagtacgtggaggatgtgacaaacgtggtcagacgggatgtggagaagtggggccccttcgatctggtgtacggcagcacccaacccctgggcagctcttgtgaccggtgccctggctggtacatgtttcagttccaccggatcctgcagtacgccctgccgagacaggagtcccagcggccattcttttggattttcatggacaacttgctgctgaccgaggatgaccaggaaactaccactcggttcctgcagaccgaagccgtgaccctgcaggacgtgagaggccgggactaccagaacgccatgcgggtgtggtccaacatccctggactgaaaagcaagcacgcacctctgacccctaaagaagaggagtacctgcaggcccaggtgcggagcagaagcaagctggacgcccctaaggtggatctgctggtgaagaattgcctcctgcccctgagagagtacttcaagtatttcagccagaatagtctgcccctgggaggcagcggcggcggcttccaggagcccctgaagttcagggacgtggccgtggagttcagcctggaggagtggcagtgcctggacaccatccagcagaacctgtacaggaacgtgatgctggagaactacaggaacctggtgttcctgggcatcgccgtgagcaagcccgacctgatcacctgcctggagcaggagaaggagccctggaccaggaagaggcacaggatggtggccaagcccgtgacctgcagccacttcggcggcccaagcagcggcgcccctcctcccagcggcggcaggcggcccaagcagcggcgcccctcctcccagcggcggcagcccagccggctccccaacctctaccgaggagggcacctctgagtccgccacccccgagagcggccctggcacctccaccgagcccagcgagggcagcgcacccggcagccctgccggcagccccacctccacagaggagggaaccagcaccgagcccagcgaaggcagcgccccaggcaccagcaccgagcctagtgagcaggagattaaacggatcaacaagatcagaagaagacttgtgaaagacagcaacaccaagaaggccggcaagacaggccccatgaaaaccctgctggttagagtgatgacacccgatctgagagagcggctggaaaacctgagaaagaagcctgaaaatatcccccagcccatcagcaatacatctagagccaacctgaataagctgctgaccgattacaccgaaatgaagaaggcgatcctgcatgtgtactgggaagagttccagaaggaccctgtgggcctgatgagccgggtggcccagcctgccagcaagaagatcgatcagaacaagctgaaacctgagatggacgagaagggcaacctgaccaccgccggctttgcctgctctcagtgtggccagcccctgttcgtgtacaagctggagcaggtgtctgagaagggcaaggcttacaccaactacttcggacggtgcaatgtggccgagcacgaaaagctgatcctgctggcccagctgaagcccgagaaggatagcgacgaagccgtgacatatagcctgggaaagtttgggcagagggccctggatttctacagcattcatgtgaccaaggagtccacccaccccgtgaagcccctggcccagatcgccggaaacagatacgcctccggacctgtgggaaaggccctgagcgacgcatgtatgggcacaatcgcctccttcctgtctaagtaccaggacatcatcatcgaacaccagaaggtggtgaagggcaaccagaagagactggagagcctgcgggagctggccggcaaggaaaacctggaataccctagcgtgaccctgccacctcagcctcacaccaaggagggcgttgatgcctacaacgaagtgatcgcccgggtgcgaatgtgggtgaacctgaacctgtggcagaagctgaagctaagcagagatgatgccaagcctctgctgagactgaagggattcccttcctttcctctggtcgagagacaggccaacgaagtggactggtgggacatggtgtgtaacgtgaagaagctgatcaacgagaaaaaggaggatggcaaggtgttttggcagaatctggctggctacaagagacaggaagccctgagaccatacctgagcagcgaggaagatcggaagaagggaaagaaattcgctcggtaccagctgggcgacctgctgctgcacctggaaaagaagcacggcgaggactggggaaaggtgtacgacgaggcctgggagcggattgacaagaaagtggaaggcctgagcaagcacatcaagctggaagaggaacggagaagcgaggacgcccagagcaaggccgccctgaccgactggctgcgggctaaggccagcttcgtgatcgagggcctgaaggaggccgacaaggacgagttctgcagatgcgagctgaagctgcagaagtggtacggggacctgcggggaaagcccttcgccatcgaagccgagaacagcatcctggacatcagcggcttcagcaagcagtacaactgtgccttcatctggcagaaggacggcgtgaagaagctgaacctgtacctgatcatcaactacttcaagggcggcaagctgcggttcaagaagatcaaacctgaagccttcgaagccaacagattctacaccgtgatcaacaaaaagagcggcgagatcgtgcccatggaggtgaacttcaacttcgacgaccccaacctgatcatcctgcctctggcctttggcaagagacagggcagagaattcatctggaacgacctgctgtccctggaaaccggcagcctgaagctggccaacggaagagtgatcgagaagacactgtacaacagaagaacccggcaggatgagcctgccctgttcgtggccctgaccttcgagcggcgggaggtcctggactcctccaatatcaaaccaatgaacctgatcggcgtggcaagaggcgaaaacatccccgccgtgatcgccctgaccgaccccgagggctgcccactgagccggtttaaggatagcctgggaaacccaacccacatcctgagaatcggcgagagctataaggagaagcagcggaccatccaggccaagaaggaggtggagcagcggagagccggcggctacagccggaagtacgccagcaaagccaagaatctggcagacgatatggtgagaaacaccgctagagatctgctgtactacgccgtgacccaggatgccatgctgatcttcgccaacctgagccggggcttcggccggcagggcaagcggaccttcatggccgagagacagtacacacggatggaggactggctgaccgccaagctggcctacgagggcctgagcaagacctacctgtccaagacactggcccagtacacctccaagacatgcagcaactgtgggtttaccatcaccagcgccgactacgacagggtgctggagaagctgaagaagacagcaacaggctggatgaccacaattaacggcaaggagctgaaggtggagggccagattacctactacaacagatacaagagacagaacgtagtcaaggacctgtccgtcgagctggatagactgagcgaagaatctgtgaacaacgacatctcctcctggacaaagggcagaagcggagaagctctgagcctcctgaagaaaagattctcccatagacccgtgcaggagaagttcgtgtgcctgaactgcggcttcgagacacacgcagccgagcaagccgccctgaacatcgccagatcctggctgttcctgcggagccaggagtacaagaaataccagacaaacaagacaaccggcaacaccgataagagagccttcgtcgagacctggcagtccttttaccggaagaagcttaaggaggtgtggaaacctgccgtgcggtctggcggatctggcggaggctccaccagccccaagaaaaagagaaaagtctaagctgccttctgcggggcttgccttctggccatgcccttcttctctcccttgcacctgtacctcttggtctttgaataaagcctgagtaggaaggctagcaaaaaaaaaaaaaaaaaaaaaaaaaaaaaaaaaaaaaaaaaaaaaaaaaaaaaaaaaaaaaaaaaaaaaaaaaaaaaaaagcccagccggctccccaacctctaccgaggagggcacctctgagtccgccacccccgagagcggccctggcacctccaccgagcccagcgagggcagcgcacccggcagccctgccggcagccccacctccacagaggagggaaccagcaccgagcccagcgaaggcagcgccccaggcaccagcaccgagcctagtgagcaggagattaaacggatcaacaagatcagaagaagacttgtgaaagacagcaacaccaagaaggccggcaagacaggccccatgaaaaccctgctggttagagtgatgacacccgatctgagagagcggctggaaaacctgagaaagaagcctgaaaatatcccccagcccatcagcaatacatctagagccaacctgaataagctgctgaccgattacaccgaaatgaagaaggcgatcctgcatgtgtactgggaagagttccagaaggaccctgtgggcctgatgagccgggtggcccagcctgccagcaagaagatcgatcagaacaagctgaaacctgagatggacgagaagggcaacctgaccaccgccggctttgcctgctctcagtgtggccagcccctgttcgtgtacaagctggagcaggtgtctgagaagggcaaggcttacaccaactacttcggacggtgcaatgtggccgagcacgaaaagctgatcctgctggcccagctgaagcccgagaaggatagcgacgaagccgtgacatatagcctgggaaagtttgggcagagggccctggatttctacagcattcatgtgaccaaggagtccacccaccccgtgaagcccctggcccagatcgccggaaacagatacgcctccggacctgtgggaaaggccctgagcgacgcatgtatgggcacaatcgcctccttcctgtctaagtaccaggacatcatcatcgaacaccagaaggtggtgaagggcaaccagaagagactggagagcctgcgggagctggccggcaaggaaaacctggaataccctagcgtgaccctgccacctcagcctcacaccaaggagggcgttgatgcctacaacgaagtgatcgcccgggtgcgaatgtgggtgaacctgaacctgtggcagaagctgaagctaagcagagatgatgccaagcctctgctgagactgaagggattcccttcctttcctctggtcgagagacaggccaacgaagtggactggtgggacatggtgtgtaacgtgaagaagctgatcaacgagaaaaaggaggatggcaaggtgttttggcagaatctggctggctacaagagacaggaagccctgagaccatacctgagcagcgaggaagatcggaagaagggaaagaaattcgctcggtaccagctgggcgacctgctgctgcacctggaaaagaagcacggcgaggactggggaaaggtgtacgacgaggcctgggagcggattgacaagaaagtggaaggcctgagcaagcacatcaagctggaagaggaacggagaagcgaggacgcccagagcaaggccgccctgaccgactggctgcgggctaaggccagcttcgtgatcgagggcctgaaggaggccgacaaggacgagttctgcagatgcgagctgaagctgcagaagtggtacggggacctgcggggaaagcccttcgccatcgaagccgagaacagcatcctggacatcagcggcttcagcaagcagtacaactgtgccttcatctggcagaaggacggcgtgaagaagctgaacctgtacctgatcatcaactacttcaagggcggcaagctgcggttcaagaagatcaaacctgaagccttcgaagccaacagattctacaccgtgatcaacaaaaagagcggcgagatcgtgcccatggaggtgaacttcaacttcgacgaccccaacctgatcatcctgcctctggcctttggcaagagacagggcagagaattcatctggaacgacctgctgtccctggaaaccggcagcctgaagctggccaacggaagagtgatcgagaagacactgtacaacagaagaacccggcaggatgagcctgccctgttcgtggccctgaccttcgagcggcgggaggtcctggactcctccaatatcaaaccaatgaacctgatcggcgtggcaagaggcgaaaacatccccgccgtgatcgccctgaccgaccccgagggctgcccactgagccggtttaaggatagcctgggaaacccaacccacatcctgagaatcggcgagagctataaggagaagcagcggaccatccaggccaagaaggaggtggagcagcggagagccggcggctacagccggaagtacgccagcaaagccaagaatctggcagacgatatggtgagaaacaccgctagagatctgctgtactacgccgtgacccaggatgccatgctgatcttcgccaacctgagccggggcttcggccggcagggcaagcggaccttcatggccgagagacagtacacacggatggaggactggctgaccgccaagctggcctacgagggcctgagcaagacctacctgtccaagacactggcccagtacacctccaagacatgcagcaactgtgggtttaccatcaccagcgccgactacgacagggtgctggagaagctgaagaagacagcaacaggctggatgaccacaattaacggcaaggagctgaaggtggagggccagattacctactacaacagatacaagagacagaacgtagtcaaggacctgtccgtcgagctggatagactgagcgaagaatctgtgaacaacgacatctcctcctggacaaagggcagaagcggagaagctctgagcctcctgaagaaaagattctcccatagacccgtgcaggagaagttcgtgtgcctgaactgcggcttcgagacacacgcagccgagcaagccgccctgaacatcgccagatcctggctgttcctgcggagccaggagtacaagaaataccagacaaacaagacaaccggcaacaccgataagagagccttcgtcgagacctggcagtccttttaccggaagaagcttaaggaggtgtggaaacctgccgtgcggtctggcggatctggcggaggctccaccagccccaagaaaaagagaaaagtctaagctgccttctgcggggcttgccttctggccatgcccttcttctctcccttgcacctgtacctcttggtctttgaataaagcctgagtaggaaggctagcaaaaaaaaaaaaaaaaaaaaaaaaaaaaaaaaaaaaaaaaaaaaaaaaaaaaaaaaaaaaaaaaaaaaaaaaaaaaaaaa

SEQ ID NO: 9129 - RNA, 8787 nt, synthetic construct
  source 1..8787: mol_type = other RNA
aggaaataagagagaaaagaagagtaagaagaaatataagagccaccatggcccctaagaagaagcgtaaagtgagccggatgaaccacgaccaggagttcgacccccctaaggtgtaccctcccgtccccgccgagaagagaaagcccatccgggtcctgagcctgttcgatggcatcgccaccggtctgctggtgctgaaggacctgggcatccaggtggataggtacattgcctccgaggtgtgcgaggactccatcaccgtgggaatggtgcgtcatcagggcaagatcatgtacgtgggcgacgtgcggagcgtgacacagaagcatatccaggagtggggccctttcgacctggtgatcggcggcagcccttgcaatgacctgagcatcgtgaacccagcccggaagggcctgtacgagggaaccggcagactgttcttcgagttttacagactgctgcacgacgcccggcctaaggaaggcgacgaccggcccttcttttggctgttcgagaatgtggtggccatgggagtcagcgacaagcgggatattagccggttcctggagagcaaccccgtgatgatcgatgccaaggaagtgagcgccgcccaccgggccagatacttctggggcaatctgcctggcatgaacagacccctggccagcaccgtgaacgacaagctggagctgcaggagtgcctggagcacggccggatcgccaagttcagcaaggtgagaaccatcaccacccgaagcaacagcatcaaacaaggcaaggaccagcactttcctgtgttcatgaacgagaaggaggacatcctgtggtgtaccgagatggagagagtgttcgggttcccagtccactacacagatgtcagcaacatgtctagactggccagacagagactgctgggaagaagctggtccgtccctgtgatcagacacctgttcgcccctctgaaggagtacttcgcctgcgtgagcagcggcaacagcaacgccaacagccggggccccagcttctctagcggcctggtgccactgtccctgagagggagccacatgggccccatggagatctacaaaaccgtgagcgcctggaagcggcagcctgtgcgcgtgctgagcctgtttcggaatatcgataaagtcctgaaaagcctgggattcctggagagcggctctggctccggcggtggcaccctgaagtacgtggaggatgtgacaaacgtggtcagacgggatgtggagaagtggggccccttcgatctggtgtacggcagcacccaacccctgggcagctcttgtgaccggtgccctggctggtacatgtttcagttccaccggatcctgcagtacgccctgccgagacaggagtcccagcggccattcttttggattttcatggacaacttgctgctgaccgaggatgaccaggaaactaccactcggttcctgcagaccgaagccgtgaccctgcaggacgtgagaggccgggactaccagaacgccatgcgggtgtggtccaacatccctggactgaaaagcaagcacgcacctctgacccctaaagaagaggagtacctgcaggcccaggtgcggagcagaagcaagctggacgcccctaaggtggatctgctggtgaagaattgcctcctgcccctgagagagtacttcaagtatttcagccagaatagtctgcccctgggaggcagcggcggcggcgagcccggcgccgtgagcttcgccgacgtggccgtgtacttcagccccgaggagtgggagtgcctgaggcccgcccagagggccctgtacagggacgtgatgagggagacctacggccacctgggcgccctgggcttccccggccccaagcccgccctgatcagctggatggagcaggagagcgaggcctggagccccgccgcccaggaccccgagaagggcgagaggctgggcggcgccaggggcggcccaagcagcggcgcccctcctcccagcggcggcaggcggcccaagcagcggcgcccctcctcccagcggcggcagcccagccggctccccaacctctaccgaggagggcacctctgagtccgccacccccgagagcggccctggcacctccaccgagcccagcgagggcagcgcacccggcagccctgccggcagccccacctccacagaggagggaaccagcaccgagcccagcgaaggcagcgccccaggcaccagcaccgagcctagtgagcaggagattaaacggatcaacaagatcagaagaagacttgtgaaagacagcaacaccaagaaggccggcaagacaggccccatgaaaaccctgctggttagagtgatgacacccgatctgagagagcggctggaaaacctgagaaagaagcctgaaaatatcccccagcccatcagcaatacatctagagccaacctgaataagctgctgaccgattacaccgaaatgaagaaggcgatcctgcatgtgtactgggaagagttccagaaggaccctgtgggcctgatgagccgggtggcccagcctgccagcaagaagatcgatcagaacaagctgaaacctgagatggacgagaagggcaacctgaccaccgccggctttgcctgctctcagtgtggccagcccctgttcgtgtacaagctggagcaggtgtctgagaagggcaaggcttacaccaactacttcggacggtgcaatgtggccgagcacgaaaagctgatcctgctggcccagctgaagcccgagaaggatagcgacgaagccgtgacatatagcctgggaaagtttgggcagagggccctggatttctacagcattcatgtgaccaaggagtccacccaccccgtgaagcccctggcccagatcgccggaaacagatacgcctccggacctgtgggaaaggccctgagcgacgcatgtatgggcacaatcgcctccttcctgtctaagtaccaggacatcatcatcgaacaccagaaggtggtgaagggcaaccagaagagactggagagcctgcgggagctggccggcaaggaaaacctggaataccctagcgtgaccctgccacctcagcctcacaccaaggagggcgttgatgcctacaacgaagtgatcgcccgggtgcgaatgtgggtgaacctgaacctgtggcagaagctgaagctaagcagagatgatgccaagcctctgctgagactgaagggattcccttcctttcctctggtcgagagacaggccaacgaagtggactggtgggacatggtgtgtaacgtgaagaagctgatcaacgagaaaaaggaggatggcaaggtgttttggcagaatctggctggctacaagagacaggaagccctgagaccatacctgagcagcgaggaagatcggaagaagggaaagaaattcgctcggtaccagctgggcgacctgctgctgcacctggaaaagaagcacggcgaggactggggaaaggtgtacgacgaggcctgggagcggattgacaagaaagtggaaggcctgagcaagcacatcaagctggaagaggaacggagaagcgaggacgcccagagcaaggccgccctgaccgactggctgcgggctaaggccagcttcgtgatcgagggcctgaaggaggccgacaaggacgagttctgcagatgcgagctgaagctgcagaagtggtacggggacctgcggggaaagcccttcgccatcgaagccgagaacagcatcctggacatcagcggcttcagcaagcagtacaactgtgccttcatctggcagaaggacggcgtgaagaagctgaacctgtacctgatcatcaactacttcaagggcggcaagctgcggttcaagaagatcaaacctgaagccttcgaagccaacagattctacaccgtgatcaacaaaaagagcggcgagatcgtgcccatggaggtgaacttcaacttcgacgaccccaacctgatcatcctgcctctggcctttggcaagagacagggcagagaattcatctggaacgacctgctgtccctggaaaccggcagcctgaagctggccaacggaagagtgatcgagaagacactgtacaacagaagaacccggcaggatgagcctgccctgttcgtggccctgaccttcgagcggcgggaggtcctggactcctccaatatcaaaccaatgaacctgatcggcgtggcaagaggcgaaaacatccccgccgtgatcgccctgaccgaccccgagggctgcccactgagccggtttaaggatagcctgggaaacccaacccacatcctgagaatcggcgagagctataaggagaagcagcggaccatccaggccaagaaggaggtggagcagcggagagccggcggctacagccggaagtacgccagcaaagccaagaatctggcagacgatatggtgagaaacaccgctagagatctgctgtactacgccgtgacccaggatgccatgctgatcttcgccaacctgagccggggcttcggccggcagggcaagcggaccttcatggccgagagacagtacacacggatggaggactggctgaccgccaagctggcctacgagggcctgagcaagacctacctgtccaagacactggcccagtacacctccaagacatgcagcaactgtgggtttaccatcaccagcgccgactacgacagggtgctggagaagctgaagaagacagcaacaggctggatgaccacaattaacggcaaggagctgaaggtggagggccagattacctactacaacagatacaagagacagaacgtagtcaaggacctgtccgtcgagctggatagactgagcgaagaatctgtgaacaacgacatctcctcctggacaaagggcagaagcggagaagctctgagcctcctgaagaaaagattctcccatagacccgtgcaggagaagttcgtgtgcctgaactgcggcttcgagacacacgcagccgagcaagccgccctgaacatcgccagatcctggctgttcctgcggagccaggagtacaagaaataccagacaaacaagacaaccggcaacaccgataagagagccttcgtcgagacctggcagtccttttaccggaagaagcttaaggaggtgtggaaacctgccgtgcggtctggcggatctggcggaggctccaccagccccaagaaaaagagaaaagtctaagctgccttctgcggggcttgccttctggccatgcccttcttctctcccttgcacctgtacctcttggtctttgaataaagcctgagtaggaaggctagcaaaaaaaaaaaaaaaaaaaaaaaaaaaaaaaaaaaaaaaaaaaaaaaaaaaaaaaaaaaaaaaaaaaaaaaaaaaaaaaagcccagccggctccccaacctctaccgaggagggcacctctgagtccgccacccccgagagcggccctggcacctccaccgagcccagcgagggcagcgcacccggcagccctgccggcagccccacctccacagaggagggaaccagcaccgagcccagcgaaggcagcgccccaggcaccagcaccgagcctagtgagcaggagattaaacggatcaacaagatcagaagaagacttgtgaaagacagcaacaccaagaaggccggcaagacaggccccatgaaaaccctgctggttagagtgatgacacccgatctgagagagcggctggaaaacctgagaaagaagcctgaaaatatcccccagcccatcagcaatacatctagagccaacctgaataagctgctgaccgattacaccgaaatgaagaaggcgatcctgcatgtgtactgggaagagttccagaaggaccctgtgggcctgatgagccgggtggcccagcctgccagcaagaagatcgatcagaacaagctgaaacctgagatggacgagaagggcaacctgaccaccgccggctttgcctgctctcagtgtggccagcccctgttcgtgtacaagctggagcaggtgtctgagaagggcaaggcttacaccaactacttcggacggtgcaatgtggccgagcacgaaaagctgatcctgctggcccagctgaagcccgagaaggatagcgacgaagccgtgacatatagcctgggaaagtttgggcagagggccctggatttctacagcattcatgtgaccaaggagtccacccaccccgtgaagcccctggcccagatcgccggaaacagatacgcctccggacctgtgggaaaggccctgagcgacgcatgtatgggcacaatcgcctccttcctgtctaagtaccaggacatcatcatcgaacaccagaaggtggtgaagggcaaccagaagagactggagagcctgcgggagctggccggcaaggaaaacctggaataccctagcgtgaccctgccacctcagcctcacaccaaggagggcgttgatgcctacaacgaagtgatcgcccgggtgcgaatgtgggtgaacctgaacctgtggcagaagctgaagctaagcagagatgatgccaagcctctgctgagactgaagggattcccttcctttcctctggtcgagagacaggccaacgaagtggactggtgggacatggtgtgtaacgtgaagaagctgatcaacgagaaaaaggaggatggcaaggtgttttggcagaatctggctggctacaagagacaggaagccctgagaccatacctgagcagcgaggaagatcggaagaagggaaagaaattcgctcggtaccagctgggcgacctgctgctgcacctggaaaagaagcacggcgaggactggggaaaggtgtacgacgaggcctgggagcggattgacaagaaagtggaaggcctgagcaagcacatcaagctggaagaggaacggagaagcgaggacgcccagagcaaggccgccctgaccgactggctgcgggctaaggccagcttcgtgatcgagggcctgaaggaggccgacaaggacgagttctgcagatgcgagctgaagctgcagaagtggtacggggacctgcggggaaagcccttcgccatcgaagccgagaacagcatcctggacatcagcggcttcagcaagcagtacaactgtgccttcatctggcagaaggacggcgtgaagaagctgaacctgtacctgatcatcaactacttcaagggcggcaagctgcggttcaagaagatcaaacctgaagccttcgaagccaacagattctacaccgtgatcaacaaaaagagcggcgagatcgtgcccatggaggtgaacttcaacttcgacgaccccaacctgatcatcctgcctctggcctttggcaagagacagggcagagaattcatctggaacgacctgctgtccctggaaaccggcagcctgaagctggccaacggaagagtgatcgagaagacactgtacaacagaagaacccggcaggatgagcctgccctgttcgtggccctgaccttcgagcggcgggaggtcctggactcctccaatatcaaaccaatgaacctgatcggcgtggcaagaggcgaaaacatccccgccgtgatcgccctgaccgaccccgagggctgcccactgagccggtttaaggatagcctgggaaacccaacccacatcctgagaatcggcgagagctataaggagaagcagcggaccatccaggccaagaaggaggtggagcagcggagagccggcggctacagccggaagtacgccagcaaagccaagaatctggcagacgatatggtgagaaacaccgctagagatctgctgtactacgccgtgacccaggatgccatgctgatcttcgccaacctgagccggggcttcggccggcagggcaagcggaccttcatggccgagagacagtacacacggatggaggactggctgaccgccaagctggcctacgagggcctgagcaagacctacctgtccaagacactggcccagtacacctccaagacatgcagcaactgtgggtttaccatcaccagcgccgactacgacagggtgctggagaagctgaagaagacagcaacaggctggatgaccacaattaacggcaaggagctgaaggtggagggccagattacctactacaacagatacaagagacagaacgtagtcaaggacctgtccgtcgagctggatagactgagcgaagaatctgtgaacaacgacatctcctcctggacaaagggcagaagcggagaagctctgagcctcctgaagaaaagattctcccatagacccgtgcaggagaagttcgtgtgcctgaactgcggcttcgagacacacgcagccgagcaagccgccctgaacatcgccagatcctggctgttcctgcggagccaggagtacaagaaataccagacaaacaagacaaccggcaacaccgataagagagccttcgtcgagacctggcagtccttttaccggaagaagcttaaggaggtgtggaaacctgccgtgcggtctggcggatctggcggaggctccaccagccccaagaaaaagagaaaagtctaagctgccttctgcggggcttgccttctggccatgcccttcttctctcccttgcacctgtacctcttggtctttgaataaagcctgagtaggaaggctagcaaaaaaaaaaaaaaaaaaaaaaaaaaaaaaaaaaaaaaaaaaaaaaaaaaaaaaaaaaaaaaaaaaaaaaaaaaaaaaaa

SEQ ID NO: 9130 - RNA, 8787 nt, synthetic construct
  source 1..8787: mol_type = other RNA
aggaaataagagagaaaagaagagtaagaagaaatataagagccaccatggcccctaagaagaagcgtaaagtgagccggatgaaccacgaccaggagttcgacccccctaaggtgtaccctcccgtccccgccgagaagagaaagcccatccgggtcctgagcctgttcgatggcatcgccaccggtctgctggtgctgaaggacctgggcatccaggtggataggtacattgcctccgaggtgtgcgaggactccatcaccgtgggaatggtgcgtcatcagggcaagatcatgtacgtgggcgacgtgcggagcgtgacacagaagcatatccaggagtggggccctttcgacctggtgatcggcggcagcccttgcaatgacctgagcatcgtgaacccagcccggaagggcctgtacgagggaaccggcagactgttcttcgagttttacagactgctgcacgacgcccggcctaaggaaggcgacgaccggcccttcttttggctgttcgagaatgtggtggccatgggagtcagcgacaagcgggatattagccggttcctggagagcaaccccgtgatgatcgatgccaaggaagtgagcgccgcccaccgggccagatacttctggggcaatctgcctggcatgaacagacccctggccagcaccgtgaacgacaagctggagctgcaggagtgcctggagcacggccggatcgccaagttcagcaaggtgagaaccatcaccacccgaagcaacagcatcaaacaaggcaaggaccagcactttcctgtgttcatgaacgagaaggaggacatcctgtggtgtaccgagatggagagagtgttcgggttcccagtccactacacagatgtcagcaacatgtctagactggccagacagagactgctgggaagaagctggtccgtccctgtgatcagacacctgttcgcccctctgaaggagtacttcgcctgcgtgagcagcggcaacagcaacgccaacagccggggccccagcttctctagcggcctggtgccactgtccctgagagggagccacatgggccccatggagatctacaaaaccgtgagcgcctggaagcggcagcctgtgcgcgtgctgagcctgtttcggaatatcgataaagtcctgaaaagcctgggattcctggagagcggctctggctccggcggtggcaccctgaagtacgtggaggatgtgacaaacgtggtcagacgggatgtggagaagtggggccccttcgatctggtgtacggcagcacccaacccctgggcagctcttgtgaccggtgccctggctggtacatgtttcagttccaccggatcctgcagtacgccctgccgagacaggagtcccagcggccattcttttggattttcatggacaacttgctgctgaccgaggatgaccaggaaactaccactcggttcctgcagaccgaagccgtgaccctgcaggacgtgagaggccgggactaccagaacgccatgcgggtgtggtccaacatccctggactgaaaagcaagcacgcacctctgacccctaaagaagaggagtacctgcaggcccaggtgcggagcagaagcaagctggacgcccctaaggtggatctgctggtgaagaattgcctcctgcccctgagagagtacttcaagtatttcagccagaatagtctgcccctgggaggcagcggcggcggccaggccgaggtgaccttcgaggacgtggccgtgctgttcagcagggaggagtggggcaggctgggccccgcccagaggggcctgtacagggacgtgatgctggagacctacaggaacctggccagcctgggcgccggcagggccggcagcaagcccggcgtgatcacccagctggagaggggcgacgagccctgggtgctggacgcccagggcgccaagggcaagggccagcccagggtgagcggcggcccaagcagcggcgcccctcctcccagcggcggcaggcggcccaagcagcggcgcccctcctcccagcggcggcagcccagccggctccccaacctctaccgaggagggcacctctgagtccgccacccccgagagcggccctggcacctccaccgagcccagcgagggcagcgcacccggcagccctgccggcagccccacctccacagaggagggaaccagcaccgagcccagcgaaggcagcgccccaggcaccagcaccgagcctagtgagcaggagattaaacggatcaacaagatcagaagaagacttgtgaaagacagcaacaccaagaaggccggcaagacaggccccatgaaaaccctgctggttagagtgatgacacccgatctgagagagcggctggaaaacctgagaaagaagcctgaaaatatcccccagcccatcagcaatacatctagagccaacctgaataagctgctgaccgattacaccgaaatgaagaaggcgatcctgcatgtgtactgggaagagttccagaaggaccctgtgggcctgatgagccgggtggcccagcctgccagcaagaagatcgatcagaacaagctgaaacctgagatggacgagaagggcaacctgaccaccgccggctttgcctgctctcagtgtggccagcccctgttcgtgtacaagctggagcaggtgtctgagaagggcaaggcttacaccaactacttcggacggtgcaatgtggccgagcacgaaaagctgatcctgctggcccagctgaagcccgagaaggatagcgacgaagccgtgacatatagcctgggaaagtttgggcagagggccctggatttctacagcattcatgtgaccaaggagtccacccaccccgtgaagcccctggcccagatcgccggaaacagatacgcctccggacctgtgggaaaggccctgagcgacgcatgtatgggcacaatcgcctccttcctgtctaagtaccaggacatcatcatcgaacaccagaaggtggtgaagggcaaccagaagagactggagagcctgcgggagctggccggcaaggaaaacctggaataccctagcgtgaccctgccacctcagcctcacaccaaggagggcgttgatgcctacaacgaagtgatcgcccgggtgcgaatgtgggtgaacctgaacctgtggcagaagctgaagctaagcagagatgatgccaagcctctgctgagactgaagggattcccttcctttcctctggtcgagagacaggccaacgaagtggactggtgggacatggtgtgtaacgtgaagaagctgatcaacgagaaaaaggaggatggcaaggtgttttggcagaatctggctggctacaagagacaggaagccctgagaccatacctgagcagcgaggaagatcggaagaagggaaagaaattcgctcggtaccagctgggcgacctgctgctgcacctggaaaagaagcacggcgaggactggggaaaggtgtacgacgaggcctgggagcggattgacaagaaagtggaaggcctgagcaagcacatcaagctggaagaggaacggagaagcgaggacgcccagagcaaggccgccctgaccgactggctgcgggctaaggccagcttcgtgatcgagggcctgaaggaggccgacaaggacgagttctgcagatgcgagctgaagctgcagaagtggtacggggacctgcggggaaagcccttcgccatcgaagccgagaacagcatcctggacatcagcggcttcagcaagcagtacaactgtgccttcatctggcagaaggacggcgtgaagaagctgaacctgtacctgatcatcaactacttcaagggcggcaagctgcggttcaagaagatcaaacctgaagccttcgaagccaacagattctacaccgtgatcaacaaaaagagcggcgagatcgtgcccatggaggtgaacttcaacttcgacgaccccaacctgatcatcctgcctctggcctttggcaagagacagggcagagaattcatctggaacgacctgctgtccctggaaaccggcagcctgaagctggccaacggaagagtgatcgagaagacactgtacaacagaagaacccggcaggatgagcctgccctgttcgtggccctgaccttcgagcggcgggaggtcctggactcctccaatatcaaaccaatgaacctgatcggcgtggcaagaggcgaaaacatccccgccgtgatcgccctgaccgaccccgagggctgcccactgagccggtttaaggatagcctgggaaacccaacccacatcctgagaatcggcgagagctataaggagaagcagcggaccatccaggccaagaaggaggtggagcagcggagagccggcggctacagccggaagtacgccagcaaagccaagaatctggcagacgatatggtgagaaacaccgctagagatctgctgtactacgccgtgacccaggatgccatgctgatcttcgccaacctgagccggggcttcggccggcagggcaagcggaccttcatggccgagagacagtacacacggatggaggactggctgaccgccaagctggcctacgagggcctgagcaagacctacctgtccaagacactggcccagtacacctccaagacatgcagcaactgtgggtttaccatcaccagcgccgactacgacagggtgctggagaagctgaagaagacagcaacaggctggatgaccacaattaacggcaaggagctgaaggtggagggccagattacctactacaacagatacaagagacagaacgtagtcaaggacctgtccgtcgagctggatagactgagcgaagaatctgtgaacaacgacatctcctcctggacaaagggcagaagcggagaagctctgagcctcctgaagaaaagattctcccatagacccgtgcaggagaagttcgtgtgcctgaactgcggcttcgagacacacgcagccgagcaagccgccctgaacatcgccagatcctggctgttcctgcggagccaggagtacaagaaataccagacaaacaagacaaccggcaacaccgataagagagccttcgtcgagacctggcagtccttttaccggaagaagcttaaggaggtgtggaaacctgccgtgcggtctggcggatctggcggaggctccaccagccccaagaaaaagagaaaagtctaagctgccttctgcggggcttgccttctggccatgcccttcttctctcccttgcacctgtacctcttggtctttgaataaagcctgagtaggaaggctagcaaaaaaaaaaaaaaaaaaaaaaaaaaaaaaaaaaaaaaaaaaaaaaaaaaaaaaaaaaaaaaaaaaaaaaaaaaaaaaaagcccagccggctccccaacctctaccgaggagggcacctctgagtccgccacccccgagagcggccctggcacctccaccgagcccagcgagggcagcgcacccggcagccctgccggcagccccacctccacagaggagggaaccagcaccgagcccagcgaaggcagcgccccaggcaccagcaccgagcctagtgagcaggagattaaacggatcaacaagatcagaagaagacttgtgaaagacagcaacaccaagaaggccggcaagacaggccccatgaaaaccctgctggttagagtgatgacacccgatctgagagagcggctggaaaacctgagaaagaagcctgaaaatatcccccagcccatcagcaatacatctagagccaacctgaataagctgctgaccgattacaccgaaatgaagaaggcgatcctgcatgtgtactgggaagagttccagaaggaccctgtgggcctgatgagccgggtggcccagcctgccagcaagaagatcgatcagaacaagctgaaacctgagatggacgagaagggcaacctgaccaccgccggctttgcctgctctcagtgtggccagcccctgttcgtgtacaagctggagcaggtgtctgagaagggcaaggcttacaccaactacttcggacggtgcaatgtggccgagcacgaaaagctgatcctgctggcccagctgaagcccgagaaggatagcgacgaagccgtgacatatagcctgggaaagtttgggcagagggccctggatttctacagcattcatgtgaccaaggagtccacccaccccgtgaagcccctggcccagatcgccggaaacagatacgcctccggacctgtgggaaaggccctgagcgacgcatgtatgggcacaatcgcctccttcctgtctaagtaccaggacatcatcatcgaacaccagaaggtggtgaagggcaaccagaagagactggagagcctgcgggagctggccggcaaggaaaacctggaataccctagcgtgaccctgccacctcagcctcacaccaaggagggcgttgatgcctacaacgaagtgatcgcccgggtgcgaatgtgggtgaacctgaacctgtggcagaagctgaagctaagcagagatgatgccaagcctctgctgagactgaagggattcccttcctttcctctggtcgagagacaggccaacgaagtggactggtgggacatggtgtgtaacgtgaagaagctgatcaacgagaaaaaggaggatggcaaggtgttttggcagaatctggctggctacaagagacaggaagccctgagaccatacctgagcagcgaggaagatcggaagaagggaaagaaattcgctcggtaccagctgggcgacctgctgctgcacctggaaaagaagcacggcgaggactggggaaaggtgtacgacgaggcctgggagcggattgacaagaaagtggaaggcctgagcaagcacatcaagctggaagaggaacggagaagcgaggacgcccagagcaaggccgccctgaccgactggctgcgggctaaggccagcttcgtgatcgagggcctgaaggaggccgacaaggacgagttctgcagatgcgagctgaagctgcagaagtggtacggggacctgcggggaaagcccttcgccatcgaagccgagaacagcatcctggacatcagcggcttcagcaagcagtacaactgtgccttcatctggcagaaggacggcgtgaagaagctgaacctgtacctgatcatcaactacttcaagggcggcaagctgcggttcaagaagatcaaacctgaagccttcgaagccaacagattctacaccgtgatcaacaaaaagagcggcgagatcgtgcccatggaggtgaacttcaacttcgacgaccccaacctgatcatcctgcctctggcctttggcaagagacagggcagagaattcatctggaacgacctgctgtccctggaaaccggcagcctgaagctggccaacggaagagtgatcgagaagacactgtacaacagaagaacccggcaggatgagcctgccctgttcgtggccctgaccttcgagcggcgggaggtcctggactcctccaatatcaaaccaatgaacctgatcggcgtggcaagaggcgaaaacatccccgccgtgatcgccctgaccgaccccgagggctgcccactgagccggtttaaggatagcctgggaaacccaacccacatcctgagaatcggcgagagctataaggagaagcagcggaccatccaggccaagaaggaggtggagcagcggagagccggcggctacagccggaagtacgccagcaaagccaagaatctggcagacgatatggtgagaaacaccgctagagatctgctgtactacgccgtgacccaggatgccatgctgatcttcgccaacctgagccggggcttcggccggcagggcaagcggaccttcatggccgagagacagtacacacggatggaggactggctgaccgccaagctggcctacgagggcctgagcaagacctacctgtccaagacactggcccagtacacctccaagacatgcagcaactgtgggtttaccatcaccagcgccgactacgacagggtgctggagaagctgaagaagacagcaacaggctggatgaccacaattaacggcaaggagctgaaggtggagggccagattacctactacaacagatacaagagacagaacgtagtcaaggacctgtccgtcgagctggatagactgagcgaagaatctgtgaacaacgacatctcctcctggacaaagggcagaagcggagaagctctgagcctcctgaagaaaagattctcccatagacccgtgcaggagaagttcgtgtgcctgaactgcggcttcgagacacacgcagccgagcaagccgccctgaacatcgccagatcctggctgttcctgcggagccaggagtacaagaaataccagacaaacaagacaaccggcaacaccgataagagagccttcgtcgagacctggcagtccttttaccggaagaagcttaaggaggtgtggaaacctgccgtgcggtctggcggatctggcggaggctccaccagccccaagaaaaagagaaaagtctaagctgccttctgcggggcttgccttctggccatgcccttcttctctcccttgcacctgtacctcttggtctttgaataaagcctgagtaggaaggctagcaaaaaaaaaaaaaaaaaaaaaaaaaaaaaaaaaaaaaaaaaaaaaaaaaaaaaaaaaaaaaaaaaaaaaaaaaaaaaaaa

SEQ ID NO: 9131 - RNA, 8787 nt, synthetic construct
  source 1..8787: mol_type = other RNA
aggaaataagagagaaaagaagagtaagaagaaatataagagccaccatggcccctaagaagaagcgtaaagtgagccggatgaaccacgaccaggagttcgacccccctaaggtgtaccctcccgtccccgccgagaagagaaagcccatccgggtcctgagcctgttcgatggcatcgccaccggtctgctggtgctgaaggacctgggcatccaggtggataggtacattgcctccgaggtgtgcgaggactccatcaccgtgggaatggtgcgtcatcagggcaagatcatgtacgtgggcgacgtgcggagcgtgacacagaagcatatccaggagtggggccctttcgacctggtgatcggcggcagcccttgcaatgacctgagcatcgtgaacccagcccggaagggcctgtacgagggaaccggcagactgttcttcgagttttacagactgctgcacgacgcccggcctaaggaaggcgacgaccggcccttcttttggctgttcgagaatgtggtggccatgggagtcagcgacaagcgggatattagccggttcctggagagcaaccccgtgatgatcgatgccaaggaagtgagcgccgcccaccgggccagatacttctggggcaatctgcctggcatgaacagacccctggccagcaccgtgaacgacaagctggagctgcaggagtgcctggagcacggccggatcgccaagttcagcaaggtgagaaccatcaccacccgaagcaacagcatcaaacaaggcaaggaccagcactttcctgtgttcatgaacgagaaggaggacatcctgtggtgtaccgagatggagagagtgttcgggttcccagtccactacacagatgtcagcaacatgtctagactggccagacagagactgctgggaagaagctggtccgtccctgtgatcagacacctgttcgcccctctgaaggagtacttcgcctgcgtgagcagcggcaacagcaacgccaacagccggggccccagcttctctagcggcctggtgccactgtccctgagagggagccacatgggccccatggagatctacaaaaccgtgagcgcctggaagcggcagcctgtgcgcgtgctgagcctgtttcggaatatcgataaagtcctgaaaagcctgggattcctggagagcggctctggctccggcggtggcaccctgaagtacgtggaggatgtgacaaacgtggtcagacgggatgtggagaagtggggccccttcgatctggtgtacggcagcacccaacccctgggcagctcttgtgaccggtgccctggctggtacatgtttcagttccaccggatcctgcagtacgccctgccgagacaggagtcccagcggccattcttttggattttcatggacaacttgctgctgaccgaggatgaccaggaaactaccactcggttcctgcagaccgaagccgtgaccctgcaggacgtgagaggccgggactaccagaacgccatgcgggtgtggtccaacatccctggactgaaaagcaagcacgcacctctgacccctaaagaagaggagtacctgcaggcccaggtgcggagcagaagcaagctggacgcccctaaggtggatctgctggtgaagaattgcctcctgcccctgagagagtacttcaagtatttcagccagaatagtctgcccctgggaggcagcggcggcggcaagcccgccgccgtgagcttcgccgacgtggccgtgtacttcagcgtggaggagtggggctgcctgaggcccgcccagagggccctgtacagggacgtgatgagggagacctacggccacctgggcgccctgggcttccccggccccaagcccgccctgatcagctggatggagcaggagagcgaggcctggagccccgccgcccaggaccccgaggagggcgagagcctgggcggcgccctgggcggcccaagcagcggcgcccctcctcccagcggcggcaggcggcccaagcagcggcgcccctcctcccagcggcggcagcccagccggctccccaacctctaccgaggagggcacctctgagtccgccacccccgagagcggccctggcacctccaccgagcccagcgagggcagcgcacccggcagccctgccggcagccccacctccacagaggagggaaccagcaccgagcccagcgaaggcagcgccccaggcaccagcaccgagcctagtgagcaggagattaaacggatcaacaagatcagaagaagacttgtgaaagacagcaacaccaagaaggccggcaagacaggccccatgaaaaccctgctggttagagtgatgacacccgatctgagagagcggctggaaaacctgagaaagaagcctgaaaatatcccccagcccatcagcaatacatctagagccaacctgaataagctgctgaccgattacaccgaaatgaagaaggcgatcctgcatgtgtactgggaagagttccagaaggaccctgtgggcctgatgagccgggtggcccagcctgccagcaagaagatcgatcagaacaagctgaaacctgagatggacgagaagggcaacctgaccaccgccggctttgcctgctctcagtgtggccagcccctgttcgtgtacaagctggagcaggtgtctgagaagggcaaggcttacaccaactacttcggacggtgcaatgtggccgagcacgaaaagctgatcctgctggcccagctgaagcccgagaaggatagcgacgaagccgtgacatatagcctgggaaagtttgggcagagggccctggatttctacagcattcatgtgaccaaggagtccacccaccccgtgaagcccctggcccagatcgccggaaacagatacgcctccggacctgtgggaaaggccctgagcgacgcatgtatgggcacaatcgcctccttcctgtctaagtaccaggacatcatcatcgaacaccagaaggtggtgaagggcaaccagaagagactggagagcctgcgggagctggccggcaaggaaaacctggaataccctagcgtgaccctgccacctcagcctcacaccaaggagggcgttgatgcctacaacgaagtgatcgcccgggtgcgaatgtgggtgaacctgaacctgtggcagaagctgaagctaagcagagatgatgccaagcctctgctgagactgaagggattcccttcctttcctctggtcgagagacaggccaacgaagtggactggtgggacatggtgtgtaacgtgaagaagctgatcaacgagaaaaaggaggatggcaaggtgttttggcagaatctggctggctacaagagacaggaagccctgagaccatacctgagcagcgaggaagatcggaagaagggaaagaaattcgctcggtaccagctgggcgacctgctgctgcacctggaaaagaagcacggcgaggactggggaaaggtgtacgacgaggcctgggagcggattgacaagaaagtggaaggcctgagcaagcacatcaagctggaagaggaacggagaagcgaggacgcccagagcaaggccgccctgaccgactggctgcgggctaaggccagcttcgtgatcgagggcctgaaggaggccgacaaggacgagttctgcagatgcgagctgaagctgcagaagtggtacggggacctgcggggaaagcccttcgccatcgaagccgagaacagcatcctggacatcagcggcttcagcaagcagtacaactgtgccttcatctggcagaaggacggcgtgaagaagctgaacctgtacctgatcatcaactacttcaagggcggcaagctgcggttcaagaagatcaaacctgaagccttcgaagccaacagattctacaccgtgatcaacaaaaagagcggcgagatcgtgcccatggaggtgaacttcaacttcgacgaccccaacctgatcatcctgcctctggcctttggcaagagacagggcagagaattcatctggaacgacctgctgtccctggaaaccggcagcctgaagctggccaacggaagagtgatcgagaagacactgtacaacagaagaacccggcaggatgagcctgccctgttcgtggccctgaccttcgagcggcgggaggtcctggactcctccaatatcaaaccaatgaacctgatcggcgtggcaagaggcgaaaacatccccgccgtgatcgccctgaccgaccccgagggctgcccactgagccggtttaaggatagcctgggaaacccaacccacatcctgagaatcggcgagagctataaggagaagcagcggaccatccaggccaagaaggaggtggagcagcggagagccggcggctacagccggaagtacgccagcaaagccaagaatctggcagacgatatggtgagaaacaccgctagagatctgctgtactacgccgtgacccaggatgccatgctgatcttcgccaacctgagccggggcttcggccggcagggcaagcggaccttcatggccgagagacagtacacacggatggaggactggctgaccgccaagctggcctacgagggcctgagcaagacctacctgtccaagacactggcccagtacacctccaagacatgcagcaactgtgggtttaccatcaccagcgccgactacgacagggtgctggagaagctgaagaagacagcaacaggctggatgaccacaattaacggcaaggagctgaaggtggagggccagattacctactacaacagatacaagagacagaacgtagtcaaggacctgtccgtcgagctggatagactgagcgaagaatctgtgaacaacgacatctcctcctggacaaagggcagaagcggagaagctctgagcctcctgaagaaaagattctcccatagacccgtgcaggagaagttcgtgtgcctgaactgcggcttcgagacacacgcagccgagcaagccgccctgaacatcgccagatcctggctgttcctgcggagccaggagtacaagaaataccagacaaacaagacaaccggcaacaccgataagagagccttcgtcgagacctggcagtccttttaccggaagaagcttaaggaggtgtggaaacctgccgtgcggtctggcggatctggcggaggctccaccagccccaagaaaaagagaaaagtctaagctgccttctgcggggcttgccttctggccatgcccttcttctctcccttgcacctgtacctcttggtctttgaataaagcctgagtaggaaggctagcaaaaaaaaaaaaaaaaaaaaaaaaaaaaaaaaaaaaaaaaaaaaaaaaaaaaaaaaaaaaaaaaaaaaaaaaaaaaaaaagcccagccggctccccaacctctaccgaggagggcacctctgagtccgccacccccgagagcggccctggcacctccaccgagcccagcgagggcagcgcacccggcagccctgccggcagccccacctccacagaggagggaaccagcaccgagcccagcgaaggcagcgccccaggcaccagcaccgagcctagtgagcaggagattaaacggatcaacaagatcagaagaagacttgtgaaagacagcaacaccaagaaggccggcaagacaggccccatgaaaaccctgctggttagagtgatgacacccgatctgagagagcggctggaaaacctgagaaagaagcctgaaaatatcccccagcccatcagcaatacatctagagccaacctgaataagctgctgaccgattacaccgaaatgaagaaggcgatcctgcatgtgtactgggaagagttccagaaggaccctgtgggcctgatgagccgggtggcccagcctgccagcaagaagatcgatcagaacaagctgaaacctgagatggacgagaagggcaacctgaccaccgccggctttgcctgctctcagtgtggccagcccctgttcgtgtacaagctggagcaggtgtctgagaagggcaaggcttacaccaactacttcggacggtgcaatgtggccgagcacgaaaagctgatcctgctggcccagctgaagcccgagaaggatagcgacgaagccgtgacatatagcctgggaaagtttgggcagagggccctggatttctacagcattcatgtgaccaaggagtccacccaccccgtgaagcccctggcccagatcgccggaaacagatacgcctccggacctgtgggaaaggccctgagcgacgcatgtatgggcacaatcgcctccttcctgtctaagtaccaggacatcatcatcgaacaccagaaggtggtgaagggcaaccagaagagactggagagcctgcgggagctggccggcaaggaaaacctggaataccctagcgtgaccctgccacctcagcctcacaccaaggagggcgttgatgcctacaacgaagtgatcgcccgggtgcgaatgtgggtgaacctgaacctgtggcagaagctgaagctaagcagagatgatgccaagcctctgctgagactgaagggattcccttcctttcctctggtcgagagacaggccaacgaagtggactggtgggacatggtgtgtaacgtgaagaagctgatcaacgagaaaaaggaggatggcaaggtgttttggcagaatctggctggctacaagagacaggaagccctgagaccatacctgagcagcgaggaagatcggaagaagggaaagaaattcgctcggtaccagctgggcgacctgctgctgcacctggaaaagaagcacggcgaggactggggaaaggtgtacgacgaggcctgggagcggattgacaagaaagtggaaggcctgagcaagcacatcaagctggaagaggaacggagaagcgaggacgcccagagcaaggccgccctgaccgactggctgcgggctaaggccagcttcgtgatcgagggcctgaaggaggccgacaaggacgagttctgcagatgcgagctgaagctgcagaagtggtacggggacctgcggggaaagcccttcgccatcgaagccgagaacagcatcctggacatcagcggcttcagcaagcagtacaactgtgccttcatctggcagaaggacggcgtgaagaagctgaacctgtacctgatcatcaactacttcaagggcggcaagctgcggttcaagaagatcaaacctgaagccttcgaagccaacagattctacaccgtgatcaacaaaaagagcggcgagatcgtgcccatggaggtgaacttcaacttcgacgaccccaacctgatcatcctgcctctggcctttggcaagagacagggcagagaattcatctggaacgacctgctgtccctggaaaccggcagcctgaagctggccaacggaagagtgatcgagaagacactgtacaacagaagaacccggcaggatgagcctgccctgttcgtggccctgaccttcgagcggcgggaggtcctggactcctccaatatcaaaccaatgaacctgatcggcgtggcaagaggcgaaaacatccccgccgtgatcgccctgaccgaccccgagggctgcccactgagccggtttaaggatagcctgggaaacccaacccacatcctgagaatcggcgagagctataaggagaagcagcggaccatccaggccaagaaggaggtggagcagcggagagccggcggctacagccggaagtacgccagcaaagccaagaatctggcagacgatatggtgagaaacaccgctagagatctgctgtactacgccgtgacccaggatgccatgctgatcttcgccaacctgagccggggcttcggccggcagggcaagcggaccttcatggccgagagacagtacacacggatggaggactggctgaccgccaagctggcctacgagggcctgagcaagacctacctgtccaagacactggcccagtacacctccaagacatgcagcaactgtgggtttaccatcaccagcgccgactacgacagggtgctggagaagctgaagaagacagcaacaggctggatgaccacaattaacggcaaggagctgaaggtggagggccagattacctactacaacagatacaagagacagaacgtagtcaaggacctgtccgtcgagctggatagactgagcgaagaatctgtgaacaacgacatctcctcctggacaaagggcagaagcggagaagctctgagcctcctgaagaaaagattctcccatagacccgtgcaggagaagttcgtgtgcctgaactgcggcttcgagacacacgcagccgagcaagccgccctgaacatcgccagatcctggctgttcctgcggagccaggagtacaagaaataccagacaaacaagacaaccggcaacaccgataagagagccttcgtcgagacctggcagtccttttaccggaagaagcttaaggaggtgtggaaacctgccgtgcggtctggcggatctggcggaggctccaccagccccaagaaaaagagaaaagtctaagctgccttctgcggggcttgccttctggccatgcccttcttctctcccttgcacctgtacctcttggtctttgaataaagcctgagtaggaaggctagcaaaaaaaaaaaaaaaaaaaaaaaaaaaaaaaaaaaaaaaaaaaaaaaaaaaaaaaaaaaaaaaaaaaaaaaaaaaaaaaa

SEQ ID NO: 9132 - RNA, 8787 nt, synthetic construct
  source 1..8787: mol_type = other RNA
aggaaataagagagaaaagaagagtaagaagaaatataagagccaccatggcccctaagaagaagcgtaaagtgagccggatgaaccacgaccaggagttcgacccccctaaggtgtaccctcccgtccccgccgagaagagaaagcccatccgggtcctgagcctgttcgatggcatcgccaccggtctgctggtgctgaaggacctgggcatccaggtggataggtacattgcctccgaggtgtgcgaggactccatcaccgtgggaatggtgcgtcatcagggcaagatcatgtacgtgggcgacgtgcggagcgtgacacagaagcatatccaggagtggggccctttcgacctggtgatcggcggcagcccttgcaatgacctgagcatcgtgaacccagcccggaagggcctgtacgagggaaccggcagactgttcttcgagttttacagactgctgcacgacgcccggcctaaggaaggcgacgaccggcccttcttttggctgttcgagaatgtggtggccatgggagtcagcgacaagcgggatattagccggttcctggagagcaaccccgtgatgatcgatgccaaggaagtgagcgccgcccaccgggccagatacttctggggcaatctgcctggcatgaacagacccctggccagcaccgtgaacgacaagctggagctgcaggagtgcctggagcacggccggatcgccaagttcagcaaggtgagaaccatcaccacccgaagcaacagcatcaaacaaggcaaggaccagcactttcctgtgttcatgaacgagaaggaggacatcctgtggtgtaccgagatggagagagtgttcgggttcccagtccactacacagatgtcagcaacatgtctagactggccagacagagactgctgggaagaagctggtccgtccctgtgatcagacacctgttcgcccctctgaaggagtacttcgcctgcgtgagcagcggcaacagcaacgccaacagccggggccccagcttctctagcggcctggtgccactgtccctgagagggagccacatgggccccatggagatctacaaaaccgtgagcgcctggaagcggcagcctgtgcgcgtgctgagcctgtttcggaatatcgataaagtcctgaaaagcctgggattcctggagagcggctctggctccggcggtggcaccctgaagtacgtggaggatgtgacaaacgtggtcagacgggatgtggagaagtggggccccttcgatctggtgtacggcagcacccaacccctgggcagctcttgtgaccggtgccctggctggtacatgtttcagttccaccggatcctgcagtacgccctgccgagacaggagtcccagcggccattcttttggattttcatggacaacttgctgctgaccgaggatgaccaggaaactaccactcggttcctgcagaccgaagccgtgaccctgcaggacgtgagaggccgggactaccagaacgccatgcgggtgtggtccaacatccctggactgaaaagcaagcacgcacctctgacccctaaagaagaggagtacctgcaggcccaggtgcggagcagaagcaagctggacgcccctaaggtggatctgctggtgaagaattgcctcctgcccctgagagagtacttcaagtatttcagccagaatagtctgcccctgggaggcagcggcggcggcctgcagggcagcgtgaccttccaggacgtggccgtggacttcagctgggaggagtggggccacctgggccccgcccagaaggagctgtacagggaggtgatgctggagaactacggcaacctggtgtgcctgggcctggccgtgagcagccccgacgtggtgtgccagctggagaggggcgagggcccctggatgcccgagggcgacgtgcccggcagcagctgcgccggctgggagaccaagggcggcccaagcagcggcgcccctcctcccagcggcggcaggcggcccaagcagcggcgcccctcctcccagcggcggcagcccagccggctccccaacctctaccgaggagggcacctctgagtccgccacccccgagagcggccctggcacctccaccgagcccagcgagggcagcgcacccggcagccctgccggcagccccacctccacagaggagggaaccagcaccgagcccagcgaaggcagcgccccaggcaccagcaccgagcctagtgagcaggagattaaacggatcaacaagatcagaagaagacttgtgaaagacagcaacaccaagaaggccggcaagacaggccccatgaaaaccctgctggttagagtgatgacacccgatctgagagagcggctggaaaacctgagaaagaagcctgaaaatatcccccagcccatcagcaatacatctagagccaacctgaataagctgctgaccgattacaccgaaatgaagaaggcgatcctgcatgtgtactgggaagagttccagaaggaccctgtgggcctgatgagccgggtggcccagcctgccagcaagaagatcgatcagaacaagctgaaacctgagatggacgagaagggcaacctgaccaccgccggctttgcctgctctcagtgtggccagcccctgttcgtgtacaagctggagcaggtgtctgagaagggcaaggcttacaccaactacttcggacggtgcaatgtggccgagcacgaaaagctgatcctgctggcccagctgaagcccgagaaggatagcgacgaagccgtgacatatagcctgggaaagtttgggcagagggccctggatttctacagcattcatgtgaccaaggagtccacccaccccgtgaagcccctggcccagatcgccggaaacagatacgcctccggacctgtgggaaaggccctgagcgacgcatgtatgggcacaatcgcctccttcctgtctaagtaccaggacatcatcatcgaacaccagaaggtggtgaagggcaaccagaagagactggagagcctgcgggagctggccggcaaggaaaacctggaataccctagcgtgaccctgccacctcagcctcacaccaaggagggcgttgatgcctacaacgaagtgatcgcccgggtgcgaatgtgggtgaacctgaacctgtggcagaagctgaagctaagcagagatgatgccaagcctctgctgagactgaagggattcccttcctttcctctggtcgagagacaggccaacgaagtggactggtgggacatggtgtgtaacgtgaagaagctgatcaacgagaaaaaggaggatggcaaggtgttttggcagaatctggctggctacaagagacaggaagccctgagaccatacctgagcagcgaggaagatcggaagaagggaaagaaattcgctcggtaccagctgggcgacctgctgctgcacctggaaaagaagcacggcgaggactggggaaaggtgtacgacgaggcctgggagcggattgacaagaaagtggaaggcctgagcaagcacatcaagctggaagaggaacggagaagcgaggacgcccagagcaaggccgccctgaccgactggctgcgggctaaggccagcttcgtgatcgagggcctgaaggaggccgacaaggacgagttctgcagatgcgagctgaagctgcagaagtggtacggggacctgcggggaaagcccttcgccatcgaagccgagaacagcatcctggacatcagcggcttcagcaagcagtacaactgtgccttcatctggcagaaggacggcgtgaagaagctgaacctgtacctgatcatcaactacttcaagggcggcaagctgcggttcaagaagatcaaacctgaagccttcgaagccaacagattctacaccgtgatcaacaaaaagagcggcgagatcgtgcccatggaggtgaacttcaacttcgacgaccccaacctgatcatcctgcctctggcctttggcaagagacagggcagagaattcatctggaacgacctgctgtccctggaaaccggcagcctgaagctggccaacggaagagtgatcgagaagacactgtacaacagaagaacccggcaggatgagcctgccctgttcgtggccctgaccttcgagcggcgggaggtcctggactcctccaatatcaaaccaatgaacctgatcggcgtggcaagaggcgaaaacatccccgccgtgatcgccctgaccgaccccgagggctgcccactgagccggtttaaggatagcctgggaaacccaacccacatcctgagaatcggcgagagctataaggagaagcagcggaccatccaggccaagaaggaggtggagcagcggagagccggcggctacagccggaagtacgccagcaaagccaagaatctggcagacgatatggtgagaaacaccgctagagatctgctgtactacgccgtgacccaggatgccatgctgatcttcgccaacctgagccggggcttcggccggcagggcaagcggaccttcatggccgagagacagtacacacggatggaggactggctgaccgccaagctggcctacgagggcctgagcaagacctacctgtccaagacactggcccagtacacctccaagacatgcagcaactgtgggtttaccatcaccagcgccgactacgacagggtgctggagaagctgaagaagacagcaacaggctggatgaccacaattaacggcaaggagctgaaggtggagggccagattacctactacaacagatacaagagacagaacgtagtcaaggacctgtccgtcgagctggatagactgagcgaagaatctgtgaacaacgacatctcctcctggacaaagggcagaagcggagaagctctgagcctcctgaagaaaagattctcccatagacccgtgcaggagaagttcgtgtgcctgaactgcggcttcgagacacacgcagccgagcaagccgccctgaacatcgccagatcctggctgttcctgcggagccaggagtacaagaaataccagacaaacaagacaaccggcaacaccgataagagagccttcgtcgagacctggcagtccttttaccggaagaagcttaaggaggtgtggaaacctgccgtgcggtctggcggatctggcggaggctccaccagccccaagaaaaagagaaaagtctaagctgccttctgcggggcttgccttctggccatgcccttcttctctcccttgcacctgtacctcttggtctttgaataaagcctgagtaggaaggctagcaaaaaaaaaaaaaaaaaaaaaaaaaaaaaaaaaaaaaaaaaaaaaaaaaaaaaaaaaaaaaaaaaaaaaaaaaaaaaaaagcccagccggctccccaacctctaccgaggagggcacctctgagtccgccacccccgagagcggccctggcacctccaccgagcccagcgagggcagcgcacccggcagccctgccggcagccccacctccacagaggagggaaccagcaccgagcccagcgaaggcagcgccccaggcaccagcaccgagcctagtgagcaggagattaaacggatcaacaagatcagaagaagacttgtgaaagacagcaacaccaagaaggccggcaagacaggccccatgaaaaccctgctggttagagtgatgacacccgatctgagagagcggctggaaaacctgagaaagaagcctgaaaatatcccccagcccatcagcaatacatctagagccaacctgaataagctgctgaccgattacaccgaaatgaagaaggcgatcctgcatgtgtactgggaagagttccagaaggaccctgtgggcctgatgagccgggtggcccagcctgccagcaagaagatcgatcagaacaagctgaaacctgagatggacgagaagggcaacctgaccaccgccggctttgcctgctctcagtgtggccagcccctgttcgtgtacaagctggagcaggtgtctgagaagggcaaggcttacaccaactacttcggacggtgcaatgtggccgagcacgaaaagctgatcctgctggcccagctgaagcccgagaaggatagcgacgaagccgtgacatatagcctgggaaagtttgggcagagggccctggatttctacagcattcatgtgaccaaggagtccacccaccccgtgaagcccctggcccagatcgccggaaacagatacgcctccggacctgtgggaaaggccctgagcgacgcatgtatgggcacaatcgcctccttcctgtctaagtaccaggacatcatcatcgaacaccagaaggtggtgaagggcaaccagaagagactggagagcctgcgggagctggccggcaaggaaaacctggaataccctagcgtgaccctgccacctcagcctcacaccaaggagggcgttgatgcctacaacgaagtgatcgcccgggtgcgaatgtgggtgaacctgaacctgtggcagaagctgaagctaagcagagatgatgccaagcctctgctgagactgaagggattcccttcctttcctctggtcgagagacaggccaacgaagtggactggtgggacatggtgtgtaacgtgaagaagctgatcaacgagaaaaaggaggatggcaaggtgttttggcagaatctggctggctacaagagacaggaagccctgagaccatacctgagcagcgaggaagatcggaagaagggaaagaaattcgctcggtaccagctgggcgacctgctgctgcacctggaaaagaagcacggcgaggactggggaaaggtgtacgacgaggcctgggagcggattgacaagaaagtggaaggcctgagcaagcacatcaagctggaagaggaacggagaagcgaggacgcccagagcaaggccgccctgaccgactggctgcgggctaaggccagcttcgtgatcgagggcctgaaggaggccgacaaggacgagttctgcagatgcgagctgaagctgcagaagtggtacggggacctgcggggaaagcccttcgccatcgaagccgagaacagcatcctggacatcagcggcttcagcaagcagtacaactgtgccttcatctggcagaaggacggcgtgaagaagctgaacctgtacctgatcatcaactacttcaagggcggcaagctgcggttcaagaagatcaaacctgaagccttcgaagccaacagattctacaccgtgatcaacaaaaagagcggcgagatcgtgcccatggaggtgaacttcaacttcgacgaccccaacctgatcatcctgcctctggcctttggcaagagacagggcagagaattcatctggaacgacctgctgtccctggaaaccggcagcctgaagctggccaacggaagagtgatcgagaagacactgtacaacagaagaacccggcaggatgagcctgccctgttcgtggccctgaccttcgagcggcgggaggtcctggactcctccaatatcaaaccaatgaacctgatcggcgtggcaagaggcgaaaacatccccgccgtgatcgccctgaccgaccccgagggctgcccactgagccggtttaaggatagcctgggaaacccaacccacatcctgagaatcggcgagagctataaggagaagcagcggaccatccaggccaagaaggaggtggagcagcggagagccggcggctacagccggaagtacgccagcaaagccaagaatctggcagacgatatggtgagaaacaccgctagagatctgctgtactacgccgtgacccaggatgccatgctgatcttcgccaacctgagccggggcttcggccggcagggcaagcggaccttcatggccgagagacagtacacacggatggaggactggctgaccgccaagctggcctacgagggcctgagcaagacctacctgtccaagacactggcccagtacacctccaagacatgcagcaactgtgggtttaccatcaccagcgccgactacgacagggtgctggagaagctgaagaagacagcaacaggctggatgaccacaattaacggcaaggagctgaaggtggagggccagattacctactacaacagatacaagagacagaacgtagtcaaggacctgtccgtcgagctggatagactgagcgaagaatctgtgaacaacgacatctcctcctggacaaagggcagaagcggagaagctctgagcctcctgaagaaaagattctcccatagacccgtgcaggagaagttcgtgtgcctgaactgcggcttcgagacacacgcagccgagcaagccgccctgaacatcgccagatcctggctgttcctgcggagccaggagtacaagaaataccagacaaacaagacaaccggcaacaccgataagagagccttcgtcgagacctggcagtccttttaccggaagaagcttaaggaggtgtggaaacctgccgtgcggtctggcggatctggcggaggctccaccagccccaagaaaaagagaaaagtctaagctgccttctgcggggcttgccttctggccatgcccttcttctctcccttgcacctgtacctcttggtctttgaataaagcctgagtaggaaggctagcaaaaaaaaaaaaaaaaaaaaaaaaaaaaaaaaaaaaaaaaaaaaaaaaaaaaaaaaaaaaaaaaaaaaaaaaaaaaaaaa

SEQ ID NO: 9133 - RNA, 8787 nt, synthetic construct
  source 1..8787: mol_type = other RNA
aggaaataagagagaaaagaagagtaagaagaaatataagagccaccatggcccctaagaagaagcgtaaagtgagccggatgaaccacgaccaggagttcgacccccctaaggtgtaccctcccgtccccgccgagaagagaaagcccatccgggtcctgagcctgttcgatggcatcgccaccggtctgctggtgctgaaggacctgggcatccaggtggataggtacattgcctccgaggtgtgcgaggactccatcaccgtgggaatggtgcgtcatcagggcaagatcatgtacgtgggcgacgtgcggagcgtgacacagaagcatatccaggagtggggccctttcgacctggtgatcggcggcagcccttgcaatgacctgagcatcgtgaacccagcccggaagggcctgtacgagggaaccggcagactgttcttcgagttttacagactgctgcacgacgcccggcctaaggaaggcgacgaccggcccttcttttggctgttcgagaatgtggtggccatgggagtcagcgacaagcgggatattagccggttcctggagagcaaccccgtgatgatcgatgccaaggaagtgagcgccgcccaccgggccagatacttctggggcaatctgcctggcatgaacagacccctggccagcaccgtgaacgacaagctggagctgcaggagtgcctggagcacggccggatcgccaagttcagcaaggtgagaaccatcaccacccgaagcaacagcatcaaacaaggcaaggaccagcactttcctgtgttcatgaacgagaaggaggacatcctgtggtgtaccgagatggagagagtgttcgggttcccagtccactacacagatgtcagcaacatgtctagactggccagacagagactgctgggaagaagctggtccgtccctgtgatcagacacctgttcgcccctctgaaggagtacttcgcctgcgtgagcagcggcaacagcaacgccaacagccggggccccagcttctctagcggcctggtgccactgtccctgagagggagccacatgggccccatggagatctacaaaaccgtgagcgcctggaagcggcagcctgtgcgcgtgctgagcctgtttcggaatatcgataaagtcctgaaaagcctgggattcctggagagcggctctggctccggcggtggcaccctgaagtacgtggaggatgtgacaaacgtggtcagacgggatgtggagaagtggggccccttcgatctggtgtacggcagcacccaacccctgggcagctcttgtgaccggtgccctggctggtacatgtttcagttccaccggatcctgcagtacgccctgccgagacaggagtcccagcggccattcttttggattttcatggacaacttgctgctgaccgaggatgaccaggaaactaccactcggttcctgcagaccgaagccgtgaccctgcaggacgtgagaggccgggactaccagaacgccatgcgggtgtggtccaacatccctggactgaaaagcaagcacgcacctctgacccctaaagaagaggagtacctgcaggcccaggtgcggagcagaagcaagctggacgcccctaaggtggatctgctggtgaagaattgcctcctgcccctgagagagtacttcaagtatttcagccagaatagtctgcccctgggaggcagcggcggcggcaccctggagagcgtgaccttccaggacgtggccgtggacttcacccaggaggagtgggccctgctggacaccagccagaggaccctgttcagggaggtgatgctggagaacatcagccacctggtgagcgtgggcaaccagctgtacaagagcgacgtgatcagccacctggagcagggcgagcagctgagcagggagggcctgggcttcctgcagggccagagccccgtgatcagcgacaggggcggcccaagcagcggcgcccctcctcccagcggcggcaggcggcccaagcagcggcgcccctcctcccagcggcggcagcccagccggctccccaacctctaccgaggagggcacctctgagtccgccacccccgagagcggccctggcacctccaccgagcccagcgagggcagcgcacccggcagccctgccggcagccccacctccacagaggagggaaccagcaccgagcccagcgaaggcagcgccccaggcaccagcaccgagcctagtgagcaggagattaaacggatcaacaagatcagaagaagacttgtgaaagacagcaacaccaagaaggccggcaagacaggccccatgaaaaccctgctggttagagtgatgacacccgatctgagagagcggctggaaaacctgagaaagaagcctgaaaatatcccccagcccatcagcaatacatctagagccaacctgaataagctgctgaccgattacaccgaaatgaagaaggcgatcctgcatgtgtactgggaagagttccagaaggaccctgtgggcctgatgagccgggtggcccagcctgccagcaagaagatcgatcagaacaagctgaaacctgagatggacgagaagggcaacctgaccaccgccggctttgcctgctctcagtgtggccagcccctgttcgtgtacaagctggagcaggtgtctgagaagggcaaggcttacaccaactacttcggacggtgcaatgtggccgagcacgaaaagctgatcctgctggcccagctgaagcccgagaaggatagcgacgaagccgtgacatatagcctgggaaagtttgggcagagggccctggatttctacagcattcatgtgaccaaggagtccacccaccccgtgaagcccctggcccagatcgccggaaacagatacgcctccggacctgtgggaaaggccctgagcgacgcatgtatgggcacaatcgcctccttcctgtctaagtaccaggacatcatcatcgaacaccagaaggtggtgaagggcaaccagaagagactggagagcctgcgggagctggccggcaaggaaaacctggaataccctagcgtgaccctgccacctcagcctcacaccaaggagggcgttgatgcctacaacgaagtgatcgcccgggtgcgaatgtgggtgaacctgaacctgtggcagaagctgaagctaagcagagatgatgccaagcctctgctgagactgaagggattcccttcctttcctctggtcgagagacaggccaacgaagtggactggtgggacatggtgtgtaacgtgaagaagctgatcaacgagaaaaaggaggatggcaaggtgttttggcagaatctggctggctacaagagacaggaagccctgagaccatacctgagcagcgaggaagatcggaagaagggaaagaaattcgctcggtaccagctgggcgacctgctgctgcacctggaaaagaagcacggcgaggactggggaaaggtgtacgacgaggcctgggagcggattgacaagaaagtggaaggcctgagcaagcacatcaagctggaagaggaacggagaagcgaggacgcccagagcaaggccgccctgaccgactggctgcgggctaaggccagcttcgtgatcgagggcctgaaggaggccgacaaggacgagttctgcagatgcgagctgaagctgcagaagtggtacggggacctgcggggaaagcccttcgccatcgaagccgagaacagcatcctggacatcagcggcttcagcaagcagtacaactgtgccttcatctggcagaaggacggcgtgaagaagctgaacctgtacctgatcatcaactacttcaagggcggcaagctgcggttcaagaagatcaaacctgaagccttcgaagccaacagattctacaccgtgatcaacaaaaagagcggcgagatcgtgcccatggaggtgaacttcaacttcgacgaccccaacctgatcatcctgcctctggcctttggcaagagacagggcagagaattcatctggaacgacctgctgtccctggaaaccggcagcctgaagctggccaacggaagagtgatcgagaagacactgtacaacagaagaacccggcaggatgagcctgccctgttcgtggccctgaccttcgagcggcgggaggtcctggactcctccaatatcaaaccaatgaacctgatcggcgtggcaagaggcgaaaacatccccgccgtgatcgccctgaccgaccccgagggctgcccactgagccggtttaaggatagcctgggaaacccaacccacatcctgagaatcggcgagagctataaggagaagcagcggaccatccaggccaagaaggaggtggagcagcggagagccggcggctacagccggaagtacgccagcaaagccaagaatctggcagacgatatggtgagaaacaccgctagagatctgctgtactacgccgtgacccaggatgccatgctgatcttcgccaacctgagccggggcttcggccggcagggcaagcggaccttcatggccgagagacagtacacacggatggaggactggctgaccgccaagctggcctacgagggcctgagcaagacctacctgtccaagacactggcccagtacacctccaagacatgcagcaactgtgggtttaccatcaccagcgccgactacgacagggtgctggagaagctgaagaagacagcaacaggctggatgaccacaattaacggcaaggagctgaaggtggagggccagattacctactacaacagatacaagagacagaacgtagtcaaggacctgtccgtcgagctggatagactgagcgaagaatctgtgaacaacgacatctcctcctggacaaagggcagaagcggagaagctctgagcctcctgaagaaaagattctcccatagacccgtgcaggagaagttcgtgtgcctgaactgcggcttcgagacacacgcagccgagcaagccgccctgaacatcgccagatcctggctgttcctgcggagccaggagtacaagaaataccagacaaacaagacaaccggcaacaccgataagagagccttcgtcgagacctggcagtccttttaccggaagaagcttaaggaggtgtggaaacctgccgtgcggtctggcggatctggcggaggctccaccagccccaagaaaaagagaaaagtctaagctgccttctgcggggcttgccttctggccatgcccttcttctctcccttgcacctgtacctcttggtctttgaataaagcctgagtaggaaggctagcaaaaaaaaaaaaaaaaaaaaaaaaaaaaaaaaaaaaaaaaaaaaaaaaaaaaaaaaaaaaaaaaaaaaaaaaaaaaaaaagcccagccggctccccaacctctaccgaggagggcacctctgagtccgccacccccgagagcggccctggcacctccaccgagcccagcgagggcagcgcacccggcagccctgccggcagccccacctccacagaggagggaaccagcaccgagcccagcgaaggcagcgccccaggcaccagcaccgagcctagtgagcaggagattaaacggatcaacaagatcagaagaagacttgtgaaagacagcaacaccaagaaggccggcaagacaggccccatgaaaaccctgctggttagagtgatgacacccgatctgagagagcggctggaaaacctgagaaagaagcctgaaaatatcccccagcccatcagcaatacatctagagccaacctgaataagctgctgaccgattacaccgaaatgaagaaggcgatcctgcatgtgtactgggaagagttccagaaggaccctgtgggcctgatgagccgggtggcccagcctgccagcaagaagatcgatcagaacaagctgaaacctgagatggacgagaagggcaacctgaccaccgccggctttgcctgctctcagtgtggccagcccctgttcgtgtacaagctggagcaggtgtctgagaagggcaaggcttacaccaactacttcggacggtgcaatgtggccgagcacgaaaagctgatcctgctggcccagctgaagcccgagaaggatagcgacgaagccgtgacatatagcctgggaaagtttgggcagagggccctggatttctacagcattcatgtgaccaaggagtccacccaccccgtgaagcccctggcccagatcgccggaaacagatacgcctccggacctgtgggaaaggccctgagcgacgcatgtatgggcacaatcgcctccttcctgtctaagtaccaggacatcatcatcgaacaccagaaggtggtgaagggcaaccagaagagactggagagcctgcgggagctggccggcaaggaaaacctggaataccctagcgtgaccctgccacctcagcctcacaccaaggagggcgttgatgcctacaacgaagtgatcgcccgggtgcgaatgtgggtgaacctgaacctgtggcagaagctgaagctaagcagagatgatgccaagcctctgctgagactgaagggattcccttcctttcctctggtcgagagacaggccaacgaagtggactggtgggacatggtgtgtaacgtgaagaagctgatcaacgagaaaaaggaggatggcaaggtgttttggcagaatctggctggctacaagagacaggaagccctgagaccatacctgagcagcgaggaagatcggaagaagggaaagaaattcgctcggtaccagctgggcgacctgctgctgcacctggaaaagaagcacggcgaggactggggaaaggtgtacgacgaggcctgggagcggattgacaagaaagtggaaggcctgagcaagcacatcaagctggaagaggaacggagaagcgaggacgcccagagcaaggccgccctgaccgactggctgcgggctaaggccagcttcgtgatcgagggcctgaaggaggccgacaaggacgagttctgcagatgcgagctgaagctgcagaagtggtacggggacctgcggggaaagcccttcgccatcgaagccgagaacagcatcctggacatcagcggcttcagcaagcagtacaactgtgccttcatctggcagaaggacggcgtgaagaagctgaacctgtacctgatcatcaactacttcaagggcggcaagctgcggttcaagaagatcaaacctgaagccttcgaagccaacagattctacaccgtgatcaacaaaaagagcggcgagatcgtgcccatggaggtgaacttcaacttcgacgaccccaacctgatcatcctgcctctggcctttggcaagagacagggcagagaattcatctggaacgacctgctgtccctggaaaccggcagcctgaagctggccaacggaagagtgatcgagaagacactgtacaacagaagaacccggcaggatgagcctgccctgttcgtggccctgaccttcgagcggcgggaggtcctggactcctccaatatcaaaccaatgaacctgatcggcgtggcaagaggcgaaaacatccccgccgtgatcgccctgaccgaccccgagggctgcccactgagccggtttaaggatagcctgggaaacccaacccacatcctgagaatcggcgagagctataaggagaagcagcggaccatccaggccaagaaggaggtggagcagcggagagccggcggctacagccggaagtacgccagcaaagccaagaatctggcagacgatatggtgagaaacaccgctagagatctgctgtactacgccgtgacccaggatgccatgctgatcttcgccaacctgagccggggcttcggccggcagggcaagcggaccttcatggccgagagacagtacacacggatggaggactggctgaccgccaagctggcctacgagggcctgagcaagacctacctgtccaagacactggcccagtacacctccaagacatgcagcaactgtgggtttaccatcaccagcgccgactacgacagggtgctggagaagctgaagaagacagcaacaggctggatgaccacaattaacggcaaggagctgaaggtggagggccagattacctactacaacagatacaagagacagaacgtagtcaaggacctgtccgtcgagctggatagactgagcgaagaatctgtgaacaacgacatctcctcctggacaaagggcagaagcggagaagctctgagcctcctgaagaaaagattctcccatagacccgtgcaggagaagttcgtgtgcctgaactgcggcttcgagacacacgcagccgagcaagccgccctgaacatcgccagatcctggctgttcctgcggagccaggagtacaagaaataccagacaaacaagacaaccggcaacaccgataagagagccttcgtcgagacctggcagtccttttaccggaagaagcttaaggaggtgtggaaacctgccgtgcggtctggcggatctggcggaggctccaccagccccaagaaaaagagaaaagtctaagctgccttctgcggggcttgccttctggccatgcccttcttctctcccttgcacctgtacctcttggtctttgaataaagcctgagtaggaaggctagcaaaaaaaaaaaaaaaaaaaaaaaaaaaaaaaaaaaaaaaaaaaaaaaaaaaaaaaaaaaaaaaaaaaaaaaaaaaaaaaa

SEQ ID NO: 9134 - RNA, 8787 nt, synthetic construct
  source 1..8787: mol_type = other RNA
aggaaataagagagaaaagaagagtaagaagaaatataagagccaccatggcccctaagaagaagcgtaaagtgagccggatgaaccacgaccaggagttcgacccccctaaggtgtaccctcccgtccccgccgagaagagaaagcccatccgggtcctgagcctgttcgatggcatcgccaccggtctgctggtgctgaaggacctgggcatccaggtggataggtacattgcctccgaggtgtgcgaggactccatcaccgtgggaatggtgcgtcatcagggcaagatcatgtacgtgggcgacgtgcggagcgtgacacagaagcatatccaggagtggggccctttcgacctggtgatcggcggcagcccttgcaatgacctgagcatcgtgaacccagcccggaagggcctgtacgagggaaccggcagactgttcttcgagttttacagactgctgcacgacgcccggcctaaggaaggcgacgaccggcccttcttttggctgttcgagaatgtggtggccatgggagtcagcgacaagcgggatattagccggttcctggagagcaaccccgtgatgatcgatgccaaggaagtgagcgccgcccaccgggccagatacttctggggcaatctgcctggcatgaacagacccctggccagcaccgtgaacgacaagctggagctgcaggagtgcctggagcacggccggatcgccaagttcagcaaggtgagaaccatcaccacccgaagcaacagcatcaaacaaggcaaggaccagcactttcctgtgttcatgaacgagaaggaggacatcctgtggtgtaccgagatggagagagtgttcgggttcccagtccactacacagatgtcagcaacatgtctagactggccagacagagactgctgggaagaagctggtccgtccctgtgatcagacacctgttcgcccctctgaaggagtacttcgcctgcgtgagcagcggcaacagcaacgccaacagccggggccccagcttctctagcggcctggtgccactgtccctgagagggagccacatgggccccatggagatctacaaaaccgtgagcgcctggaagcggcagcctgtgcgcgtgctgagcctgtttcggaatatcgataaagtcctgaaaagcctgggattcctggagagcggctctggctccggcggtggcaccctgaagtacgtggaggatgtgacaaacgtggtcagacgggatgtggagaagtggggccccttcgatctggtgtacggcagcacccaacccctgggcagctcttgtgaccggtgccctggctggtacatgtttcagttccaccggatcctgcagtacgccctgccgagacaggagtcccagcggccattcttttggattttcatggacaacttgctgctgaccgaggatgaccaggaaactaccactcggttcctgcagaccgaagccgtgaccctgcaggacgtgagaggccgggactaccagaacgccatgcgggtgtggtccaacatccctggactgaaaagcaagcacgcacctctgacccctaaagaagaggagtacctgcaggcccaggtgcggagcagaagcaagctggacgcccctaaggtggatctgctggtgaagaattgcctcctgcccctgagagagtacttcaagtatttcagccagaatagtctgcccctgggaggcagcggcggcggccaccaggaggtggtgaccttcgaggacgtggccgtgtacttcacccagaccgagtgggccggcctgagccccgcccagagggccctgtacaggagcgtgatgctggagatctacggcaacctgaccagcctgggctaccccgtgcccaagcccgccctggtgagcctgctggagaggggcgacctgcccgtgggcctggagacccaggacaacccccccgcccagggcaccagggacatctacggcggcccaagcagcggcgcccctcctcccagcggcggcaggcggcccaagcagcggcgcccctcctcccagcggcggcagcccagccggctccccaacctctaccgaggagggcacctctgagtccgccacccccgagagcggccctggcacctccaccgagcccagcgagggcagcgcacccggcagccctgccggcagccccacctccacagaggagggaaccagcaccgagcccagcgaaggcagcgccccaggcaccagcaccgagcctagtgagcaggagattaaacggatcaacaagatcagaagaagacttgtgaaagacagcaacaccaagaaggccggcaagacaggccccatgaaaaccctgctggttagagtgatgacacccgatctgagagagcggctggaaaacctgagaaagaagcctgaaaatatcccccagcccatcagcaatacatctagagccaacctgaataagctgctgaccgattacaccgaaatgaagaaggcgatcctgcatgtgtactgggaagagttccagaaggaccctgtgggcctgatgagccgggtggcccagcctgccagcaagaagatcgatcagaacaagctgaaacctgagatggacgagaagggcaacctgaccaccgccggctttgcctgctctcagtgtggccagcccctgttcgtgtacaagctggagcaggtgtctgagaagggcaaggcttacaccaactacttcggacggtgcaatgtggccgagcacgaaaagctgatcctgctggcccagctgaagcccgagaaggatagcgacgaagccgtgacatatagcctgggaaagtttgggcagagggccctggatttctacagcattcatgtgaccaaggagtccacccaccccgtgaagcccctggcccagatcgccggaaacagatacgcctccggacctgtgggaaaggccctgagcgacgcatgtatgggcacaatcgcctccttcctgtctaagtaccaggacatcatcatcgaacaccagaaggtggtgaagggcaaccagaagagactggagagcctgcgggagctggccggcaaggaaaacctggaataccctagcgtgaccctgccacctcagcctcacaccaaggagggcgttgatgcctacaacgaagtgatcgcccgggtgcgaatgtgggtgaacctgaacctgtggcagaagctgaagctaagcagagatgatgccaagcctctgctgagactgaagggattcccttcctttcctctggtcgagagacaggccaacgaagtggactggtgggacatggtgtgtaacgtgaagaagctgatcaacgagaaaaaggaggatggcaaggtgttttggcagaatctggctggctacaagagacaggaagccctgagaccatacctgagcagcgaggaagatcggaagaagggaaagaaattcgctcggtaccagctgggcgacctgctgctgcacctggaaaagaagcacggcgaggactggggaaaggtgtacgacgaggcctgggagcggattgacaagaaagtggaaggcctgagcaagcacatcaagctggaagaggaacggagaagcgaggacgcccagagcaaggccgccctgaccgactggctgcgggctaaggccagcttcgtgatcgagggcctgaaggaggccgacaaggacgagttctgcagatgcgagctgaagctgcagaagtggtacggggacctgcggggaaagcccttcgccatcgaagccgagaacagcatcctggacatcagcggcttcagcaagcagtacaactgtgccttcatctggcagaaggacggcgtgaagaagctgaacctgtacctgatcatcaactacttcaagggcggcaagctgcggttcaagaagatcaaacctgaagccttcgaagccaacagattctacaccgtgatcaacaaaaagagcggcgagatcgtgcccatggaggtgaacttcaacttcgacgaccccaacctgatcatcctgcctctggcctttggcaagagacagggcagagaattcatctggaacgacctgctgtccctggaaaccggcagcctgaagctggccaacggaagagtgatcgagaagacactgtacaacagaagaacccggcaggatgagcctgccctgttcgtggccctgaccttcgagcggcgggaggtcctggactcctccaatatcaaaccaatgaacctgatcggcgtggcaagaggcgaaaacatccccgccgtgatcgccctgaccgaccccgagggctgcccactgagccggtttaaggatagcctgggaaacccaacccacatcctgagaatcggcgagagctataaggagaagcagcggaccatccaggccaagaaggaggtggagcagcggagagccggcggctacagccggaagtacgccagcaaagccaagaatctggcagacgatatggtgagaaacaccgctagagatctgctgtactacgccgtgacccaggatgccatgctgatcttcgccaacctgagccggggcttcggccggcagggcaagcggaccttcatggccgagagacagtacacacggatggaggactggctgaccgccaagctggcctacgagggcctgagcaagacctacctgtccaagacactggcccagtacacctccaagacatgcagcaactgtgggtttaccatcaccagcgccgactacgacagggtgctggagaagctgaagaagacagcaacaggctggatgaccacaattaacggcaaggagctgaaggtggagggccagattacctactacaacagatacaagagacagaacgtagtcaaggacctgtccgtcgagctggatagactgagcgaagaatctgtgaacaacgacatctcctcctggacaaagggcagaagcggagaagctctgagcctcctgaagaaaagattctcccatagacccgtgcaggagaagttcgtgtgcctgaactgcggcttcgagacacacgcagccgagcaagccgccctgaacatcgccagatcctggctgttcctgcggagccaggagtacaagaaataccagacaaacaagacaaccggcaacaccgataagagagccttcgtcgagacctggcagtccttttaccggaagaagcttaaggaggtgtggaaacctgccgtgcggtctggcggatctggcggaggctccaccagccccaagaaaaagagaaaagtctaagctgccttctgcggggcttgccttctggccatgcccttcttctctcccttgcacctgtacctcttggtctttgaataaagcctgagtaggaaggctagcaaaaaaaaaaaaaaaaaaaaaaaaaaaaaaaaaaaaaaaaaaaaaaaaaaaaaaaaaaaaaaaaaaaaaaaaaaaaaaaagcccagccggctccccaacctctaccgaggagggcacctctgagtccgccacccccgagagcggccctggcacctccaccgagcccagcgagggcagcgcacccggcagccctgccggcagccccacctccacagaggagggaaccagcaccgagcccagcgaaggcagcgccccaggcaccagcaccgagcctagtgagcaggagattaaacggatcaacaagatcagaagaagacttgtgaaagacagcaacaccaagaaggccggcaagacaggccccatgaaaaccctgctggttagagtgatgacacccgatctgagagagcggctggaaaacctgagaaagaagcctgaaaatatcccccagcccatcagcaatacatctagagccaacctgaataagctgctgaccgattacaccgaaatgaagaaggcgatcctgcatgtgtactgggaagagttccagaaggaccctgtgggcctgatgagccgggtggcccagcctgccagcaagaagatcgatcagaacaagctgaaacctgagatggacgagaagggcaacctgaccaccgccggctttgcctgctctcagtgtggccagcccctgttcgtgtacaagctggagcaggtgtctgagaagggcaaggcttacaccaactacttcggacggtgcaatgtggccgagcacgaaaagctgatcctgctggcccagctgaagcccgagaaggatagcgacgaagccgtgacatatagcctgggaaagtttgggcagagggccctggatttctacagcattcatgtgaccaaggagtccacccaccccgtgaagcccctggcccagatcgccggaaacagatacgcctccggacctgtgggaaaggccctgagcgacgcatgtatgggcacaatcgcctccttcctgtctaagtaccaggacatcatcatcgaacaccagaaggtggtgaagggcaaccagaagagactggagagcctgcgggagctggccggcaaggaaaacctggaataccctagcgtgaccctgccacctcagcctcacaccaaggagggcgttgatgcctacaacgaagtgatcgcccgggtgcgaatgtgggtgaacctgaacctgtggcagaagctgaagctaagcagagatgatgccaagcctctgctgagactgaagggattcccttcctttcctctggtcgagagacaggccaacgaagtggactggtgggacatggtgtgtaacgtgaagaagctgatcaacgagaaaaaggaggatggcaaggtgttttggcagaatctggctggctacaagagacaggaagccctgagaccatacctgagcagcgaggaagatcggaagaagggaaagaaattcgctcggtaccagctgggcgacctgctgctgcacctggaaaagaagcacggcgaggactggggaaaggtgtacgacgaggcctgggagcggattgacaagaaagtggaaggcctgagcaagcacatcaagctggaagaggaacggagaagcgaggacgcccagagcaaggccgccctgaccgactggctgcgggctaaggccagcttcgtgatcgagggcctgaaggaggccgacaaggacgagttctgcagatgcgagctgaagctgcagaagtggtacggggacctgcggggaaagcccttcgccatcgaagccgagaacagcatcctggacatcagcggcttcagcaagcagtacaactgtgccttcatctggcagaaggacggcgtgaagaagctgaacctgtacctgatcatcaactacttcaagggcggcaagctgcggttcaagaagatcaaacctgaagccttcgaagccaacagattctacaccgtgatcaacaaaaagagcggcgagatcgtgcccatggaggtgaacttcaacttcgacgaccccaacctgatcatcctgcctctggcctttggcaagagacagggcagagaattcatctggaacgacctgctgtccctggaaaccggcagcctgaagctggccaacggaagagtgatcgagaagacactgtacaacagaagaacccggcaggatgagcctgccctgttcgtggccctgaccttcgagcggcgggaggtcctggactcctccaatatcaaaccaatgaacctgatcggcgtggcaagaggcgaaaacatccccgccgtgatcgccctgaccgaccccgagggctgcccactgagccggtttaaggatagcctgggaaacccaacccacatcctgagaatcggcgagagctataaggagaagcagcggaccatccaggccaagaaggaggtggagcagcggagagccggcggctacagccggaagtacgccagcaaagccaagaatctggcagacgatatggtgagaaacaccgctagagatctgctgtactacgccgtgacccaggatgccatgctgatcttcgccaacctgagccggggcttcggccggcagggcaagcggaccttcatggccgagagacagtacacacggatggaggactggctgaccgccaagctggcctacgagggcctgagcaagacctacctgtccaagacactggcccagtacacctccaagacatgcagcaactgtgggtttaccatcaccagcgccgactacgacagggtgctggagaagctgaagaagacagcaacaggctggatgaccacaattaacggcaaggagctgaaggtggagggccagattacctactacaacagatacaagagacagaacgtagtcaaggacctgtccgtcgagctggatagactgagcgaagaatctgtgaacaacgacatctcctcctggacaaagggcagaagcggagaagctctgagcctcctgaagaaaagattctcccatagacccgtgcaggagaagttcgtgtgcctgaactgcggcttcgagacacacgcagccgagcaagccgccctgaacatcgccagatcctggctgttcctgcggagccaggagtacaagaaataccagacaaacaagacaaccggcaacaccgataagagagccttcgtcgagacctggcagtccttttaccggaagaagcttaaggaggtgtggaaacctgccgtgcggtctggcggatctggcggaggctccaccagccccaagaaaaagagaaaagtctaagctgccttctgcggggcttgccttctggccatgcccttcttctctcccttgcacctgtacctcttggtctttgaataaagcctgagtaggaaggctagcaaaaaaaaaaaaaaaaaaaaaaaaaaaaaaaaaaaaaaaaaaaaaaaaaaaaaaaaaaaaaaaaaaaaaaaaaaaaaaaa

SEQ ID NO: 9135 - RNA, 8787 nt, synthetic construct
  source 1..8787: mol_type = other RNA
aggaaataagagagaaaagaagagtaagaagaaatataagagccaccatggcccctaagaagaagcgtaaagtgagccggatgaaccacgaccaggagttcgacccccctaaggtgtaccctcccgtccccgccgagaagagaaagcccatccgggtcctgagcctgttcgatggcatcgccaccggtctgctggtgctgaaggacctgggcatccaggtggataggtacattgcctccgaggtgtgcgaggactccatcaccgtgggaatggtgcgtcatcagggcaagatcatgtacgtgggcgacgtgcggagcgtgacacagaagcatatccaggagtggggccctttcgacctggtgatcggcggcagcccttgcaatgacctgagcatcgtgaacccagcccggaagggcctgtacgagggaaccggcagactgttcttcgagttttacagactgctgcacgacgcccggcctaaggaaggcgacgaccggcccttcttttggctgttcgagaatgtggtggccatgggagtcagcgacaagcgggatattagccggttcctggagagcaaccccgtgatgatcgatgccaaggaagtgagcgccgcccaccgggccagatacttctggggcaatctgcctggcatgaacagacccctggccagcaccgtgaacgacaagctggagctgcaggagtgcctggagcacggccggatcgccaagttcagcaaggtgagaaccatcaccacccgaagcaacagcatcaaacaaggcaaggaccagcactttcctgtgttcatgaacgagaaggaggacatcctgtggtgtaccgagatggagagagtgttcgggttcccagtccactacacagatgtcagcaacatgtctagactggccagacagagactgctgggaagaagctggtccgtccctgtgatcagacacctgttcgcccctctgaaggagtacttcgcctgcgtgagcagcggcaacagcaacgccaacagccggggccccagcttctctagcggcctggtgccactgtccctgagagggagccacatgggccccatggagatctacaaaaccgtgagcgcctggaagcggcagcctgtgcgcgtgctgagcctgtttcggaatatcgataaagtcctgaaaagcctgggattcctggagagcggctctggctccggcggtggcaccctgaagtacgtggaggatgtgacaaacgtggtcagacgggatgtggagaagtggggccccttcgatctggtgtacggcagcacccaacccctgggcagctcttgtgaccggtgccctggctggtacatgtttcagttccaccggatcctgcagtacgccctgccgagacaggagtcccagcggccattcttttggattttcatggacaacttgctgctgaccgaggatgaccaggaaactaccactcggttcctgcagaccgaagccgtgaccctgcaggacgtgagaggccgggactaccagaacgccatgcgggtgtggtccaacatccctggactgaaaagcaagcacgcacctctgacccctaaagaagaggagtacctgcaggcccaggtgcggagcagaagcaagctggacgcccctaaggtggatctgctggtgaagaattgcctcctgcccctgagagagtacttcaagtatttcagccagaatagtctgcccctgggaggcagcggcggcggcctggacgcccccgtgaccttcgaggacgtggccgtgtacttcagcgagaacgagtggacctgcctgacctgcccccagagggccctgtacagggacgtgatgctggagaactacggcgccgtggccagcctggccttcctgttccccaagcccgccctgatcagcaggctggagaggggcgaggccccctggtgcagcgccccccagggcgccctggacggcgagggctggaagggcgtgagcggcggcccaagcagcggcgcccctcctcccagcggcggcaggcggcccaagcagcggcgcccctcctcccagcggcggcagcccagccggctccccaacctctaccgaggagggcacctctgagtccgccacccccgagagcggccctggcacctccaccgagcccagcgagggcagcgcacccggcagccctgccggcagccccacctccacagaggagggaaccagcaccgagcccagcgaaggcagcgccccaggcaccagcaccgagcctagtgagcaggagattaaacggatcaacaagatcagaagaagacttgtgaaagacagcaacaccaagaaggccggcaagacaggccccatgaaaaccctgctggttagagtgatgacacccgatctgagagagcggctggaaaacctgagaaagaagcctgaaaatatcccccagcccatcagcaatacatctagagccaacctgaataagctgctgaccgattacaccgaaatgaagaaggcgatcctgcatgtgtactgggaagagttccagaaggaccctgtgggcctgatgagccgggtggcccagcctgccagcaagaagatcgatcagaacaagctgaaacctgagatggacgagaagggcaacctgaccaccgccggctttgcctgctctcagtgtggccagcccctgttcgtgtacaagctggagcaggtgtctgagaagggcaaggcttacaccaactacttcggacggtgcaatgtggccgagcacgaaaagctgatcctgctggcccagctgaagcccgagaaggatagcgacgaagccgtgacatatagcctgggaaagtttgggcagagggccctggatttctacagcattcatgtgaccaaggagtccacccaccccgtgaagcccctggcccagatcgccggaaacagatacgcctccggacctgtgggaaaggccctgagcgacgcatgtatgggcacaatcgcctccttcctgtctaagtaccaggacatcatcatcgaacaccagaaggtggtgaagggcaaccagaagagactggagagcctgcgggagctggccggcaaggaaaacctggaataccctagcgtgaccctgccacctcagcctcacaccaaggagggcgttgatgcctacaacgaagtgatcgcccgggtgcgaatgtgggtgaacctgaacctgtggcagaagctgaagctaagcagagatgatgccaagcctctgctgagactgaagggattcccttcctttcctctggtcgagagacaggccaacgaagtggactggtgggacatggtgtgtaacgtgaagaagctgatcaacgagaaaaaggaggatggcaaggtgttttggcagaatctggctggctacaagagacaggaagccctgagaccatacctgagcagcgaggaagatcggaagaagggaaagaaattcgctcggtaccagctgggcgacctgctgctgcacctggaaaagaagcacggcgaggactggggaaaggtgtacgacgaggcctgggagcggattgacaagaaagtggaaggcctgagcaagcacatcaagctggaagaggaacggagaagcgaggacgcccagagcaaggccgccctgaccgactggctgcgggctaaggccagcttcgtgatcgagggcctgaaggaggccgacaaggacgagttctgcagatgcgagctgaagctgcagaagtggtacggggacctgcggggaaagcccttcgccatcgaagccgagaacagcatcctggacatcagcggcttcagcaagcagtacaactgtgccttcatctggcagaaggacggcgtgaagaagctgaacctgtacctgatcatcaactacttcaagggcggcaagctgcggttcaagaagatcaaacctgaagccttcgaagccaacagattctacaccgtgatcaacaaaaagagcggcgagatcgtgcccatggaggtgaacttcaacttcgacgaccccaacctgatcatcctgcctctggcctttggcaagagacagggcagagaattcatctggaacgacctgctgtccctggaaaccggcagcctgaagctggccaacggaagagtgatcgagaagacactgtacaacagaagaacccggcaggatgagcctgccctgttcgtggccctgaccttcgagcggcgggaggtcctggactcctccaatatcaaaccaatgaacctgatcggcgtggcaagaggcgaaaacatccccgccgtgatcgccctgaccgaccccgagggctgcccactgagccggtttaaggatagcctgggaaacccaacccacatcctgagaatcggcgagagctataaggagaagcagcggaccatccaggccaagaaggaggtggagcagcggagagccggcggctacagccggaagtacgccagcaaagccaagaatctggcagacgatatggtgagaaacaccgctagagatctgctgtactacgccgtgacccaggatgccatgctgatcttcgccaacctgagccggggcttcggccggcagggcaagcggaccttcatggccgagagacagtacacacggatggaggactggctgaccgccaagctggcctacgagggcctgagcaagacctacctgtccaagacactggcccagtacacctccaagacatgcagcaactgtgggtttaccatcaccagcgccgactacgacagggtgctggagaagctgaagaagacagcaacaggctggatgaccacaattaacggcaaggagctgaaggtggagggccagattacctactacaacagatacaagagacagaacgtagtcaaggacctgtccgtcgagctggatagactgagcgaagaatctgtgaacaacgacatctcctcctggacaaagggcagaagcggagaagctctgagcctcctgaagaaaagattctcccatagacccgtgcaggagaagttcgtgtgcctgaactgcggcttcgagacacacgcagccgagcaagccgccctgaacatcgccagatcctggctgttcctgcggagccaggagtacaagaaataccagacaaacaagacaaccggcaacaccgataagagagccttcgtcgagacctggcagtccttttaccggaagaagcttaaggaggtgtggaaacctgccgtgcggtctggcggatctggcggaggctccaccagccccaagaaaaagagaaaagtctaagctgccttctgcggggcttgccttctggccatgcccttcttctctcccttgcacctgtacctcttggtctttgaataaagcctgagtaggaaggctagcaaaaaaaaaaaaaaaaaaaaaaaaaaaaaaaaaaaaaaaaaaaaaaaaaaaaaaaaaaaaaaaaaaaaaaaaaaaaaaaagcccagccggctccccaacctctaccgaggagggcacctctgagtccgccacccccgagagcggccctggcacctccaccgagcccagcgagggcagcgcacccggcagccctgccggcagccccacctccacagaggagggaaccagcaccgagcccagcgaaggcagcgccccaggcaccagcaccgagcctagtgagcaggagattaaacggatcaacaagatcagaagaagacttgtgaaagacagcaacaccaagaaggccggcaagacaggccccatgaaaaccctgctggttagagtgatgacacccgatctgagagagcggctggaaaacctgagaaagaagcctgaaaatatcccccagcccatcagcaatacatctagagccaacctgaataagctgctgaccgattacaccgaaatgaagaaggcgatcctgcatgtgtactgggaagagttccagaaggaccctgtgggcctgatgagccgggtggcccagcctgccagcaagaagatcgatcagaacaagctgaaacctgagatggacgagaagggcaacctgaccaccgccggctttgcctgctctcagtgtggccagcccctgttcgtgtacaagctggagcaggtgtctgagaagggcaaggcttacaccaactacttcggacggtgcaatgtggccgagcacgaaaagctgatcctgctggcccagctgaagcccgagaaggatagcgacgaagccgtgacatatagcctgggaaagtttgggcagagggccctggatttctacagcattcatgtgaccaaggagtccacccaccccgtgaagcccctggcccagatcgccggaaacagatacgcctccggacctgtgggaaaggccctgagcgacgcatgtatgggcacaatcgcctccttcctgtctaagtaccaggacatcatcatcgaacaccagaaggtggtgaagggcaaccagaagagactggagagcctgcgggagctggccggcaaggaaaacctggaataccctagcgtgaccctgccacctcagcctcacaccaaggagggcgttgatgcctacaacgaagtgatcgcccgggtgcgaatgtgggtgaacctgaacctgtggcagaagctgaagctaagcagagatgatgccaagcctctgctgagactgaagggattcccttcctttcctctggtcgagagacaggccaacgaagtggactggtgggacatggtgtgtaacgtgaagaagctgatcaacgagaaaaaggaggatggcaaggtgttttggcagaatctggctggctacaagagacaggaagccctgagaccatacctgagcagcgaggaagatcggaagaagggaaagaaattcgctcggtaccagctgggcgacctgctgctgcacctggaaaagaagcacggcgaggactggggaaaggtgtacgacgaggcctgggagcggattgacaagaaagtggaaggcctgagcaagcacatcaagctggaagaggaacggagaagcgaggacgcccagagcaaggccgccctgaccgactggctgcgggctaaggccagcttcgtgatcgagggcctgaaggaggccgacaaggacgagttctgcagatgcgagctgaagctgcagaagtggtacggggacctgcggggaaagcccttcgccatcgaagccgagaacagcatcctggacatcagcggcttcagcaagcagtacaactgtgccttcatctggcagaaggacggcgtgaagaagctgaacctgtacctgatcatcaactacttcaagggcggcaagctgcggttcaagaagatcaaacctgaagccttcgaagccaacagattctacaccgtgatcaacaaaaagagcggcgagatcgtgcccatggaggtgaacttcaacttcgacgaccccaacctgatcatcctgcctctggcctttggcaagagacagggcagagaattcatctggaacgacctgctgtccctggaaaccggcagcctgaagctggccaacggaagagtgatcgagaagacactgtacaacagaagaacccggcaggatgagcctgccctgttcgtggccctgaccttcgagcggcgggaggtcctggactcctccaatatcaaaccaatgaacctgatcggcgtggcaagaggcgaaaacatccccgccgtgatcgccctgaccgaccccgagggctgcccactgagccggtttaaggatagcctgggaaacccaacccacatcctgagaatcggcgagagctataaggagaagcagcggaccatccaggccaagaaggaggtggagcagcggagagccggcggctacagccggaagtacgccagcaaagccaagaatctggcagacgatatggtgagaaacaccgctagagatctgctgtactacgccgtgacccaggatgccatgctgatcttcgccaacctgagccggggcttcggccggcagggcaagcggaccttcatggccgagagacagtacacacggatggaggactggctgaccgccaagctggcctacgagggcctgagcaagacctacctgtccaagacactggcccagtacacctccaagacatgcagcaactgtgggtttaccatcaccagcgccgactacgacagggtgctggagaagctgaagaagacagcaacaggctggatgaccacaattaacggcaaggagctgaaggtggagggccagattacctactacaacagatacaagagacagaacgtagtcaaggacctgtccgtcgagctggatagactgagcgaagaatctgtgaacaacgacatctcctcctggacaaagggcagaagcggagaagctctgagcctcctgaagaaaagattctcccatagacccgtgcaggagaagttcgtgtgcctgaactgcggcttcgagacacacgcagccgagcaagccgccctgaacatcgccagatcctggctgttcctgcggagccaggagtacaagaaataccagacaaacaagacaaccggcaacaccgataagagagccttcgtcgagacctggcagtccttttaccggaagaagcttaaggaggtgtggaaacctgccgtgcggtctggcggatctggcggaggctccaccagccccaagaaaaagagaaaagtctaagctgccttctgcggggcttgccttctggccatgcccttcttctctcccttgcacctgtacctcttggtctttgaataaagcctgagtaggaaggctagcaaaaaaaaaaaaaaaaaaaaaaaaaaaaaaaaaaaaaaaaaaaaaaaaaaaaaaaaaaaaaaaaaaaaaaaaaaaaaaaa

SEQ ID NO: 9136 - RNA, 8787 nt, synthetic construct
  source 1..8787: mol_type = other RNA
aggaaataagagagaaaagaagagtaagaagaaatataagagccaccatggcccctaagaagaagcgtaaagtgagccggatgaaccacgaccaggagttcgacccccctaaggtgtaccctcccgtccccgccgagaagagaaagcccatccgggtcctgagcctgttcgatggcatcgccaccggtctgctggtgctgaaggacctgggcatccaggtggataggtacattgcctccgaggtgtgcgaggactccatcaccgtgggaatggtgcgtcatcagggcaagatcatgtacgtgggcgacgtgcggagcgtgacacagaagcatatccaggagtggggccctttcgacctggtgatcggcggcagcccttgcaatgacctgagcatcgtgaacccagcccggaagggcctgtacgagggaaccggcagactgttcttcgagttttacagactgctgcacgacgcccggcctaaggaaggcgacgaccggcccttcttttggctgttcgagaatgtggtggccatgggagtcagcgacaagcgggatattagccggttcctggagagcaaccccgtgatgatcgatgccaaggaagtgagcgccgcccaccgggccagatacttctggggcaatctgcctggcatgaacagacccctggccagcaccgtgaacgacaagctggagctgcaggagtgcctggagcacggccggatcgccaagttcagcaaggtgagaaccatcaccacccgaagcaacagcatcaaacaaggcaaggaccagcactttcctgtgttcatgaacgagaaggaggacatcctgtggtgtaccgagatggagagagtgttcgggttcccagtccactacacagatgtcagcaacatgtctagactggccagacagagactgctgggaagaagctggtccgtccctgtgatcagacacctgttcgcccctctgaaggagtacttcgcctgcgtgagcagcggcaacagcaacgccaacagccggggccccagcttctctagcggcctggtgccactgtccctgagagggagccacatgggccccatggagatctacaaaaccgtgagcgcctggaagcggcagcctgtgcgcgtgctgagcctgtttcggaatatcgataaagtcctgaaaagcctgggattcctggagagcggctctggctccggcggtggcaccctgaagtacgtggaggatgtgacaaacgtggtcagacgggatgtggagaagtggggccccttcgatctggtgtacggcagcacccaacccctgggcagctcttgtgaccggtgccctggctggtacatgtttcagttccaccggatcctgcagtacgccctgccgagacaggagtcccagcggccattcttttggattttcatggacaacttgctgctgaccgaggatgaccaggaaactaccactcggttcctgcagaccgaagccgtgaccctgcaggacgtgagaggccgggactaccagaacgccatgcgggtgtggtccaacatccctggactgaaaagcaagcacgcacctctgacccctaaagaagaggagtacctgcaggcccaggtgcggagcagaagcaagctggacgcccctaaggtggatctgctggtgaagaattgcctcctgcccctgagagagtacttcaagtatttcagccagaatagtctgcccctgggaggcagcggcggcggcatggccgccatgcccctgaaggcccagtaccaggagatggtgaccttcgaggacgtggccgtgcacttcaccaagaccgagtggaccggcctgagccccgcccagagggccctgtacaggagcgtgatgctggagaacttcggcaacctgaccgccctgggctaccccgtgcccaagcccgccctgatcagcctgctggagggcggcgacatggcctggggcctggaggcccaggacgaccccggcggcccaagcagcggcgcccctcctcccagcggcggcaggcggcccaagcagcggcgcccctcctcccagcggcggcagcccagccggctccccaacctctaccgaggagggcacctctgagtccgccacccccgagagcggccctggcacctccaccgagcccagcgagggcagcgcacccggcagccctgccggcagccccacctccacagaggagggaaccagcaccgagcccagcgaaggcagcgccccaggcaccagcaccgagcctagtgagcaggagattaaacggatcaacaagatcagaagaagacttgtgaaagacagcaacaccaagaaggccggcaagacaggccccatgaaaaccctgctggttagagtgatgacacccgatctgagagagcggctggaaaacctgagaaagaagcctgaaaatatcccccagcccatcagcaatacatctagagccaacctgaataagctgctgaccgattacaccgaaatgaagaaggcgatcctgcatgtgtactgggaagagttccagaaggaccctgtgggcctgatgagccgggtggcccagcctgccagcaagaagatcgatcagaacaagctgaaacctgagatggacgagaagggcaacctgaccaccgccggctttgcctgctctcagtgtggccagcccctgttcgtgtacaagctggagcaggtgtctgagaagggcaaggcttacaccaactacttcggacggtgcaatgtggccgagcacgaaaagctgatcctgctggcccagctgaagcccgagaaggatagcgacgaagccgtgacatatagcctgggaaagtttgggcagagggccctggatttctacagcattcatgtgaccaaggagtccacccaccccgtgaagcccctggcccagatcgccggaaacagatacgcctccggacctgtgggaaaggccctgagcgacgcatgtatgggcacaatcgcctccttcctgtctaagtaccaggacatcatcatcgaacaccagaaggtggtgaagggcaaccagaagagactggagagcctgcgggagctggccggcaaggaaaacctggaataccctagcgtgaccctgccacctcagcctcacaccaaggagggcgttgatgcctacaacgaagtgatcgcccgggtgcgaatgtgggtgaacctgaacctgtggcagaagctgaagctaagcagagatgatgccaagcctctgctgagactgaagggattcccttcctttcctctggtcgagagacaggccaacgaagtggactggtgggacatggtgtgtaacgtgaagaagctgatcaacgagaaaaaggaggatggcaaggtgttttggcagaatctggctggctacaagagacaggaagccctgagaccatacctgagcagcgaggaagatcggaagaagggaaagaaattcgctcggtaccagctgggcgacctgctgctgcacctggaaaagaagcacggcgaggactggggaaaggtgtacgacgaggcctgggagcggattgacaagaaagtggaaggcctgagcaagcacatcaagctggaagaggaacggagaagcgaggacgcccagagcaaggccgccctgaccgactggctgcgggctaaggccagcttcgtgatcgagggcctgaaggaggccgacaaggacgagttctgcagatgcgagctgaagctgcagaagtggtacggggacctgcggggaaagcccttcgccatcgaagccgagaacagcatcctggacatcagcggcttcagcaagcagtacaactgtgccttcatctggcagaaggacggcgtgaagaagctgaacctgtacctgatcatcaactacttcaagggcggcaagctgcggttcaagaagatcaaacctgaagccttcgaagccaacagattctacaccgtgatcaacaaaaagagcggcgagatcgtgcccatggaggtgaacttcaacttcgacgaccccaacctgatcatcctgcctctggcctttggcaagagacagggcagagaattcatctggaacgacctgctgtccctggaaaccggcagcctgaagctggccaacggaagagtgatcgagaagacactgtacaacagaagaacccggcaggatgagcctgccctgttcgtggccctgaccttcgagcggcgggaggtcctggactcctccaatatcaaaccaatgaacctgatcggcgtggcaagaggcgaaaacatccccgccgtgatcgccctgaccgaccccgagggctgcccactgagccggtttaaggatagcctgggaaacccaacccacatcctgagaatcggcgagagctataaggagaagcagcggaccatccaggccaagaaggaggtggagcagcggagagccggcggctacagccggaagtacgccagcaaagccaagaatctggcagacgatatggtgagaaacaccgctagagatctgctgtactacgccgtgacccaggatgccatgctgatcttcgccaacctgagccggggcttcggccggcagggcaagcggaccttcatggccgagagacagtacacacggatggaggactggctgaccgccaagctggcctacgagggcctgagcaagacctacctgtccaagacactggcccagtacacctccaagacatgcagcaactgtgggtttaccatcaccagcgccgactacgacagggtgctggagaagctgaagaagacagcaacaggctggatgaccacaattaacggcaaggagctgaaggtggagggccagattacctactacaacagatacaagagacagaacgtagtcaaggacctgtccgtcgagctggatagactgagcgaagaatctgtgaacaacgacatctcctcctggacaaagggcagaagcggagaagctctgagcctcctgaagaaaagattctcccatagacccgtgcaggagaagttcgtgtgcctgaactgcggcttcgagacacacgcagccgagcaagccgccctgaacatcgccagatcctggctgttcctgcggagccaggagtacaagaaataccagacaaacaagacaaccggcaacaccgataagagagccttcgtcgagacctggcagtccttttaccggaagaagcttaaggaggtgtggaaacctgccgtgcggtctggcggatctggcggaggctccaccagccccaagaaaaagagaaaagtctaagctgccttctgcggggcttgccttctggccatgcccttcttctctcccttgcacctgtacctcttggtctttgaataaagcctgagtaggaaggctagcaaaaaaaaaaaaaaaaaaaaaaaaaaaaaaaaaaaaaaaaaaaaaaaaaaaaaaaaaaaaaaaaaaaaaaaaaaaaaaaagcccagccggctccccaacctctaccgaggagggcacctctgagtccgccacccccgagagcggccctggcacctccaccgagcccagcgagggcagcgcacccggcagccctgccggcagccccacctccacagaggagggaaccagcaccgagcccagcgaaggcagcgccccaggcaccagcaccgagcctagtgagcaggagattaaacggatcaacaagatcagaagaagacttgtgaaagacagcaacaccaagaaggccggcaagacaggccccatgaaaaccctgctggttagagtgatgacacccgatctgagagagcggctggaaaacctgagaaagaagcctgaaaatatcccccagcccatcagcaatacatctagagccaacctgaataagctgctgaccgattacaccgaaatgaagaaggcgatcctgcatgtgtactgggaagagttccagaaggaccctgtgggcctgatgagccgggtggcccagcctgccagcaagaagatcgatcagaacaagctgaaacctgagatggacgagaagggcaacctgaccaccgccggctttgcctgctctcagtgtggccagcccctgttcgtgtacaagctggagcaggtgtctgagaagggcaaggcttacaccaactacttcggacggtgcaatgtggccgagcacgaaaagctgatcctgctggcccagctgaagcccgagaaggatagcgacgaagccgtgacatatagcctgggaaagtttgggcagagggccctggatttctacagcattcatgtgaccaaggagtccacccaccccgtgaagcccctggcccagatcgccggaaacagatacgcctccggacctgtgggaaaggccctgagcgacgcatgtatgggcacaatcgcctccttcctgtctaagtaccaggacatcatcatcgaacaccagaaggtggtgaagggcaaccagaagagactggagagcctgcgggagctggccggcaaggaaaacctggaataccctagcgtgaccctgccacctcagcctcacaccaaggagggcgttgatgcctacaacgaagtgatcgcccgggtgcgaatgtgggtgaacctgaacctgtggcagaagctgaagctaagcagagatgatgccaagcctctgctgagactgaagggattcccttcctttcctctggtcgagagacaggccaacgaagtggactggtgggacatggtgtgtaacgtgaagaagctgatcaacgagaaaaaggaggatggcaaggtgttttggcagaatctggctggctacaagagacaggaagccctgagaccatacctgagcagcgaggaagatcggaagaagggaaagaaattcgctcggtaccagctgggcgacctgctgctgcacctggaaaagaagcacggcgaggactggggaaaggtgtacgacgaggcctgggagcggattgacaagaaagtggaaggcctgagcaagcacatcaagctggaagaggaacggagaagcgaggacgcccagagcaaggccgccctgaccgactggctgcgggctaaggccagcttcgtgatcgagggcctgaaggaggccgacaaggacgagttctgcagatgcgagctgaagctgcagaagtggtacggggacctgcggggaaagcccttcgccatcgaagccgagaacagcatcctggacatcagcggcttcagcaagcagtacaactgtgccttcatctggcagaaggacggcgtgaagaagctgaacctgtacctgatcatcaactacttcaagggcggcaagctgcggttcaagaagatcaaacctgaagccttcgaagccaacagattctacaccgtgatcaacaaaaagagcggcgagatcgtgcccatggaggtgaacttcaacttcgacgaccccaacctgatcatcctgcctctggcctttggcaagagacagggcagagaattcatctggaacgacctgctgtccctggaaaccggcagcctgaagctggccaacggaagagtgatcgagaagacactgtacaacagaagaacccggcaggatgagcctgccctgttcgtggccctgaccttcgagcggcgggaggtcctggactcctccaatatcaaaccaatgaacctgatcggcgtggcaagaggcgaaaacatccccgccgtgatcgccctgaccgaccccgagggctgcccactgagccggtttaaggatagcctgggaaacccaacccacatcctgagaatcggcgagagctataaggagaagcagcggaccatccaggccaagaaggaggtggagcagcggagagccggcggctacagccggaagtacgccagcaaagccaagaatctggcagacgatatggtgagaaacaccgctagagatctgctgtactacgccgtgacccaggatgccatgctgatcttcgccaacctgagccggggcttcggccggcagggcaagcggaccttcatggccgagagacagtacacacggatggaggactggctgaccgccaagctggcctacgagggcctgagcaagacctacctgtccaagacactggcccagtacacctccaagacatgcagcaactgtgggtttaccatcaccagcgccgactacgacagggtgctggagaagctgaagaagacagcaacaggctggatgaccacaattaacggcaaggagctgaaggtggagggccagattacctactacaacagatacaagagacagaacgtagtcaaggacctgtccgtcgagctggatagactgagcgaagaatctgtgaacaacgacatctcctcctggacaaagggcagaagcggagaagctctgagcctcctgaagaaaagattctcccatagacccgtgcaggagaagttcgtgtgcctgaactgcggcttcgagacacacgcagccgagcaagccgccctgaacatcgccagatcctggctgttcctgcggagccaggagtacaagaaataccagacaaacaagacaaccggcaacaccgataagagagccttcgtcgagacctggcagtccttttaccggaagaagcttaaggaggtgtggaaacctgccgtgcggtctggcggatctggcggaggctccaccagccccaagaaaaagagaaaagtctaagctgccttctgcggggcttgccttctggccatgcccttcttctctcccttgcacctgtacctcttggtctttgaataaagcctgagtaggaaggctagcaaaaaaaaaaaaaaaaaaaaaaaaaaaaaaaaaaaaaaaaaaaaaaaaaaaaaaaaaaaaaaaaaaaaaaaaaaaaaaaa

SEQ ID NO: 9137 - RNA, 8787 nt, synthetic construct
  source 1..8787: mol_type = other RNA
aggaaataagagagaaaagaagagtaagaagaaatataagagccaccatggcccctaagaagaagcgtaaagtgagccggatgaaccacgaccaggagttcgacccccctaaggtgtaccctcccgtccccgccgagaagagaaagcccatccgggtcctgagcctgttcgatggcatcgccaccggtctgctggtgctgaaggacctgggcatccaggtggataggtacattgcctccgaggtgtgcgaggactccatcaccgtgggaatggtgcgtcatcagggcaagatcatgtacgtgggcgacgtgcggagcgtgacacagaagcatatccaggagtggggccctttcgacctggtgatcggcggcagcccttgcaatgacctgagcatcgtgaacccagcccggaagggcctgtacgagggaaccggcagactgttcttcgagttttacagactgctgcacgacgcccggcctaaggaaggcgacgaccggcccttcttttggctgttcgagaatgtggtggccatgggagtcagcgacaagcgggatattagccggttcctggagagcaaccccgtgatgatcgatgccaaggaagtgagcgccgcccaccgggccagatacttctggggcaatctgcctggcatgaacagacccctggccagcaccgtgaacgacaagctggagctgcaggagtgcctggagcacggccggatcgccaagttcagcaaggtgagaaccatcaccacccgaagcaacagcatcaaacaaggcaaggaccagcactttcctgtgttcatgaacgagaaggaggacatcctgtggtgtaccgagatggagagagtgttcgggttcccagtccactacacagatgtcagcaacatgtctagactggccagacagagactgctgggaagaagctggtccgtccctgtgatcagacacctgttcgcccctctgaaggagtacttcgcctgcgtgagcagcggcaacagcaacgccaacagccggggccccagcttctctagcggcctggtgccactgtccctgagagggagccacatgggccccatggagatctacaaaaccgtgagcgcctggaagcggcagcctgtgcgcgtgctgagcctgtttcggaatatcgataaagtcctgaaaagcctgggattcctggagagcggctctggctccggcggtggcaccctgaagtacgtggaggatgtgacaaacgtggtcagacgggatgtggagaagtggggccccttcgatctggtgtacggcagcacccaacccctgggcagctcttgtgaccggtgccctggctggtacatgtttcagttccaccggatcctgcagtacgccctgccgagacaggagtcccagcggccattcttttggattttcatggacaacttgctgctgaccgaggatgaccaggaaactaccactcggttcctgcagaccgaagccgtgaccctgcaggacgtgagaggccgggactaccagaacgccatgcgggtgtggtccaacatccctggactgaaaagcaagcacgcacctctgacccctaaagaagaggagtacctgcaggcccaggtgcggagcagaagcaagctggacgcccctaaggtggatctgctggtgaagaattgcctcctgcccctgagagagtacttcaagtatttcagccagaatagtctgcccctgggaggcagcggcggcggcagcgtgaccttcagggacgtgatcgtggacttcacccaggaggagtggcagcagctgaagcccgcccagaaggacctgtacagggacgtgatgatggaggtgtactggaacctggtgagcctggacgtggagaccaggcccgacgccaaggagagcgacccccaggaggacgactgggaggacaggcccagcgtggtggtgatcgccgagggccccaccaggaacggcgccaggagctacaccggcggcccaagcagcggcgcccctcctcccagcggcggcaggcggcccaagcagcggcgcccctcctcccagcggcggcagcccagccggctccccaacctctaccgaggagggcacctctgagtccgccacccccgagagcggccctggcacctccaccgagcccagcgagggcagcgcacccggcagccctgccggcagccccacctccacagaggagggaaccagcaccgagcccagcgaaggcagcgccccaggcaccagcaccgagcctagtgagcaggagattaaacggatcaacaagatcagaagaagacttgtgaaagacagcaacaccaagaaggccggcaagacaggccccatgaaaaccctgctggttagagtgatgacacccgatctgagagagcggctggaaaacctgagaaagaagcctgaaaatatcccccagcccatcagcaatacatctagagccaacctgaataagctgctgaccgattacaccgaaatgaagaaggcgatcctgcatgtgtactgggaagagttccagaaggaccctgtgggcctgatgagccgggtggcccagcctgccagcaagaagatcgatcagaacaagctgaaacctgagatggacgagaagggcaacctgaccaccgccggctttgcctgctctcagtgtggccagcccctgttcgtgtacaagctggagcaggtgtctgagaagggcaaggcttacaccaactacttcggacggtgcaatgtggccgagcacgaaaagctgatcctgctggcccagctgaagcccgagaaggatagcgacgaagccgtgacatatagcctgggaaagtttgggcagagggccctggatttctacagcattcatgtgaccaaggagtccacccaccccgtgaagcccctggcccagatcgccggaaacagatacgcctccggacctgtgggaaaggccctgagcgacgcatgtatgggcacaatcgcctccttcctgtctaagtaccaggacatcatcatcgaacaccagaaggtggtgaagggcaaccagaagagactggagagcctgcgggagctggccggcaaggaaaacctggaataccctagcgtgaccctgccacctcagcctcacaccaaggagggcgttgatgcctacaacgaagtgatcgcccgggtgcgaatgtgggtgaacctgaacctgtggcagaagctgaagctaagcagagatgatgccaagcctctgctgagactgaagggattcccttcctttcctctggtcgagagacaggccaacgaagtggactggtgggacatggtgtgtaacgtgaagaagctgatcaacgagaaaaaggaggatggcaaggtgttttggcagaatctggctggctacaagagacaggaagccctgagaccatacctgagcagcgaggaagatcggaagaagggaaagaaattcgctcggtaccagctgggcgacctgctgctgcacctggaaaagaagcacggcgaggactggggaaaggtgtacgacgaggcctgggagcggattgacaagaaagtggaaggcctgagcaagcacatcaagctggaagaggaacggagaagcgaggacgcccagagcaaggccgccctgaccgactggctgcgggctaaggccagcttcgtgatcgagggcctgaaggaggccgacaaggacgagttctgcagatgcgagctgaagctgcagaagtggtacggggacctgcggggaaagcccttcgccatcgaagccgagaacagcatcctggacatcagcggcttcagcaagcagtacaactgtgccttcatctggcagaaggacggcgtgaagaagctgaacctgtacctgatcatcaactacttcaagggcggcaagctgcggttcaagaagatcaaacctgaagccttcgaagccaacagattctacaccgtgatcaacaaaaagagcggcgagatcgtgcccatggaggtgaacttcaacttcgacgaccccaacctgatcatcctgcctctggcctttggcaagagacagggcagagaattcatctggaacgacctgctgtccctggaaaccggcagcctgaagctggccaacggaagagtgatcgagaagacactgtacaacagaagaacccggcaggatgagcctgccctgttcgtggccctgaccttcgagcggcgggaggtcctggactcctccaatatcaaaccaatgaacctgatcggcgtggcaagaggcgaaaacatccccgccgtgatcgccctgaccgaccccgagggctgcccactgagccggtttaaggatagcctgggaaacccaacccacatcctgagaatcggcgagagctataaggagaagcagcggaccatccaggccaagaaggaggtggagcagcggagagccggcggctacagccggaagtacgccagcaaagccaagaatctggcagacgatatggtgagaaacaccgctagagatctgctgtactacgccgtgacccaggatgccatgctgatcttcgccaacctgagccggggcttcggccggcagggcaagcggaccttcatggccgagagacagtacacacggatggaggactggctgaccgccaagctggcctacgagggcctgagcaagacctacctgtccaagacactggcccagtacacctccaagacatgcagcaactgtgggtttaccatcaccagcgccgactacgacagggtgctggagaagctgaagaagacagcaacaggctggatgaccacaattaacggcaaggagctgaaggtggagggccagattacctactacaacagatacaagagacagaacgtagtcaaggacctgtccgtcgagctggatagactgagcgaagaatctgtgaacaacgacatctcctcctggacaaagggcagaagcggagaagctctgagcctcctgaagaaaagattctcccatagacccgtgcaggagaagttcgtgtgcctgaactgcggcttcgagacacacgcagccgagcaagccgccctgaacatcgccagatcctggctgttcctgcggagccaggagtacaagaaataccagacaaacaagacaaccggcaacaccgataagagagccttcgtcgagacctggcagtccttttaccggaagaagcttaaggaggtgtggaaacctgccgtgcggtctggcggatctggcggaggctccaccagccccaagaaaaagagaaaagtctaagctgccttctgcggggcttgccttctggccatgcccttcttctctcccttgcacctgtacctcttggtctttgaataaagcctgagtaggaaggctagcaaaaaaaaaaaaaaaaaaaaaaaaaaaaaaaaaaaaaaaaaaaaaaaaaaaaaaaaaaaaaaaaaaaaaaaaaaaaaaaagcccagccggctccccaacctctaccgaggagggcacctctgagtccgccacccccgagagcggccctggcacctccaccgagcccagcgagggcagcgcacccggcagccctgccggcagccccacctccacagaggagggaaccagcaccgagcccagcgaaggcagcgccccaggcaccagcaccgagcctagtgagcaggagattaaacggatcaacaagatcagaagaagacttgtgaaagacagcaacaccaagaaggccggcaagacaggccccatgaaaaccctgctggttagagtgatgacacccgatctgagagagcggctggaaaacctgagaaagaagcctgaaaatatcccccagcccatcagcaatacatctagagccaacctgaataagctgctgaccgattacaccgaaatgaagaaggcgatcctgcatgtgtactgggaagagttccagaaggaccctgtgggcctgatgagccgggtggcccagcctgccagcaagaagatcgatcagaacaagctgaaacctgagatggacgagaagggcaacctgaccaccgccggctttgcctgctctcagtgtggccagcccctgttcgtgtacaagctggagcaggtgtctgagaagggcaaggcttacaccaactacttcggacggtgcaatgtggccgagcacgaaaagctgatcctgctggcccagctgaagcccgagaaggatagcgacgaagccgtgacatatagcctgggaaagtttgggcagagggccctggatttctacagcattcatgtgaccaaggagtccacccaccccgtgaagcccctggcccagatcgccggaaacagatacgcctccggacctgtgggaaaggccctgagcgacgcatgtatgggcacaatcgcctccttcctgtctaagtaccaggacatcatcatcgaacaccagaaggtggtgaagggcaaccagaagagactggagagcctgcgggagctggccggcaaggaaaacctggaataccctagcgtgaccctgccacctcagcctcacaccaaggagggcgttgatgcctacaacgaagtgatcgcccgggtgcgaatgtgggtgaacctgaacctgtggcagaagctgaagctaagcagagatgatgccaagcctctgctgagactgaagggattcccttcctttcctctggtcgagagacaggccaacgaagtggactggtgggacatggtgtgtaacgtgaagaagctgatcaacgagaaaaaggaggatggcaaggtgttttggcagaatctggctggctacaagagacaggaagccctgagaccatacctgagcagcgaggaagatcggaagaagggaaagaaattcgctcggtaccagctgggcgacctgctgctgcacctggaaaagaagcacggcgaggactggggaaaggtgtacgacgaggcctgggagcggattgacaagaaagtggaaggcctgagcaagcacatcaagctggaagaggaacggagaagcgaggacgcccagagcaaggccgccctgaccgactggctgcgggctaaggccagcttcgtgatcgagggcctgaaggaggccgacaaggacgagttctgcagatgcgagctgaagctgcagaagtggtacggggacctgcggggaaagcccttcgccatcgaagccgagaacagcatcctggacatcagcggcttcagcaagcagtacaactgtgccttcatctggcagaaggacggcgtgaagaagctgaacctgtacctgatcatcaactacttcaagggcggcaagctgcggttcaagaagatcaaacctgaagccttcgaagccaacagattctacaccgtgatcaacaaaaagagcggcgagatcgtgcccatggaggtgaacttcaacttcgacgaccccaacctgatcatcctgcctctggcctttggcaagagacagggcagagaattcatctggaacgacctgctgtccctggaaaccggcagcctgaagctggccaacggaagagtgatcgagaagacactgtacaacagaagaacccggcaggatgagcctgccctgttcgtggccctgaccttcgagcggcgggaggtcctggactcctccaatatcaaaccaatgaacctgatcggcgtggcaagaggcgaaaacatccccgccgtgatcgccctgaccgaccccgagggctgcccactgagccggtttaaggatagcctgggaaacccaacccacatcctgagaatcggcgagagctataaggagaagcagcggaccatccaggccaagaaggaggtggagcagcggagagccggcggctacagccggaagtacgccagcaaagccaagaatctggcagacgatatggtgagaaacaccgctagagatctgctgtactacgccgtgacccaggatgccatgctgatcttcgccaacctgagccggggcttcggccggcagggcaagcggaccttcatggccgagagacagtacacacggatggaggactggctgaccgccaagctggcctacgagggcctgagcaagacctacctgtccaagacactggcccagtacacctccaagacatgcagcaactgtgggtttaccatcaccagcgccgactacgacagggtgctggagaagctgaagaagacagcaacaggctggatgaccacaattaacggcaaggagctgaaggtggagggccagattacctactacaacagatacaagagacagaacgtagtcaaggacctgtccgtcgagctggatagactgagcgaagaatctgtgaacaacgacatctcctcctggacaaagggcagaagcggagaagctctgagcctcctgaagaaaagattctcccatagacccgtgcaggagaagttcgtgtgcctgaactgcggcttcgagacacacgcagccgagcaagccgccctgaacatcgccagatcctggctgttcctgcggagccaggagtacaagaaataccagacaaacaagacaaccggcaacaccgataagagagccttcgtcgagacctggcagtccttttaccggaagaagcttaaggaggtgtggaaacctgccgtgcggtctggcggatctggcggaggctccaccagccccaagaaaaagagaaaagtctaagctgccttctgcggggcttgccttctggccatgcccttcttctctcccttgcacctgtacctcttggtctttgaataaagcctgagtaggaaggctagcaaaaaaaaaaaaaaaaaaaaaaaaaaaaaaaaaaaaaaaaaaaaaaaaaaaaaaaaaaaaaaaaaaaaaaaaaaaaaaaa

SEQ ID NO: 9138 - RNA, 8787 nt, synthetic construct
  source 1..8787: mol_type = other RNA
aggaaataagagagaaaagaagagtaagaagaaatataagagccaccatggcccctaagaagaagcgtaaagtgagccggatgaaccacgaccaggagttcgacccccctaaggtgtaccctcccgtccccgccgagaagagaaagcccatccgggtcctgagcctgttcgatggcatcgccaccggtctgctggtgctgaaggacctgggcatccaggtggataggtacattgcctccgaggtgtgcgaggactccatcaccgtgggaatggtgcgtcatcagggcaagatcatgtacgtgggcgacgtgcggagcgtgacacagaagcatatccaggagtggggccctttcgacctggtgatcggcggcagcccttgcaatgacctgagcatcgtgaacccagcccggaagggcctgtacgagggaaccggcagactgttcttcgagttttacagactgctgcacgacgcccggcctaaggaaggcgacgaccggcccttcttttggctgttcgagaatgtggtggccatgggagtcagcgacaagcgggatattagccggttcctggagagcaaccccgtgatgatcgatgccaaggaagtgagcgccgcccaccgggccagatacttctggggcaatctgcctggcatgaacagacccctggccagcaccgtgaacgacaagctggagctgcaggagtgcctggagcacggccggatcgccaagttcagcaaggtgagaaccatcaccacccgaagcaacagcatcaaacaaggcaaggaccagcactttcctgtgttcatgaacgagaaggaggacatcctgtggtgtaccgagatggagagagtgttcgggttcccagtccactacacagatgtcagcaacatgtctagactggccagacagagactgctgggaagaagctggtccgtccctgtgatcagacacctgttcgcccctctgaaggagtacttcgcctgcgtgagcagcggcaacagcaacgccaacagccggggccccagcttctctagcggcctggtgccactgtccctgagagggagccacatgggccccatggagatctacaaaaccgtgagcgcctggaagcggcagcctgtgcgcgtgctgagcctgtttcggaatatcgataaagtcctgaaaagcctgggattcctggagagcggctctggctccggcggtggcaccctgaagtacgtggaggatgtgacaaacgtggtcagacgggatgtggagaagtggggccccttcgatctggtgtacggcagcacccaacccctgggcagctcttgtgaccggtgccctggctggtacatgtttcagttccaccggatcctgcagtacgccctgccgagacaggagtcccagcggccattcttttggattttcatggacaacttgctgctgaccgaggatgaccaggaaactaccactcggttcctgcagaccgaagccgtgaccctgcaggacgtgagaggccgggactaccagaacgccatgcgggtgtggtccaacatccctggactgaaaagcaagcacgcacctctgacccctaaagaagaggagtacctgcaggcccaggtgcggagcagaagcaagctggacgcccctaaggtggatctgctggtgaagaattgcctcctgcccctgagagagtacttcaagtatttcagccagaatagtctgcccctgggaggcagcggcggcggcagccacgagctgctgaccttcaaggacatcagcgtggacttcacccaggaggagtggggccagctggcccccgcctaccagaacctgtacagggaggtgatgctggagaactacagcaacctggtgagcgtggccggctaccagctgagcaagcccagcgtgatcagccagctggagaagggcgaggagccctggatggccgagaaggagggccccggcgaccccagcagcgacctgaagagcggcggcccaagcagcggcgcccctcctcccagcggcggcaggcggcccaagcagcggcgcccctcctcccagcggcggcagcccagccggctccccaacctctaccgaggagggcacctctgagtccgccacccccgagagcggccctggcacctccaccgagcccagcgagggcagcgcacccggcagccctgccggcagccccacctccacagaggagggaaccagcaccgagcccagcgaaggcagcgccccaggcaccagcaccgagcctagtgagcaggagattaaacggatcaacaagatcagaagaagacttgtgaaagacagcaacaccaagaaggccggcaagacaggccccatgaaaaccctgctggttagagtgatgacacccgatctgagagagcggctggaaaacctgagaaagaagcctgaaaatatcccccagcccatcagcaatacatctagagccaacctgaataagctgctgaccgattacaccgaaatgaagaaggcgatcctgcatgtgtactgggaagagttccagaaggaccctgtgggcctgatgagccgggtggcccagcctgccagcaagaagatcgatcagaacaagctgaaacctgagatggacgagaagggcaacctgaccaccgccggctttgcctgctctcagtgtggccagcccctgttcgtgtacaagctggagcaggtgtctgagaagggcaaggcttacaccaactacttcggacggtgcaatgtggccgagcacgaaaagctgatcctgctggcccagctgaagcccgagaaggatagcgacgaagccgtgacatatagcctgggaaagtttgggcagagggccctggatttctacagcattcatgtgaccaaggagtccacccaccccgtgaagcccctggcccagatcgccggaaacagatacgcctccggacctgtgggaaaggccctgagcgacgcatgtatgggcacaatcgcctccttcctgtctaagtaccaggacatcatcatcgaacaccagaaggtggtgaagggcaaccagaagagactggagagcctgcgggagctggccggcaaggaaaacctggaataccctagcgtgaccctgccacctcagcctcacaccaaggagggcgttgatgcctacaacgaagtgatcgcccgggtgcgaatgtgggtgaacctgaacctgtggcagaagctgaagctaagcagagatgatgccaagcctctgctgagactgaagggattcccttcctttcctctggtcgagagacaggccaacgaagtggactggtgggacatggtgtgtaacgtgaagaagctgatcaacgagaaaaaggaggatggcaaggtgttttggcagaatctggctggctacaagagacaggaagccctgagaccatacctgagcagcgaggaagatcggaagaagggaaagaaattcgctcggtaccagctgggcgacctgctgctgcacctggaaaagaagcacggcgaggactggggaaaggtgtacgacgaggcctgggagcggattgacaagaaagtggaaggcctgagcaagcacatcaagctggaagaggaacggagaagcgaggacgcccagagcaaggccgccctgaccgactggctgcgggctaaggccagcttcgtgatcgagggcctgaaggaggccgacaaggacgagttctgcagatgcgagctgaagctgcagaagtggtacggggacctgcggggaaagcccttcgccatcgaagccgagaacagcatcctggacatcagcggcttcagcaagcagtacaactgtgccttcatctggcagaaggacggcgtgaagaagctgaacctgtacctgatcatcaactacttcaagggcggcaagctgcggttcaagaagatcaaacctgaagccttcgaagccaacagattctacaccgtgatcaacaaaaagagcggcgagatcgtgcccatggaggtgaacttcaacttcgacgaccccaacctgatcatcctgcctctggcctttggcaagagacagggcagagaattcatctggaacgacctgctgtccctggaaaccggcagcctgaagctggccaacggaagagtgatcgagaagacactgtacaacagaagaacccggcaggatgagcctgccctgttcgtggccctgaccttcgagcggcgggaggtcctggactcctccaatatcaaaccaatgaacctgatcggcgtggcaagaggcgaaaacatccccgccgtgatcgccctgaccgaccccgagggctgcccactgagccggtttaaggatagcctgggaaacccaacccacatcctgagaatcggcgagagctataaggagaagcagcggaccatccaggccaagaaggaggtggagcagcggagagccggcggctacagccggaagtacgccagcaaagccaagaatctggcagacgatatggtgagaaacaccgctagagatctgctgtactacgccgtgacccaggatgccatgctgatcttcgccaacctgagccggggcttcggccggcagggcaagcggaccttcatggccgagagacagtacacacggatggaggactggctgaccgccaagctggcctacgagggcctgagcaagacctacctgtccaagacactggcccagtacacctccaagacatgcagcaactgtgggtttaccatcaccagcgccgactacgacagggtgctggagaagctgaagaagacagcaacaggctggatgaccacaattaacggcaaggagctgaaggtggagggccagattacctactacaacagatacaagagacagaacgtagtcaaggacctgtccgtcgagctggatagactgagcgaagaatctgtgaacaacgacatctcctcctggacaaagggcagaagcggagaagctctgagcctcctgaagaaaagattctcccatagacccgtgcaggagaagttcgtgtgcctgaactgcggcttcgagacacacgcagccgagcaagccgccctgaacatcgccagatcctggctgttcctgcggagccaggagtacaagaaataccagacaaacaagacaaccggcaacaccgataagagagccttcgtcgagacctggcagtccttttaccggaagaagcttaaggaggtgtggaaacctgccgtgcggtctggcggatctggcggaggctccaccagccccaagaaaaagagaaaagtctaagctgccttctgcggggcttgccttctggccatgcccttcttctctcccttgcacctgtacctcttggtctttgaataaagcctgagtaggaaggctagcaaaaaaaaaaaaaaaaaaaaaaaaaaaaaaaaaaaaaaaaaaaaaaaaaaaaaaaaaaaaaaaaaaaaaaaaaaaaaaaagcccagccggctccccaacctctaccgaggagggcacctctgagtccgccacccccgagagcggccctggcacctccaccgagcccagcgagggcagcgcacccggcagccctgccggcagccccacctccacagaggagggaaccagcaccgagcccagcgaaggcagcgccccaggcaccagcaccgagcctagtgagcaggagattaaacggatcaacaagatcagaagaagacttgtgaaagacagcaacaccaagaaggccggcaagacaggccccatgaaaaccctgctggttagagtgatgacacccgatctgagagagcggctggaaaacctgagaaagaagcctgaaaatatcccccagcccatcagcaatacatctagagccaacctgaataagctgctgaccgattacaccgaaatgaagaaggcgatcctgcatgtgtactgggaagagttccagaaggaccctgtgggcctgatgagccgggtggcccagcctgccagcaagaagatcgatcagaacaagctgaaacctgagatggacgagaagggcaacctgaccaccgccggctttgcctgctctcagtgtggccagcccctgttcgtgtacaagctggagcaggtgtctgagaagggcaaggcttacaccaactacttcggacggtgcaatgtggccgagcacgaaaagctgatcctgctggcccagctgaagcccgagaaggatagcgacgaagccgtgacatatagcctgggaaagtttgggcagagggccctggatttctacagcattcatgtgaccaaggagtccacccaccccgtgaagcccctggcccagatcgccggaaacagatacgcctccggacctgtgggaaaggccctgagcgacgcatgtatgggcacaatcgcctccttcctgtctaagtaccaggacatcatcatcgaacaccagaaggtggtgaagggcaaccagaagagactggagagcctgcgggagctggccggcaaggaaaacctggaataccctagcgtgaccctgccacctcagcctcacaccaaggagggcgttgatgcctacaacgaagtgatcgcccgggtgcgaatgtgggtgaacctgaacctgtggcagaagctgaagctaagcagagatgatgccaagcctctgctgagactgaagggattcccttcctttcctctggtcgagagacaggccaacgaagtggactggtgggacatggtgtgtaacgtgaagaagctgatcaacgagaaaaaggaggatggcaaggtgttttggcagaatctggctggctacaagagacaggaagccctgagaccatacctgagcagcgaggaagatcggaagaagggaaagaaattcgctcggtaccagctgggcgacctgctgctgcacctggaaaagaagcacggcgaggactggggaaaggtgtacgacgaggcctgggagcggattgacaagaaagtggaaggcctgagcaagcacatcaagctggaagaggaacggagaagcgaggacgcccagagcaaggccgccctgaccgactggctgcgggctaaggccagcttcgtgatcgagggcctgaaggaggccgacaaggacgagttctgcagatgcgagctgaagctgcagaagtggtacggggacctgcggggaaagcccttcgccatcgaagccgagaacagcatcctggacatcagcggcttcagcaagcagtacaactgtgccttcatctggcagaaggacggcgtgaagaagctgaacctgtacctgatcatcaactacttcaagggcggcaagctgcggttcaagaagatcaaacctgaagccttcgaagccaacagattctacaccgtgatcaacaaaaagagcggcgagatcgtgcccatggaggtgaacttcaacttcgacgaccccaacctgatcatcctgcctctggcctttggcaagagacagggcagagaattcatctggaacgacctgctgtccctggaaaccggcagcctgaagctggccaacggaagagtgatcgagaagacactgtacaacagaagaacccggcaggatgagcctgccctgttcgtggccctgaccttcgagcggcgggaggtcctggactcctccaatatcaaaccaatgaacctgatcggcgtggcaagaggcgaaaacatccccgccgtgatcgccctgaccgaccccgagggctgcccactgagccggtttaaggatagcctgggaaacccaacccacatcctgagaatcggcgagagctataaggagaagcagcggaccatccaggccaagaaggaggtggagcagcggagagccggcggctacagccggaagtacgccagcaaagccaagaatctggcagacgatatggtgagaaacaccgctagagatctgctgtactacgccgtgacccaggatgccatgctgatcttcgccaacctgagccggggcttcggccggcagggcaagcggaccttcatggccgagagacagtacacacggatggaggactggctgaccgccaagctggcctacgagggcctgagcaagacctacctgtccaagacactggcccagtacacctccaagacatgcagcaactgtgggtttaccatcaccagcgccgactacgacagggtgctggagaagctgaagaagacagcaacaggctggatgaccacaattaacggcaaggagctgaaggtggagggccagattacctactacaacagatacaagagacagaacgtagtcaaggacctgtccgtcgagctggatagactgagcgaagaatctgtgaacaacgacatctcctcctggacaaagggcagaagcggagaagctctgagcctcctgaagaaaagattctcccatagacccgtgcaggagaagttcgtgtgcctgaactgcggcttcgagacacacgcagccgagcaagccgccctgaacatcgccagatcctggctgttcctgcggagccaggagtacaagaaataccagacaaacaagacaaccggcaacaccgataagagagccttcgtcgagacctggcagtccttttaccggaagaagcttaaggaggtgtggaaacctgccgtgcggtctggcggatctggcggaggctccaccagccccaagaaaaagagaaaagtctaagctgccttctgcggggcttgccttctggccatgcccttcttctctcccttgcacctgtacctcttggtctttgaataaagcctgagtaggaaggctagcaaaaaaaaaaaaaaaaaaaaaaaaaaaaaaaaaaaaaaaaaaaaaaaaaaaaaaaaaaaaaaaaaaaaaaaaaaaaaaaa

SEQ ID NO: 9139 - RNA, 8787 nt, synthetic construct
  source 1..8787: mol_type = other RNA
aggaaataagagagaaaagaagagtaagaagaaatataagagccaccatggcccctaagaagaagcgtaaagtgagccggatgaaccacgaccaggagttcgacccccctaaggtgtaccctcccgtccccgccgagaagagaaagcccatccgggtcctgagcctgttcgatggcatcgccaccggtctgctggtgctgaaggacctgggcatccaggtggataggtacattgcctccgaggtgtgcgaggactccatcaccgtgggaatggtgcgtcatcagggcaagatcatgtacgtgggcgacgtgcggagcgtgacacagaagcatatccaggagtggggccctttcgacctggtgatcggcggcagcccttgcaatgacctgagcatcgtgaacccagcccggaagggcctgtacgagggaaccggcagactgttcttcgagttttacagactgctgcacgacgcccggcctaaggaaggcgacgaccggcccttcttttggctgttcgagaatgtggtggccatgggagtcagcgacaagcgggatattagccggttcctggagagcaaccccgtgatgatcgatgccaaggaagtgagcgccgcccaccgggccagatacttctggggcaatctgcctggcatgaacagacccctggccagcaccgtgaacgacaagctggagctgcaggagtgcctggagcacggccggatcgccaagttcagcaaggtgagaaccatcaccacccgaagcaacagcatcaaacaaggcaaggaccagcactttcctgtgttcatgaacgagaaggaggacatcctgtggtgtaccgagatggagagagtgttcgggttcccagtccactacacagatgtcagcaacatgtctagactggccagacagagactgctgggaagaagctggtccgtccctgtgatcagacacctgttcgcccctctgaaggagtacttcgcctgcgtgagcagcggcaacagcaacgccaacagccggggccccagcttctctagcggcctggtgccactgtccctgagagggagccacatgggccccatggagatctacaaaaccgtgagcgcctggaagcggcagcctgtgcgcgtgctgagcctgtttcggaatatcgataaagtcctgaaaagcctgggattcctggagagcggctctggctccggcggtggcaccctgaagtacgtggaggatgtgacaaacgtggtcagacgggatgtggagaagtggggccccttcgatctggtgtacggcagcacccaacccctgggcagctcttgtgaccggtgccctggctggtacatgtttcagttccaccggatcctgcagtacgccctgccgagacaggagtcccagcggccattcttttggattttcatggacaacttgctgctgaccgaggatgaccaggaaactaccactcggttcctgcagaccgaagccgtgaccctgcaggacgtgagaggccgggactaccagaacgccatgcgggtgtggtccaacatccctggactgaaaagcaagcacgcacctctgacccctaaagaagaggagtacctgcaggcccaggtgcggagcagaagcaagctggacgcccctaaggtggatctgctggtgaagaattgcctcctgcccctgagagagtacttcaagtatttcagccagaatagtctgcccctgggaggcagcggcggcggcatggagctggtgaccttcgaggacgtggccgtgtacttcaccaggaaggagtggggctggctggaccccgcccagagggacctgtacagggacgtgatgctggagaactacggcaacttcgtgagcatgggcctgcccttcagcaagcccgacgtgatcagccagctggagcagggcgaggagagctgggtggaggacctgcaggagtgcgaggagggcgagttcagccccgtggtgcacagcggcggcccaagcagcggcgcccctcctcccagcggcggcaggcggcccaagcagcggcgcccctcctcccagcggcggcagcccagccggctccccaacctctaccgaggagggcacctctgagtccgccacccccgagagcggccctggcacctccaccgagcccagcgagggcagcgcacccggcagccctgccggcagccccacctccacagaggagggaaccagcaccgagcccagcgaaggcagcgccccaggcaccagcaccgagcctagtgagcaggagattaaacggatcaacaagatcagaagaagacttgtgaaagacagcaacaccaagaaggccggcaagacaggccccatgaaaaccctgctggttagagtgatgacacccgatctgagagagcggctggaaaacctgagaaagaagcctgaaaatatcccccagcccatcagcaatacatctagagccaacctgaataagctgctgaccgattacaccgaaatgaagaaggcgatcctgcatgtgtactgggaagagttccagaaggaccctgtgggcctgatgagccgggtggcccagcctgccagcaagaagatcgatcagaacaagctgaaacctgagatggacgagaagggcaacctgaccaccgccggctttgcctgctctcagtgtggccagcccctgttcgtgtacaagctggagcaggtgtctgagaagggcaaggcttacaccaactacttcggacggtgcaatgtggccgagcacgaaaagctgatcctgctggcccagctgaagcccgagaaggatagcgacgaagccgtgacatatagcctgggaaagtttgggcagagggccctggatttctacagcattcatgtgaccaaggagtccacccaccccgtgaagcccctggcccagatcgccggaaacagatacgcctccggacctgtgggaaaggccctgagcgacgcatgtatgggcacaatcgcctccttcctgtctaagtaccaggacatcatcatcgaacaccagaaggtggtgaagggcaaccagaagagactggagagcctgcgggagctggccggcaaggaaaacctggaataccctagcgtgaccctgccacctcagcctcacaccaaggagggcgttgatgcctacaacgaagtgatcgcccgggtgcgaatgtgggtgaacctgaacctgtggcagaagctgaagctaagcagagatgatgccaagcctctgctgagactgaagggattcccttcctttcctctggtcgagagacaggccaacgaagtggactggtgggacatggtgtgtaacgtgaagaagctgatcaacgagaaaaaggaggatggcaaggtgttttggcagaatctggctggctacaagagacaggaagccctgagaccatacctgagcagcgaggaagatcggaagaagggaaagaaattcgctcggtaccagctgggcgacctgctgctgcacctggaaaagaagcacggcgaggactggggaaaggtgtacgacgaggcctgggagcggattgacaagaaagtggaaggcctgagcaagcacatcaagctggaagaggaacggagaagcgaggacgcccagagcaaggccgccctgaccgactggctgcgggctaaggccagcttcgtgatcgagggcctgaaggaggccgacaaggacgagttctgcagatgcgagctgaagctgcagaagtggtacggggacctgcggggaaagcccttcgccatcgaagccgagaacagcatcctggacatcagcggcttcagcaagcagtacaactgtgccttcatctggcagaaggacggcgtgaagaagctgaacctgtacctgatcatcaactacttcaagggcggcaagctgcggttcaagaagatcaaacctgaagccttcgaagccaacagattctacaccgtgatcaacaaaaagagcggcgagatcgtgcccatggaggtgaacttcaacttcgacgaccccaacctgatcatcctgcctctggcctttggcaagagacagggcagagaattcatctggaacgacctgctgtccctggaaaccggcagcctgaagctggccaacggaagagtgatcgagaagacactgtacaacagaagaacccggcaggatgagcctgccctgttcgtggccctgaccttcgagcggcgggaggtcctggactcctccaatatcaaaccaatgaacctgatcggcgtggcaagaggcgaaaacatccccgccgtgatcgccctgaccgaccccgagggctgcccactgagccggtttaaggatagcctgggaaacccaacccacatcctgagaatcggcgagagctataaggagaagcagcggaccatccaggccaagaaggaggtggagcagcggagagccggcggctacagccggaagtacgccagcaaagccaagaatctggcagacgatatggtgagaaacaccgctagagatctgctgtactacgccgtgacccaggatgccatgctgatcttcgccaacctgagccggggcttcggccggcagggcaagcggaccttcatggccgagagacagtacacacggatggaggactggctgaccgccaagctggcctacgagggcctgagcaagacctacctgtccaagacactggcccagtacacctccaagacatgcagcaactgtgggtttaccatcaccagcgccgactacgacagggtgctggagaagctgaagaagacagcaacaggctggatgaccacaattaacggcaaggagctgaaggtggagggccagattacctactacaacagatacaagagacagaacgtagtcaaggacctgtccgtcgagctggatagactgagcgaagaatctgtgaacaacgacatctcctcctggacaaagggcagaagcggagaagctctgagcctcctgaagaaaagattctcccatagacccgtgcaggagaagttcgtgtgcctgaactgcggcttcgagacacacgcagccgagcaagccgccctgaacatcgccagatcctggctgttcctgcggagccaggagtacaagaaataccagacaaacaagacaaccggcaacaccgataagagagccttcgtcgagacctggcagtccttttaccggaagaagcttaaggaggtgtggaaacctgccgtgcggtctggcggatctggcggaggctccaccagccccaagaaaaagagaaaagtctaagctgccttctgcggggcttgccttctggccatgcccttcttctctcccttgcacctgtacctcttggtctttgaataaagcctgagtaggaaggctagcaaaaaaaaaaaaaaaaaaaaaaaaaaaaaaaaaaaaaaaaaaaaaaaaaaaaaaaaaaaaaaaaaaaaaaaaaaaaaaaagcccagccggctccccaacctctaccgaggagggcacctctgagtccgccacccccgagagcggccctggcacctccaccgagcccagcgagggcagcgcacccggcagccctgccggcagccccacctccacagaggagggaaccagcaccgagcccagcgaaggcagcgccccaggcaccagcaccgagcctagtgagcaggagattaaacggatcaacaagatcagaagaagacttgtgaaagacagcaacaccaagaaggccggcaagacaggccccatgaaaaccctgctggttagagtgatgacacccgatctgagagagcggctggaaaacctgagaaagaagcctgaaaatatcccccagcccatcagcaatacatctagagccaacctgaataagctgctgaccgattacaccgaaatgaagaaggcgatcctgcatgtgtactgggaagagttccagaaggaccctgtgggcctgatgagccgggtggcccagcctgccagcaagaagatcgatcagaacaagctgaaacctgagatggacgagaagggcaacctgaccaccgccggctttgcctgctctcagtgtggccagcccctgttcgtgtacaagctggagcaggtgtctgagaagggcaaggcttacaccaactacttcggacggtgcaatgtggccgagcacgaaaagctgatcctgctggcccagctgaagcccgagaaggatagcgacgaagccgtgacatatagcctgggaaagtttgggcagagggccctggatttctacagcattcatgtgaccaaggagtccacccaccccgtgaagcccctggcccagatcgccggaaacagatacgcctccggacctgtgggaaaggccctgagcgacgcatgtatgggcacaatcgcctccttcctgtctaagtaccaggacatcatcatcgaacaccagaaggtggtgaagggcaaccagaagagactggagagcctgcgggagctggccggcaaggaaaacctggaataccctagcgtgaccctgccacctcagcctcacaccaaggagggcgttgatgcctacaacgaagtgatcgcccgggtgcgaatgtgggtgaacctgaacctgtggcagaagctgaagctaagcagagatgatgccaagcctctgctgagactgaagggattcccttcctttcctctggtcgagagacaggccaacgaagtggactggtgggacatggtgtgtaacgtgaagaagctgatcaacgagaaaaaggaggatggcaaggtgttttggcagaatctggctggctacaagagacaggaagccctgagaccatacctgagcagcgaggaagatcggaagaagggaaagaaattcgctcggtaccagctgggcgacctgctgctgcacctggaaaagaagcacggcgaggactggggaaaggtgtacgacgaggcctgggagcggattgacaagaaagtggaaggcctgagcaagcacatcaagctggaagaggaacggagaagcgaggacgcccagagcaaggccgccctgaccgactggctgcgggctaaggccagcttcgtgatcgagggcctgaaggaggccgacaaggacgagttctgcagatgcgagctgaagctgcagaagtggtacggggacctgcggggaaagcccttcgccatcgaagccgagaacagcatcctggacatcagcggcttcagcaagcagtacaactgtgccttcatctggcagaaggacggcgtgaagaagctgaacctgtacctgatcatcaactacttcaagggcggcaagctgcggttcaagaagatcaaacctgaagccttcgaagccaacagattctacaccgtgatcaacaaaaagagcggcgagatcgtgcccatggaggtgaacttcaacttcgacgaccccaacctgatcatcctgcctctggcctttggcaagagacagggcagagaattcatctggaacgacctgctgtccctggaaaccggcagcctgaagctggccaacggaagagtgatcgagaagacactgtacaacagaagaacccggcaggatgagcctgccctgttcgtggccctgaccttcgagcggcgggaggtcctggactcctccaatatcaaaccaatgaacctgatcggcgtggcaagaggcgaaaacatccccgccgtgatcgccctgaccgaccccgagggctgcccactgagccggtttaaggatagcctgggaaacccaacccacatcctgagaatcggcgagagctataaggagaagcagcggaccatccaggccaagaaggaggtggagcagcggagagccggcggctacagccggaagtacgccagcaaagccaagaatctggcagacgatatggtgagaaacaccgctagagatctgctgtactacgccgtgacccaggatgccatgctgatcttcgccaacctgagccggggcttcggccggcagggcaagcggaccttcatggccgagagacagtacacacggatggaggactggctgaccgccaagctggcctacgagggcctgagcaagacctacctgtccaagacactggcccagtacacctccaagacatgcagcaactgtgggtttaccatcaccagcgccgactacgacagggtgctggagaagctgaagaagacagcaacaggctggatgaccacaattaacggcaaggagctgaaggtggagggccagattacctactacaacagatacaagagacagaacgtagtcaaggacctgtccgtcgagctggatagactgagcgaagaatctgtgaacaacgacatctcctcctggacaaagggcagaagcggagaagctctgagcctcctgaagaaaagattctcccatagacccgtgcaggagaagttcgtgtgcctgaactgcggcttcgagacacacgcagccgagcaagccgccctgaacatcgccagatcctggctgttcctgcggagccaggagtacaagaaataccagacaaacaagacaaccggcaacaccgataagagagccttcgtcgagacctggcagtccttttaccggaagaagcttaaggaggtgtggaaacctgccgtgcggtctggcggatctggcggaggctccaccagccccaagaaaaagagaaaagtctaagctgccttctgcggggcttgccttctggccatgcccttcttctctcccttgcacctgtacctcttggtctttgaataaagcctgagtaggaaggctagcaaaaaaaaaaaaaaaaaaaaaaaaaaaaaaaaaaaaaaaaaaaaaaaaaaaaaaaaaaaaaaaaaaaaaaaaaaaaaaaa

SEQ ID NO: 9140 - RNA, 8787 nt, synthetic construct
  source 1..8787: mol_type = other RNA
aggaaataagagagaaaagaagagtaagaagaaatataagagccaccatggcccctaagaagaagcgtaaagtgagccggatgaaccacgaccaggagttcgacccccctaaggtgtaccctcccgtccccgccgagaagagaaagcccatccgggtcctgagcctgttcgatggcatcgccaccggtctgctggtgctgaaggacctgggcatccaggtggataggtacattgcctccgaggtgtgcgaggactccatcaccgtgggaatggtgcgtcatcagggcaagatcatgtacgtgggcgacgtgcggagcgtgacacagaagcatatccaggagtggggccctttcgacctggtgatcggcggcagcccttgcaatgacctgagcatcgtgaacccagcccggaagggcctgtacgagggaaccggcagactgttcttcgagttttacagactgctgcacgacgcccggcctaaggaaggcgacgaccggcccttcttttggctgttcgagaatgtggtggccatgggagtcagcgacaagcgggatattagccggttcctggagagcaaccccgtgatgatcgatgccaaggaagtgagcgccgcccaccgggccagatacttctggggcaatctgcctggcatgaacagacccctggccagcaccgtgaacgacaagctggagctgcaggagtgcctggagcacggccggatcgccaagttcagcaaggtgagaaccatcaccacccgaagcaacagcatcaaacaaggcaaggaccagcactttcctgtgttcatgaacgagaaggaggacatcctgtggtgtaccgagatggagagagtgttcgggttcccagtccactacacagatgtcagcaacatgtctagactggccagacagagactgctgggaagaagctggtccgtccctgtgatcagacacctgttcgcccctctgaaggagtacttcgcctgcgtgagcagcggcaacagcaacgccaacagccggggccccagcttctctagcggcctggtgccactgtccctgagagggagccacatgggccccatggagatctacaaaaccgtgagcgcctggaagcggcagcctgtgcgcgtgctgagcctgtttcggaatatcgataaagtcctgaaaagcctgggattcctggagagcggctctggctccggcggtggcaccctgaagtacgtggaggatgtgacaaacgtggtcagacgggatgtggagaagtggggccccttcgatctggtgtacggcagcacccaacccctgggcagctcttgtgaccggtgccctggctggtacatgtttcagttccaccggatcctgcagtacgccctgccgagacaggagtcccagcggccattcttttggattttcatggacaacttgctgctgaccgaggatgaccaggaaactaccactcggttcctgcagaccgaagccgtgaccctgcaggacgtgagaggccgggactaccagaacgccatgcgggtgtggtccaacatccctggactgaaaagcaagcacgcacctctgacccctaaagaagaggagtacctgcaggcccaggtgcggagcagaagcaagctggacgcccctaaggtggatctgctggtgaagaattgcctcctgcccctgagagagtacttcaagtatttcagccagaatagtctgcccctgggaggcagcggcggcggcatggccgccatgcccctgaaggccaggtaccaggagatggtgaccttcgaggacgtggccgtgcacttcaccaagaccgagtggaccggcctgagccccgcccagagggccctgtacaggagcgtgatgctggagaacttcggcaacctgaccgccctgggctaccccgtgcccaagcccgccctgatcagcctgctggagggcggcgacatggcctggggcctggaggcccaggacgaccccggcggcccaagcagcggcgcccctcctcccagcggcggcaggcggcccaagcagcggcgcccctcctcccagcggcggcagcccagccggctccccaacctctaccgaggagggcacctctgagtccgccacccccgagagcggccctggcacctccaccgagcccagcgagggcagcgcacccggcagccctgccggcagccccacctccacagaggagggaaccagcaccgagcccagcgaaggcagcgccccaggcaccagcaccgagcctagtgagcaggagattaaacggatcaacaagatcagaagaagacttgtgaaagacagcaacaccaagaaggccggcaagacaggccccatgaaaaccctgctggttagagtgatgacacccgatctgagagagcggctggaaaacctgagaaagaagcctgaaaatatcccccagcccatcagcaatacatctagagccaacctgaataagctgctgaccgattacaccgaaatgaagaaggcgatcctgcatgtgtactgggaagagttccagaaggaccctgtgggcctgatgagccgggtggcccagcctgccagcaagaagatcgatcagaacaagctgaaacctgagatggacgagaagggcaacctgaccaccgccggctttgcctgctctcagtgtggccagcccctgttcgtgtacaagctggagcaggtgtctgagaagggcaaggcttacaccaactacttcggacggtgcaatgtggccgagcacgaaaagctgatcctgctggcccagctgaagcccgagaaggatagcgacgaagccgtgacatatagcctgggaaagtttgggcagagggccctggatttctacagcattcatgtgaccaaggagtccacccaccccgtgaagcccctggcccagatcgccggaaacagatacgcctccggacctgtgggaaaggccctgagcgacgcatgtatgggcacaatcgcctccttcctgtctaagtaccaggacatcatcatcgaacaccagaaggtggtgaagggcaaccagaagagactggagagcctgcgggagctggccggcaaggaaaacctggaataccctagcgtgaccctgccacctcagcctcacaccaaggagggcgttgatgcctacaacgaagtgatcgcccgggtgcgaatgtgggtgaacctgaacctgtggcagaagctgaagctaagcagagatgatgccaagcctctgctgagactgaagggattcccttcctttcctctggtcgagagacaggccaacgaagtggactggtgggacatggtgtgtaacgtgaagaagctgatcaacgagaaaaaggaggatggcaaggtgttttggcagaatctggctggctacaagagacaggaagccctgagaccatacctgagcagcgaggaagatcggaagaagggaaagaaattcgctcggtaccagctgggcgacctgctgctgcacctggaaaagaagcacggcgaggactggggaaaggtgtacgacgaggcctgggagcggattgacaagaaagtggaaggcctgagcaagcacatcaagctggaagaggaacggagaagcgaggacgcccagagcaaggccgccctgaccgactggctgcgggctaaggccagcttcgtgatcgagggcctgaaggaggccgacaaggacgagttctgcagatgcgagctgaagctgcagaagtggtacggggacctgcggggaaagcccttcgccatcgaagccgagaacagcatcctggacatcagcggcttcagcaagcagtacaactgtgccttcatctggcagaaggacggcgtgaagaagctgaacctgtacctgatcatcaactacttcaagggcggcaagctgcggttcaagaagatcaaacctgaagccttcgaagccaacagattctacaccgtgatcaacaaaaagagcggcgagatcgtgcccatggaggtgaacttcaacttcgacgaccccaacctgatcatcctgcctctggcctttggcaagagacagggcagagaattcatctggaacgacctgctgtccctggaaaccggcagcctgaagctggccaacggaagagtgatcgagaagacactgtacaacagaagaacccggcaggatgagcctgccctgttcgtggccctgaccttcgagcggcgggaggtcctggactcctccaatatcaaaccaatgaacctgatcggcgtggcaagaggcgaaaacatccccgccgtgatcgccctgaccgaccccgagggctgcccactgagccggtttaaggatagcctgggaaacccaacccacatcctgagaatcggcgagagctataaggagaagcagcggaccatccaggccaagaaggaggtggagcagcggagagccggcggctacagccggaagtacgccagcaaagccaagaatctggcagacgatatggtgagaaacaccgctagagatctgctgtactacgccgtgacccaggatgccatgctgatcttcgccaacctgagccggggcttcggccggcagggcaagcggaccttcatggccgagagacagtacacacggatggaggactggctgaccgccaagctggcctacgagggcctgagcaagacctacctgtccaagacactggcccagtacacctccaagacatgcagcaactgtgggtttaccatcaccagcgccgactacgacagggtgctggagaagctgaagaagacagcaacaggctggatgaccacaattaacggcaaggagctgaaggtggagggccagattacctactacaacagatacaagagacagaacgtagtcaaggacctgtccgtcgagctggatagactgagcgaagaatctgtgaacaacgacatctcctcctggacaaagggcagaagcggagaagctctgagcctcctgaagaaaagattctcccatagacccgtgcaggagaagttcgtgtgcctgaactgcggcttcgagacacacgcagccgagcaagccgccctgaacatcgccagatcctggctgttcctgcggagccaggagtacaagaaataccagacaaacaagacaaccggcaacaccgataagagagccttcgtcgagacctggcagtccttttaccggaagaagcttaaggaggtgtggaaacctgccgtgcggtctggcggatctggcggaggctccaccagccccaagaaaaagagaaaagtctaagctgccttctgcggggcttgccttctggccatgcccttcttctctcccttgcacctgtacctcttggtctttgaataaagcctgagtaggaaggctagcaaaaaaaaaaaaaaaaaaaaaaaaaaaaaaaaaaaaaaaaaaaaaaaaaaaaaaaaaaaaaaaaaaaaaaaaaaaaaaaagcccagccggctccccaacctctaccgaggagggcacctctgagtccgccacccccgagagcggccctggcacctccaccgagcccagcgagggcagcgcacccggcagccctgccggcagccccacctccacagaggagggaaccagcaccgagcccagcgaaggcagcgccccaggcaccagcaccgagcctagtgagcaggagattaaacggatcaacaagatcagaagaagacttgtgaaagacagcaacaccaagaaggccggcaagacaggccccatgaaaaccctgctggttagagtgatgacacccgatctgagagagcggctggaaaacctgagaaagaagcctgaaaatatcccccagcccatcagcaatacatctagagccaacctgaataagctgctgaccgattacaccgaaatgaagaaggcgatcctgcatgtgtactgggaagagttccagaaggaccctgtgggcctgatgagccgggtggcccagcctgccagcaagaagatcgatcagaacaagctgaaacctgagatggacgagaagggcaacctgaccaccgccggctttgcctgctctcagtgtggccagcccctgttcgtgtacaagctggagcaggtgtctgagaagggcaaggcttacaccaactacttcggacggtgcaatgtggccgagcacgaaaagctgatcctgctggcccagctgaagcccgagaaggatagcgacgaagccgtgacatatagcctgggaaagtttgggcagagggccctggatttctacagcattcatgtgaccaaggagtccacccaccccgtgaagcccctggcccagatcgccggaaacagatacgcctccggacctgtgggaaaggccctgagcgacgcatgtatgggcacaatcgcctccttcctgtctaagtaccaggacatcatcatcgaacaccagaaggtggtgaagggcaaccagaagagactggagagcctgcgggagctggccggcaaggaaaacctggaataccctagcgtgaccctgccacctcagcctcacaccaaggagggcgttgatgcctacaacgaagtgatcgcccgggtgcgaatgtgggtgaacctgaacctgtggcagaagctgaagctaagcagagatgatgccaagcctctgctgagactgaagggattcccttcctttcctctggtcgagagacaggccaacgaagtggactggtgggacatggtgtgtaacgtgaagaagctgatcaacgagaaaaaggaggatggcaaggtgttttggcagaatctggctggctacaagagacaggaagccctgagaccatacctgagcagcgaggaagatcggaagaagggaaagaaattcgctcggtaccagctgggcgacctgctgctgcacctggaaaagaagcacggcgaggactggggaaaggtgtacgacgaggcctgggagcggattgacaagaaagtggaaggcctgagcaagcacatcaagctggaagaggaacggagaagcgaggacgcccagagcaaggccgccctgaccgactggctgcgggctaaggccagcttcgtgatcgagggcctgaaggaggccgacaaggacgagttctgcagatgcgagctgaagctgcagaagtggtacggggacctgcggggaaagcccttcgccatcgaagccgagaacagcatcctggacatcagcggcttcagcaagcagtacaactgtgccttcatctggcagaaggacggcgtgaagaagctgaacctgtacctgatcatcaactacttcaagggcggcaagctgcggttcaagaagatcaaacctgaagccttcgaagccaacagattctacaccgtgatcaacaaaaagagcggcgagatcgtgcccatggaggtgaacttcaacttcgacgaccccaacctgatcatcctgcctctggcctttggcaagagacagggcagagaattcatctggaacgacctgctgtccctggaaaccggcagcctgaagctggccaacggaagagtgatcgagaagacactgtacaacagaagaacccggcaggatgagcctgccctgttcgtggccctgaccttcgagcggcgggaggtcctggactcctccaatatcaaaccaatgaacctgatcggcgtggcaagaggcgaaaacatccccgccgtgatcgccctgaccgaccccgagggctgcccactgagccggtttaaggatagcctgggaaacccaacccacatcctgagaatcggcgagagctataaggagaagcagcggaccatccaggccaagaaggaggtggagcagcggagagccggcggctacagccggaagtacgccagcaaagccaagaatctggcagacgatatggtgagaaacaccgctagagatctgctgtactacgccgtgacccaggatgccatgctgatcttcgccaacctgagccggggcttcggccggcagggcaagcggaccttcatggccgagagacagtacacacggatggaggactggctgaccgccaagctggcctacgagggcctgagcaagacctacctgtccaagacactggcccagtacacctccaagacatgcagcaactgtgggtttaccatcaccagcgccgactacgacagggtgctggagaagctgaagaagacagcaacaggctggatgaccacaattaacggcaaggagctgaaggtggagggccagattacctactacaacagatacaagagacagaacgtagtcaaggacctgtccgtcgagctggatagactgagcgaagaatctgtgaacaacgacatctcctcctggacaaagggcagaagcggagaagctctgagcctcctgaagaaaagattctcccatagacccgtgcaggagaagttcgtgtgcctgaactgcggcttcgagacacacgcagccgagcaagccgccctgaacatcgccagatcctggctgttcctgcggagccaggagtacaagaaataccagacaaacaagacaaccggcaacaccgataagagagccttcgtcgagacctggcagtccttttaccggaagaagcttaaggaggtgtggaaacctgccgtgcggtctggcggatctggcggaggctccaccagccccaagaaaaagagaaaagtctaagctgccttctgcggggcttgccttctggccatgcccttcttctctcccttgcacctgtacctcttggtctttgaataaagcctgagtaggaaggctagcaaaaaaaaaaaaaaaaaaaaaaaaaaaaaaaaaaaaaaaaaaaaaaaaaaaaaaaaaaaaaaaaaaaaaaaaaaaaaaaa

SEQ ID NO: 9141 - RNA, 8787 nt, synthetic construct
  source 1..8787: mol_type = other RNA
aggaaataagagagaaaagaagagtaagaagaaatataagagccaccatggcccctaagaagaagcgtaaagtgagccggatgaaccacgaccaggagttcgacccccctaaggtgtaccctcccgtccccgccgagaagagaaagcccatccgggtcctgagcctgttcgatggcatcgccaccggtctgctggtgctgaaggacctgggcatccaggtggataggtacattgcctccgaggtgtgcgaggactccatcaccgtgggaatggtgcgtcatcagggcaagatcatgtacgtgggcgacgtgcggagcgtgacacagaagcatatccaggagtggggccctttcgacctggtgatcggcggcagcccttgcaatgacctgagcatcgtgaacccagcccggaagggcctgtacgagggaaccggcagactgttcttcgagttttacagactgctgcacgacgcccggcctaaggaaggcgacgaccggcccttcttttggctgttcgagaatgtggtggccatgggagtcagcgacaagcgggatattagccggttcctggagagcaaccccgtgatgatcgatgccaaggaagtgagcgccgcccaccgggccagatacttctggggcaatctgcctggcatgaacagacccctggccagcaccgtgaacgacaagctggagctgcaggagtgcctggagcacggccggatcgccaagttcagcaaggtgagaaccatcaccacccgaagcaacagcatcaaacaaggcaaggaccagcactttcctgtgttcatgaacgagaaggaggacatcctgtggtgtaccgagatggagagagtgttcgggttcccagtccactacacagatgtcagcaacatgtctagactggccagacagagactgctgggaagaagctggtccgtccctgtgatcagacacctgttcgcccctctgaaggagtacttcgcctgcgtgagcagcggcaacagcaacgccaacagccggggccccagcttctctagcggcctggtgccactgtccctgagagggagccacatgggccccatggagatctacaaaaccgtgagcgcctggaagcggcagcctgtgcgcgtgctgagcctgtttcggaatatcgataaagtcctgaaaagcctgggattcctggagagcggctctggctccggcggtggcaccctgaagtacgtggaggatgtgacaaacgtggtcagacgggatgtggagaagtggggccccttcgatctggtgtacggcagcacccaacccctgggcagctcttgtgaccggtgccctggctggtacatgtttcagttccaccggatcctgcagtacgccctgccgagacaggagtcccagcggccattcttttggattttcatggacaacttgctgctgaccgaggatgaccaggaaactaccactcggttcctgcagaccgaagccgtgaccctgcaggacgtgagaggccgggactaccagaacgccatgcgggtgtggtccaacatccctggactgaaaagcaagcacgcacctctgacccctaaagaagaggagtacctgcaggcccaggtgcggagcagaagcaagctggacgcccctaaggtggatctgctggtgaagaattgcctcctgcccctgagagagtacttcaagtatttcagccagaatagtctgcccctgggaggcagcggcggcggcgcccaggagagcgtggtgttcagcgacgtgagcatcgacttcagccaggaggagtgggagtgcctgaacgacgaccagagggacctgtacagggacgtgatgctggagaactacagccacctggtgagcatggccggccacagcgtgagcaagcccgacgtgatcagcgtgctggagcagggcaaggagccctggctggtggacagggagctgaccagggagcagtggcccgtgctggagagcggcggcccaagcagcggcgcccctcctcccagcggcggcaggcggcccaagcagcggcgcccctcctcccagcggcggcagcccagccggctccccaacctctaccgaggagggcacctctgagtccgccacccccgagagcggccctggcacctccaccgagcccagcgagggcagcgcacccggcagccctgccggcagccccacctccacagaggagggaaccagcaccgagcccagcgaaggcagcgccccaggcaccagcaccgagcctagtgagcaggagattaaacggatcaacaagatcagaagaagacttgtgaaagacagcaacaccaagaaggccggcaagacaggccccatgaaaaccctgctggttagagtgatgacacccgatctgagagagcggctggaaaacctgagaaagaagcctgaaaatatcccccagcccatcagcaatacatctagagccaacctgaataagctgctgaccgattacaccgaaatgaagaaggcgatcctgcatgtgtactgggaagagttccagaaggaccctgtgggcctgatgagccgggtggcccagcctgccagcaagaagatcgatcagaacaagctgaaacctgagatggacgagaagggcaacctgaccaccgccggctttgcctgctctcagtgtggccagcccctgttcgtgtacaagctggagcaggtgtctgagaagggcaaggcttacaccaactacttcggacggtgcaatgtggccgagcacgaaaagctgatcctgctggcccagctgaagcccgagaaggatagcgacgaagccgtgacatatagcctgggaaagtttgggcagagggccctggatttctacagcattcatgtgaccaaggagtccacccaccccgtgaagcccctggcccagatcgccggaaacagatacgcctccggacctgtgggaaaggccctgagcgacgcatgtatgggcacaatcgcctccttcctgtctaagtaccaggacatcatcatcgaacaccagaaggtggtgaagggcaaccagaagagactggagagcctgcgggagctggccggcaaggaaaacctggaataccctagcgtgaccctgccacctcagcctcacaccaaggagggcgttgatgcctacaacgaagtgatcgcccgggtgcgaatgtgggtgaacctgaacctgtggcagaagctgaagctaagcagagatgatgccaagcctctgctgagactgaagggattcccttcctttcctctggtcgagagacaggccaacgaagtggactggtgggacatggtgtgtaacgtgaagaagctgatcaacgagaaaaaggaggatggcaaggtgttttggcagaatctggctggctacaagagacaggaagccctgagaccatacctgagcagcgaggaagatcggaagaagggaaagaaattcgctcggtaccagctgggcgacctgctgctgcacctggaaaagaagcacggcgaggactggggaaaggtgtacgacgaggcctgggagcggattgacaagaaagtggaaggcctgagcaagcacatcaagctggaagaggaacggagaagcgaggacgcccagagcaaggccgccctgaccgactggctgcgggctaaggccagcttcgtgatcgagggcctgaaggaggccgacaaggacgagttctgcagatgcgagctgaagctgcagaagtggtacggggacctgcggggaaagcccttcgccatcgaagccgagaacagcatcctggacatcagcggcttcagcaagcagtacaactgtgccttcatctggcagaaggacggcgtgaagaagctgaacctgtacctgatcatcaactacttcaagggcggcaagctgcggttcaagaagatcaaacctgaagccttcgaagccaacagattctacaccgtgatcaacaaaaagagcggcgagatcgtgcccatggaggtgaacttcaacttcgacgaccccaacctgatcatcctgcctctggcctttggcaagagacagggcagagaattcatctggaacgacctgctgtccctggaaaccggcagcctgaagctggccaacggaagagtgatcgagaagacactgtacaacagaagaacccggcaggatgagcctgccctgttcgtggccctgaccttcgagcggcgggaggtcctggactcctccaatatcaaaccaatgaacctgatcggcgtggcaagaggcgaaaacatccccgccgtgatcgccctgaccgaccccgagggctgcccactgagccggtttaaggatagcctgggaaacccaacccacatcctgagaatcggcgagagctataaggagaagcagcggaccatccaggccaagaaggaggtggagcagcggagagccggcggctacagccggaagtacgccagcaaagccaagaatctggcagacgatatggtgagaaacaccgctagagatctgctgtactacgccgtgacccaggatgccatgctgatcttcgccaacctgagccggggcttcggccggcagggcaagcggaccttcatggccgagagacagtacacacggatggaggactggctgaccgccaagctggcctacgagggcctgagcaagacctacctgtccaagacactggcccagtacacctccaagacatgcagcaactgtgggtttaccatcaccagcgccgactacgacagggtgctggagaagctgaagaagacagcaacaggctggatgaccacaattaacggcaaggagctgaaggtggagggccagattacctactacaacagatacaagagacagaacgtagtcaaggacctgtccgtcgagctggatagactgagcgaagaatctgtgaacaacgacatctcctcctggacaaagggcagaagcggagaagctctgagcctcctgaagaaaagattctcccatagacccgtgcaggagaagttcgtgtgcctgaactgcggcttcgagacacacgcagccgagcaagccgccctgaacatcgccagatcctggctgttcctgcggagccaggagtacaagaaataccagacaaacaagacaaccggcaacaccgataagagagccttcgtcgagacctggcagtccttttaccggaagaagcttaaggaggtgtggaaacctgccgtgcggtctggcggatctggcggaggctccaccagccccaagaaaaagagaaaagtctaagctgccttctgcggggcttgccttctggccatgcccttcttctctcccttgcacctgtacctcttggtctttgaataaagcctgagtaggaaggctagcaaaaaaaaaaaaaaaaaaaaaaaaaaaaaaaaaaaaaaaaaaaaaaaaaaaaaaaaaaaaaaaaaaaaaaaaaaaaaaaagcccagccggctccccaacctctaccgaggagggcacctctgagtccgccacccccgagagcggccctggcacctccaccgagcccagcgagggcagcgcacccggcagccctgccggcagccccacctccacagaggagggaaccagcaccgagcccagcgaaggcagcgccccaggcaccagcaccgagcctagtgagcaggagattaaacggatcaacaagatcagaagaagacttgtgaaagacagcaacaccaagaaggccggcaagacaggccccatgaaaaccctgctggttagagtgatgacacccgatctgagagagcggctggaaaacctgagaaagaagcctgaaaatatcccccagcccatcagcaatacatctagagccaacctgaataagctgctgaccgattacaccgaaatgaagaaggcgatcctgcatgtgtactgggaagagttccagaaggaccctgtgggcctgatgagccgggtggcccagcctgccagcaagaagatcgatcagaacaagctgaaacctgagatggacgagaagggcaacctgaccaccgccggctttgcctgctctcagtgtggccagcccctgttcgtgtacaagctggagcaggtgtctgagaagggcaaggcttacaccaactacttcggacggtgcaatgtggccgagcacgaaaagctgatcctgctggcccagctgaagcccgagaaggatagcgacgaagccgtgacatatagcctgggaaagtttgggcagagggccctggatttctacagcattcatgtgaccaaggagtccacccaccccgtgaagcccctggcccagatcgccggaaacagatacgcctccggacctgtgggaaaggccctgagcgacgcatgtatgggcacaatcgcctccttcctgtctaagtaccaggacatcatcatcgaacaccagaaggtggtgaagggcaaccagaagagactggagagcctgcgggagctggccggcaaggaaaacctggaataccctagcgtgaccctgccacctcagcctcacaccaaggagggcgttgatgcctacaacgaagtgatcgcccgggtgcgaatgtgggtgaacctgaacctgtggcagaagctgaagctaagcagagatgatgccaagcctctgctgagactgaagggattcccttcctttcctctggtcgagagacaggccaacgaagtggactggtgggacatggtgtgtaacgtgaagaagctgatcaacgagaaaaaggaggatggcaaggtgttttggcagaatctggctggctacaagagacaggaagccctgagaccatacctgagcagcgaggaagatcggaagaagggaaagaaattcgctcggtaccagctgggcgacctgctgctgcacctggaaaagaagcacggcgaggactggggaaaggtgtacgacgaggcctgggagcggattgacaagaaagtggaaggcctgagcaagcacatcaagctggaagaggaacggagaagcgaggacgcccagagcaaggccgccctgaccgactggctgcgggctaaggccagcttcgtgatcgagggcctgaaggaggccgacaaggacgagttctgcagatgcgagctgaagctgcagaagtggtacggggacctgcggggaaagcccttcgccatcgaagccgagaacagcatcctggacatcagcggcttcagcaagcagtacaactgtgccttcatctggcagaaggacggcgtgaagaagctgaacctgtacctgatcatcaactacttcaagggcggcaagctgcggttcaagaagatcaaacctgaagccttcgaagccaacagattctacaccgtgatcaacaaaaagagcggcgagatcgtgcccatggaggtgaacttcaacttcgacgaccccaacctgatcatcctgcctctggcctttggcaagagacagggcagagaattcatctggaacgacctgctgtccctggaaaccggcagcctgaagctggccaacggaagagtgatcgagaagacactgtacaacagaagaacccggcaggatgagcctgccctgttcgtggccctgaccttcgagcggcgggaggtcctggactcctccaatatcaaaccaatgaacctgatcggcgtggcaagaggcgaaaacatccccgccgtgatcgccctgaccgaccccgagggctgcccactgagccggtttaaggatagcctgggaaacccaacccacatcctgagaatcggcgagagctataaggagaagcagcggaccatccaggccaagaaggaggtggagcagcggagagccggcggctacagccggaagtacgccagcaaagccaagaatctggcagacgatatggtgagaaacaccgctagagatctgctgtactacgccgtgacccaggatgccatgctgatcttcgccaacctgagccggggcttcggccggcagggcaagcggaccttcatggccgagagacagtacacacggatggaggactggctgaccgccaagctggcctacgagggcctgagcaagacctacctgtccaagacactggcccagtacacctccaagacatgcagcaactgtgggtttaccatcaccagcgccgactacgacagggtgctggagaagctgaagaagacagcaacaggctggatgaccacaattaacggcaaggagctgaaggtggagggccagattacctactacaacagatacaagagacagaacgtagtcaaggacctgtccgtcgagctggatagactgagcgaagaatctgtgaacaacgacatctcctcctggacaaagggcagaagcggagaagctctgagcctcctgaagaaaagattctcccatagacccgtgcaggagaagttcgtgtgcctgaactgcggcttcgagacacacgcagccgagcaagccgccctgaacatcgccagatcctggctgttcctgcggagccaggagtacaagaaataccagacaaacaagacaaccggcaacaccgataagagagccttcgtcgagacctggcagtccttttaccggaagaagcttaaggaggtgtggaaacctgccgtgcggtctggcggatctggcggaggctccaccagccccaagaaaaagagaaaagtctaagctgccttctgcggggcttgccttctggccatgcccttcttctctcccttgcacctgtacctcttggtctttgaataaagcctgagtaggaaggctagcaaaaaaaaaaaaaaaaaaaaaaaaaaaaaaaaaaaaaaaaaaaaaaaaaaaaaaaaaaaaaaaaaaaaaaaaaaaaaaaa

SEQ ID NO: 9142 - RNA, 8787 nt, synthetic construct
  source 1..8787: mol_type = other RNA
aggaaataagagagaaaagaagagtaagaagaaatataagagccaccatggcccctaagaagaagcgtaaagtgagccggatgaaccacgaccaggagttcgacccccctaaggtgtaccctcccgtccccgccgagaagagaaagcccatccgggtcctgagcctgttcgatggcatcgccaccggtctgctggtgctgaaggacctgggcatccaggtggataggtacattgcctccgaggtgtgcgaggactccatcaccgtgggaatggtgcgtcatcagggcaagatcatgtacgtgggcgacgtgcggagcgtgacacagaagcatatccaggagtggggccctttcgacctggtgatcggcggcagcccttgcaatgacctgagcatcgtgaacccagcccggaagggcctgtacgagggaaccggcagactgttcttcgagttttacagactgctgcacgacgcccggcctaaggaaggcgacgaccggcccttcttttggctgttcgagaatgtggtggccatgggagtcagcgacaagcgggatattagccggttcctggagagcaaccccgtgatgatcgatgccaaggaagtgagcgccgcccaccgggccagatacttctggggcaatctgcctggcatgaacagacccctggccagcaccgtgaacgacaagctggagctgcaggagtgcctggagcacggccggatcgccaagttcagcaaggtgagaaccatcaccacccgaagcaacagcatcaaacaaggcaaggaccagcactttcctgtgttcatgaacgagaaggaggacatcctgtggtgtaccgagatggagagagtgttcgggttcccagtccactacacagatgtcagcaacatgtctagactggccagacagagactgctgggaagaagctggtccgtccctgtgatcagacacctgttcgcccctctgaaggagtacttcgcctgcgtgagcagcggcaacagcaacgccaacagccggggccccagcttctctagcggcctggtgccactgtccctgagagggagccacatgggccccatggagatctacaaaaccgtgagcgcctggaagcggcagcctgtgcgcgtgctgagcctgtttcggaatatcgataaagtcctgaaaagcctgggattcctggagagcggctctggctccggcggtggcaccctgaagtacgtggaggatgtgacaaacgtggtcagacgggatgtggagaagtggggccccttcgatctggtgtacggcagcacccaacccctgggcagctcttgtgaccggtgccctggctggtacatgtttcagttccaccggatcctgcagtacgccctgccgagacaggagtcccagcggccattcttttggattttcatggacaacttgctgctgaccgaggatgaccaggaaactaccactcggttcctgcagaccgaagccgtgaccctgcaggacgtgagaggccgggactaccagaacgccatgcgggtgtggtccaacatccctggactgaaaagcaagcacgcacctctgacccctaaagaagaggagtacctgcaggcccaggtgcggagcagaagcaagctggacgcccctaaggtggatctgctggtgaagaattgcctcctgcccctgagagagtacttcaagtatttcagccagaatagtctgcccctgggaggcagcggcggcggcatggagggcctggtgatgttccaggacctgttcatcgacttcagccaggaggagtgggagtgcctggacaccgcccagaaggacctgtacagggacgtgatgatggagaactacagcagcctggtgagcctgggcctgtgcatccccaagcccgacgtgatcagcctgctggagcagggcaaggagccctggatggtgagcagggacgtgctgggcggctggtgccccgacagcgagttcaggggcggcccaagcagcggcgcccctcctcccagcggcggcaggcggcccaagcagcggcgcccctcctcccagcggcggcagcccagccggctccccaacctctaccgaggagggcacctctgagtccgccacccccgagagcggccctggcacctccaccgagcccagcgagggcagcgcacccggcagccctgccggcagccccacctccacagaggagggaaccagcaccgagcccagcgaaggcagcgccccaggcaccagcaccgagcctagtgagcaggagattaaacggatcaacaagatcagaagaagacttgtgaaagacagcaacaccaagaaggccggcaagacaggccccatgaaaaccctgctggttagagtgatgacacccgatctgagagagcggctggaaaacctgagaaagaagcctgaaaatatcccccagcccatcagcaatacatctagagccaacctgaataagctgctgaccgattacaccgaaatgaagaaggcgatcctgcatgtgtactgggaagagttccagaaggaccctgtgggcctgatgagccgggtggcccagcctgccagcaagaagatcgatcagaacaagctgaaacctgagatggacgagaagggcaacctgaccaccgccggctttgcctgctctcagtgtggccagcccctgttcgtgtacaagctggagcaggtgtctgagaagggcaaggcttacaccaactacttcggacggtgcaatgtggccgagcacgaaaagctgatcctgctggcccagctgaagcccgagaaggatagcgacgaagccgtgacatatagcctgggaaagtttgggcagagggccctggatttctacagcattcatgtgaccaaggagtccacccaccccgtgaagcccctggcccagatcgccggaaacagatacgcctccggacctgtgggaaaggccctgagcgacgcatgtatgggcacaatcgcctccttcctgtctaagtaccaggacatcatcatcgaacaccagaaggtggtgaagggcaaccagaagagactggagagcctgcgggagctggccggcaaggaaaacctggaataccctagcgtgaccctgccacctcagcctcacaccaaggagggcgttgatgcctacaacgaagtgatcgcccgggtgcgaatgtgggtgaacctgaacctgtggcagaagctgaagctaagcagagatgatgccaagcctctgctgagactgaagggattcccttcctttcctctggtcgagagacaggccaacgaagtggactggtgggacatggtgtgtaacgtgaagaagctgatcaacgagaaaaaggaggatggcaaggtgttttggcagaatctggctggctacaagagacaggaagccctgagaccatacctgagcagcgaggaagatcggaagaagggaaagaaattcgctcggtaccagctgggcgacctgctgctgcacctggaaaagaagcacggcgaggactggggaaaggtgtacgacgaggcctgggagcggattgacaagaaagtggaaggcctgagcaagcacatcaagctggaagaggaacggagaagcgaggacgcccagagcaaggccgccctgaccgactggctgcgggctaaggccagcttcgtgatcgagggcctgaaggaggccgacaaggacgagttctgcagatgcgagctgaagctgcagaagtggtacggggacctgcggggaaagcccttcgccatcgaagccgagaacagcatcctggacatcagcggcttcagcaagcagtacaactgtgccttcatctggcagaaggacggcgtgaagaagctgaacctgtacctgatcatcaactacttcaagggcggcaagctgcggttcaagaagatcaaacctgaagccttcgaagccaacagattctacaccgtgatcaacaaaaagagcggcgagatcgtgcccatggaggtgaacttcaacttcgacgaccccaacctgatcatcctgcctctggcctttggcaagagacagggcagagaattcatctggaacgacctgctgtccctggaaaccggcagcctgaagctggccaacggaagagtgatcgagaagacactgtacaacagaagaacccggcaggatgagcctgccctgttcgtggccctgaccttcgagcggcgggaggtcctggactcctccaatatcaaaccaatgaacctgatcggcgtggcaagaggcgaaaacatccccgccgtgatcgccctgaccgaccccgagggctgcccactgagccggtttaaggatagcctgggaaacccaacccacatcctgagaatcggcgagagctataaggagaagcagcggaccatccaggccaagaaggaggtggagcagcggagagccggcggctacagccggaagtacgccagcaaagccaagaatctggcagacgatatggtgagaaacaccgctagagatctgctgtactacgccgtgacccaggatgccatgctgatcttcgccaacctgagccggggcttcggccggcagggcaagcggaccttcatggccgagagacagtacacacggatggaggactggctgaccgccaagctggcctacgagggcctgagcaagacctacctgtccaagacactggcccagtacacctccaagacatgcagcaactgtgggtttaccatcaccagcgccgactacgacagggtgctggagaagctgaagaagacagcaacaggctggatgaccacaattaacggcaaggagctgaaggtggagggccagattacctactacaacagatacaagagacagaacgtagtcaaggacctgtccgtcgagctggatagactgagcgaagaatctgtgaacaacgacatctcctcctggacaaagggcagaagcggagaagctctgagcctcctgaagaaaagattctcccatagacccgtgcaggagaagttcgtgtgcctgaactgcggcttcgagacacacgcagccgagcaagccgccctgaacatcgccagatcctggctgttcctgcggagccaggagtacaagaaataccagacaaacaagacaaccggcaacaccgataagagagccttcgtcgagacctggcagtccttttaccggaagaagcttaaggaggtgtggaaacctgccgtgcggtctggcggatctggcggaggctccaccagccccaagaaaaagagaaaagtctaagctgccttctgcggggcttgccttctggccatgcccttcttctctcccttgcacctgtacctcttggtctttgaataaagcctgagtaggaaggctagcaaaaaaaaaaaaaaaaaaaaaaaaaaaaaaaaaaaaaaaaaaaaaaaaaaaaaaaaaaaaaaaaaaaaaaaaaaaaaaaagcccagccggctccccaacctctaccgaggagggcacctctgagtccgccacccccgagagcggccctggcacctccaccgagcccagcgagggcagcgcacccggcagccctgccggcagccccacctccacagaggagggaaccagcaccgagcccagcgaaggcagcgccccaggcaccagcaccgagcctagtgagcaggagattaaacggatcaacaagatcagaagaagacttgtgaaagacagcaacaccaagaaggccggcaagacaggccccatgaaaaccctgctggttagagtgatgacacccgatctgagagagcggctggaaaacctgagaaagaagcctgaaaatatcccccagcccatcagcaatacatctagagccaacctgaataagctgctgaccgattacaccgaaatgaagaaggcgatcctgcatgtgtactgggaagagttccagaaggaccctgtgggcctgatgagccgggtggcccagcctgccagcaagaagatcgatcagaacaagctgaaacctgagatggacgagaagggcaacctgaccaccgccggctttgcctgctctcagtgtggccagcccctgttcgtgtacaagctggagcaggtgtctgagaagggcaaggcttacaccaactacttcggacggtgcaatgtggccgagcacgaaaagctgatcctgctggcccagctgaagcccgagaaggatagcgacgaagccgtgacatatagcctgggaaagtttgggcagagggccctggatttctacagcattcatgtgaccaaggagtccacccaccccgtgaagcccctggcccagatcgccggaaacagatacgcctccggacctgtgggaaaggccctgagcgacgcatgtatgggcacaatcgcctccttcctgtctaagtaccaggacatcatcatcgaacaccagaaggtggtgaagggcaaccagaagagactggagagcctgcgggagctggccggcaaggaaaacctggaataccctagcgtgaccctgccacctcagcctcacaccaaggagggcgttgatgcctacaacgaagtgatcgcccgggtgcgaatgtgggtgaacctgaacctgtggcagaagctgaagctaagcagagatgatgccaagcctctgctgagactgaagggattcccttcctttcctctggtcgagagacaggccaacgaagtggactggtgggacatggtgtgtaacgtgaagaagctgatcaacgagaaaaaggaggatggcaaggtgttttggcagaatctggctggctacaagagacaggaagccctgagaccatacctgagcagcgaggaagatcggaagaagggaaagaaattcgctcggtaccagctgggcgacctgctgctgcacctggaaaagaagcacggcgaggactggggaaaggtgtacgacgaggcctgggagcggattgacaagaaagtggaaggcctgagcaagcacatcaagctggaagaggaacggagaagcgaggacgcccagagcaaggccgccctgaccgactggctgcgggctaaggccagcttcgtgatcgagggcctgaaggaggccgacaaggacgagttctgcagatgcgagctgaagctgcagaagtggtacggggacctgcggggaaagcccttcgccatcgaagccgagaacagcatcctggacatcagcggcttcagcaagcagtacaactgtgccttcatctggcagaaggacggcgtgaagaagctgaacctgtacctgatcatcaactacttcaagggcggcaagctgcggttcaagaagatcaaacctgaagccttcgaagccaacagattctacaccgtgatcaacaaaaagagcggcgagatcgtgcccatggaggtgaacttcaacttcgacgaccccaacctgatcatcctgcctctggcctttggcaagagacagggcagagaattcatctggaacgacctgctgtccctggaaaccggcagcctgaagctggccaacggaagagtgatcgagaagacactgtacaacagaagaacccggcaggatgagcctgccctgttcgtggccctgaccttcgagcggcgggaggtcctggactcctccaatatcaaaccaatgaacctgatcggcgtggcaagaggcgaaaacatccccgccgtgatcgccctgaccgaccccgagggctgcccactgagccggtttaaggatagcctgggaaacccaacccacatcctgagaatcggcgagagctataaggagaagcagcggaccatccaggccaagaaggaggtggagcagcggagagccggcggctacagccggaagtacgccagcaaagccaagaatctggcagacgatatggtgagaaacaccgctagagatctgctgtactacgccgtgacccaggatgccatgctgatcttcgccaacctgagccggggcttcggccggcagggcaagcggaccttcatggccgagagacagtacacacggatggaggactggctgaccgccaagctggcctacgagggcctgagcaagacctacctgtccaagacactggcccagtacacctccaagacatgcagcaactgtgggtttaccatcaccagcgccgactacgacagggtgctggagaagctgaagaagacagcaacaggctggatgaccacaattaacggcaaggagctgaaggtggagggccagattacctactacaacagatacaagagacagaacgtagtcaaggacctgtccgtcgagctggatagactgagcgaagaatctgtgaacaacgacatctcctcctggacaaagggcagaagcggagaagctctgagcctcctgaagaaaagattctcccatagacccgtgcaggagaagttcgtgtgcctgaactgcggcttcgagacacacgcagccgagcaagccgccctgaacatcgccagatcctggctgttcctgcggagccaggagtacaagaaataccagacaaacaagacaaccggcaacaccgataagagagccttcgtcgagacctggcagtccttttaccggaagaagcttaaggaggtgtggaaacctgccgtgcggtctggcggatctggcggaggctccaccagccccaagaaaaagagaaaagtctaagctgccttctgcggggcttgccttctggccatgcccttcttctctcccttgcacctgtacctcttggtctttgaataaagcctgagtaggaaggctagcaaaaaaaaaaaaaaaaaaaaaaaaaaaaaaaaaaaaaaaaaaaaaaaaaaaaaaaaaaaaaaaaaaaaaaaaaaaaaaaa

SEQ ID NO: 9143 - RNA, 8787 nt, synthetic construct
  source 1..8787: mol_type = other RNA
aggaaataagagagaaaagaagagtaagaagaaatataagagccaccatggcccctaagaagaagcgtaaagtgagccggatgaaccacgaccaggagttcgacccccctaaggtgtaccctcccgtccccgccgagaagagaaagcccatccgggtcctgagcctgttcgatggcatcgccaccggtctgctggtgctgaaggacctgggcatccaggtggataggtacattgcctccgaggtgtgcgaggactccatcaccgtgggaatggtgcgtcatcagggcaagatcatgtacgtgggcgacgtgcggagcgtgacacagaagcatatccaggagtggggccctttcgacctggtgatcggcggcagcccttgcaatgacctgagcatcgtgaacccagcccggaagggcctgtacgagggaaccggcagactgttcttcgagttttacagactgctgcacgacgcccggcctaaggaaggcgacgaccggcccttcttttggctgttcgagaatgtggtggccatgggagtcagcgacaagcgggatattagccggttcctggagagcaaccccgtgatgatcgatgccaaggaagtgagcgccgcccaccgggccagatacttctggggcaatctgcctggcatgaacagacccctggccagcaccgtgaacgacaagctggagctgcaggagtgcctggagcacggccggatcgccaagttcagcaaggtgagaaccatcaccacccgaagcaacagcatcaaacaaggcaaggaccagcactttcctgtgttcatgaacgagaaggaggacatcctgtggtgtaccgagatggagagagtgttcgggttcccagtccactacacagatgtcagcaacatgtctagactggccagacagagactgctgggaagaagctggtccgtccctgtgatcagacacctgttcgcccctctgaaggagtacttcgcctgcgtgagcagcggcaacagcaacgccaacagccggggccccagcttctctagcggcctggtgccactgtccctgagagggagccacatgggccccatggagatctacaaaaccgtgagcgcctggaagcggcagcctgtgcgcgtgctgagcctgtttcggaatatcgataaagtcctgaaaagcctgggattcctggagagcggctctggctccggcggtggcaccctgaagtacgtggaggatgtgacaaacgtggtcagacgggatgtggagaagtggggccccttcgatctggtgtacggcagcacccaacccctgggcagctcttgtgaccggtgccctggctggtacatgtttcagttccaccggatcctgcagtacgccctgccgagacaggagtcccagcggccattcttttggattttcatggacaacttgctgctgaccgaggatgaccaggaaactaccactcggttcctgcagaccgaagccgtgaccctgcaggacgtgagaggccgggactaccagaacgccatgcgggtgtggtccaacatccctggactgaaaagcaagcacgcacctctgacccctaaagaagaggagtacctgcaggcccaggtgcggagcagaagcaagctggacgcccctaaggtggatctgctggtgaagaattgcctcctgcccctgagagagtacttcaagtatttcagccagaatagtctgcccctgggaggcagcggcggcggcaggaccagcgccttccccttccaggcccccgtgaccttcggcgacctggccatctacttcagccaggaggagtgggagtggctgagccccatccagaaggacctgtacgaggacgtgatgctggagaactaccagaacctggtgagcctgggcctgtgcttcaggaggcccaacgtgatcaccctgctggagaagggcaaggccccctggatggtggaccccgtgaagaggaggaggggcctgggcggcccaagcagcggcgcccctcctcccagcggcggcaggcggcccaagcagcggcgcccctcctcccagcggcggcagcccagccggctccccaacctctaccgaggagggcacctctgagtccgccacccccgagagcggccctggcacctccaccgagcccagcgagggcagcgcacccggcagccctgccggcagccccacctccacagaggagggaaccagcaccgagcccagcgaaggcagcgccccaggcaccagcaccgagcctagtgagcaggagattaaacggatcaacaagatcagaagaagacttgtgaaagacagcaacaccaagaaggccggcaagacaggccccatgaaaaccctgctggttagagtgatgacacccgatctgagagagcggctggaaaacctgagaaagaagcctgaaaatatcccccagcccatcagcaatacatctagagccaacctgaataagctgctgaccgattacaccgaaatgaagaaggcgatcctgcatgtgtactgggaagagttccagaaggaccctgtgggcctgatgagccgggtggcccagcctgccagcaagaagatcgatcagaacaagctgaaacctgagatggacgagaagggcaacctgaccaccgccggctttgcctgctctcagtgtggccagcccctgttcgtgtacaagctggagcaggtgtctgagaagggcaaggcttacaccaactacttcggacggtgcaatgtggccgagcacgaaaagctgatcctgctggcccagctgaagcccgagaaggatagcgacgaagccgtgacatatagcctgggaaagtttgggcagagggccctggatttctacagcattcatgtgaccaaggagtccacccaccccgtgaagcccctggcccagatcgccggaaacagatacgcctccggacctgtgggaaaggccctgagcgacgcatgtatgggcacaatcgcctccttcctgtctaagtaccaggacatcatcatcgaacaccagaaggtggtgaagggcaaccagaagagactggagagcctgcgggagctggccggcaaggaaaacctggaataccctagcgtgaccctgccacctcagcctcacaccaaggagggcgttgatgcctacaacgaagtgatcgcccgggtgcgaatgtgggtgaacctgaacctgtggcagaagctgaagctaagcagagatgatgccaagcctctgctgagactgaagggattcccttcctttcctctggtcgagagacaggccaacgaagtggactggtgggacatggtgtgtaacgtgaagaagctgatcaacgagaaaaaggaggatggcaaggtgttttggcagaatctggctggctacaagagacaggaagccctgagaccatacctgagcagcgaggaagatcggaagaagggaaagaaattcgctcggtaccagctgggcgacctgctgctgcacctggaaaagaagcacggcgaggactggggaaaggtgtacgacgaggcctgggagcggattgacaagaaagtggaaggcctgagcaagcacatcaagctggaagaggaacggagaagcgaggacgcccagagcaaggccgccctgaccgactggctgcgggctaaggccagcttcgtgatcgagggcctgaaggaggccgacaaggacgagttctgcagatgcgagctgaagctgcagaagtggtacggggacctgcggggaaagcccttcgccatcgaagccgagaacagcatcctggacatcagcggcttcagcaagcagtacaactgtgccttcatctggcagaaggacggcgtgaagaagctgaacctgtacctgatcatcaactacttcaagggcggcaagctgcggttcaagaagatcaaacctgaagccttcgaagccaacagattctacaccgtgatcaacaaaaagagcggcgagatcgtgcccatggaggtgaacttcaacttcgacgaccccaacctgatcatcctgcctctggcctttggcaagagacagggcagagaattcatctggaacgacctgctgtccctggaaaccggcagcctgaagctggccaacggaagagtgatcgagaagacactgtacaacagaagaacccggcaggatgagcctgccctgttcgtggccctgaccttcgagcggcgggaggtcctggactcctccaatatcaaaccaatgaacctgatcggcgtggcaagaggcgaaaacatccccgccgtgatcgccctgaccgaccccgagggctgcccactgagccggtttaaggatagcctgggaaacccaacccacatcctgagaatcggcgagagctataaggagaagcagcggaccatccaggccaagaaggaggtggagcagcggagagccggcggctacagccggaagtacgccagcaaagccaagaatctggcagacgatatggtgagaaacaccgctagagatctgctgtactacgccgtgacccaggatgccatgctgatcttcgccaacctgagccggggcttcggccggcagggcaagcggaccttcatggccgagagacagtacacacggatggaggactggctgaccgccaagctggcctacgagggcctgagcaagacctacctgtccaagacactggcccagtacacctccaagacatgcagcaactgtgggtttaccatcaccagcgccgactacgacagggtgctggagaagctgaagaagacagcaacaggctggatgaccacaattaacggcaaggagctgaaggtggagggccagattacctactacaacagatacaagagacagaacgtagtcaaggacctgtccgtcgagctggatagactgagcgaagaatctgtgaacaacgacatctcctcctggacaaagggcagaagcggagaagctctgagcctcctgaagaaaagattctcccatagacccgtgcaggagaagttcgtgtgcctgaactgcggcttcgagacacacgcagccgagcaagccgccctgaacatcgccagatcctggctgttcctgcggagccaggagtacaagaaataccagacaaacaagacaaccggcaacaccgataagagagccttcgtcgagacctggcagtccttttaccggaagaagcttaaggaggtgtggaaacctgccgtgcggtctggcggatctggcggaggctccaccagccccaagaaaaagagaaaagtctaagctgccttctgcggggcttgccttctggccatgcccttcttctctcccttgcacctgtacctcttggtctttgaataaagcctgagtaggaaggctagcaaaaaaaaaaaaaaaaaaaaaaaaaaaaaaaaaaaaaaaaaaaaaaaaaaaaaaaaaaaaaaaaaaaaaaaaaaaaaaaagcccagccggctccccaacctctaccgaggagggcacctctgagtccgccacccccgagagcggccctggcacctccaccgagcccagcgagggcagcgcacccggcagccctgccggcagccccacctccacagaggagggaaccagcaccgagcccagcgaaggcagcgccccaggcaccagcaccgagcctagtgagcaggagattaaacggatcaacaagatcagaagaagacttgtgaaagacagcaacaccaagaaggccggcaagacaggccccatgaaaaccctgctggttagagtgatgacacccgatctgagagagcggctggaaaacctgagaaagaagcctgaaaatatcccccagcccatcagcaatacatctagagccaacctgaataagctgctgaccgattacaccgaaatgaagaaggcgatcctgcatgtgtactgggaagagttccagaaggaccctgtgggcctgatgagccgggtggcccagcctgccagcaagaagatcgatcagaacaagctgaaacctgagatggacgagaagggcaacctgaccaccgccggctttgcctgctctcagtgtggccagcccctgttcgtgtacaagctggagcaggtgtctgagaagggcaaggcttacaccaactacttcggacggtgcaatgtggccgagcacgaaaagctgatcctgctggcccagctgaagcccgagaaggatagcgacgaagccgtgacatatagcctgggaaagtttgggcagagggccctggatttctacagcattcatgtgaccaaggagtccacccaccccgtgaagcccctggcccagatcgccggaaacagatacgcctccggacctgtgggaaaggccctgagcgacgcatgtatgggcacaatcgcctccttcctgtctaagtaccaggacatcatcatcgaacaccagaaggtggtgaagggcaaccagaagagactggagagcctgcgggagctggccggcaaggaaaacctggaataccctagcgtgaccctgccacctcagcctcacaccaaggagggcgttgatgcctacaacgaagtgatcgcccgggtgcgaatgtgggtgaacctgaacctgtggcagaagctgaagctaagcagagatgatgccaagcctctgctgagactgaagggattcccttcctttcctctggtcgagagacaggccaacgaagtggactggtgggacatggtgtgtaacgtgaagaagctgatcaacgagaaaaaggaggatggcaaggtgttttggcagaatctggctggctacaagagacaggaagccctgagaccatacctgagcagcgaggaagatcggaagaagggaaagaaattcgctcggtaccagctgggcgacctgctgctgcacctggaaaagaagcacggcgaggactggggaaaggtgtacgacgaggcctgggagcggattgacaagaaagtggaaggcctgagcaagcacatcaagctggaagaggaacggagaagcgaggacgcccagagcaaggccgccctgaccgactggctgcgggctaaggccagcttcgtgatcgagggcctgaaggaggccgacaaggacgagttctgcagatgcgagctgaagctgcagaagtggtacggggacctgcggggaaagcccttcgccatcgaagccgagaacagcatcctggacatcagcggcttcagcaagcagtacaactgtgccttcatctggcagaaggacggcgtgaagaagctgaacctgtacctgatcatcaactacttcaagggcggcaagctgcggttcaagaagatcaaacctgaagccttcgaagccaacagattctacaccgtgatcaacaaaaagagcggcgagatcgtgcccatggaggtgaacttcaacttcgacgaccccaacctgatcatcctgcctctggcctttggcaagagacagggcagagaattcatctggaacgacctgctgtccctggaaaccggcagcctgaagctggccaacggaagagtgatcgagaagacactgtacaacagaagaacccggcaggatgagcctgccctgttcgtggccctgaccttcgagcggcgggaggtcctggactcctccaatatcaaaccaatgaacctgatcggcgtggcaagaggcgaaaacatccccgccgtgatcgccctgaccgaccccgagggctgcccactgagccggtttaaggatagcctgggaaacccaacccacatcctgagaatcggcgagagctataaggagaagcagcggaccatccaggccaagaaggaggtggagcagcggagagccggcggctacagccggaagtacgccagcaaagccaagaatctggcagacgatatggtgagaaacaccgctagagatctgctgtactacgccgtgacccaggatgccatgctgatcttcgccaacctgagccggggcttcggccggcagggcaagcggaccttcatggccgagagacagtacacacggatggaggactggctgaccgccaagctggcctacgagggcctgagcaagacctacctgtccaagacactggcccagtacacctccaagacatgcagcaactgtgggtttaccatcaccagcgccgactacgacagggtgctggagaagctgaagaagacagcaacaggctggatgaccacaattaacggcaaggagctgaaggtggagggccagattacctactacaacagatacaagagacagaacgtagtcaaggacctgtccgtcgagctggatagactgagcgaagaatctgtgaacaacgacatctcctcctggacaaagggcagaagcggagaagctctgagcctcctgaagaaaagattctcccatagacccgtgcaggagaagttcgtgtgcctgaactgcggcttcgagacacacgcagccgagcaagccgccctgaacatcgccagatcctggctgttcctgcggagccaggagtacaagaaataccagacaaacaagacaaccggcaacaccgataagagagccttcgtcgagacctggcagtccttttaccggaagaagcttaaggaggtgtggaaacctgccgtgcggtctggcggatctggcggaggctccaccagccccaagaaaaagagaaaagtctaagctgccttctgcggggcttgccttctggccatgcccttcttctctcccttgcacctgtacctcttggtctttgaataaagcctgagtaggaaggctagcaaaaaaaaaaaaaaaaaaaaaaaaaaaaaaaaaaaaaaaaaaaaaaaaaaaaaaaaaaaaaaaaaaaaaaaaaaaaaaaa

SEQ ID NO: 9144 - RNA, 8787 nt, synthetic construct
  source 1..8787: mol_type = other RNA
aggaaataagagagaaaagaagagtaagaagaaatataagagccaccatggcccctaagaagaagcgtaaagtgagccggatgaaccacgaccaggagttcgacccccctaaggtgtaccctcccgtccccgccgagaagagaaagcccatccgggtcctgagcctgttcgatggcatcgccaccggtctgctggtgctgaaggacctgggcatccaggtggataggtacattgcctccgaggtgtgcgaggactccatcaccgtgggaatggtgcgtcatcagggcaagatcatgtacgtgggcgacgtgcggagcgtgacacagaagcatatccaggagtggggccctttcgacctggtgatcggcggcagcccttgcaatgacctgagcatcgtgaacccagcccggaagggcctgtacgagggaaccggcagactgttcttcgagttttacagactgctgcacgacgcccggcctaaggaaggcgacgaccggcccttcttttggctgttcgagaatgtggtggccatgggagtcagcgacaagcgggatattagccggttcctggagagcaaccccgtgatgatcgatgccaaggaagtgagcgccgcccaccgggccagatacttctggggcaatctgcctggcatgaacagacccctggccagcaccgtgaacgacaagctggagctgcaggagtgcctggagcacggccggatcgccaagttcagcaaggtgagaaccatcaccacccgaagcaacagcatcaaacaaggcaaggaccagcactttcctgtgttcatgaacgagaaggaggacatcctgtggtgtaccgagatggagagagtgttcgggttcccagtccactacacagatgtcagcaacatgtctagactggccagacagagactgctgggaagaagctggtccgtccctgtgatcagacacctgttcgcccctctgaaggagtacttcgcctgcgtgagcagcggcaacagcaacgccaacagccggggccccagcttctctagcggcctggtgccactgtccctgagagggagccacatgggccccatggagatctacaaaaccgtgagcgcctggaagcggcagcctgtgcgcgtgctgagcctgtttcggaatatcgataaagtcctgaaaagcctgggattcctggagagcggctctggctccggcggtggcaccctgaagtacgtggaggatgtgacaaacgtggtcagacgggatgtggagaagtggggccccttcgatctggtgtacggcagcacccaacccctgggcagctcttgtgaccggtgccctggctggtacatgtttcagttccaccggatcctgcagtacgccctgccgagacaggagtcccagcggccattcttttggattttcatggacaacttgctgctgaccgaggatgaccaggaaactaccactcggttcctgcagaccgaagccgtgaccctgcaggacgtgagaggccgggactaccagaacgccatgcgggtgtggtccaacatccctggactgaaaagcaagcacgcacctctgacccctaaagaagaggagtacctgcaggcccaggtgcggagcagaagcaagctggacgcccctaaggtggatctgctggtgaagaattgcctcctgcccctgagagagtacttcaagtatttcagccagaatagtctgcccctgggaggcagcggcggcggcgcccaggtgctggtgaccttccaggacgtggccgtggacttcacccaggaggagtggaggctgctggaccccggccagaaggagctgtacaaggaggtgatgctggagaacgtgcagaacgtgctgagcctgggcctgcccgtgcccagggaggactggatcagccacttcgaccagggcagggccccctggatgctggagggcgagggccccagcaacagctgcctgggcagggagaggaggggcggcccaagcagcggcgcccctcctcccagcggcggcaggcggcccaagcagcggcgcccctcctcccagcggcggcagcccagccggctccccaacctctaccgaggagggcacctctgagtccgccacccccgagagcggccctggcacctccaccgagcccagcgagggcagcgcacccggcagccctgccggcagccccacctccacagaggagggaaccagcaccgagcccagcgaaggcagcgccccaggcaccagcaccgagcctagtgagcaggagattaaacggatcaacaagatcagaagaagacttgtgaaagacagcaacaccaagaaggccggcaagacaggccccatgaaaaccctgctggttagagtgatgacacccgatctgagagagcggctggaaaacctgagaaagaagcctgaaaatatcccccagcccatcagcaatacatctagagccaacctgaataagctgctgaccgattacaccgaaatgaagaaggcgatcctgcatgtgtactgggaagagttccagaaggaccctgtgggcctgatgagccgggtggcccagcctgccagcaagaagatcgatcagaacaagctgaaacctgagatggacgagaagggcaacctgaccaccgccggctttgcctgctctcagtgtggccagcccctgttcgtgtacaagctggagcaggtgtctgagaagggcaaggcttacaccaactacttcggacggtgcaatgtggccgagcacgaaaagctgatcctgctggcccagctgaagcccgagaaggatagcgacgaagccgtgacatatagcctgggaaagtttgggcagagggccctggatttctacagcattcatgtgaccaaggagtccacccaccccgtgaagcccctggcccagatcgccggaaacagatacgcctccggacctgtgggaaaggccctgagcgacgcatgtatgggcacaatcgcctccttcctgtctaagtaccaggacatcatcatcgaacaccagaaggtggtgaagggcaaccagaagagactggagagcctgcgggagctggccggcaaggaaaacctggaataccctagcgtgaccctgccacctcagcctcacaccaaggagggcgttgatgcctacaacgaagtgatcgcccgggtgcgaatgtgggtgaacctgaacctgtggcagaagctgaagctaagcagagatgatgccaagcctctgctgagactgaagggattcccttcctttcctctggtcgagagacaggccaacgaagtggactggtgggacatggtgtgtaacgtgaagaagctgatcaacgagaaaaaggaggatggcaaggtgttttggcagaatctggctggctacaagagacaggaagccctgagaccatacctgagcagcgaggaagatcggaagaagggaaagaaattcgctcggtaccagctgggcgacctgctgctgcacctggaaaagaagcacggcgaggactggggaaaggtgtacgacgaggcctgggagcggattgacaagaaagtggaaggcctgagcaagcacatcaagctggaagaggaacggagaagcgaggacgcccagagcaaggccgccctgaccgactggctgcgggctaaggccagcttcgtgatcgagggcctgaaggaggccgacaaggacgagttctgcagatgcgagctgaagctgcagaagtggtacggggacctgcggggaaagcccttcgccatcgaagccgagaacagcatcctggacatcagcggcttcagcaagcagtacaactgtgccttcatctggcagaaggacggcgtgaagaagctgaacctgtacctgatcatcaactacttcaagggcggcaagctgcggttcaagaagatcaaacctgaagccttcgaagccaacagattctacaccgtgatcaacaaaaagagcggcgagatcgtgcccatggaggtgaacttcaacttcgacgaccccaacctgatcatcctgcctctggcctttggcaagagacagggcagagaattcatctggaacgacctgctgtccctggaaaccggcagcctgaagctggccaacggaagagtgatcgagaagacactgtacaacagaagaacccggcaggatgagcctgccctgttcgtggccctgaccttcgagcggcgggaggtcctggactcctccaatatcaaaccaatgaacctgatcggcgtggcaagaggcgaaaacatccccgccgtgatcgccctgaccgaccccgagggctgcccactgagccggtttaaggatagcctgggaaacccaacccacatcctgagaatcggcgagagctataaggagaagcagcggaccatccaggccaagaaggaggtggagcagcggagagccggcggctacagccggaagtacgccagcaaagccaagaatctggcagacgatatggtgagaaacaccgctagagatctgctgtactacgccgtgacccaggatgccatgctgatcttcgccaacctgagccggggcttcggccggcagggcaagcggaccttcatggccgagagacagtacacacggatggaggactggctgaccgccaagctggcctacgagggcctgagcaagacctacctgtccaagacactggcccagtacacctccaagacatgcagcaactgtgggtttaccatcaccagcgccgactacgacagggtgctggagaagctgaagaagacagcaacaggctggatgaccacaattaacggcaaggagctgaaggtggagggccagattacctactacaacagatacaagagacagaacgtagtcaaggacctgtccgtcgagctggatagactgagcgaagaatctgtgaacaacgacatctcctcctggacaaagggcagaagcggagaagctctgagcctcctgaagaaaagattctcccatagacccgtgcaggagaagttcgtgtgcctgaactgcggcttcgagacacacgcagccgagcaagccgccctgaacatcgccagatcctggctgttcctgcggagccaggagtacaagaaataccagacaaacaagacaaccggcaacaccgataagagagccttcgtcgagacctggcagtccttttaccggaagaagcttaaggaggtgtggaaacctgccgtgcggtctggcggatctggcggaggctccaccagccccaagaaaaagagaaaagtctaagctgccttctgcggggcttgccttctggccatgcccttcttctctcccttgcacctgtacctcttggtctttgaataaagcctgagtaggaaggctagcaaaaaaaaaaaaaaaaaaaaaaaaaaaaaaaaaaaaaaaaaaaaaaaaaaaaaaaaaaaaaaaaaaaaaaaaaaaaaaaagcccagccggctccccaacctctaccgaggagggcacctctgagtccgccacccccgagagcggccctggcacctccaccgagcccagcgagggcagcgcacccggcagccctgccggcagccccacctccacagaggagggaaccagcaccgagcccagcgaaggcagcgccccaggcaccagcaccgagcctagtgagcaggagattaaacggatcaacaagatcagaagaagacttgtgaaagacagcaacaccaagaaggccggcaagacaggccccatgaaaaccctgctggttagagtgatgacacccgatctgagagagcggctggaaaacctgagaaagaagcctgaaaatatcccccagcccatcagcaatacatctagagccaacctgaataagctgctgaccgattacaccgaaatgaagaaggcgatcctgcatgtgtactgggaagagttccagaaggaccctgtgggcctgatgagccgggtggcccagcctgccagcaagaagatcgatcagaacaagctgaaacctgagatggacgagaagggcaacctgaccaccgccggctttgcctgctctcagtgtggccagcccctgttcgtgtacaagctggagcaggtgtctgagaagggcaaggcttacaccaactacttcggacggtgcaatgtggccgagcacgaaaagctgatcctgctggcccagctgaagcccgagaaggatagcgacgaagccgtgacatatagcctgggaaagtttgggcagagggccctggatttctacagcattcatgtgaccaaggagtccacccaccccgtgaagcccctggcccagatcgccggaaacagatacgcctccggacctgtgggaaaggccctgagcgacgcatgtatgggcacaatcgcctccttcctgtctaagtaccaggacatcatcatcgaacaccagaaggtggtgaagggcaaccagaagagactggagagcctgcgggagctggccggcaaggaaaacctggaataccctagcgtgaccctgccacctcagcctcacaccaaggagggcgttgatgcctacaacgaagtgatcgcccgggtgcgaatgtgggtgaacctgaacctgtggcagaagctgaagctaagcagagatgatgccaagcctctgctgagactgaagggattcccttcctttcctctggtcgagagacaggccaacgaagtggactggtgggacatggtgtgtaacgtgaagaagctgatcaacgagaaaaaggaggatggcaaggtgttttggcagaatctggctggctacaagagacaggaagccctgagaccatacctgagcagcgaggaagatcggaagaagggaaagaaattcgctcggtaccagctgggcgacctgctgctgcacctggaaaagaagcacggcgaggactggggaaaggtgtacgacgaggcctgggagcggattgacaagaaagtggaaggcctgagcaagcacatcaagctggaagaggaacggagaagcgaggacgcccagagcaaggccgccctgaccgactggctgcgggctaaggccagcttcgtgatcgagggcctgaaggaggccgacaaggacgagttctgcagatgcgagctgaagctgcagaagtggtacggggacctgcggggaaagcccttcgccatcgaagccgagaacagcatcctggacatcagcggcttcagcaagcagtacaactgtgccttcatctggcagaaggacggcgtgaagaagctgaacctgtacctgatcatcaactacttcaagggcggcaagctgcggttcaagaagatcaaacctgaagccttcgaagccaacagattctacaccgtgatcaacaaaaagagcggcgagatcgtgcccatggaggtgaacttcaacttcgacgaccccaacctgatcatcctgcctctggcctttggcaagagacagggcagagaattcatctggaacgacctgctgtccctggaaaccggcagcctgaagctggccaacggaagagtgatcgagaagacactgtacaacagaagaacccggcaggatgagcctgccctgttcgtggccctgaccttcgagcggcgggaggtcctggactcctccaatatcaaaccaatgaacctgatcggcgtggcaagaggcgaaaacatccccgccgtgatcgccctgaccgaccccgagggctgcccactgagccggtttaaggatagcctgggaaacccaacccacatcctgagaatcggcgagagctataaggagaagcagcggaccatccaggccaagaaggaggtggagcagcggagagccggcggctacagccggaagtacgccagcaaagccaagaatctggcagacgatatggtgagaaacaccgctagagatctgctgtactacgccgtgacccaggatgccatgctgatcttcgccaacctgagccggggcttcggccggcagggcaagcggaccttcatggccgagagacagtacacacggatggaggactggctgaccgccaagctggcctacgagggcctgagcaagacctacctgtccaagacactggcccagtacacctccaagacatgcagcaactgtgggtttaccatcaccagcgccgactacgacagggtgctggagaagctgaagaagacagcaacaggctggatgaccacaattaacggcaaggagctgaaggtggagggccagattacctactacaacagatacaagagacagaacgtagtcaaggacctgtccgtcgagctggatagactgagcgaagaatctgtgaacaacgacatctcctcctggacaaagggcagaagcggagaagctctgagcctcctgaagaaaagattctcccatagacccgtgcaggagaagttcgtgtgcctgaactgcggcttcgagacacacgcagccgagcaagccgccctgaacatcgccagatcctggctgttcctgcggagccaggagtacaagaaataccagacaaacaagacaaccggcaacaccgataagagagccttcgtcgagacctggcagtccttttaccggaagaagcttaaggaggtgtggaaacctgccgtgcggtctggcggatctggcggaggctccaccagccccaagaaaaagagaaaagtctaagctgccttctgcggggcttgccttctggccatgcccttcttctctcccttgcacctgtacctcttggtctttgaataaagcctgagtaggaaggctagcaaaaaaaaaaaaaaaaaaaaaaaaaaaaaaaaaaaaaaaaaaaaaaaaaaaaaaaaaaaaaaaaaaaaaaaaaaaaaaaa

SEQ ID NO: 9145 - RNA, 8787 nt, synthetic construct
  source 1..8787: mol_type = other RNA
aggaaataagagagaaaagaagagtaagaagaaatataagagccaccatggcccctaagaagaagcgtaaagtgagccggatgaaccacgaccaggagttcgacccccctaaggtgtaccctcccgtccccgccgagaagagaaagcccatccgggtcctgagcctgttcgatggcatcgccaccggtctgctggtgctgaaggacctgggcatccaggtggataggtacattgcctccgaggtgtgcgaggactccatcaccgtgggaatggtgcgtcatcagggcaagatcatgtacgtgggcgacgtgcggagcgtgacacagaagcatatccaggagtggggccctttcgacctggtgatcggcggcagcccttgcaatgacctgagcatcgtgaacccagcccggaagggcctgtacgagggaaccggcagactgttcttcgagttttacagactgctgcacgacgcccggcctaaggaaggcgacgaccggcccttcttttggctgttcgagaatgtggtggccatgggagtcagcgacaagcgggatattagccggttcctggagagcaaccccgtgatgatcgatgccaaggaagtgagcgccgcccaccgggccagatacttctggggcaatctgcctggcatgaacagacccctggccagcaccgtgaacgacaagctggagctgcaggagtgcctggagcacggccggatcgccaagttcagcaaggtgagaaccatcaccacccgaagcaacagcatcaaacaaggcaaggaccagcactttcctgtgttcatgaacgagaaggaggacatcctgtggtgtaccgagatggagagagtgttcgggttcccagtccactacacagatgtcagcaacatgtctagactggccagacagagactgctgggaagaagctggtccgtccctgtgatcagacacctgttcgcccctctgaaggagtacttcgcctgcgtgagcagcggcaacagcaacgccaacagccggggccccagcttctctagcggcctggtgccactgtccctgagagggagccacatgggccccatggagatctacaaaaccgtgagcgcctggaagcggcagcctgtgcgcgtgctgagcctgtttcggaatatcgataaagtcctgaaaagcctgggattcctggagagcggctctggctccggcggtggcaccctgaagtacgtggaggatgtgacaaacgtggtcagacgggatgtggagaagtggggccccttcgatctggtgtacggcagcacccaacccctgggcagctcttgtgaccggtgccctggctggtacatgtttcagttccaccggatcctgcagtacgccctgccgagacaggagtcccagcggccattcttttggattttcatggacaacttgctgctgaccgaggatgaccaggaaactaccactcggttcctgcagaccgaagccgtgaccctgcaggacgtgagaggccgggactaccagaacgccatgcgggtgtggtccaacatccctggactgaaaagcaagcacgcacctctgacccctaaagaagaggagtacctgcaggcccaggtgcggagcagaagcaagctggacgcccctaaggtggatctgctggtgaagaattgcctcctgcccctgagagagtacttcaagtatttcagccagaatagtctgcccctgggaggcagcggcggcggcaggagggagcccgtgaccttcgaggacgtggccgtgtacttcagcgagaacgagtggagcagcctggcccccgcccagagggccctgtacagggacgtgatgctggagaactacggcgccgtggccagcctggccttcagcttccccaagcccgccctgatcagccagctggagaggggcgaggccccctggagcctggccccccagggcgccctggacggcgagggcagcaggggcatcagcggcggcccaagcagcggcgcccctcctcccagcggcggcaggcggcccaagcagcggcgcccctcctcccagcggcggcagcccagccggctccccaacctctaccgaggagggcacctctgagtccgccacccccgagagcggccctggcacctccaccgagcccagcgagggcagcgcacccggcagccctgccggcagccccacctccacagaggagggaaccagcaccgagcccagcgaaggcagcgccccaggcaccagcaccgagcctagtgagcaggagattaaacggatcaacaagatcagaagaagacttgtgaaagacagcaacaccaagaaggccggcaagacaggccccatgaaaaccctgctggttagagtgatgacacccgatctgagagagcggctggaaaacctgagaaagaagcctgaaaatatcccccagcccatcagcaatacatctagagccaacctgaataagctgctgaccgattacaccgaaatgaagaaggcgatcctgcatgtgtactgggaagagttccagaaggaccctgtgggcctgatgagccgggtggcccagcctgccagcaagaagatcgatcagaacaagctgaaacctgagatggacgagaagggcaacctgaccaccgccggctttgcctgctctcagtgtggccagcccctgttcgtgtacaagctggagcaggtgtctgagaagggcaaggcttacaccaactacttcggacggtgcaatgtggccgagcacgaaaagctgatcctgctggcccagctgaagcccgagaaggatagcgacgaagccgtgacatatagcctgggaaagtttgggcagagggccctggatttctacagcattcatgtgaccaaggagtccacccaccccgtgaagcccctggcccagatcgccggaaacagatacgcctccggacctgtgggaaaggccctgagcgacgcatgtatgggcacaatcgcctccttcctgtctaagtaccaggacatcatcatcgaacaccagaaggtggtgaagggcaaccagaagagactggagagcctgcgggagctggccggcaaggaaaacctggaataccctagcgtgaccctgccacctcagcctcacaccaaggagggcgttgatgcctacaacgaagtgatcgcccgggtgcgaatgtgggtgaacctgaacctgtggcagaagctgaagctaagcagagatgatgccaagcctctgctgagactgaagggattcccttcctttcctctggtcgagagacaggccaacgaagtggactggtgggacatggtgtgtaacgtgaagaagctgatcaacgagaaaaaggaggatggcaaggtgttttggcagaatctggctggctacaagagacaggaagccctgagaccatacctgagcagcgaggaagatcggaagaagggaaagaaattcgctcggtaccagctgggcgacctgctgctgcacctggaaaagaagcacggcgaggactggggaaaggtgtacgacgaggcctgggagcggattgacaagaaagtggaaggcctgagcaagcacatcaagctggaagaggaacggagaagcgaggacgcccagagcaaggccgccctgaccgactggctgcgggctaaggccagcttcgtgatcgagggcctgaaggaggccgacaaggacgagttctgcagatgcgagctgaagctgcagaagtggtacggggacctgcggggaaagcccttcgccatcgaagccgagaacagcatcctggacatcagcggcttcagcaagcagtacaactgtgccttcatctggcagaaggacggcgtgaagaagctgaacctgtacctgatcatcaactacttcaagggcggcaagctgcggttcaagaagatcaaacctgaagccttcgaagccaacagattctacaccgtgatcaacaaaaagagcggcgagatcgtgcccatggaggtgaacttcaacttcgacgaccccaacctgatcatcctgcctctggcctttggcaagagacagggcagagaattcatctggaacgacctgctgtccctggaaaccggcagcctgaagctggccaacggaagagtgatcgagaagacactgtacaacagaagaacccggcaggatgagcctgccctgttcgtggccctgaccttcgagcggcgggaggtcctggactcctccaatatcaaaccaatgaacctgatcggcgtggcaagaggcgaaaacatccccgccgtgatcgccctgaccgaccccgagggctgcccactgagccggtttaaggatagcctgggaaacccaacccacatcctgagaatcggcgagagctataaggagaagcagcggaccatccaggccaagaaggaggtggagcagcggagagccggcggctacagccggaagtacgccagcaaagccaagaatctggcagacgatatggtgagaaacaccgctagagatctgctgtactacgccgtgacccaggatgccatgctgatcttcgccaacctgagccggggcttcggccggcagggcaagcggaccttcatggccgagagacagtacacacggatggaggactggctgaccgccaagctggcctacgagggcctgagcaagacctacctgtccaagacactggcccagtacacctccaagacatgcagcaactgtgggtttaccatcaccagcgccgactacgacagggtgctggagaagctgaagaagacagcaacaggctggatgaccacaattaacggcaaggagctgaaggtggagggccagattacctactacaacagatacaagagacagaacgtagtcaaggacctgtccgtcgagctggatagactgagcgaagaatctgtgaacaacgacatctcctcctggacaaagggcagaagcggagaagctctgagcctcctgaagaaaagattctcccatagacccgtgcaggagaagttcgtgtgcctgaactgcggcttcgagacacacgcagccgagcaagccgccctgaacatcgccagatcctggctgttcctgcggagccaggagtacaagaaataccagacaaacaagacaaccggcaacaccgataagagagccttcgtcgagacctggcagtccttttaccggaagaagcttaaggaggtgtggaaacctgccgtgcggtctggcggatctggcggaggctccaccagccccaagaaaaagagaaaagtctaagctgccttctgcggggcttgccttctggccatgcccttcttctctcccttgcacctgtacctcttggtctttgaataaagcctgagtaggaaggctagcaaaaaaaaaaaaaaaaaaaaaaaaaaaaaaaaaaaaaaaaaaaaaaaaaaaaaaaaaaaaaaaaaaaaaaaaaaaaaaaagcccagccggctccccaacctctaccgaggagggcacctctgagtccgccacccccgagagcggccctggcacctccaccgagcccagcgagggcagcgcacccggcagccctgccggcagccccacctccacagaggagggaaccagcaccgagcccagcgaaggcagcgccccaggcaccagcaccgagcctagtgagcaggagattaaacggatcaacaagatcagaagaagacttgtgaaagacagcaacaccaagaaggccggcaagacaggccccatgaaaaccctgctggttagagtgatgacacccgatctgagagagcggctggaaaacctgagaaagaagcctgaaaatatcccccagcccatcagcaatacatctagagccaacctgaataagctgctgaccgattacaccgaaatgaagaaggcgatcctgcatgtgtactgggaagagttccagaaggaccctgtgggcctgatgagccgggtggcccagcctgccagcaagaagatcgatcagaacaagctgaaacctgagatggacgagaagggcaacctgaccaccgccggctttgcctgctctcagtgtggccagcccctgttcgtgtacaagctggagcaggtgtctgagaagggcaaggcttacaccaactacttcggacggtgcaatgtggccgagcacgaaaagctgatcctgctggcccagctgaagcccgagaaggatagcgacgaagccgtgacatatagcctgggaaagtttgggcagagggccctggatttctacagcattcatgtgaccaaggagtccacccaccccgtgaagcccctggcccagatcgccggaaacagatacgcctccggacctgtgggaaaggccctgagcgacgcatgtatgggcacaatcgcctccttcctgtctaagtaccaggacatcatcatcgaacaccagaaggtggtgaagggcaaccagaagagactggagagcctgcgggagctggccggcaaggaaaacctggaataccctagcgtgaccctgccacctcagcctcacaccaaggagggcgttgatgcctacaacgaagtgatcgcccgggtgcgaatgtgggtgaacctgaacctgtggcagaagctgaagctaagcagagatgatgccaagcctctgctgagactgaagggattcccttcctttcctctggtcgagagacaggccaacgaagtggactggtgggacatggtgtgtaacgtgaagaagctgatcaacgagaaaaaggaggatggcaaggtgttttggcagaatctggctggctacaagagacaggaagccctgagaccatacctgagcagcgaggaagatcggaagaagggaaagaaattcgctcggtaccagctgggcgacctgctgctgcacctggaaaagaagcacggcgaggactggggaaaggtgtacgacgaggcctgggagcggattgacaagaaagtggaaggcctgagcaagcacatcaagctggaagaggaacggagaagcgaggacgcccagagcaaggccgccctgaccgactggctgcgggctaaggccagcttcgtgatcgagggcctgaaggaggccgacaaggacgagttctgcagatgcgagctgaagctgcagaagtggtacggggacctgcggggaaagcccttcgccatcgaagccgagaacagcatcctggacatcagcggcttcagcaagcagtacaactgtgccttcatctggcagaaggacggcgtgaagaagctgaacctgtacctgatcatcaactacttcaagggcggcaagctgcggttcaagaagatcaaacctgaagccttcgaagccaacagattctacaccgtgatcaacaaaaagagcggcgagatcgtgcccatggaggtgaacttcaacttcgacgaccccaacctgatcatcctgcctctggcctttggcaagagacagggcagagaattcatctggaacgacctgctgtccctggaaaccggcagcctgaagctggccaacggaagagtgatcgagaagacactgtacaacagaagaacccggcaggatgagcctgccctgttcgtggccctgaccttcgagcggcgggaggtcctggactcctccaatatcaaaccaatgaacctgatcggcgtggcaagaggcgaaaacatccccgccgtgatcgccctgaccgaccccgagggctgcccactgagccggtttaaggatagcctgggaaacccaacccacatcctgagaatcggcgagagctataaggagaagcagcggaccatccaggccaagaaggaggtggagcagcggagagccggcggctacagccggaagtacgccagcaaagccaagaatctggcagacgatatggtgagaaacaccgctagagatctgctgtactacgccgtgacccaggatgccatgctgatcttcgccaacctgagccggggcttcggccggcagggcaagcggaccttcatggccgagagacagtacacacggatggaggactggctgaccgccaagctggcctacgagggcctgagcaagacctacctgtccaagacactggcccagtacacctccaagacatgcagcaactgtgggtttaccatcaccagcgccgactacgacagggtgctggagaagctgaagaagacagcaacaggctggatgaccacaattaacggcaaggagctgaaggtggagggccagattacctactacaacagatacaagagacagaacgtagtcaaggacctgtccgtcgagctggatagactgagcgaagaatctgtgaacaacgacatctcctcctggacaaagggcagaagcggagaagctctgagcctcctgaagaaaagattctcccatagacccgtgcaggagaagttcgtgtgcctgaactgcggcttcgagacacacgcagccgagcaagccgccctgaacatcgccagatcctggctgttcctgcggagccaggagtacaagaaataccagacaaacaagacaaccggcaacaccgataagagagccttcgtcgagacctggcagtccttttaccggaagaagcttaaggaggtgtggaaacctgccgtgcggtctggcggatctggcggaggctccaccagccccaagaaaaagagaaaagtctaagctgccttctgcggggcttgccttctggccatgcccttcttctctcccttgcacctgtacctcttggtctttgaataaagcctgagtaggaaggctagcaaaaaaaaaaaaaaaaaaaaaaaaaaaaaaaaaaaaaaaaaaaaaaaaaaaaaaaaaaaaaaaaaaaaaaaaaaaaaaaa

SEQ ID NO: 9146 - RNA, 8787 nt, synthetic construct
  source 1..8787: mol_type = other RNA
aggaaataagagagaaaagaagagtaagaagaaatataagagccaccatggcccctaagaagaagcgtaaagtgagccggatgaaccacgaccaggagttcgacccccctaaggtgtaccctcccgtccccgccgagaagagaaagcccatccgggtcctgagcctgttcgatggcatcgccaccggtctgctggtgctgaaggacctgggcatccaggtggataggtacattgcctccgaggtgtgcgaggactccatcaccgtgggaatggtgcgtcatcagggcaagatcatgtacgtgggcgacgtgcggagcgtgacacagaagcatatccaggagtggggccctttcgacctggtgatcggcggcagcccttgcaatgacctgagcatcgtgaacccagcccggaagggcctgtacgagggaaccggcagactgttcttcgagttttacagactgctgcacgacgcccggcctaaggaaggcgacgaccggcccttcttttggctgttcgagaatgtggtggccatgggagtcagcgacaagcgggatattagccggttcctggagagcaaccccgtgatgatcgatgccaaggaagtgagcgccgcccaccgggccagatacttctggggcaatctgcctggcatgaacagacccctggccagcaccgtgaacgacaagctggagctgcaggagtgcctggagcacggccggatcgccaagttcagcaaggtgagaaccatcaccacccgaagcaacagcatcaaacaaggcaaggaccagcactttcctgtgttcatgaacgagaaggaggacatcctgtggtgtaccgagatggagagagtgttcgggttcccagtccactacacagatgtcagcaacatgtctagactggccagacagagactgctgggaagaagctggtccgtccctgtgatcagacacctgttcgcccctctgaaggagtacttcgcctgcgtgagcagcggcaacagcaacgccaacagccggggccccagcttctctagcggcctggtgccactgtccctgagagggagccacatgggccccatggagatctacaaaaccgtgagcgcctggaagcggcagcctgtgcgcgtgctgagcctgtttcggaatatcgataaagtcctgaaaagcctgggattcctggagagcggctctggctccggcggtggcaccctgaagtacgtggaggatgtgacaaacgtggtcagacgggatgtggagaagtggggccccttcgatctggtgtacggcagcacccaacccctgggcagctcttgtgaccggtgccctggctggtacatgtttcagttccaccggatcctgcagtacgccctgccgagacaggagtcccagcggccattcttttggattttcatggacaacttgctgctgaccgaggatgaccaggaaactaccactcggttcctgcagaccgaagccgtgaccctgcaggacgtgagaggccgggactaccagaacgccatgcgggtgtggtccaacatccctggactgaaaagcaagcacgcacctctgacccctaaagaagaggagtacctgcaggcccaggtgcggagcagaagcaagctggacgcccctaaggtggatctgctggtgaagaattgcctcctgcccctgagagagtacttcaagtatttcagccagaatagtctgcccctgggaggcagcggcggcggcatgggcgccgtgacctacgacgacgtgcacatcaacttcacccaggaggagtgggccctgctgaaccccagccagaagaggctgtacaaggacgtgatgcacgacacctacagcaacctgaccgccaccggctacagcctggaggaccactacatcgaggagcactgccagagcagcaggaggtgcaggaggcacctgcagaggcacaagaaggtgcacatcggcgagaagccctacgagagcggcggcccaagcagcggcgcccctcctcccagcggcggcaggcggcccaagcagcggcgcccctcctcccagcggcggcagcccagccggctccccaacctctaccgaggagggcacctctgagtccgccacccccgagagcggccctggcacctccaccgagcccagcgagggcagcgcacccggcagccctgccggcagccccacctccacagaggagggaaccagcaccgagcccagcgaaggcagcgccccaggcaccagcaccgagcctagtgagcaggagattaaacggatcaacaagatcagaagaagacttgtgaaagacagcaacaccaagaaggccggcaagacaggccccatgaaaaccctgctggttagagtgatgacacccgatctgagagagcggctggaaaacctgagaaagaagcctgaaaatatcccccagcccatcagcaatacatctagagccaacctgaataagctgctgaccgattacaccgaaatgaagaaggcgatcctgcatgtgtactgggaagagttccagaaggaccctgtgggcctgatgagccgggtggcccagcctgccagcaagaagatcgatcagaacaagctgaaacctgagatggacgagaagggcaacctgaccaccgccggctttgcctgctctcagtgtggccagcccctgttcgtgtacaagctggagcaggtgtctgagaagggcaaggcttacaccaactacttcggacggtgcaatgtggccgagcacgaaaagctgatcctgctggcccagctgaagcccgagaaggatagcgacgaagccgtgacatatagcctgggaaagtttgggcagagggccctggatttctacagcattcatgtgaccaaggagtccacccaccccgtgaagcccctggcccagatcgccggaaacagatacgcctccggacctgtgggaaaggccctgagcgacgcatgtatgggcacaatcgcctccttcctgtctaagtaccaggacatcatcatcgaacaccagaaggtggtgaagggcaaccagaagagactggagagcctgcgggagctggccggcaaggaaaacctggaataccctagcgtgaccctgccacctcagcctcacaccaaggagggcgttgatgcctacaacgaagtgatcgcccgggtgcgaatgtgggtgaacctgaacctgtggcagaagctgaagctaagcagagatgatgccaagcctctgctgagactgaagggattcccttcctttcctctggtcgagagacaggccaacgaagtggactggtgggacatggtgtgtaacgtgaagaagctgatcaacgagaaaaaggaggatggcaaggtgttttggcagaatctggctggctacaagagacaggaagccctgagaccatacctgagcagcgaggaagatcggaagaagggaaagaaattcgctcggtaccagctgggcgacctgctgctgcacctggaaaagaagcacggcgaggactggggaaaggtgtacgacgaggcctgggagcggattgacaagaaagtggaaggcctgagcaagcacatcaagctggaagaggaacggagaagcgaggacgcccagagcaaggccgccctgaccgactggctgcgggctaaggccagcttcgtgatcgagggcctgaaggaggccgacaaggacgagttctgcagatgcgagctgaagctgcagaagtggtacggggacctgcggggaaagcccttcgccatcgaagccgagaacagcatcctggacatcagcggcttcagcaagcagtacaactgtgccttcatctggcagaaggacggcgtgaagaagctgaacctgtacctgatcatcaactacttcaagggcggcaagctgcggttcaagaagatcaaacctgaagccttcgaagccaacagattctacaccgtgatcaacaaaaagagcggcgagatcgtgcccatggaggtgaacttcaacttcgacgaccccaacctgatcatcctgcctctggcctttggcaagagacagggcagagaattcatctggaacgacctgctgtccctggaaaccggcagcctgaagctggccaacggaagagtgatcgagaagacactgtacaacagaagaacccggcaggatgagcctgccctgttcgtggccctgaccttcgagcggcgggaggtcctggactcctccaatatcaaaccaatgaacctgatcggcgtggcaagaggcgaaaacatccccgccgtgatcgccctgaccgaccccgagggctgcccactgagccggtttaaggatagcctgggaaacccaacccacatcctgagaatcggcgagagctataaggagaagcagcggaccatccaggccaagaaggaggtggagcagcggagagccggcggctacagccggaagtacgccagcaaagccaagaatctggcagacgatatggtgagaaacaccgctagagatctgctgtactacgccgtgacccaggatgccatgctgatcttcgccaacctgagccggggcttcggccggcagggcaagcggaccttcatggccgagagacagtacacacggatggaggactggctgaccgccaagctggcctacgagggcctgagcaagacctacctgtccaagacactggcccagtacacctccaagacatgcagcaactgtgggtttaccatcaccagcgccgactacgacagggtgctggagaagctgaagaagacagcaacaggctggatgaccacaattaacggcaaggagctgaaggtggagggccagattacctactacaacagatacaagagacagaacgtagtcaaggacctgtccgtcgagctggatagactgagcgaagaatctgtgaacaacgacatctcctcctggacaaagggcagaagcggagaagctctgagcctcctgaagaaaagattctcccatagacccgtgcaggagaagttcgtgtgcctgaactgcggcttcgagacacacgcagccgagcaagccgccctgaacatcgccagatcctggctgttcctgcggagccaggagtacaagaaataccagacaaacaagacaaccggcaacaccgataagagagccttcgtcgagacctggcagtccttttaccggaagaagcttaaggaggtgtggaaacctgccgtgcggtctggcggatctggcggaggctccaccagccccaagaaaaagagaaaagtctaagctgccttctgcggggcttgccttctggccatgcccttcttctctcccttgcacctgtacctcttggtctttgaataaagcctgagtaggaaggctagcaaaaaaaaaaaaaaaaaaaaaaaaaaaaaaaaaaaaaaaaaaaaaaaaaaaaaaaaaaaaaaaaaaaaaaaaaaaaaaaagcccagccggctccccaacctctaccgaggagggcacctctgagtccgccacccccgagagcggccctggcacctccaccgagcccagcgagggcagcgcacccggcagccctgccggcagccccacctccacagaggagggaaccagcaccgagcccagcgaaggcagcgccccaggcaccagcaccgagcctagtgagcaggagattaaacggatcaacaagatcagaagaagacttgtgaaagacagcaacaccaagaaggccggcaagacaggccccatgaaaaccctgctggttagagtgatgacacccgatctgagagagcggctggaaaacctgagaaagaagcctgaaaatatcccccagcccatcagcaatacatctagagccaacctgaataagctgctgaccgattacaccgaaatgaagaaggcgatcctgcatgtgtactgggaagagttccagaaggaccctgtgggcctgatgagccgggtggcccagcctgccagcaagaagatcgatcagaacaagctgaaacctgagatggacgagaagggcaacctgaccaccgccggctttgcctgctctcagtgtggccagcccctgttcgtgtacaagctggagcaggtgtctgagaagggcaaggcttacaccaactacttcggacggtgcaatgtggccgagcacgaaaagctgatcctgctggcccagctgaagcccgagaaggatagcgacgaagccgtgacatatagcctgggaaagtttgggcagagggccctggatttctacagcattcatgtgaccaaggagtccacccaccccgtgaagcccctggcccagatcgccggaaacagatacgcctccggacctgtgggaaaggccctgagcgacgcatgtatgggcacaatcgcctccttcctgtctaagtaccaggacatcatcatcgaacaccagaaggtggtgaagggcaaccagaagagactggagagcctgcgggagctggccggcaaggaaaacctggaataccctagcgtgaccctgccacctcagcctcacaccaaggagggcgttgatgcctacaacgaagtgatcgcccgggtgcgaatgtgggtgaacctgaacctgtggcagaagctgaagctaagcagagatgatgccaagcctctgctgagactgaagggattcccttcctttcctctggtcgagagacaggccaacgaagtggactggtgggacatggtgtgtaacgtgaagaagctgatcaacgagaaaaaggaggatggcaaggtgttttggcagaatctggctggctacaagagacaggaagccctgagaccatacctgagcagcgaggaagatcggaagaagggaaagaaattcgctcggtaccagctgggcgacctgctgctgcacctggaaaagaagcacggcgaggactggggaaaggtgtacgacgaggcctgggagcggattgacaagaaagtggaaggcctgagcaagcacatcaagctggaagaggaacggagaagcgaggacgcccagagcaaggccgccctgaccgactggctgcgggctaaggccagcttcgtgatcgagggcctgaaggaggccgacaaggacgagttctgcagatgcgagctgaagctgcagaagtggtacggggacctgcggggaaagcccttcgccatcgaagccgagaacagcatcctggacatcagcggcttcagcaagcagtacaactgtgccttcatctggcagaaggacggcgtgaagaagctgaacctgtacctgatcatcaactacttcaagggcggcaagctgcggttcaagaagatcaaacctgaagccttcgaagccaacagattctacaccgtgatcaacaaaaagagcggcgagatcgtgcccatggaggtgaacttcaacttcgacgaccccaacctgatcatcctgcctctggcctttggcaagagacagggcagagaattcatctggaacgacctgctgtccctggaaaccggcagcctgaagctggccaacggaagagtgatcgagaagacactgtacaacagaagaacccggcaggatgagcctgccctgttcgtggccctgaccttcgagcggcgggaggtcctggactcctccaatatcaaaccaatgaacctgatcggcgtggcaagaggcgaaaacatccccgccgtgatcgccctgaccgaccccgagggctgcccactgagccggtttaaggatagcctgggaaacccaacccacatcctgagaatcggcgagagctataaggagaagcagcggaccatccaggccaagaaggaggtggagcagcggagagccggcggctacagccggaagtacgccagcaaagccaagaatctggcagacgatatggtgagaaacaccgctagagatctgctgtactacgccgtgacccaggatgccatgctgatcttcgccaacctgagccggggcttcggccggcagggcaagcggaccttcatggccgagagacagtacacacggatggaggactggctgaccgccaagctggcctacgagggcctgagcaagacctacctgtccaagacactggcccagtacacctccaagacatgcagcaactgtgggtttaccatcaccagcgccgactacgacagggtgctggagaagctgaagaagacagcaacaggctggatgaccacaattaacggcaaggagctgaaggtggagggccagattacctactacaacagatacaagagacagaacgtagtcaaggacctgtccgtcgagctggatagactgagcgaagaatctgtgaacaacgacatctcctcctggacaaagggcagaagcggagaagctctgagcctcctgaagaaaagattctcccatagacccgtgcaggagaagttcgtgtgcctgaactgcggcttcgagacacacgcagccgagcaagccgccctgaacatcgccagatcctggctgttcctgcggagccaggagtacaagaaataccagacaaacaagacaaccggcaacaccgataagagagccttcgtcgagacctggcagtccttttaccggaagaagcttaaggaggtgtggaaacctgccgtgcggtctggcggatctggcggaggctccaccagccccaagaaaaagagaaaagtctaagctgccttctgcggggcttgccttctggccatgcccttcttctctcccttgcacctgtacctcttggtctttgaataaagcctgagtaggaaggctagcaaaaaaaaaaaaaaaaaaaaaaaaaaaaaaaaaaaaaaaaaaaaaaaaaaaaaaaaaaaaaaaaaaaaaaaaaaaaaaaa

SEQ ID NO: 9147 - RNA, 8787 nt, synthetic construct
  source 1..8787: mol_type = other RNA
aggaaataagagagaaaagaagagtaagaagaaatataagagccaccatggcccctaagaagaagcgtaaagtgagccggatgaaccacgaccaggagttcgacccccctaaggtgtaccctcccgtccccgccgagaagagaaagcccatccgggtcctgagcctgttcgatggcatcgccaccggtctgctggtgctgaaggacctgggcatccaggtggataggtacattgcctccgaggtgtgcgaggactccatcaccgtgggaatggtgcgtcatcagggcaagatcatgtacgtgggcgacgtgcggagcgtgacacagaagcatatccaggagtggggccctttcgacctggtgatcggcggcagcccttgcaatgacctgagcatcgtgaacccagcccggaagggcctgtacgagggaaccggcagactgttcttcgagttttacagactgctgcacgacgcccggcctaaggaaggcgacgaccggcccttcttttggctgttcgagaatgtggtggccatgggagtcagcgacaagcgggatattagccggttcctggagagcaaccccgtgatgatcgatgccaaggaagtgagcgccgcccaccgggccagatacttctggggcaatctgcctggcatgaacagacccctggccagcaccgtgaacgacaagctggagctgcaggagtgcctggagcacggccggatcgccaagttcagcaaggtgagaaccatcaccacccgaagcaacagcatcaaacaaggcaaggaccagcactttcctgtgttcatgaacgagaaggaggacatcctgtggtgtaccgagatggagagagtgttcgggttcccagtccactacacagatgtcagcaacatgtctagactggccagacagagactgctgggaagaagctggtccgtccctgtgatcagacacctgttcgcccctctgaaggagtacttcgcctgcgtgagcagcggcaacagcaacgccaacagccggggccccagcttctctagcggcctggtgccactgtccctgagagggagccacatgggccccatggagatctacaaaaccgtgagcgcctggaagcggcagcctgtgcgcgtgctgagcctgtttcggaatatcgataaagtcctgaaaagcctgggattcctggagagcggctctggctccggcggtggcaccctgaagtacgtggaggatgtgacaaacgtggtcagacgggatgtggagaagtggggccccttcgatctggtgtacggcagcacccaacccctgggcagctcttgtgaccggtgccctggctggtacatgtttcagttccaccggatcctgcagtacgccctgccgagacaggagtcccagcggccattcttttggattttcatggacaacttgctgctgaccgaggatgaccaggaaactaccactcggttcctgcagaccgaagccgtgaccctgcaggacgtgagaggccgggactaccagaacgccatgcgggtgtggtccaacatccctggactgaaaagcaagcacgcacctctgacccctaaagaagaggagtacctgcaggcccaggtgcggagcagaagcaagctggacgcccctaaggtggatctgctggtgaagaattgcctcctgcccctgagagagtacttcaagtatttcagccagaatagtctgcccctgggaggcagcggcggcggcagccaggagcccgtgaccttcgaggacgtggccgtgtacttcacccagaaccagtgggccagcctggaccccatgcagagggccctgtacctggaggtgatgctggagaactacgccaacatcaccagcctggccctgcccttccccaagcccgacctgatcctgcagctggagcagggcggcgccccctggggcctggacccctggacccccctggagggcgaggccctgggcggcgtgcacggcggcccaagcagcggcgcccctcctcccagcggcggcaggcggcccaagcagcggcgcccctcctcccagcggcggcagcccagccggctccccaacctctaccgaggagggcacctctgagtccgccacccccgagagcggccctggcacctccaccgagcccagcgagggcagcgcacccggcagccctgccggcagccccacctccacagaggagggaaccagcaccgagcccagcgaaggcagcgccccaggcaccagcaccgagcctagtgagcaggagattaaacggatcaacaagatcagaagaagacttgtgaaagacagcaacaccaagaaggccggcaagacaggccccatgaaaaccctgctggttagagtgatgacacccgatctgagagagcggctggaaaacctgagaaagaagcctgaaaatatcccccagcccatcagcaatacatctagagccaacctgaataagctgctgaccgattacaccgaaatgaagaaggcgatcctgcatgtgtactgggaagagttccagaaggaccctgtgggcctgatgagccgggtggcccagcctgccagcaagaagatcgatcagaacaagctgaaacctgagatggacgagaagggcaacctgaccaccgccggctttgcctgctctcagtgtggccagcccctgttcgtgtacaagctggagcaggtgtctgagaagggcaaggcttacaccaactacttcggacggtgcaatgtggccgagcacgaaaagctgatcctgctggcccagctgaagcccgagaaggatagcgacgaagccgtgacatatagcctgggaaagtttgggcagagggccctggatttctacagcattcatgtgaccaaggagtccacccaccccgtgaagcccctggcccagatcgccggaaacagatacgcctccggacctgtgggaaaggccctgagcgacgcatgtatgggcacaatcgcctccttcctgtctaagtaccaggacatcatcatcgaacaccagaaggtggtgaagggcaaccagaagagactggagagcctgcgggagctggccggcaaggaaaacctggaataccctagcgtgaccctgccacctcagcctcacaccaaggagggcgttgatgcctacaacgaagtgatcgcccgggtgcgaatgtgggtgaacctgaacctgtggcagaagctgaagctaagcagagatgatgccaagcctctgctgagactgaagggattcccttcctttcctctggtcgagagacaggccaacgaagtggactggtgggacatggtgtgtaacgtgaagaagctgatcaacgagaaaaaggaggatggcaaggtgttttggcagaatctggctggctacaagagacaggaagccctgagaccatacctgagcagcgaggaagatcggaagaagggaaagaaattcgctcggtaccagctgggcgacctgctgctgcacctggaaaagaagcacggcgaggactggggaaaggtgtacgacgaggcctgggagcggattgacaagaaagtggaaggcctgagcaagcacatcaagctggaagaggaacggagaagcgaggacgcccagagcaaggccgccctgaccgactggctgcgggctaaggccagcttcgtgatcgagggcctgaaggaggccgacaaggacgagttctgcagatgcgagctgaagctgcagaagtggtacggggacctgcggggaaagcccttcgccatcgaagccgagaacagcatcctggacatcagcggcttcagcaagcagtacaactgtgccttcatctggcagaaggacggcgtgaagaagctgaacctgtacctgatcatcaactacttcaagggcggcaagctgcggttcaagaagatcaaacctgaagccttcgaagccaacagattctacaccgtgatcaacaaaaagagcggcgagatcgtgcccatggaggtgaacttcaacttcgacgaccccaacctgatcatcctgcctctggcctttggcaagagacagggcagagaattcatctggaacgacctgctgtccctggaaaccggcagcctgaagctggccaacggaagagtgatcgagaagacactgtacaacagaagaacccggcaggatgagcctgccctgttcgtggccctgaccttcgagcggcgggaggtcctggactcctccaatatcaaaccaatgaacctgatcggcgtggcaagaggcgaaaacatccccgccgtgatcgccctgaccgaccccgagggctgcccactgagccggtttaaggatagcctgggaaacccaacccacatcctgagaatcggcgagagctataaggagaagcagcggaccatccaggccaagaaggaggtggagcagcggagagccggcggctacagccggaagtacgccagcaaagccaagaatctggcagacgatatggtgagaaacaccgctagagatctgctgtactacgccgtgacccaggatgccatgctgatcttcgccaacctgagccggggcttcggccggcagggcaagcggaccttcatggccgagagacagtacacacggatggaggactggctgaccgccaagctggcctacgagggcctgagcaagacctacctgtccaagacactggcccagtacacctccaagacatgcagcaactgtgggtttaccatcaccagcgccgactacgacagggtgctggagaagctgaagaagacagcaacaggctggatgaccacaattaacggcaaggagctgaaggtggagggccagattacctactacaacagatacaagagacagaacgtagtcaaggacctgtccgtcgagctggatagactgagcgaagaatctgtgaacaacgacatctcctcctggacaaagggcagaagcggagaagctctgagcctcctgaagaaaagattctcccatagacccgtgcaggagaagttcgtgtgcctgaactgcggcttcgagacacacgcagccgagcaagccgccctgaacatcgccagatcctggctgttcctgcggagccaggagtacaagaaataccagacaaacaagacaaccggcaacaccgataagagagccttcgtcgagacctggcagtccttttaccggaagaagcttaaggaggtgtggaaacctgccgtgcggtctggcggatctggcggaggctccaccagccccaagaaaaagagaaaagtctaagctgccttctgcggggcttgccttctggccatgcccttcttctctcccttgcacctgtacctcttggtctttgaataaagcctgagtaggaaggctagcaaaaaaaaaaaaaaaaaaaaaaaaaaaaaaaaaaaaaaaaaaaaaaaaaaaaaaaaaaaaaaaaaaaaaaaaaaaaaaaagcccagccggctccccaacctctaccgaggagggcacctctgagtccgccacccccgagagcggccctggcacctccaccgagcccagcgagggcagcgcacccggcagccctgccggcagccccacctccacagaggagggaaccagcaccgagcccagcgaaggcagcgccccaggcaccagcaccgagcctagtgagcaggagattaaacggatcaacaagatcagaagaagacttgtgaaagacagcaacaccaagaaggccggcaagacaggccccatgaaaaccctgctggttagagtgatgacacccgatctgagagagcggctggaaaacctgagaaagaagcctgaaaatatcccccagcccatcagcaatacatctagagccaacctgaataagctgctgaccgattacaccgaaatgaagaaggcgatcctgcatgtgtactgggaagagttccagaaggaccctgtgggcctgatgagccgggtggcccagcctgccagcaagaagatcgatcagaacaagctgaaacctgagatggacgagaagggcaacctgaccaccgccggctttgcctgctctcagtgtggccagcccctgttcgtgtacaagctggagcaggtgtctgagaagggcaaggcttacaccaactacttcggacggtgcaatgtggccgagcacgaaaagctgatcctgctggcccagctgaagcccgagaaggatagcgacgaagccgtgacatatagcctgggaaagtttgggcagagggccctggatttctacagcattcatgtgaccaaggagtccacccaccccgtgaagcccctggcccagatcgccggaaacagatacgcctccggacctgtgggaaaggccctgagcgacgcatgtatgggcacaatcgcctccttcctgtctaagtaccaggacatcatcatcgaacaccagaaggtggtgaagggcaaccagaagagactggagagcctgcgggagctggccggcaaggaaaacctggaataccctagcgtgaccctgccacctcagcctcacaccaaggagggcgttgatgcctacaacgaagtgatcgcccgggtgcgaatgtgggtgaacctgaacctgtggcagaagctgaagctaagcagagatgatgccaagcctctgctgagactgaagggattcccttcctttcctctggtcgagagacaggccaacgaagtggactggtgggacatggtgtgtaacgtgaagaagctgatcaacgagaaaaaggaggatggcaaggtgttttggcagaatctggctggctacaagagacaggaagccctgagaccatacctgagcagcgaggaagatcggaagaagggaaagaaattcgctcggtaccagctgggcgacctgctgctgcacctggaaaagaagcacggcgaggactggggaaaggtgtacgacgaggcctgggagcggattgacaagaaagtggaaggcctgagcaagcacatcaagctggaagaggaacggagaagcgaggacgcccagagcaaggccgccctgaccgactggctgcgggctaaggccagcttcgtgatcgagggcctgaaggaggccgacaaggacgagttctgcagatgcgagctgaagctgcagaagtggtacggggacctgcggggaaagcccttcgccatcgaagccgagaacagcatcctggacatcagcggcttcagcaagcagtacaactgtgccttcatctggcagaaggacggcgtgaagaagctgaacctgtacctgatcatcaactacttcaagggcggcaagctgcggttcaagaagatcaaacctgaagccttcgaagccaacagattctacaccgtgatcaacaaaaagagcggcgagatcgtgcccatggaggtgaacttcaacttcgacgaccccaacctgatcatcctgcctctggcctttggcaagagacagggcagagaattcatctggaacgacctgctgtccctggaaaccggcagcctgaagctggccaacggaagagtgatcgagaagacactgtacaacagaagaacccggcaggatgagcctgccctgttcgtggccctgaccttcgagcggcgggaggtcctggactcctccaatatcaaaccaatgaacctgatcggcgtggcaagaggcgaaaacatccccgccgtgatcgccctgaccgaccccgagggctgcccactgagccggtttaaggatagcctgggaaacccaacccacatcctgagaatcggcgagagctataaggagaagcagcggaccatccaggccaagaaggaggtggagcagcggagagccggcggctacagccggaagtacgccagcaaagccaagaatctggcagacgatatggtgagaaacaccgctagagatctgctgtactacgccgtgacccaggatgccatgctgatcttcgccaacctgagccggggcttcggccggcagggcaagcggaccttcatggccgagagacagtacacacggatggaggactggctgaccgccaagctggcctacgagggcctgagcaagacctacctgtccaagacactggcccagtacacctccaagacatgcagcaactgtgggtttaccatcaccagcgccgactacgacagggtgctggagaagctgaagaagacagcaacaggctggatgaccacaattaacggcaaggagctgaaggtggagggccagattacctactacaacagatacaagagacagaacgtagtcaaggacctgtccgtcgagctggatagactgagcgaagaatctgtgaacaacgacatctcctcctggacaaagggcagaagcggagaagctctgagcctcctgaagaaaagattctcccatagacccgtgcaggagaagttcgtgtgcctgaactgcggcttcgagacacacgcagccgagcaagccgccctgaacatcgccagatcctggctgttcctgcggagccaggagtacaagaaataccagacaaacaagacaaccggcaacaccgataagagagccttcgtcgagacctggcagtccttttaccggaagaagcttaaggaggtgtggaaacctgccgtgcggtctggcggatctggcggaggctccaccagccccaagaaaaagagaaaagtctaagctgccttctgcggggcttgccttctggccatgcccttcttctctcccttgcacctgtacctcttggtctttgaataaagcctgagtaggaaggctagcaaaaaaaaaaaaaaaaaaaaaaaaaaaaaaaaaaaaaaaaaaaaaaaaaaaaaaaaaaaaaaaaaaaaaaaaaaaaaaaa

SEQ ID NO: 9148 - RNA, 8787 nt, synthetic construct
  source 1..8787: mol_type = other RNA
aggaaataagagagaaaagaagagtaagaagaaatataagagccaccatggcccctaagaagaagcgtaaagtgagccggatgaaccacgaccaggagttcgacccccctaaggtgtaccctcccgtccccgccgagaagagaaagcccatccgggtcctgagcctgttcgatggcatcgccaccggtctgctggtgctgaaggacctgggcatccaggtggataggtacattgcctccgaggtgtgcgaggactccatcaccgtgggaatggtgcgtcatcagggcaagatcatgtacgtgggcgacgtgcggagcgtgacacagaagcatatccaggagtggggccctttcgacctggtgatcggcggcagcccttgcaatgacctgagcatcgtgaacccagcccggaagggcctgtacgagggaaccggcagactgttcttcgagttttacagactgctgcacgacgcccggcctaaggaaggcgacgaccggcccttcttttggctgttcgagaatgtggtggccatgggagtcagcgacaagcgggatattagccggttcctggagagcaaccccgtgatgatcgatgccaaggaagtgagcgccgcccaccgggccagatacttctggggcaatctgcctggcatgaacagacccctggccagcaccgtgaacgacaagctggagctgcaggagtgcctggagcacggccggatcgccaagttcagcaaggtgagaaccatcaccacccgaagcaacagcatcaaacaaggcaaggaccagcactttcctgtgttcatgaacgagaaggaggacatcctgtggtgtaccgagatggagagagtgttcgggttcccagtccactacacagatgtcagcaacatgtctagactggccagacagagactgctgggaagaagctggtccgtccctgtgatcagacacctgttcgcccctctgaaggagtacttcgcctgcgtgagcagcggcaacagcaacgccaacagccggggccccagcttctctagcggcctggtgccactgtccctgagagggagccacatgggccccatggagatctacaaaaccgtgagcgcctggaagcggcagcctgtgcgcgtgctgagcctgtttcggaatatcgataaagtcctgaaaagcctgggattcctggagagcggctctggctccggcggtggcaccctgaagtacgtggaggatgtgacaaacgtggtcagacgggatgtggagaagtggggccccttcgatctggtgtacggcagcacccaacccctgggcagctcttgtgaccggtgccctggctggtacatgtttcagttccaccggatcctgcagtacgccctgccgagacaggagtcccagcggccattcttttggattttcatggacaacttgctgctgaccgaggatgaccaggaaactaccactcggttcctgcagaccgaagccgtgaccctgcaggacgtgagaggccgggactaccagaacgccatgcgggtgtggtccaacatccctggactgaaaagcaagcacgcacctctgacccctaaagaagaggagtacctgcaggcccaggtgcggagcagaagcaagctggacgcccctaaggtggatctgctggtgaagaattgcctcctgcccctgagagagtacttcaagtatttcagccagaatagtctgcccctgggaggcagcggcggcggctaccaggagatggtgaccttcgaggacgtggccgtgcacttcaccaagaccgagtggaccggcctgagccccgcccagagggccctgtacaggagcgtgatgctggagaacttcggcaacctgaccgccctgggctaccccgtgcccaagcccgccctgatcagcctgctggagaggggcgacatggcctggggcctggaggcccaggacgacccccccgccgagaggaccaagaacgtgtgcggcggcccaagcagcggcgcccctcctcccagcggcggcaggcggcccaagcagcggcgcccctcctcccagcggcggcagcccagccggctccccaacctctaccgaggagggcacctctgagtccgccacccccgagagcggccctggcacctccaccgagcccagcgagggcagcgcacccggcagccctgccggcagccccacctccacagaggagggaaccagcaccgagcccagcgaaggcagcgccccaggcaccagcaccgagcctagtgagcaggagattaaacggatcaacaagatcagaagaagacttgtgaaagacagcaacaccaagaaggccggcaagacaggccccatgaaaaccctgctggttagagtgatgacacccgatctgagagagcggctggaaaacctgagaaagaagcctgaaaatatcccccagcccatcagcaatacatctagagccaacctgaataagctgctgaccgattacaccgaaatgaagaaggcgatcctgcatgtgtactgggaagagttccagaaggaccctgtgggcctgatgagccgggtggcccagcctgccagcaagaagatcgatcagaacaagctgaaacctgagatggacgagaagggcaacctgaccaccgccggctttgcctgctctcagtgtggccagcccctgttcgtgtacaagctggagcaggtgtctgagaagggcaaggcttacaccaactacttcggacggtgcaatgtggccgagcacgaaaagctgatcctgctggcccagctgaagcccgagaaggatagcgacgaagccgtgacatatagcctgggaaagtttgggcagagggccctggatttctacagcattcatgtgaccaaggagtccacccaccccgtgaagcccctggcccagatcgccggaaacagatacgcctccggacctgtgggaaaggccctgagcgacgcatgtatgggcacaatcgcctccttcctgtctaagtaccaggacatcatcatcgaacaccagaaggtggtgaagggcaaccagaagagactggagagcctgcgggagctggccggcaaggaaaacctggaataccctagcgtgaccctgccacctcagcctcacaccaaggagggcgttgatgcctacaacgaagtgatcgcccgggtgcgaatgtgggtgaacctgaacctgtggcagaagctgaagctaagcagagatgatgccaagcctctgctgagactgaagggattcccttcctttcctctggtcgagagacaggccaacgaagtggactggtgggacatggtgtgtaacgtgaagaagctgatcaacgagaaaaaggaggatggcaaggtgttttggcagaatctggctggctacaagagacaggaagccctgagaccatacctgagcagcgaggaagatcggaagaagggaaagaaattcgctcggtaccagctgggcgacctgctgctgcacctggaaaagaagcacggcgaggactggggaaaggtgtacgacgaggcctgggagcggattgacaagaaagtggaaggcctgagcaagcacatcaagctggaagaggaacggagaagcgaggacgcccagagcaaggccgccctgaccgactggctgcgggctaaggccagcttcgtgatcgagggcctgaaggaggccgacaaggacgagttctgcagatgcgagctgaagctgcagaagtggtacggggacctgcggggaaagcccttcgccatcgaagccgagaacagcatcctggacatcagcggcttcagcaagcagtacaactgtgccttcatctggcagaaggacggcgtgaagaagctgaacctgtacctgatcatcaactacttcaagggcggcaagctgcggttcaagaagatcaaacctgaagccttcgaagccaacagattctacaccgtgatcaacaaaaagagcggcgagatcgtgcccatggaggtgaacttcaacttcgacgaccccaacctgatcatcctgcctctggcctttggcaagagacagggcagagaattcatctggaacgacctgctgtccctggaaaccggcagcctgaagctggccaacggaagagtgatcgagaagacactgtacaacagaagaacccggcaggatgagcctgccctgttcgtggccctgaccttcgagcggcgggaggtcctggactcctccaatatcaaaccaatgaacctgatcggcgtggcaagaggcgaaaacatccccgccgtgatcgccctgaccgaccccgagggctgcccactgagccggtttaaggatagcctgggaaacccaacccacatcctgagaatcggcgagagctataaggagaagcagcggaccatccaggccaagaaggaggtggagcagcggagagccggcggctacagccggaagtacgccagcaaagccaagaatctggcagacgatatggtgagaaacaccgctagagatctgctgtactacgccgtgacccaggatgccatgctgatcttcgccaacctgagccggggcttcggccggcagggcaagcggaccttcatggccgagagacagtacacacggatggaggactggctgaccgccaagctggcctacgagggcctgagcaagacctacctgtccaagacactggcccagtacacctccaagacatgcagcaactgtgggtttaccatcaccagcgccgactacgacagggtgctggagaagctgaagaagacagcaacaggctggatgaccacaattaacggcaaggagctgaaggtggagggccagattacctactacaacagatacaagagacagaacgtagtcaaggacctgtccgtcgagctggatagactgagcgaagaatctgtgaacaacgacatctcctcctggacaaagggcagaagcggagaagctctgagcctcctgaagaaaagattctcccatagacccgtgcaggagaagttcgtgtgcctgaactgcggcttcgagacacacgcagccgagcaagccgccctgaacatcgccagatcctggctgttcctgcggagccaggagtacaagaaataccagacaaacaagacaaccggcaacaccgataagagagccttcgtcgagacctggcagtccttttaccggaagaagcttaaggaggtgtggaaacctgccgtgcggtctggcggatctggcggaggctccaccagccccaagaaaaagagaaaagtctaagctgccttctgcggggcttgccttctggccatgcccttcttctctcccttgcacctgtacctcttggtctttgaataaagcctgagtaggaaggctagcaaaaaaaaaaaaaaaaaaaaaaaaaaaaaaaaaaaaaaaaaaaaaaaaaaaaaaaaaaaaaaaaaaaaaaaaaaaaaaaagcccagccggctccccaacctctaccgaggagggcacctctgagtccgccacccccgagagcggccctggcacctccaccgagcccagcgagggcagcgcacccggcagccctgccggcagccccacctccacagaggagggaaccagcaccgagcccagcgaaggcagcgccccaggcaccagcaccgagcctagtgagcaggagattaaacggatcaacaagatcagaagaagacttgtgaaagacagcaacaccaagaaggccggcaagacaggccccatgaaaaccctgctggttagagtgatgacacccgatctgagagagcggctggaaaacctgagaaagaagcctgaaaatatcccccagcccatcagcaatacatctagagccaacctgaataagctgctgaccgattacaccgaaatgaagaaggcgatcctgcatgtgtactgggaagagttccagaaggaccctgtgggcctgatgagccgggtggcccagcctgccagcaagaagatcgatcagaacaagctgaaacctgagatggacgagaagggcaacctgaccaccgccggctttgcctgctctcagtgtggccagcccctgttcgtgtacaagctggagcaggtgtctgagaagggcaaggcttacaccaactacttcggacggtgcaatgtggccgagcacgaaaagctgatcctgctggcccagctgaagcccgagaaggatagcgacgaagccgtgacatatagcctgggaaagtttgggcagagggccctggatttctacagcattcatgtgaccaaggagtccacccaccccgtgaagcccctggcccagatcgccggaaacagatacgcctccggacctgtgggaaaggccctgagcgacgcatgtatgggcacaatcgcctccttcctgtctaagtaccaggacatcatcatcgaacaccagaaggtggtgaagggcaaccagaagagactggagagcctgcgggagctggccggcaaggaaaacctggaataccctagcgtgaccctgccacctcagcctcacaccaaggagggcgttgatgcctacaacgaagtgatcgcccgggtgcgaatgtgggtgaacctgaacctgtggcagaagctgaagctaagcagagatgatgccaagcctctgctgagactgaagggattcccttcctttcctctggtcgagagacaggccaacgaagtggactggtgggacatggtgtgtaacgtgaagaagctgatcaacgagaaaaaggaggatggcaaggtgttttggcagaatctggctggctacaagagacaggaagccctgagaccatacctgagcagcgaggaagatcggaagaagggaaagaaattcgctcggtaccagctgggcgacctgctgctgcacctggaaaagaagcacggcgaggactggggaaaggtgtacgacgaggcctgggagcggattgacaagaaagtggaaggcctgagcaagcacatcaagctggaagaggaacggagaagcgaggacgcccagagcaaggccgccctgaccgactggctgcgggctaaggccagcttcgtgatcgagggcctgaaggaggccgacaaggacgagttctgcagatgcgagctgaagctgcagaagtggtacggggacctgcggggaaagcccttcgccatcgaagccgagaacagcatcctggacatcagcggcttcagcaagcagtacaactgtgccttcatctggcagaaggacggcgtgaagaagctgaacctgtacctgatcatcaactacttcaagggcggcaagctgcggttcaagaagatcaaacctgaagccttcgaagccaacagattctacaccgtgatcaacaaaaagagcggcgagatcgtgcccatggaggtgaacttcaacttcgacgaccccaacctgatcatcctgcctctggcctttggcaagagacagggcagagaattcatctggaacgacctgctgtccctggaaaccggcagcctgaagctggccaacggaagagtgatcgagaagacactgtacaacagaagaacccggcaggatgagcctgccctgttcgtggccctgaccttcgagcggcgggaggtcctggactcctccaatatcaaaccaatgaacctgatcggcgtggcaagaggcgaaaacatccccgccgtgatcgccctgaccgaccccgagggctgcccactgagccggtttaaggatagcctgggaaacccaacccacatcctgagaatcggcgagagctataaggagaagcagcggaccatccaggccaagaaggaggtggagcagcggagagccggcggctacagccggaagtacgccagcaaagccaagaatctggcagacgatatggtgagaaacaccgctagagatctgctgtactacgccgtgacccaggatgccatgctgatcttcgccaacctgagccggggcttcggccggcagggcaagcggaccttcatggccgagagacagtacacacggatggaggactggctgaccgccaagctggcctacgagggcctgagcaagacctacctgtccaagacactggcccagtacacctccaagacatgcagcaactgtgggtttaccatcaccagcgccgactacgacagggtgctggagaagctgaagaagacagcaacaggctggatgaccacaattaacggcaaggagctgaaggtggagggccagattacctactacaacagatacaagagacagaacgtagtcaaggacctgtccgtcgagctggatagactgagcgaagaatctgtgaacaacgacatctcctcctggacaaagggcagaagcggagaagctctgagcctcctgaagaaaagattctcccatagacccgtgcaggagaagttcgtgtgcctgaactgcggcttcgagacacacgcagccgagcaagccgccctgaacatcgccagatcctggctgttcctgcggagccaggagtacaagaaataccagacaaacaagacaaccggcaacaccgataagagagccttcgtcgagacctggcagtccttttaccggaagaagcttaaggaggtgtggaaacctgccgtgcggtctggcggatctggcggaggctccaccagccccaagaaaaagagaaaagtctaagctgccttctgcggggcttgccttctggccatgcccttcttctctcccttgcacctgtacctcttggtctttgaataaagcctgagtaggaaggctagcaaaaaaaaaaaaaaaaaaaaaaaaaaaaaaaaaaaaaaaaaaaaaaaaaaaaaaaaaaaaaaaaaaaaaaaaaaaaaaaa

SEQ ID NO: 9149 - RNA, 8787 nt, synthetic construct
  source 1..8787: mol_type = other RNA
aggaaataagagagaaaagaagagtaagaagaaatataagagccaccatggcccctaagaagaagcgtaaagtgagccggatgaaccacgaccaggagttcgacccccctaaggtgtaccctcccgtccccgccgagaagagaaagcccatccgggtcctgagcctgttcgatggcatcgccaccggtctgctggtgctgaaggacctgggcatccaggtggataggtacattgcctccgaggtgtgcgaggactccatcaccgtgggaatggtgcgtcatcagggcaagatcatgtacgtgggcgacgtgcggagcgtgacacagaagcatatccaggagtggggccctttcgacctggtgatcggcggcagcccttgcaatgacctgagcatcgtgaacccagcccggaagggcctgtacgagggaaccggcagactgttcttcgagttttacagactgctgcacgacgcccggcctaaggaaggcgacgaccggcccttcttttggctgttcgagaatgtggtggccatgggagtcagcgacaagcgggatattagccggttcctggagagcaaccccgtgatgatcgatgccaaggaagtgagcgccgcccaccgggccagatacttctggggcaatctgcctggcatgaacagacccctggccagcaccgtgaacgacaagctggagctgcaggagtgcctggagcacggccggatcgccaagttcagcaaggtgagaaccatcaccacccgaagcaacagcatcaaacaaggcaaggaccagcactttcctgtgttcatgaacgagaaggaggacatcctgtggtgtaccgagatggagagagtgttcgggttcccagtccactacacagatgtcagcaacatgtctagactggccagacagagactgctgggaagaagctggtccgtccctgtgatcagacacctgttcgcccctctgaaggagtacttcgcctgcgtgagcagcggcaacagcaacgccaacagccggggccccagcttctctagcggcctggtgccactgtccctgagagggagccacatgggccccatggagatctacaaaaccgtgagcgcctggaagcggcagcctgtgcgcgtgctgagcctgtttcggaatatcgataaagtcctgaaaagcctgggattcctggagagcggctctggctccggcggtggcaccctgaagtacgtggaggatgtgacaaacgtggtcagacgggatgtggagaagtggggccccttcgatctggtgtacggcagcacccaacccctgggcagctcttgtgaccggtgccctggctggtacatgtttcagttccaccggatcctgcagtacgccctgccgagacaggagtcccagcggccattcttttggattttcatggacaacttgctgctgaccgaggatgaccaggaaactaccactcggttcctgcagaccgaagccgtgaccctgcaggacgtgagaggccgggactaccagaacgccatgcgggtgtggtccaacatccctggactgaaaagcaagcacgcacctctgacccctaaagaagaggagtacctgcaggcccaggtgcggagcagaagcaagctggacgcccctaaggtggatctgctggtgaagaattgcctcctgcccctgagagagtacttcaagtatttcagccagaatagtctgcccctgggaggcagcggcggcggcagccagagcctggtgaccttcggcgacgtggccgtggacttcagccaggaggagtgggagaggctgaacagcgcccagaggggcctgtacagggacgtgatgctggagaactacaggagcctggtgagcctgggcctgtgcttcagcaagcccgacatgatcagcagcctggagcagaggaaggagccctggatgcccaagaggaagctgatgaggggccagtgccccggctggaaggccgtgggcggcccaagcagcggcgcccctcctcccagcggcggcaggcggcccaagcagcggcgcccctcctcccagcggcggcagcccagccggctccccaacctctaccgaggagggcacctctgagtccgccacccccgagagcggccctggcacctccaccgagcccagcgagggcagcgcacccggcagccctgccggcagccccacctccacagaggagggaaccagcaccgagcccagcgaaggcagcgccccaggcaccagcaccgagcctagtgagcaggagattaaacggatcaacaagatcagaagaagacttgtgaaagacagcaacaccaagaaggccggcaagacaggccccatgaaaaccctgctggttagagtgatgacacccgatctgagagagcggctggaaaacctgagaaagaagcctgaaaatatcccccagcccatcagcaatacatctagagccaacctgaataagctgctgaccgattacaccgaaatgaagaaggcgatcctgcatgtgtactgggaagagttccagaaggaccctgtgggcctgatgagccgggtggcccagcctgccagcaagaagatcgatcagaacaagctgaaacctgagatggacgagaagggcaacctgaccaccgccggctttgcctgctctcagtgtggccagcccctgttcgtgtacaagctggagcaggtgtctgagaagggcaaggcttacaccaactacttcggacggtgcaatgtggccgagcacgaaaagctgatcctgctggcccagctgaagcccgagaaggatagcgacgaagccgtgacatatagcctgggaaagtttgggcagagggccctggatttctacagcattcatgtgaccaaggagtccacccaccccgtgaagcccctggcccagatcgccggaaacagatacgcctccggacctgtgggaaaggccctgagcgacgcatgtatgggcacaatcgcctccttcctgtctaagtaccaggacatcatcatcgaacaccagaaggtggtgaagggcaaccagaagagactggagagcctgcgggagctggccggcaaggaaaacctggaataccctagcgtgaccctgccacctcagcctcacaccaaggagggcgttgatgcctacaacgaagtgatcgcccgggtgcgaatgtgggtgaacctgaacctgtggcagaagctgaagctaagcagagatgatgccaagcctctgctgagactgaagggattcccttcctttcctctggtcgagagacaggccaacgaagtggactggtgggacatggtgtgtaacgtgaagaagctgatcaacgagaaaaaggaggatggcaaggtgttttggcagaatctggctggctacaagagacaggaagccctgagaccatacctgagcagcgaggaagatcggaagaagggaaagaaattcgctcggtaccagctgggcgacctgctgctgcacctggaaaagaagcacggcgaggactggggaaaggtgtacgacgaggcctgggagcggattgacaagaaagtggaaggcctgagcaagcacatcaagctggaagaggaacggagaagcgaggacgcccagagcaaggccgccctgaccgactggctgcgggctaaggccagcttcgtgatcgagggcctgaaggaggccgacaaggacgagttctgcagatgcgagctgaagctgcagaagtggtacggggacctgcggggaaagcccttcgccatcgaagccgagaacagcatcctggacatcagcggcttcagcaagcagtacaactgtgccttcatctggcagaaggacggcgtgaagaagctgaacctgtacctgatcatcaactacttcaagggcggcaagctgcggttcaagaagatcaaacctgaagccttcgaagccaacagattctacaccgtgatcaacaaaaagagcggcgagatcgtgcccatggaggtgaacttcaacttcgacgaccccaacctgatcatcctgcctctggcctttggcaagagacagggcagagaattcatctggaacgacctgctgtccctggaaaccggcagcctgaagctggccaacggaagagtgatcgagaagacactgtacaacagaagaacccggcaggatgagcctgccctgttcgtggccctgaccttcgagcggcgggaggtcctggactcctccaatatcaaaccaatgaacctgatcggcgtggcaagaggcgaaaacatccccgccgtgatcgccctgaccgaccccgagggctgcccactgagccggtttaaggatagcctgggaaacccaacccacatcctgagaatcggcgagagctataaggagaagcagcggaccatccaggccaagaaggaggtggagcagcggagagccggcggctacagccggaagtacgccagcaaagccaagaatctggcagacgatatggtgagaaacaccgctagagatctgctgtactacgccgtgacccaggatgccatgctgatcttcgccaacctgagccggggcttcggccggcagggcaagcggaccttcatggccgagagacagtacacacggatggaggactggctgaccgccaagctggcctacgagggcctgagcaagacctacctgtccaagacactggcccagtacacctccaagacatgcagcaactgtgggtttaccatcaccagcgccgactacgacagggtgctggagaagctgaagaagacagcaacaggctggatgaccacaattaacggcaaggagctgaaggtggagggccagattacctactacaacagatacaagagacagaacgtagtcaaggacctgtccgtcgagctggatagactgagcgaagaatctgtgaacaacgacatctcctcctggacaaagggcagaagcggagaagctctgagcctcctgaagaaaagattctcccatagacccgtgcaggagaagttcgtgtgcctgaactgcggcttcgagacacacgcagccgagcaagccgccctgaacatcgccagatcctggctgttcctgcggagccaggagtacaagaaataccagacaaacaagacaaccggcaacaccgataagagagccttcgtcgagacctggcagtccttttaccggaagaagcttaaggaggtgtggaaacctgccgtgcggtctggcggatctggcggaggctccaccagccccaagaaaaagagaaaagtctaagctgccttctgcggggcttgccttctggccatgcccttcttctctcccttgcacctgtacctcttggtctttgaataaagcctgagtaggaaggctagcaaaaaaaaaaaaaaaaaaaaaaaaaaaaaaaaaaaaaaaaaaaaaaaaaaaaaaaaaaaaaaaaaaaaaaaaaaaaaaaagcccagccggctccccaacctctaccgaggagggcacctctgagtccgccacccccgagagcggccctggcacctccaccgagcccagcgagggcagcgcacccggcagccctgccggcagccccacctccacagaggagggaaccagcaccgagcccagcgaaggcagcgccccaggcaccagcaccgagcctagtgagcaggagattaaacggatcaacaagatcagaagaagacttgtgaaagacagcaacaccaagaaggccggcaagacaggccccatgaaaaccctgctggttagagtgatgacacccgatctgagagagcggctggaaaacctgagaaagaagcctgaaaatatcccccagcccatcagcaatacatctagagccaacctgaataagctgctgaccgattacaccgaaatgaagaaggcgatcctgcatgtgtactgggaagagttccagaaggaccctgtgggcctgatgagccgggtggcccagcctgccagcaagaagatcgatcagaacaagctgaaacctgagatggacgagaagggcaacctgaccaccgccggctttgcctgctctcagtgtggccagcccctgttcgtgtacaagctggagcaggtgtctgagaagggcaaggcttacaccaactacttcggacggtgcaatgtggccgagcacgaaaagctgatcctgctggcccagctgaagcccgagaaggatagcgacgaagccgtgacatatagcctgggaaagtttgggcagagggccctggatttctacagcattcatgtgaccaaggagtccacccaccccgtgaagcccctggcccagatcgccggaaacagatacgcctccggacctgtgggaaaggccctgagcgacgcatgtatgggcacaatcgcctccttcctgtctaagtaccaggacatcatcatcgaacaccagaaggtggtgaagggcaaccagaagagactggagagcctgcgggagctggccggcaaggaaaacctggaataccctagcgtgaccctgccacctcagcctcacaccaaggagggcgttgatgcctacaacgaagtgatcgcccgggtgcgaatgtgggtgaacctgaacctgtggcagaagctgaagctaagcagagatgatgccaagcctctgctgagactgaagggattcccttcctttcctctggtcgagagacaggccaacgaagtggactggtgggacatggtgtgtaacgtgaagaagctgatcaacgagaaaaaggaggatggcaaggtgttttggcagaatctggctggctacaagagacaggaagccctgagaccatacctgagcagcgaggaagatcggaagaagggaaagaaattcgctcggtaccagctgggcgacctgctgctgcacctggaaaagaagcacggcgaggactggggaaaggtgtacgacgaggcctgggagcggattgacaagaaagtggaaggcctgagcaagcacatcaagctggaagaggaacggagaagcgaggacgcccagagcaaggccgccctgaccgactggctgcgggctaaggccagcttcgtgatcgagggcctgaaggaggccgacaaggacgagttctgcagatgcgagctgaagctgcagaagtggtacggggacctgcggggaaagcccttcgccatcgaagccgagaacagcatcctggacatcagcggcttcagcaagcagtacaactgtgccttcatctggcagaaggacggcgtgaagaagctgaacctgtacctgatcatcaactacttcaagggcggcaagctgcggttcaagaagatcaaacctgaagccttcgaagccaacagattctacaccgtgatcaacaaaaagagcggcgagatcgtgcccatggaggtgaacttcaacttcgacgaccccaacctgatcatcctgcctctggcctttggcaagagacagggcagagaattcatctggaacgacctgctgtccctggaaaccggcagcctgaagctggccaacggaagagtgatcgagaagacactgtacaacagaagaacccggcaggatgagcctgccctgttcgtggccctgaccttcgagcggcgggaggtcctggactcctccaatatcaaaccaatgaacctgatcggcgtggcaagaggcgaaaacatccccgccgtgatcgccctgaccgaccccgagggctgcccactgagccggtttaaggatagcctgggaaacccaacccacatcctgagaatcggcgagagctataaggagaagcagcggaccatccaggccaagaaggaggtggagcagcggagagccggcggctacagccggaagtacgccagcaaagccaagaatctggcagacgatatggtgagaaacaccgctagagatctgctgtactacgccgtgacccaggatgccatgctgatcttcgccaacctgagccggggcttcggccggcagggcaagcggaccttcatggccgagagacagtacacacggatggaggactggctgaccgccaagctggcctacgagggcctgagcaagacctacctgtccaagacactggcccagtacacctccaagacatgcagcaactgtgggtttaccatcaccagcgccgactacgacagggtgctggagaagctgaagaagacagcaacaggctggatgaccacaattaacggcaaggagctgaaggtggagggccagattacctactacaacagatacaagagacagaacgtagtcaaggacctgtccgtcgagctggatagactgagcgaagaatctgtgaacaacgacatctcctcctggacaaagggcagaagcggagaagctctgagcctcctgaagaaaagattctcccatagacccgtgcaggagaagttcgtgtgcctgaactgcggcttcgagacacacgcagccgagcaagccgccctgaacatcgccagatcctggctgttcctgcggagccaggagtacaagaaataccagacaaacaagacaaccggcaacaccgataagagagccttcgtcgagacctggcagtccttttaccggaagaagcttaaggaggtgtggaaacctgccgtgcggtctggcggatctggcggaggctccaccagccccaagaaaaagagaaaagtctaagctgccttctgcggggcttgccttctggccatgcccttcttctctcccttgcacctgtacctcttggtctttgaataaagcctgagtaggaaggctagcaaaaaaaaaaaaaaaaaaaaaaaaaaaaaaaaaaaaaaaaaaaaaaaaaaaaaaaaaaaaaaaaaaaaaaaaaaaaaaaa

SEQ ID NO: 9150 - RNA, 8787 nt, synthetic construct
  source 1..8787: mol_type = other RNA
aggaaataagagagaaaagaagagtaagaagaaatataagagccaccatggcccctaagaagaagcgtaaagtgagccggatgaaccacgaccaggagttcgacccccctaaggtgtaccctcccgtccccgccgagaagagaaagcccatccgggtcctgagcctgttcgatggcatcgccaccggtctgctggtgctgaaggacctgggcatccaggtggataggtacattgcctccgaggtgtgcgaggactccatcaccgtgggaatggtgcgtcatcagggcaagatcatgtacgtgggcgacgtgcggagcgtgacacagaagcatatccaggagtggggccctttcgacctggtgatcggcggcagcccttgcaatgacctgagcatcgtgaacccagcccggaagggcctgtacgagggaaccggcagactgttcttcgagttttacagactgctgcacgacgcccggcctaaggaaggcgacgaccggcccttcttttggctgttcgagaatgtggtggccatgggagtcagcgacaagcgggatattagccggttcctggagagcaaccccgtgatgatcgatgccaaggaagtgagcgccgcccaccgggccagatacttctggggcaatctgcctggcatgaacagacccctggccagcaccgtgaacgacaagctggagctgcaggagtgcctggagcacggccggatcgccaagttcagcaaggtgagaaccatcaccacccgaagcaacagcatcaaacaaggcaaggaccagcactttcctgtgttcatgaacgagaaggaggacatcctgtggtgtaccgagatggagagagtgttcgggttcccagtccactacacagatgtcagcaacatgtctagactggccagacagagactgctgggaagaagctggtccgtccctgtgatcagacacctgttcgcccctctgaaggagtacttcgcctgcgtgagcagcggcaacagcaacgccaacagccggggccccagcttctctagcggcctggtgccactgtccctgagagggagccacatgggccccatggagatctacaaaaccgtgagcgcctggaagcggcagcctgtgcgcgtgctgagcctgtttcggaatatcgataaagtcctgaaaagcctgggattcctggagagcggctctggctccggcggtggcaccctgaagtacgtggaggatgtgacaaacgtggtcagacgggatgtggagaagtggggccccttcgatctggtgtacggcagcacccaacccctgggcagctcttgtgaccggtgccctggctggtacatgtttcagttccaccggatcctgcagtacgccctgccgagacaggagtcccagcggccattcttttggattttcatggacaacttgctgctgaccgaggatgaccaggaaactaccactcggttcctgcagaccgaagccgtgaccctgcaggacgtgagaggccgggactaccagaacgccatgcgggtgtggtccaacatccctggactgaaaagcaagcacgcacctctgacccctaaagaagaggagtacctgcaggcccaggtgcggagcagaagcaagctggacgcccctaaggtggatctgctggtgaagaattgcctcctgcccctgagagagtacttcaagtatttcagccagaatagtctgcccctgggaggcagcggcggcggcggctgctgcagcctggagacccacagcatcagggacaagaacgccgtgacctacggcgacgtgcacgtgaacttcacccaggaggagtgggccctgctggaccccagccagaagaagctgtacaaggacgtgatgctggagacctacaggaacctgaacgccatcggcttcaactgggacgacaagaacaccgaggagcactgccccagcaccaggaggtggaggaggttctacaggatgcagggcggcccaagcagcggcgcccctcctcccagcggcggcaggcggcccaagcagcggcgcccctcctcccagcggcggcagcccagccggctccccaacctctaccgaggagggcacctctgagtccgccacccccgagagcggccctggcacctccaccgagcccagcgagggcagcgcacccggcagccctgccggcagccccacctccacagaggagggaaccagcaccgagcccagcgaaggcagcgccccaggcaccagcaccgagcctagtgagcaggagattaaacggatcaacaagatcagaagaagacttgtgaaagacagcaacaccaagaaggccggcaagacaggccccatgaaaaccctgctggttagagtgatgacacccgatctgagagagcggctggaaaacctgagaaagaagcctgaaaatatcccccagcccatcagcaatacatctagagccaacctgaataagctgctgaccgattacaccgaaatgaagaaggcgatcctgcatgtgtactgggaagagttccagaaggaccctgtgggcctgatgagccgggtggcccagcctgccagcaagaagatcgatcagaacaagctgaaacctgagatggacgagaagggcaacctgaccaccgccggctttgcctgctctcagtgtggccagcccctgttcgtgtacaagctggagcaggtgtctgagaagggcaaggcttacaccaactacttcggacggtgcaatgtggccgagcacgaaaagctgatcctgctggcccagctgaagcccgagaaggatagcgacgaagccgtgacatatagcctgggaaagtttgggcagagggccctggatttctacagcattcatgtgaccaaggagtccacccaccccgtgaagcccctggcccagatcgccggaaacagatacgcctccggacctgtgggaaaggccctgagcgacgcatgtatgggcacaatcgcctccttcctgtctaagtaccaggacatcatcatcgaacaccagaaggtggtgaagggcaaccagaagagactggagagcctgcgggagctggccggcaaggaaaacctggaataccctagcgtgaccctgccacctcagcctcacaccaaggagggcgttgatgcctacaacgaagtgatcgcccgggtgcgaatgtgggtgaacctgaacctgtggcagaagctgaagctaagcagagatgatgccaagcctctgctgagactgaagggattcccttcctttcctctggtcgagagacaggccaacgaagtggactggtgggacatggtgtgtaacgtgaagaagctgatcaacgagaaaaaggaggatggcaaggtgttttggcagaatctggctggctacaagagacaggaagccctgagaccatacctgagcagcgaggaagatcggaagaagggaaagaaattcgctcggtaccagctgggcgacctgctgctgcacctggaaaagaagcacggcgaggactggggaaaggtgtacgacgaggcctgggagcggattgacaagaaagtggaaggcctgagcaagcacatcaagctggaagaggaacggagaagcgaggacgcccagagcaaggccgccctgaccgactggctgcgggctaaggccagcttcgtgatcgagggcctgaaggaggccgacaaggacgagttctgcagatgcgagctgaagctgcagaagtggtacggggacctgcggggaaagcccttcgccatcgaagccgagaacagcatcctggacatcagcggcttcagcaagcagtacaactgtgccttcatctggcagaaggacggcgtgaagaagctgaacctgtacctgatcatcaactacttcaagggcggcaagctgcggttcaagaagatcaaacctgaagccttcgaagccaacagattctacaccgtgatcaacaaaaagagcggcgagatcgtgcccatggaggtgaacttcaacttcgacgaccccaacctgatcatcctgcctctggcctttggcaagagacagggcagagaattcatctggaacgacctgctgtccctggaaaccggcagcctgaagctggccaacggaagagtgatcgagaagacactgtacaacagaagaacccggcaggatgagcctgccctgttcgtggccctgaccttcgagcggcgggaggtcctggactcctccaatatcaaaccaatgaacctgatcggcgtggcaagaggcgaaaacatccccgccgtgatcgccctgaccgaccccgagggctgcccactgagccggtttaaggatagcctgggaaacccaacccacatcctgagaatcggcgagagctataaggagaagcagcggaccatccaggccaagaaggaggtggagcagcggagagccggcggctacagccggaagtacgccagcaaagccaagaatctggcagacgatatggtgagaaacaccgctagagatctgctgtactacgccgtgacccaggatgccatgctgatcttcgccaacctgagccggggcttcggccggcagggcaagcggaccttcatggccgagagacagtacacacggatggaggactggctgaccgccaagctggcctacgagggcctgagcaagacctacctgtccaagacactggcccagtacacctccaagacatgcagcaactgtgggtttaccatcaccagcgccgactacgacagggtgctggagaagctgaagaagacagcaacaggctggatgaccacaattaacggcaaggagctgaaggtggagggccagattacctactacaacagatacaagagacagaacgtagtcaaggacctgtccgtcgagctggatagactgagcgaagaatctgtgaacaacgacatctcctcctggacaaagggcagaagcggagaagctctgagcctcctgaagaaaagattctcccatagacccgtgcaggagaagttcgtgtgcctgaactgcggcttcgagacacacgcagccgagcaagccgccctgaacatcgccagatcctggctgttcctgcggagccaggagtacaagaaataccagacaaacaagacaaccggcaacaccgataagagagccttcgtcgagacctggcagtccttttaccggaagaagcttaaggaggtgtggaaacctgccgtgcggtctggcggatctggcggaggctccaccagccccaagaaaaagagaaaagtctaagctgccttctgcggggcttgccttctggccatgcccttcttctctcccttgcacctgtacctcttggtctttgaataaagcctgagtaggaaggctagcaaaaaaaaaaaaaaaaaaaaaaaaaaaaaaaaaaaaaaaaaaaaaaaaaaaaaaaaaaaaaaaaaaaaaaaaaaaaaaaagcccagccggctccccaacctctaccgaggagggcacctctgagtccgccacccccgagagcggccctggcacctccaccgagcccagcgagggcagcgcacccggcagccctgccggcagccccacctccacagaggagggaaccagcaccgagcccagcgaaggcagcgccccaggcaccagcaccgagcctagtgagcaggagattaaacggatcaacaagatcagaagaagacttgtgaaagacagcaacaccaagaaggccggcaagacaggccccatgaaaaccctgctggttagagtgatgacacccgatctgagagagcggctggaaaacctgagaaagaagcctgaaaatatcccccagcccatcagcaatacatctagagccaacctgaataagctgctgaccgattacaccgaaatgaagaaggcgatcctgcatgtgtactgggaagagttccagaaggaccctgtgggcctgatgagccgggtggcccagcctgccagcaagaagatcgatcagaacaagctgaaacctgagatggacgagaagggcaacctgaccaccgccggctttgcctgctctcagtgtggccagcccctgttcgtgtacaagctggagcaggtgtctgagaagggcaaggcttacaccaactacttcggacggtgcaatgtggccgagcacgaaaagctgatcctgctggcccagctgaagcccgagaaggatagcgacgaagccgtgacatatagcctgggaaagtttgggcagagggccctggatttctacagcattcatgtgaccaaggagtccacccaccccgtgaagcccctggcccagatcgccggaaacagatacgcctccggacctgtgggaaaggccctgagcgacgcatgtatgggcacaatcgcctccttcctgtctaagtaccaggacatcatcatcgaacaccagaaggtggtgaagggcaaccagaagagactggagagcctgcgggagctggccggcaaggaaaacctggaataccctagcgtgaccctgccacctcagcctcacaccaaggagggcgttgatgcctacaacgaagtgatcgcccgggtgcgaatgtgggtgaacctgaacctgtggcagaagctgaagctaagcagagatgatgccaagcctctgctgagactgaagggattcccttcctttcctctggtcgagagacaggccaacgaagtggactggtgggacatggtgtgtaacgtgaagaagctgatcaacgagaaaaaggaggatggcaaggtgttttggcagaatctggctggctacaagagacaggaagccctgagaccatacctgagcagcgaggaagatcggaagaagggaaagaaattcgctcggtaccagctgggcgacctgctgctgcacctggaaaagaagcacggcgaggactggggaaaggtgtacgacgaggcctgggagcggattgacaagaaagtggaaggcctgagcaagcacatcaagctggaagaggaacggagaagcgaggacgcccagagcaaggccgccctgaccgactggctgcgggctaaggccagcttcgtgatcgagggcctgaaggaggccgacaaggacgagttctgcagatgcgagctgaagctgcagaagtggtacggggacctgcggggaaagcccttcgccatcgaagccgagaacagcatcctggacatcagcggcttcagcaagcagtacaactgtgccttcatctggcagaaggacggcgtgaagaagctgaacctgtacctgatcatcaactacttcaagggcggcaagctgcggttcaagaagatcaaacctgaagccttcgaagccaacagattctacaccgtgatcaacaaaaagagcggcgagatcgtgcccatggaggtgaacttcaacttcgacgaccccaacctgatcatcctgcctctggcctttggcaagagacagggcagagaattcatctggaacgacctgctgtccctggaaaccggcagcctgaagctggccaacggaagagtgatcgagaagacactgtacaacagaagaacccggcaggatgagcctgccctgttcgtggccctgaccttcgagcggcgggaggtcctggactcctccaatatcaaaccaatgaacctgatcggcgtggcaagaggcgaaaacatccccgccgtgatcgccctgaccgaccccgagggctgcccactgagccggtttaaggatagcctgggaaacccaacccacatcctgagaatcggcgagagctataaggagaagcagcggaccatccaggccaagaaggaggtggagcagcggagagccggcggctacagccggaagtacgccagcaaagccaagaatctggcagacgatatggtgagaaacaccgctagagatctgctgtactacgccgtgacccaggatgccatgctgatcttcgccaacctgagccggggcttcggccggcagggcaagcggaccttcatggccgagagacagtacacacggatggaggactggctgaccgccaagctggcctacgagggcctgagcaagacctacctgtccaagacactggcccagtacacctccaagacatgcagcaactgtgggtttaccatcaccagcgccgactacgacagggtgctggagaagctgaagaagacagcaacaggctggatgaccacaattaacggcaaggagctgaaggtggagggccagattacctactacaacagatacaagagacagaacgtagtcaaggacctgtccgtcgagctggatagactgagcgaagaatctgtgaacaacgacatctcctcctggacaaagggcagaagcggagaagctctgagcctcctgaagaaaagattctcccatagacccgtgcaggagaagttcgtgtgcctgaactgcggcttcgagacacacgcagccgagcaagccgccctgaacatcgccagatcctggctgttcctgcggagccaggagtacaagaaataccagacaaacaagacaaccggcaacaccgataagagagccttcgtcgagacctggcagtccttttaccggaagaagcttaaggaggtgtggaaacctgccgtgcggtctggcggatctggcggaggctccaccagccccaagaaaaagagaaaagtctaagctgccttctgcggggcttgccttctggccatgcccttcttctctcccttgcacctgtacctcttggtctttgaataaagcctgagtaggaaggctagcaaaaaaaaaaaaaaaaaaaaaaaaaaaaaaaaaaaaaaaaaaaaaaaaaaaaaaaaaaaaaaaaaaaaaaaaaaaaaaaa

SEQ ID NO: 9151 - RNA, 8787 nt, synthetic construct
  source 1..8787: mol_type = other RNA
aggaaataagagagaaaagaagagtaagaagaaatataagagccaccatggcccctaagaagaagcgtaaagtgagccggatgaaccacgaccaggagttcgacccccctaaggtgtaccctcccgtccccgccgagaagagaaagcccatccgggtcctgagcctgttcgatggcatcgccaccggtctgctggtgctgaaggacctgggcatccaggtggataggtacattgcctccgaggtgtgcgaggactccatcaccgtgggaatggtgcgtcatcagggcaagatcatgtacgtgggcgacgtgcggagcgtgacacagaagcatatccaggagtggggccctttcgacctggtgatcggcggcagcccttgcaatgacctgagcatcgtgaacccagcccggaagggcctgtacgagggaaccggcagactgttcttcgagttttacagactgctgcacgacgcccggcctaaggaaggcgacgaccggcccttcttttggctgttcgagaatgtggtggccatgggagtcagcgacaagcgggatattagccggttcctggagagcaaccccgtgatgatcgatgccaaggaagtgagcgccgcccaccgggccagatacttctggggcaatctgcctggcatgaacagacccctggccagcaccgtgaacgacaagctggagctgcaggagtgcctggagcacggccggatcgccaagttcagcaaggtgagaaccatcaccacccgaagcaacagcatcaaacaaggcaaggaccagcactttcctgtgttcatgaacgagaaggaggacatcctgtggtgtaccgagatggagagagtgttcgggttcccagtccactacacagatgtcagcaacatgtctagactggccagacagagactgctgggaagaagctggtccgtccctgtgatcagacacctgttcgcccctctgaaggagtacttcgcctgcgtgagcagcggcaacagcaacgccaacagccggggccccagcttctctagcggcctggtgccactgtccctgagagggagccacatgggccccatggagatctacaaaaccgtgagcgcctggaagcggcagcctgtgcgcgtgctgagcctgtttcggaatatcgataaagtcctgaaaagcctgggattcctggagagcggctctggctccggcggtggcaccctgaagtacgtggaggatgtgacaaacgtggtcagacgggatgtggagaagtggggccccttcgatctggtgtacggcagcacccaacccctgggcagctcttgtgaccggtgccctggctggtacatgtttcagttccaccggatcctgcagtacgccctgccgagacaggagtcccagcggccattcttttggattttcatggacaacttgctgctgaccgaggatgaccaggaaactaccactcggttcctgcagaccgaagccgtgaccctgcaggacgtgagaggccgggactaccagaacgccatgcgggtgtggtccaacatccctggactgaaaagcaagcacgcacctctgacccctaaagaagaggagtacctgcaggcccaggtgcggagcagaagcaagctggacgcccctaaggtggatctgctggtgaagaattgcctcctgcccctgagagagtacttcaagtatttcagccagaatagtctgcccctgggaggcagcggcggcggcacctgcatggtgcacaggcagaccatgagctgcagcggcgccggcggcatcaccgccttcgtggccttcagggacgtggccgtggacttcacccaggaggagtggaggctgctgagccccgcccagaggaccctgcacagggaggtgatgctggagacctacaaccacctggtgagcctggagatccccagcagcaagcccaagctgatcgcccagctggagcagggcgaggagccctggaggggcggcccaagcagcggcgcccctcctcccagcggcggcaggcggcccaagcagcggcgcccctcctcccagcggcggcagcccagccggctccccaacctctaccgaggagggcacctctgagtccgccacccccgagagcggccctggcacctccaccgagcccagcgagggcagcgcacccggcagccctgccggcagccccacctccacagaggagggaaccagcaccgagcccagcgaaggcagcgccccaggcaccagcaccgagcctagtgagcaggagattaaacggatcaacaagatcagaagaagacttgtgaaagacagcaacaccaagaaggccggcaagacaggccccatgaaaaccctgctggttagagtgatgacacccgatctgagagagcggctggaaaacctgagaaagaagcctgaaaatatcccccagcccatcagcaatacatctagagccaacctgaataagctgctgaccgattacaccgaaatgaagaaggcgatcctgcatgtgtactgggaagagttccagaaggaccctgtgggcctgatgagccgggtggcccagcctgccagcaagaagatcgatcagaacaagctgaaacctgagatggacgagaagggcaacctgaccaccgccggctttgcctgctctcagtgtggccagcccctgttcgtgtacaagctggagcaggtgtctgagaagggcaaggcttacaccaactacttcggacggtgcaatgtggccgagcacgaaaagctgatcctgctggcccagctgaagcccgagaaggatagcgacgaagccgtgacatatagcctgggaaagtttgggcagagggccctggatttctacagcattcatgtgaccaaggagtccacccaccccgtgaagcccctggcccagatcgccggaaacagatacgcctccggacctgtgggaaaggccctgagcgacgcatgtatgggcacaatcgcctccttcctgtctaagtaccaggacatcatcatcgaacaccagaaggtggtgaagggcaaccagaagagactggagagcctgcgggagctggccggcaaggaaaacctggaataccctagcgtgaccctgccacctcagcctcacaccaaggagggcgttgatgcctacaacgaagtgatcgcccgggtgcgaatgtgggtgaacctgaacctgtggcagaagctgaagctaagcagagatgatgccaagcctctgctgagactgaagggattcccttcctttcctctggtcgagagacaggccaacgaagtggactggtgggacatggtgtgtaacgtgaagaagctgatcaacgagaaaaaggaggatggcaaggtgttttggcagaatctggctggctacaagagacaggaagccctgagaccatacctgagcagcgaggaagatcggaagaagggaaagaaattcgctcggtaccagctgggcgacctgctgctgcacctggaaaagaagcacggcgaggactggggaaaggtgtacgacgaggcctgggagcggattgacaagaaagtggaaggcctgagcaagcacatcaagctggaagaggaacggagaagcgaggacgcccagagcaaggccgccctgaccgactggctgcgggctaaggccagcttcgtgatcgagggcctgaaggaggccgacaaggacgagttctgcagatgcgagctgaagctgcagaagtggtacggggacctgcggggaaagcccttcgccatcgaagccgagaacagcatcctggacatcagcggcttcagcaagcagtacaactgtgccttcatctggcagaaggacggcgtgaagaagctgaacctgtacctgatcatcaactacttcaagggcggcaagctgcggttcaagaagatcaaacctgaagccttcgaagccaacagattctacaccgtgatcaacaaaaagagcggcgagatcgtgcccatggaggtgaacttcaacttcgacgaccccaacctgatcatcctgcctctggcctttggcaagagacagggcagagaattcatctggaacgacctgctgtccctggaaaccggcagcctgaagctggccaacggaagagtgatcgagaagacactgtacaacagaagaacccggcaggatgagcctgccctgttcgtggccctgaccttcgagcggcgggaggtcctggactcctccaatatcaaaccaatgaacctgatcggcgtggcaagaggcgaaaacatccccgccgtgatcgccctgaccgaccccgagggctgcccactgagccggtttaaggatagcctgggaaacccaacccacatcctgagaatcggcgagagctataaggagaagcagcggaccatccaggccaagaaggaggtggagcagcggagagccggcggctacagccggaagtacgccagcaaagccaagaatctggcagacgatatggtgagaaacaccgctagagatctgctgtactacgccgtgacccaggatgccatgctgatcttcgccaacctgagccggggcttcggccggcagggcaagcggaccttcatggccgagagacagtacacacggatggaggactggctgaccgccaagctggcctacgagggcctgagcaagacctacctgtccaagacactggcccagtacacctccaagacatgcagcaactgtgggtttaccatcaccagcgccgactacgacagggtgctggagaagctgaagaagacagcaacaggctggatgaccacaattaacggcaaggagctgaaggtggagggccagattacctactacaacagatacaagagacagaacgtagtcaaggacctgtccgtcgagctggatagactgagcgaagaatctgtgaacaacgacatctcctcctggacaaagggcagaagcggagaagctctgagcctcctgaagaaaagattctcccatagacccgtgcaggagaagttcgtgtgcctgaactgcggcttcgagacacacgcagccgagcaagccgccctgaacatcgccagatcctggctgttcctgcggagccaggagtacaagaaataccagacaaacaagacaaccggcaacaccgataagagagccttcgtcgagacctggcagtccttttaccggaagaagcttaaggaggtgtggaaacctgccgtgcggtctggcggatctggcggaggctccaccagccccaagaaaaagagaaaagtctaagctgccttctgcggggcttgccttctggccatgcccttcttctctcccttgcacctgtacctcttggtctttgaataaagcctgagtaggaaggctagcaaaaaaaaaaaaaaaaaaaaaaaaaaaaaaaaaaaaaaaaaaaaaaaaaaaaaaaaaaaaaaaaaaaaaaaaaaaaaaaagcccagccggctccccaacctctaccgaggagggcacctctgagtccgccacccccgagagcggccctggcacctccaccgagcccagcgagggcagcgcacccggcagccctgccggcagccccacctccacagaggagggaaccagcaccgagcccagcgaaggcagcgccccaggcaccagcaccgagcctagtgagcaggagattaaacggatcaacaagatcagaagaagacttgtgaaagacagcaacaccaagaaggccggcaagacaggccccatgaaaaccctgctggttagagtgatgacacccgatctgagagagcggctggaaaacctgagaaagaagcctgaaaatatcccccagcccatcagcaatacatctagagccaacctgaataagctgctgaccgattacaccgaaatgaagaaggcgatcctgcatgtgtactgggaagagttccagaaggaccctgtgggcctgatgagccgggtggcccagcctgccagcaagaagatcgatcagaacaagctgaaacctgagatggacgagaagggcaacctgaccaccgccggctttgcctgctctcagtgtggccagcccctgttcgtgtacaagctggagcaggtgtctgagaagggcaaggcttacaccaactacttcggacggtgcaatgtggccgagcacgaaaagctgatcctgctggcccagctgaagcccgagaaggatagcgacgaagccgtgacatatagcctgggaaagtttgggcagagggccctggatttctacagcattcatgtgaccaaggagtccacccaccccgtgaagcccctggcccagatcgccggaaacagatacgcctccggacctgtgggaaaggccctgagcgacgcatgtatgggcacaatcgcctccttcctgtctaagtaccaggacatcatcatcgaacaccagaaggtggtgaagggcaaccagaagagactggagagcctgcgggagctggccggcaaggaaaacctggaataccctagcgtgaccctgccacctcagcctcacaccaaggagggcgttgatgcctacaacgaagtgatcgcccgggtgcgaatgtgggtgaacctgaacctgtggcagaagctgaagctaagcagagatgatgccaagcctctgctgagactgaagggattcccttcctttcctctggtcgagagacaggccaacgaagtggactggtgggacatggtgtgtaacgtgaagaagctgatcaacgagaaaaaggaggatggcaaggtgttttggcagaatctggctggctacaagagacaggaagccctgagaccatacctgagcagcgaggaagatcggaagaagggaaagaaattcgctcggtaccagctgggcgacctgctgctgcacctggaaaagaagcacggcgaggactggggaaaggtgtacgacgaggcctgggagcggattgacaagaaagtggaaggcctgagcaagcacatcaagctggaagaggaacggagaagcgaggacgcccagagcaaggccgccctgaccgactggctgcgggctaaggccagcttcgtgatcgagggcctgaaggaggccgacaaggacgagttctgcagatgcgagctgaagctgcagaagtggtacggggacctgcggggaaagcccttcgccatcgaagccgagaacagcatcctggacatcagcggcttcagcaagcagtacaactgtgccttcatctggcagaaggacggcgtgaagaagctgaacctgtacctgatcatcaactacttcaagggcggcaagctgcggttcaagaagatcaaacctgaagccttcgaagccaacagattctacaccgtgatcaacaaaaagagcggcgagatcgtgcccatggaggtgaacttcaacttcgacgaccccaacctgatcatcctgcctctggcctttggcaagagacagggcagagaattcatctggaacgacctgctgtccctggaaaccggcagcctgaagctggccaacggaagagtgatcgagaagacactgtacaacagaagaacccggcaggatgagcctgccctgttcgtggccctgaccttcgagcggcgggaggtcctggactcctccaatatcaaaccaatgaacctgatcggcgtggcaagaggcgaaaacatccccgccgtgatcgccctgaccgaccccgagggctgcccactgagccggtttaaggatagcctgggaaacccaacccacatcctgagaatcggcgagagctataaggagaagcagcggaccatccaggccaagaaggaggtggagcagcggagagccggcggctacagccggaagtacgccagcaaagccaagaatctggcagacgatatggtgagaaacaccgctagagatctgctgtactacgccgtgacccaggatgccatgctgatcttcgccaacctgagccggggcttcggccggcagggcaagcggaccttcatggccgagagacagtacacacggatggaggactggctgaccgccaagctggcctacgagggcctgagcaagacctacctgtccaagacactggcccagtacacctccaagacatgcagcaactgtgggtttaccatcaccagcgccgactacgacagggtgctggagaagctgaagaagacagcaacaggctggatgaccacaattaacggcaaggagctgaaggtggagggccagattacctactacaacagatacaagagacagaacgtagtcaaggacctgtccgtcgagctggatagactgagcgaagaatctgtgaacaacgacatctcctcctggacaaagggcagaagcggagaagctctgagcctcctgaagaaaagattctcccatagacccgtgcaggagaagttcgtgtgcctgaactgcggcttcgagacacacgcagccgagcaagccgccctgaacatcgccagatcctggctgttcctgcggagccaggagtacaagaaataccagacaaacaagacaaccggcaacaccgataagagagccttcgtcgagacctggcagtccttttaccggaagaagcttaaggaggtgtggaaacctgccgtgcggtctggcggatctggcggaggctccaccagccccaagaaaaagagaaaagtctaagctgccttctgcggggcttgccttctggccatgcccttcttctctcccttgcacctgtacctcttggtctttgaataaagcctgagtaggaaggctagcaaaaaaaaaaaaaaaaaaaaaaaaaaaaaaaaaaaaaaaaaaaaaaaaaaaaaaaaaaaaaaaaaaaaaaaaaaaaaaaa

SEQ ID NO: 9152 - RNA, 8787 nt, synthetic construct
  source 1..8787: mol_type = other RNA
aggaaataagagagaaaagaagagtaagaagaaatataagagccaccatggcccctaagaagaagcgtaaagtgagccggatgaaccacgaccaggagttcgacccccctaaggtgtaccctcccgtccccgccgagaagagaaagcccatccgggtcctgagcctgttcgatggcatcgccaccggtctgctggtgctgaaggacctgggcatccaggtggataggtacattgcctccgaggtgtgcgaggactccatcaccgtgggaatggtgcgtcatcagggcaagatcatgtacgtgggcgacgtgcggagcgtgacacagaagcatatccaggagtggggccctttcgacctggtgatcggcggcagcccttgcaatgacctgagcatcgtgaacccagcccggaagggcctgtacgagggaaccggcagactgttcttcgagttttacagactgctgcacgacgcccggcctaaggaaggcgacgaccggcccttcttttggctgttcgagaatgtggtggccatgggagtcagcgacaagcgggatattagccggttcctggagagcaaccccgtgatgatcgatgccaaggaagtgagcgccgcccaccgggccagatacttctggggcaatctgcctggcatgaacagacccctggccagcaccgtgaacgacaagctggagctgcaggagtgcctggagcacggccggatcgccaagttcagcaaggtgagaaccatcaccacccgaagcaacagcatcaaacaaggcaaggaccagcactttcctgtgttcatgaacgagaaggaggacatcctgtggtgtaccgagatggagagagtgttcgggttcccagtccactacacagatgtcagcaacatgtctagactggccagacagagactgctgggaagaagctggtccgtccctgtgatcagacacctgttcgcccctctgaaggagtacttcgcctgcgtgagcagcggcaacagcaacgccaacagccggggccccagcttctctagcggcctggtgccactgtccctgagagggagccacatgggccccatggagatctacaaaaccgtgagcgcctggaagcggcagcctgtgcgcgtgctgagcctgtttcggaatatcgataaagtcctgaaaagcctgggattcctggagagcggctctggctccggcggtggcaccctgaagtacgtggaggatgtgacaaacgtggtcagacgggatgtggagaagtggggccccttcgatctggtgtacggcagcacccaacccctgggcagctcttgtgaccggtgccctggctggtacatgtttcagttccaccggatcctgcagtacgccctgccgagacaggagtcccagcggccattcttttggattttcatggacaacttgctgctgaccgaggatgaccaggaaactaccactcggttcctgcagaccgaagccgtgaccctgcaggacgtgagaggccgggactaccagaacgccatgcgggtgtggtccaacatccctggactgaaaagcaagcacgcacctctgacccctaaagaagaggagtacctgcaggcccaggtgcggagcagaagcaagctggacgcccctaaggtggatctgctggtgaagaattgcctcctgcccctgagagagtacttcaagtatttcagccagaatagtctgcccctgggaggcagcggcggcggcatggtgagcttcgaggacgtggccgtgctgctgagccaggaggagtgggactgcctgatccccgcccagaggggcctgtacagggacgtgatgctggagacctacggcaacctggtgagcctgggcctgcaggccagcaagcccgacgtgatcagcaggctggagcagggcgacaagccctggaccccccacatcctgaggacccagatcagctggagctggaggcacaagagggagtgctacggcggcccaagcagcggcgcccctcctcccagcggcggcaggcggcccaagcagcggcgcccctcctcccagcggcggcagcccagccggctccccaacctctaccgaggagggcacctctgagtccgccacccccgagagcggccctggcacctccaccgagcccagcgagggcagcgcacccggcagccctgccggcagccccacctccacagaggagggaaccagcaccgagcccagcgaaggcagcgccccaggcaccagcaccgagcctagtgagcaggagattaaacggatcaacaagatcagaagaagacttgtgaaagacagcaacaccaagaaggccggcaagacaggccccatgaaaaccctgctggttagagtgatgacacccgatctgagagagcggctggaaaacctgagaaagaagcctgaaaatatcccccagcccatcagcaatacatctagagccaacctgaataagctgctgaccgattacaccgaaatgaagaaggcgatcctgcatgtgtactgggaagagttccagaaggaccctgtgggcctgatgagccgggtggcccagcctgccagcaagaagatcgatcagaacaagctgaaacctgagatggacgagaagggcaacctgaccaccgccggctttgcctgctctcagtgtggccagcccctgttcgtgtacaagctggagcaggtgtctgagaagggcaaggcttacaccaactacttcggacggtgcaatgtggccgagcacgaaaagctgatcctgctggcccagctgaagcccgagaaggatagcgacgaagccgtgacatatagcctgggaaagtttgggcagagggccctggatttctacagcattcatgtgaccaaggagtccacccaccccgtgaagcccctggcccagatcgccggaaacagatacgcctccggacctgtgggaaaggccctgagcgacgcatgtatgggcacaatcgcctccttcctgtctaagtaccaggacatcatcatcgaacaccagaaggtggtgaagggcaaccagaagagactggagagcctgcgggagctggccggcaaggaaaacctggaataccctagcgtgaccctgccacctcagcctcacaccaaggagggcgttgatgcctacaacgaagtgatcgcccgggtgcgaatgtgggtgaacctgaacctgtggcagaagctgaagctaagcagagatgatgccaagcctctgctgagactgaagggattcccttcctttcctctggtcgagagacaggccaacgaagtggactggtgggacatggtgtgtaacgtgaagaagctgatcaacgagaaaaaggaggatggcaaggtgttttggcagaatctggctggctacaagagacaggaagccctgagaccatacctgagcagcgaggaagatcggaagaagggaaagaaattcgctcggtaccagctgggcgacctgctgctgcacctggaaaagaagcacggcgaggactggggaaaggtgtacgacgaggcctgggagcggattgacaagaaagtggaaggcctgagcaagcacatcaagctggaagaggaacggagaagcgaggacgcccagagcaaggccgccctgaccgactggctgcgggctaaggccagcttcgtgatcgagggcctgaaggaggccgacaaggacgagttctgcagatgcgagctgaagctgcagaagtggtacggggacctgcggggaaagcccttcgccatcgaagccgagaacagcatcctggacatcagcggcttcagcaagcagtacaactgtgccttcatctggcagaaggacggcgtgaagaagctgaacctgtacctgatcatcaactacttcaagggcggcaagctgcggttcaagaagatcaaacctgaagccttcgaagccaacagattctacaccgtgatcaacaaaaagagcggcgagatcgtgcccatggaggtgaacttcaacttcgacgaccccaacctgatcatcctgcctctggcctttggcaagagacagggcagagaattcatctggaacgacctgctgtccctggaaaccggcagcctgaagctggccaacggaagagtgatcgagaagacactgtacaacagaagaacccggcaggatgagcctgccctgttcgtggccctgaccttcgagcggcgggaggtcctggactcctccaatatcaaaccaatgaacctgatcggcgtggcaagaggcgaaaacatccccgccgtgatcgccctgaccgaccccgagggctgcccactgagccggtttaaggatagcctgggaaacccaacccacatcctgagaatcggcgagagctataaggagaagcagcggaccatccaggccaagaaggaggtggagcagcggagagccggcggctacagccggaagtacgccagcaaagccaagaatctggcagacgatatggtgagaaacaccgctagagatctgctgtactacgccgtgacccaggatgccatgctgatcttcgccaacctgagccggggcttcggccggcagggcaagcggaccttcatggccgagagacagtacacacggatggaggactggctgaccgccaagctggcctacgagggcctgagcaagacctacctgtccaagacactggcccagtacacctccaagacatgcagcaactgtgggtttaccatcaccagcgccgactacgacagggtgctggagaagctgaagaagacagcaacaggctggatgaccacaattaacggcaaggagctgaaggtggagggccagattacctactacaacagatacaagagacagaacgtagtcaaggacctgtccgtcgagctggatagactgagcgaagaatctgtgaacaacgacatctcctcctggacaaagggcagaagcggagaagctctgagcctcctgaagaaaagattctcccatagacccgtgcaggagaagttcgtgtgcctgaactgcggcttcgagacacacgcagccgagcaagccgccctgaacatcgccagatcctggctgttcctgcggagccaggagtacaagaaataccagacaaacaagacaaccggcaacaccgataagagagccttcgtcgagacctggcagtccttttaccggaagaagcttaaggaggtgtggaaacctgccgtgcggtctggcggatctggcggaggctccaccagccccaagaaaaagagaaaagtctaagctgccttctgcggggcttgccttctggccatgcccttcttctctcccttgcacctgtacctcttggtctttgaataaagcctgagtaggaaggctagcaaaaaaaaaaaaaaaaaaaaaaaaaaaaaaaaaaaaaaaaaaaaaaaaaaaaaaaaaaaaaaaaaaaaaaaaaaaaaaaagcccagccggctccccaacctctaccgaggagggcacctctgagtccgccacccccgagagcggccctggcacctccaccgagcccagcgagggcagcgcacccggcagccctgccggcagccccacctccacagaggagggaaccagcaccgagcccagcgaaggcagcgccccaggcaccagcaccgagcctagtgagcaggagattaaacggatcaacaagatcagaagaagacttgtgaaagacagcaacaccaagaaggccggcaagacaggccccatgaaaaccctgctggttagagtgatgacacccgatctgagagagcggctggaaaacctgagaaagaagcctgaaaatatcccccagcccatcagcaatacatctagagccaacctgaataagctgctgaccgattacaccgaaatgaagaaggcgatcctgcatgtgtactgggaagagttccagaaggaccctgtgggcctgatgagccgggtggcccagcctgccagcaagaagatcgatcagaacaagctgaaacctgagatggacgagaagggcaacctgaccaccgccggctttgcctgctctcagtgtggccagcccctgttcgtgtacaagctggagcaggtgtctgagaagggcaaggcttacaccaactacttcggacggtgcaatgtggccgagcacgaaaagctgatcctgctggcccagctgaagcccgagaaggatagcgacgaagccgtgacatatagcctgggaaagtttgggcagagggccctggatttctacagcattcatgtgaccaaggagtccacccaccccgtgaagcccctggcccagatcgccggaaacagatacgcctccggacctgtgggaaaggccctgagcgacgcatgtatgggcacaatcgcctccttcctgtctaagtaccaggacatcatcatcgaacaccagaaggtggtgaagggcaaccagaagagactggagagcctgcgggagctggccggcaaggaaaacctggaataccctagcgtgaccctgccacctcagcctcacaccaaggagggcgttgatgcctacaacgaagtgatcgcccgggtgcgaatgtgggtgaacctgaacctgtggcagaagctgaagctaagcagagatgatgccaagcctctgctgagactgaagggattcccttcctttcctctggtcgagagacaggccaacgaagtggactggtgggacatggtgtgtaacgtgaagaagctgatcaacgagaaaaaggaggatggcaaggtgttttggcagaatctggctggctacaagagacaggaagccctgagaccatacctgagcagcgaggaagatcggaagaagggaaagaaattcgctcggtaccagctgggcgacctgctgctgcacctggaaaagaagcacggcgaggactggggaaaggtgtacgacgaggcctgggagcggattgacaagaaagtggaaggcctgagcaagcacatcaagctggaagaggaacggagaagcgaggacgcccagagcaaggccgccctgaccgactggctgcgggctaaggccagcttcgtgatcgagggcctgaaggaggccgacaaggacgagttctgcagatgcgagctgaagctgcagaagtggtacggggacctgcggggaaagcccttcgccatcgaagccgagaacagcatcctggacatcagcggcttcagcaagcagtacaactgtgccttcatctggcagaaggacggcgtgaagaagctgaacctgtacctgatcatcaactacttcaagggcggcaagctgcggttcaagaagatcaaacctgaagccttcgaagccaacagattctacaccgtgatcaacaaaaagagcggcgagatcgtgcccatggaggtgaacttcaacttcgacgaccccaacctgatcatcctgcctctggcctttggcaagagacagggcagagaattcatctggaacgacctgctgtccctggaaaccggcagcctgaagctggccaacggaagagtgatcgagaagacactgtacaacagaagaacccggcaggatgagcctgccctgttcgtggccctgaccttcgagcggcgggaggtcctggactcctccaatatcaaaccaatgaacctgatcggcgtggcaagaggcgaaaacatccccgccgtgatcgccctgaccgaccccgagggctgcccactgagccggtttaaggatagcctgggaaacccaacccacatcctgagaatcggcgagagctataaggagaagcagcggaccatccaggccaagaaggaggtggagcagcggagagccggcggctacagccggaagtacgccagcaaagccaagaatctggcagacgatatggtgagaaacaccgctagagatctgctgtactacgccgtgacccaggatgccatgctgatcttcgccaacctgagccggggcttcggccggcagggcaagcggaccttcatggccgagagacagtacacacggatggaggactggctgaccgccaagctggcctacgagggcctgagcaagacctacctgtccaagacactggcccagtacacctccaagacatgcagcaactgtgggtttaccatcaccagcgccgactacgacagggtgctggagaagctgaagaagacagcaacaggctggatgaccacaattaacggcaaggagctgaaggtggagggccagattacctactacaacagatacaagagacagaacgtagtcaaggacctgtccgtcgagctggatagactgagcgaagaatctgtgaacaacgacatctcctcctggacaaagggcagaagcggagaagctctgagcctcctgaagaaaagattctcccatagacccgtgcaggagaagttcgtgtgcctgaactgcggcttcgagacacacgcagccgagcaagccgccctgaacatcgccagatcctggctgttcctgcggagccaggagtacaagaaataccagacaaacaagacaaccggcaacaccgataagagagccttcgtcgagacctggcagtccttttaccggaagaagcttaaggaggtgtggaaacctgccgtgcggtctggcggatctggcggaggctccaccagccccaagaaaaagagaaaagtctaagctgccttctgcggggcttgccttctggccatgcccttcttctctcccttgcacctgtacctcttggtctttgaataaagcctgagtaggaaggctagcaaaaaaaaaaaaaaaaaaaaaaaaaaaaaaaaaaaaaaaaaaaaaaaaaaaaaaaaaaaaaaaaaaaaaaaaaaaaaaaa

SEQ ID NO: 9153 - RNA, 8787 nt, synthetic construct
  source 1..8787: mol_type = other RNA
aggaaataagagagaaaagaagagtaagaagaaatataagagccaccatggcccctaagaagaagcgtaaagtgagccggatgaaccacgaccaggagttcgacccccctaaggtgtaccctcccgtccccgccgagaagagaaagcccatccgggtcctgagcctgttcgatggcatcgccaccggtctgctggtgctgaaggacctgggcatccaggtggataggtacattgcctccgaggtgtgcgaggactccatcaccgtgggaatggtgcgtcatcagggcaagatcatgtacgtgggcgacgtgcggagcgtgacacagaagcatatccaggagtggggccctttcgacctggtgatcggcggcagcccttgcaatgacctgagcatcgtgaacccagcccggaagggcctgtacgagggaaccggcagactgttcttcgagttttacagactgctgcacgacgcccggcctaaggaaggcgacgaccggcccttcttttggctgttcgagaatgtggtggccatgggagtcagcgacaagcgggatattagccggttcctggagagcaaccccgtgatgatcgatgccaaggaagtgagcgccgcccaccgggccagatacttctggggcaatctgcctggcatgaacagacccctggccagcaccgtgaacgacaagctggagctgcaggagtgcctggagcacggccggatcgccaagttcagcaaggtgagaaccatcaccacccgaagcaacagcatcaaacaaggcaaggaccagcactttcctgtgttcatgaacgagaaggaggacatcctgtggtgtaccgagatggagagagtgttcgggttcccagtccactacacagatgtcagcaacatgtctagactggccagacagagactgctgggaagaagctggtccgtccctgtgatcagacacctgttcgcccctctgaaggagtacttcgcctgcgtgagcagcggcaacagcaacgccaacagccggggccccagcttctctagcggcctggtgccactgtccctgagagggagccacatgggccccatggagatctacaaaaccgtgagcgcctggaagcggcagcctgtgcgcgtgctgagcctgtttcggaatatcgataaagtcctgaaaagcctgggattcctggagagcggctctggctccggcggtggcaccctgaagtacgtggaggatgtgacaaacgtggtcagacgggatgtggagaagtggggccccttcgatctggtgtacggcagcacccaacccctgggcagctcttgtgaccggtgccctggctggtacatgtttcagttccaccggatcctgcagtacgccctgccgagacaggagtcccagcggccattcttttggattttcatggacaacttgctgctgaccgaggatgaccaggaaactaccactcggttcctgcagaccgaagccgtgaccctgcaggacgtgagaggccgggactaccagaacgccatgcgggtgtggtccaacatccctggactgaaaagcaagcacgcacctctgacccctaaagaagaggagtacctgcaggcccaggtgcggagcagaagcaagctggacgcccctaaggtggatctgctggtgaagaattgcctcctgcccctgagagagtacttcaagtatttcagccagaatagtctgcccctgggaggcagcggcggcggcgcccagggcagcgtggtgttcagcgacgtgagcgtggacttcagccaggaggagtgggagtgcctggacagcggccagagggacctgtacagggacgtgatgctggagaactacagcaacctgctgagcatgggcttctacatccccaagccccccgtgatcagcctgctggagcagggcaaggagccctggatggtgggcagggagctgaccaagggcctgtgcagcgacctggagagcatgggcggcccaagcagcggcgcccctcctcccagcggcggcaggcggcccaagcagcggcgcccctcctcccagcggcggcagcccagccggctccccaacctctaccgaggagggcacctctgagtccgccacccccgagagcggccctggcacctccaccgagcccagcgagggcagcgcacccggcagccctgccggcagccccacctccacagaggagggaaccagcaccgagcccagcgaaggcagcgccccaggcaccagcaccgagcctagtgagcaggagattaaacggatcaacaagatcagaagaagacttgtgaaagacagcaacaccaagaaggccggcaagacaggccccatgaaaaccctgctggttagagtgatgacacccgatctgagagagcggctggaaaacctgagaaagaagcctgaaaatatcccccagcccatcagcaatacatctagagccaacctgaataagctgctgaccgattacaccgaaatgaagaaggcgatcctgcatgtgtactgggaagagttccagaaggaccctgtgggcctgatgagccgggtggcccagcctgccagcaagaagatcgatcagaacaagctgaaacctgagatggacgagaagggcaacctgaccaccgccggctttgcctgctctcagtgtggccagcccctgttcgtgtacaagctggagcaggtgtctgagaagggcaaggcttacaccaactacttcggacggtgcaatgtggccgagcacgaaaagctgatcctgctggcccagctgaagcccgagaaggatagcgacgaagccgtgacatatagcctgggaaagtttgggcagagggccctggatttctacagcattcatgtgaccaaggagtccacccaccccgtgaagcccctggcccagatcgccggaaacagatacgcctccggacctgtgggaaaggccctgagcgacgcatgtatgggcacaatcgcctccttcctgtctaagtaccaggacatcatcatcgaacaccagaaggtggtgaagggcaaccagaagagactggagagcctgcgggagctggccggcaaggaaaacctggaataccctagcgtgaccctgccacctcagcctcacaccaaggagggcgttgatgcctacaacgaagtgatcgcccgggtgcgaatgtgggtgaacctgaacctgtggcagaagctgaagctaagcagagatgatgccaagcctctgctgagactgaagggattcccttcctttcctctggtcgagagacaggccaacgaagtggactggtgggacatggtgtgtaacgtgaagaagctgatcaacgagaaaaaggaggatggcaaggtgttttggcagaatctggctggctacaagagacaggaagccctgagaccatacctgagcagcgaggaagatcggaagaagggaaagaaattcgctcggtaccagctgggcgacctgctgctgcacctggaaaagaagcacggcgaggactggggaaaggtgtacgacgaggcctgggagcggattgacaagaaagtggaaggcctgagcaagcacatcaagctggaagaggaacggagaagcgaggacgcccagagcaaggccgccctgaccgactggctgcgggctaaggccagcttcgtgatcgagggcctgaaggaggccgacaaggacgagttctgcagatgcgagctgaagctgcagaagtggtacggggacctgcggggaaagcccttcgccatcgaagccgagaacagcatcctggacatcagcggcttcagcaagcagtacaactgtgccttcatctggcagaaggacggcgtgaagaagctgaacctgtacctgatcatcaactacttcaagggcggcaagctgcggttcaagaagatcaaacctgaagccttcgaagccaacagattctacaccgtgatcaacaaaaagagcggcgagatcgtgcccatggaggtgaacttcaacttcgacgaccccaacctgatcatcctgcctctggcctttggcaagagacagggcagagaattcatctggaacgacctgctgtccctggaaaccggcagcctgaagctggccaacggaagagtgatcgagaagacactgtacaacagaagaacccggcaggatgagcctgccctgttcgtggccctgaccttcgagcggcgggaggtcctggactcctccaatatcaaaccaatgaacctgatcggcgtggcaagaggcgaaaacatccccgccgtgatcgccctgaccgaccccgagggctgcccactgagccggtttaaggatagcctgggaaacccaacccacatcctgagaatcggcgagagctataaggagaagcagcggaccatccaggccaagaaggaggtggagcagcggagagccggcggctacagccggaagtacgccagcaaagccaagaatctggcagacgatatggtgagaaacaccgctagagatctgctgtactacgccgtgacccaggatgccatgctgatcttcgccaacctgagccggggcttcggccggcagggcaagcggaccttcatggccgagagacagtacacacggatggaggactggctgaccgccaagctggcctacgagggcctgagcaagacctacctgtccaagacactggcccagtacacctccaagacatgcagcaactgtgggtttaccatcaccagcgccgactacgacagggtgctggagaagctgaagaagacagcaacaggctggatgaccacaattaacggcaaggagctgaaggtggagggccagattacctactacaacagatacaagagacagaacgtagtcaaggacctgtccgtcgagctggatagactgagcgaagaatctgtgaacaacgacatctcctcctggacaaagggcagaagcggagaagctctgagcctcctgaagaaaagattctcccatagacccgtgcaggagaagttcgtgtgcctgaactgcggcttcgagacacacgcagccgagcaagccgccctgaacatcgccagatcctggctgttcctgcggagccaggagtacaagaaataccagacaaacaagacaaccggcaacaccgataagagagccttcgtcgagacctggcagtccttttaccggaagaagcttaaggaggtgtggaaacctgccgtgcggtctggcggatctggcggaggctccaccagccccaagaaaaagagaaaagtctaagctgccttctgcggggcttgccttctggccatgcccttcttctctcccttgcacctgtacctcttggtctttgaataaagcctgagtaggaaggctagcaaaaaaaaaaaaaaaaaaaaaaaaaaaaaaaaaaaaaaaaaaaaaaaaaaaaaaaaaaaaaaaaaaaaaaaaaaaaaaaagcccagccggctccccaacctctaccgaggagggcacctctgagtccgccacccccgagagcggccctggcacctccaccgagcccagcgagggcagcgcacccggcagccctgccggcagccccacctccacagaggagggaaccagcaccgagcccagcgaaggcagcgccccaggcaccagcaccgagcctagtgagcaggagattaaacggatcaacaagatcagaagaagacttgtgaaagacagcaacaccaagaaggccggcaagacaggccccatgaaaaccctgctggttagagtgatgacacccgatctgagagagcggctggaaaacctgagaaagaagcctgaaaatatcccccagcccatcagcaatacatctagagccaacctgaataagctgctgaccgattacaccgaaatgaagaaggcgatcctgcatgtgtactgggaagagttccagaaggaccctgtgggcctgatgagccgggtggcccagcctgccagcaagaagatcgatcagaacaagctgaaacctgagatggacgagaagggcaacctgaccaccgccggctttgcctgctctcagtgtggccagcccctgttcgtgtacaagctggagcaggtgtctgagaagggcaaggcttacaccaactacttcggacggtgcaatgtggccgagcacgaaaagctgatcctgctggcccagctgaagcccgagaaggatagcgacgaagccgtgacatatagcctgggaaagtttgggcagagggccctggatttctacagcattcatgtgaccaaggagtccacccaccccgtgaagcccctggcccagatcgccggaaacagatacgcctccggacctgtgggaaaggccctgagcgacgcatgtatgggcacaatcgcctccttcctgtctaagtaccaggacatcatcatcgaacaccagaaggtggtgaagggcaaccagaagagactggagagcctgcgggagctggccggcaaggaaaacctggaataccctagcgtgaccctgccacctcagcctcacaccaaggagggcgttgatgcctacaacgaagtgatcgcccgggtgcgaatgtgggtgaacctgaacctgtggcagaagctgaagctaagcagagatgatgccaagcctctgctgagactgaagggattcccttcctttcctctggtcgagagacaggccaacgaagtggactggtgggacatggtgtgtaacgtgaagaagctgatcaacgagaaaaaggaggatggcaaggtgttttggcagaatctggctggctacaagagacaggaagccctgagaccatacctgagcagcgaggaagatcggaagaagggaaagaaattcgctcggtaccagctgggcgacctgctgctgcacctggaaaagaagcacggcgaggactggggaaaggtgtacgacgaggcctgggagcggattgacaagaaagtggaaggcctgagcaagcacatcaagctggaagaggaacggagaagcgaggacgcccagagcaaggccgccctgaccgactggctgcgggctaaggccagcttcgtgatcgagggcctgaaggaggccgacaaggacgagttctgcagatgcgagctgaagctgcagaagtggtacggggacctgcggggaaagcccttcgccatcgaagccgagaacagcatcctggacatcagcggcttcagcaagcagtacaactgtgccttcatctggcagaaggacggcgtgaagaagctgaacctgtacctgatcatcaactacttcaagggcggcaagctgcggttcaagaagatcaaacctgaagccttcgaagccaacagattctacaccgtgatcaacaaaaagagcggcgagatcgtgcccatggaggtgaacttcaacttcgacgaccccaacctgatcatcctgcctctggcctttggcaagagacagggcagagaattcatctggaacgacctgctgtccctggaaaccggcagcctgaagctggccaacggaagagtgatcgagaagacactgtacaacagaagaacccggcaggatgagcctgccctgttcgtggccctgaccttcgagcggcgggaggtcctggactcctccaatatcaaaccaatgaacctgatcggcgtggcaagaggcgaaaacatccccgccgtgatcgccctgaccgaccccgagggctgcccactgagccggtttaaggatagcctgggaaacccaacccacatcctgagaatcggcgagagctataaggagaagcagcggaccatccaggccaagaaggaggtggagcagcggagagccggcggctacagccggaagtacgccagcaaagccaagaatctggcagacgatatggtgagaaacaccgctagagatctgctgtactacgccgtgacccaggatgccatgctgatcttcgccaacctgagccggggcttcggccggcagggcaagcggaccttcatggccgagagacagtacacacggatggaggactggctgaccgccaagctggcctacgagggcctgagcaagacctacctgtccaagacactggcccagtacacctccaagacatgcagcaactgtgggtttaccatcaccagcgccgactacgacagggtgctggagaagctgaagaagacagcaacaggctggatgaccacaattaacggcaaggagctgaaggtggagggccagattacctactacaacagatacaagagacagaacgtagtcaaggacctgtccgtcgagctggatagactgagcgaagaatctgtgaacaacgacatctcctcctggacaaagggcagaagcggagaagctctgagcctcctgaagaaaagattctcccatagacccgtgcaggagaagttcgtgtgcctgaactgcggcttcgagacacacgcagccgagcaagccgccctgaacatcgccagatcctggctgttcctgcggagccaggagtacaagaaataccagacaaacaagacaaccggcaacaccgataagagagccttcgtcgagacctggcagtccttttaccggaagaagcttaaggaggtgtggaaacctgccgtgcggtctggcggatctggcggaggctccaccagccccaagaaaaagagaaaagtctaagctgccttctgcggggcttgccttctggccatgcccttcttctctcccttgcacctgtacctcttggtctttgaataaagcctgagtaggaaggctagcaaaaaaaaaaaaaaaaaaaaaaaaaaaaaaaaaaaaaaaaaaaaaaaaaaaaaaaaaaaaaaaaaaaaaaaaaaaaaaaa

SEQ ID NO: 9154 - RNA, 8787 nt, synthetic construct
  source 1..8787: mol_type = other RNA
aggaaataagagagaaaagaagagtaagaagaaatataagagccaccatggcccctaagaagaagcgtaaagtgagccggatgaaccacgaccaggagttcgacccccctaaggtgtaccctcccgtccccgccgagaagagaaagcccatccgggtcctgagcctgttcgatggcatcgccaccggtctgctggtgctgaaggacctgggcatccaggtggataggtacattgcctccgaggtgtgcgaggactccatcaccgtgggaatggtgcgtcatcagggcaagatcatgtacgtgggcgacgtgcggagcgtgacacagaagcatatccaggagtggggccctttcgacctggtgatcggcggcagcccttgcaatgacctgagcatcgtgaacccagcccggaagggcctgtacgagggaaccggcagactgttcttcgagttttacagactgctgcacgacgcccggcctaaggaaggcgacgaccggcccttcttttggctgttcgagaatgtggtggccatgggagtcagcgacaagcgggatattagccggttcctggagagcaaccccgtgatgatcgatgccaaggaagtgagcgccgcccaccgggccagatacttctggggcaatctgcctggcatgaacagacccctggccagcaccgtgaacgacaagctggagctgcaggagtgcctggagcacggccggatcgccaagttcagcaaggtgagaaccatcaccacccgaagcaacagcatcaaacaaggcaaggaccagcactttcctgtgttcatgaacgagaaggaggacatcctgtggtgtaccgagatggagagagtgttcgggttcccagtccactacacagatgtcagcaacatgtctagactggccagacagagactgctgggaagaagctggtccgtccctgtgatcagacacctgttcgcccctctgaaggagtacttcgcctgcgtgagcagcggcaacagcaacgccaacagccggggccccagcttctctagcggcctggtgccactgtccctgagagggagccacatgggccccatggagatctacaaaaccgtgagcgcctggaagcggcagcctgtgcgcgtgctgagcctgtttcggaatatcgataaagtcctgaaaagcctgggattcctggagagcggctctggctccggcggtggcaccctgaagtacgtggaggatgtgacaaacgtggtcagacgggatgtggagaagtggggccccttcgatctggtgtacggcagcacccaacccctgggcagctcttgtgaccggtgccctggctggtacatgtttcagttccaccggatcctgcagtacgccctgccgagacaggagtcccagcggccattcttttggattttcatggacaacttgctgctgaccgaggatgaccaggaaactaccactcggttcctgcagaccgaagccgtgaccctgcaggacgtgagaggccgggactaccagaacgccatgcgggtgtggtccaacatccctggactgaaaagcaagcacgcacctctgacccctaaagaagaggagtacctgcaggcccaggtgcggagcagaagcaagctggacgcccctaaggtggatctgctggtgaagaattgcctcctgcccctgagagagtacttcaagtatttcagccagaatagtctgcccctgggaggcagcggcggcggcagcaaggccagcgtgaccttcgccgacctggccgtgtacttcagccaggaggagtgggagggcctgagccccatccagaaggacctgtacgaggacgtgatgctggagacctaccagaacctggtgagcgtgggcctgagctgcaggaggcccagcgtgatcaccctgctggagaagggcaaggccccctggaccgtggagcccgccaggcagaggaggggccccgacagcggcgccaagtgcggcggcccaagcagcggcgcccctcctcccagcggcggcaggcggcccaagcagcggcgcccctcctcccagcggcggcagcccagccggctccccaacctctaccgaggagggcacctctgagtccgccacccccgagagcggccctggcacctccaccgagcccagcgagggcagcgcacccggcagccctgccggcagccccacctccacagaggagggaaccagcaccgagcccagcgaaggcagcgccccaggcaccagcaccgagcctagtgagcaggagattaaacggatcaacaagatcagaagaagacttgtgaaagacagcaacaccaagaaggccggcaagacaggccccatgaaaaccctgctggttagagtgatgacacccgatctgagagagcggctggaaaacctgagaaagaagcctgaaaatatcccccagcccatcagcaatacatctagagccaacctgaataagctgctgaccgattacaccgaaatgaagaaggcgatcctgcatgtgtactgggaagagttccagaaggaccctgtgggcctgatgagccgggtggcccagcctgccagcaagaagatcgatcagaacaagctgaaacctgagatggacgagaagggcaacctgaccaccgccggctttgcctgctctcagtgtggccagcccctgttcgtgtacaagctggagcaggtgtctgagaagggcaaggcttacaccaactacttcggacggtgcaatgtggccgagcacgaaaagctgatcctgctggcccagctgaagcccgagaaggatagcgacgaagccgtgacatatagcctgggaaagtttgggcagagggccctggatttctacagcattcatgtgaccaaggagtccacccaccccgtgaagcccctggcccagatcgccggaaacagatacgcctccggacctgtgggaaaggccctgagcgacgcatgtatgggcacaatcgcctccttcctgtctaagtaccaggacatcatcatcgaacaccagaaggtggtgaagggcaaccagaagagactggagagcctgcgggagctggccggcaaggaaaacctggaataccctagcgtgaccctgccacctcagcctcacaccaaggagggcgttgatgcctacaacgaagtgatcgcccgggtgcgaatgtgggtgaacctgaacctgtggcagaagctgaagctaagcagagatgatgccaagcctctgctgagactgaagggattcccttcctttcctctggtcgagagacaggccaacgaagtggactggtgggacatggtgtgtaacgtgaagaagctgatcaacgagaaaaaggaggatggcaaggtgttttggcagaatctggctggctacaagagacaggaagccctgagaccatacctgagcagcgaggaagatcggaagaagggaaagaaattcgctcggtaccagctgggcgacctgctgctgcacctggaaaagaagcacggcgaggactggggaaaggtgtacgacgaggcctgggagcggattgacaagaaagtggaaggcctgagcaagcacatcaagctggaagaggaacggagaagcgaggacgcccagagcaaggccgccctgaccgactggctgcgggctaaggccagcttcgtgatcgagggcctgaaggaggccgacaaggacgagttctgcagatgcgagctgaagctgcagaagtggtacggggacctgcggggaaagcccttcgccatcgaagccgagaacagcatcctggacatcagcggcttcagcaagcagtacaactgtgccttcatctggcagaaggacggcgtgaagaagctgaacctgtacctgatcatcaactacttcaagggcggcaagctgcggttcaagaagatcaaacctgaagccttcgaagccaacagattctacaccgtgatcaacaaaaagagcggcgagatcgtgcccatggaggtgaacttcaacttcgacgaccccaacctgatcatcctgcctctggcctttggcaagagacagggcagagaattcatctggaacgacctgctgtccctggaaaccggcagcctgaagctggccaacggaagagtgatcgagaagacactgtacaacagaagaacccggcaggatgagcctgccctgttcgtggccctgaccttcgagcggcgggaggtcctggactcctccaatatcaaaccaatgaacctgatcggcgtggcaagaggcgaaaacatccccgccgtgatcgccctgaccgaccccgagggctgcccactgagccggtttaaggatagcctgggaaacccaacccacatcctgagaatcggcgagagctataaggagaagcagcggaccatccaggccaagaaggaggtggagcagcggagagccggcggctacagccggaagtacgccagcaaagccaagaatctggcagacgatatggtgagaaacaccgctagagatctgctgtactacgccgtgacccaggatgccatgctgatcttcgccaacctgagccggggcttcggccggcagggcaagcggaccttcatggccgagagacagtacacacggatggaggactggctgaccgccaagctggcctacgagggcctgagcaagacctacctgtccaagacactggcccagtacacctccaagacatgcagcaactgtgggtttaccatcaccagcgccgactacgacagggtgctggagaagctgaagaagacagcaacaggctggatgaccacaattaacggcaaggagctgaaggtggagggccagattacctactacaacagatacaagagacagaacgtagtcaaggacctgtccgtcgagctggatagactgagcgaagaatctgtgaacaacgacatctcctcctggacaaagggcagaagcggagaagctctgagcctcctgaagaaaagattctcccatagacccgtgcaggagaagttcgtgtgcctgaactgcggcttcgagacacacgcagccgagcaagccgccctgaacatcgccagatcctggctgttcctgcggagccaggagtacaagaaataccagacaaacaagacaaccggcaacaccgataagagagccttcgtcgagacctggcagtccttttaccggaagaagcttaaggaggtgtggaaacctgccgtgcggtctggcggatctggcggaggctccaccagccccaagaaaaagagaaaagtctaagctgccttctgcggggcttgccttctggccatgcccttcttctctcccttgcacctgtacctcttggtctttgaataaagcctgagtaggaaggctagcaaaaaaaaaaaaaaaaaaaaaaaaaaaaaaaaaaaaaaaaaaaaaaaaaaaaaaaaaaaaaaaaaaaaaaaaaaaaaaaagcccagccggctccccaacctctaccgaggagggcacctctgagtccgccacccccgagagcggccctggcacctccaccgagcccagcgagggcagcgcacccggcagccctgccggcagccccacctccacagaggagggaaccagcaccgagcccagcgaaggcagcgccccaggcaccagcaccgagcctagtgagcaggagattaaacggatcaacaagatcagaagaagacttgtgaaagacagcaacaccaagaaggccggcaagacaggccccatgaaaaccctgctggttagagtgatgacacccgatctgagagagcggctggaaaacctgagaaagaagcctgaaaatatcccccagcccatcagcaatacatctagagccaacctgaataagctgctgaccgattacaccgaaatgaagaaggcgatcctgcatgtgtactgggaagagttccagaaggaccctgtgggcctgatgagccgggtggcccagcctgccagcaagaagatcgatcagaacaagctgaaacctgagatggacgagaagggcaacctgaccaccgccggctttgcctgctctcagtgtggccagcccctgttcgtgtacaagctggagcaggtgtctgagaagggcaaggcttacaccaactacttcggacggtgcaatgtggccgagcacgaaaagctgatcctgctggcccagctgaagcccgagaaggatagcgacgaagccgtgacatatagcctgggaaagtttgggcagagggccctggatttctacagcattcatgtgaccaaggagtccacccaccccgtgaagcccctggcccagatcgccggaaacagatacgcctccggacctgtgggaaaggccctgagcgacgcatgtatgggcacaatcgcctccttcctgtctaagtaccaggacatcatcatcgaacaccagaaggtggtgaagggcaaccagaagagactggagagcctgcgggagctggccggcaaggaaaacctggaataccctagcgtgaccctgccacctcagcctcacaccaaggagggcgttgatgcctacaacgaagtgatcgcccgggtgcgaatgtgggtgaacctgaacctgtggcagaagctgaagctaagcagagatgatgccaagcctctgctgagactgaagggattcccttcctttcctctggtcgagagacaggccaacgaagtggactggtgggacatggtgtgtaacgtgaagaagctgatcaacgagaaaaaggaggatggcaaggtgttttggcagaatctggctggctacaagagacaggaagccctgagaccatacctgagcagcgaggaagatcggaagaagggaaagaaattcgctcggtaccagctgggcgacctgctgctgcacctggaaaagaagcacggcgaggactggggaaaggtgtacgacgaggcctgggagcggattgacaagaaagtggaaggcctgagcaagcacatcaagctggaagaggaacggagaagcgaggacgcccagagcaaggccgccctgaccgactggctgcgggctaaggccagcttcgtgatcgagggcctgaaggaggccgacaaggacgagttctgcagatgcgagctgaagctgcagaagtggtacggggacctgcggggaaagcccttcgccatcgaagccgagaacagcatcctggacatcagcggcttcagcaagcagtacaactgtgccttcatctggcagaaggacggcgtgaagaagctgaacctgtacctgatcatcaactacttcaagggcggcaagctgcggttcaagaagatcaaacctgaagccttcgaagccaacagattctacaccgtgatcaacaaaaagagcggcgagatcgtgcccatggaggtgaacttcaacttcgacgaccccaacctgatcatcctgcctctggcctttggcaagagacagggcagagaattcatctggaacgacctgctgtccctggaaaccggcagcctgaagctggccaacggaagagtgatcgagaagacactgtacaacagaagaacccggcaggatgagcctgccctgttcgtggccctgaccttcgagcggcgggaggtcctggactcctccaatatcaaaccaatgaacctgatcggcgtggcaagaggcgaaaacatccccgccgtgatcgccctgaccgaccccgagggctgcccactgagccggtttaaggatagcctgggaaacccaacccacatcctgagaatcggcgagagctataaggagaagcagcggaccatccaggccaagaaggaggtggagcagcggagagccggcggctacagccggaagtacgccagcaaagccaagaatctggcagacgatatggtgagaaacaccgctagagatctgctgtactacgccgtgacccaggatgccatgctgatcttcgccaacctgagccggggcttcggccggcagggcaagcggaccttcatggccgagagacagtacacacggatggaggactggctgaccgccaagctggcctacgagggcctgagcaagacctacctgtccaagacactggcccagtacacctccaagacatgcagcaactgtgggtttaccatcaccagcgccgactacgacagggtgctggagaagctgaagaagacagcaacaggctggatgaccacaattaacggcaaggagctgaaggtggagggccagattacctactacaacagatacaagagacagaacgtagtcaaggacctgtccgtcgagctggatagactgagcgaagaatctgtgaacaacgacatctcctcctggacaaagggcagaagcggagaagctctgagcctcctgaagaaaagattctcccatagacccgtgcaggagaagttcgtgtgcctgaactgcggcttcgagacacacgcagccgagcaagccgccctgaacatcgccagatcctggctgttcctgcggagccaggagtacaagaaataccagacaaacaagacaaccggcaacaccgataagagagccttcgtcgagacctggcagtccttttaccggaagaagcttaaggaggtgtggaaacctgccgtgcggtctggcggatctggcggaggctccaccagccccaagaaaaagagaaaagtctaagctgccttctgcggggcttgccttctggccatgcccttcttctctcccttgcacctgtacctcttggtctttgaataaagcctgagtaggaaggctagcaaaaaaaaaaaaaaaaaaaaaaaaaaaaaaaaaaaaaaaaaaaaaaaaaaaaaaaaaaaaaaaaaaaaaaaaaaaaaaaa

SEQ ID NO: 9155 - RNA, 8787 nt, synthetic construct
  source 1..8787: mol_type = other RNA
aggaaataagagagaaaagaagagtaagaagaaatataagagccaccatggcccctaagaagaagcgtaaagtgagccggatgaaccacgaccaggagttcgacccccctaaggtgtaccctcccgtccccgccgagaagagaaagcccatccgggtcctgagcctgttcgatggcatcgccaccggtctgctggtgctgaaggacctgggcatccaggtggataggtacattgcctccgaggtgtgcgaggactccatcaccgtgggaatggtgcgtcatcagggcaagatcatgtacgtgggcgacgtgcggagcgtgacacagaagcatatccaggagtggggccctttcgacctggtgatcggcggcagcccttgcaatgacctgagcatcgtgaacccagcccggaagggcctgtacgagggaaccggcagactgttcttcgagttttacagactgctgcacgacgcccggcctaaggaaggcgacgaccggcccttcttttggctgttcgagaatgtggtggccatgggagtcagcgacaagcgggatattagccggttcctggagagcaaccccgtgatgatcgatgccaaggaagtgagcgccgcccaccgggccagatacttctggggcaatctgcctggcatgaacagacccctggccagcaccgtgaacgacaagctggagctgcaggagtgcctggagcacggccggatcgccaagttcagcaaggtgagaaccatcaccacccgaagcaacagcatcaaacaaggcaaggaccagcactttcctgtgttcatgaacgagaaggaggacatcctgtggtgtaccgagatggagagagtgttcgggttcccagtccactacacagatgtcagcaacatgtctagactggccagacagagactgctgggaagaagctggtccgtccctgtgatcagacacctgttcgcccctctgaaggagtacttcgcctgcgtgagcagcggcaacagcaacgccaacagccggggccccagcttctctagcggcctggtgccactgtccctgagagggagccacatgggccccatggagatctacaaaaccgtgagcgcctggaagcggcagcctgtgcgcgtgctgagcctgtttcggaatatcgataaagtcctgaaaagcctgggattcctggagagcggctctggctccggcggtggcaccctgaagtacgtggaggatgtgacaaacgtggtcagacgggatgtggagaagtggggccccttcgatctggtgtacggcagcacccaacccctgggcagctcttgtgaccggtgccctggctggtacatgtttcagttccaccggatcctgcagtacgccctgccgagacaggagtcccagcggccattcttttggattttcatggacaacttgctgctgaccgaggatgaccaggaaactaccactcggttcctgcagaccgaagccgtgaccctgcaggacgtgagaggccgggactaccagaacgccatgcgggtgtggtccaacatccctggactgaaaagcaagcacgcacctctgacccctaaagaagaggagtacctgcaggcccaggtgcggagcagaagcaagctggacgcccctaaggtggatctgctggtgaagaattgcctcctgcccctgagagagtacttcaagtatttcagccagaatagtctgcccctgggaggcagcggcggcggcgagagcgtggccttcgaggacgtggccgtgtacttcacccagaaccagtgggccagcctggaccccgcccagagggccctgtacagggaggtgatgctggagaactacgccaacgtggccagcctggtggccttccccttccccaagcccgccctgatcagccacctggagaagggcgaggccccctggggccccgacccctgggacgccgagatccccagcagcctgagccagggcgacgagggcggcccaagcagcggcgcccctcctcccagcggcggcaggcggcccaagcagcggcgcccctcctcccagcggcggcagcccagccggctccccaacctctaccgaggagggcacctctgagtccgccacccccgagagcggccctggcacctccaccgagcccagcgagggcagcgcacccggcagccctgccggcagccccacctccacagaggagggaaccagcaccgagcccagcgaaggcagcgccccaggcaccagcaccgagcctagtgagcaggagattaaacggatcaacaagatcagaagaagacttgtgaaagacagcaacaccaagaaggccggcaagacaggccccatgaaaaccctgctggttagagtgatgacacccgatctgagagagcggctggaaaacctgagaaagaagcctgaaaatatcccccagcccatcagcaatacatctagagccaacctgaataagctgctgaccgattacaccgaaatgaagaaggcgatcctgcatgtgtactgggaagagttccagaaggaccctgtgggcctgatgagccgggtggcccagcctgccagcaagaagatcgatcagaacaagctgaaacctgagatggacgagaagggcaacctgaccaccgccggctttgcctgctctcagtgtggccagcccctgttcgtgtacaagctggagcaggtgtctgagaagggcaaggcttacaccaactacttcggacggtgcaatgtggccgagcacgaaaagctgatcctgctggcccagctgaagcccgagaaggatagcgacgaagccgtgacatatagcctgggaaagtttgggcagagggccctggatttctacagcattcatgtgaccaaggagtccacccaccccgtgaagcccctggcccagatcgccggaaacagatacgcctccggacctgtgggaaaggccctgagcgacgcatgtatgggcacaatcgcctccttcctgtctaagtaccaggacatcatcatcgaacaccagaaggtggtgaagggcaaccagaagagactggagagcctgcgggagctggccggcaaggaaaacctggaataccctagcgtgaccctgccacctcagcctcacaccaaggagggcgttgatgcctacaacgaagtgatcgcccgggtgcgaatgtgggtgaacctgaacctgtggcagaagctgaagctaagcagagatgatgccaagcctctgctgagactgaagggattcccttcctttcctctggtcgagagacaggccaacgaagtggactggtgggacatggtgtgtaacgtgaagaagctgatcaacgagaaaaaggaggatggcaaggtgttttggcagaatctggctggctacaagagacaggaagccctgagaccatacctgagcagcgaggaagatcggaagaagggaaagaaattcgctcggtaccagctgggcgacctgctgctgcacctggaaaagaagcacggcgaggactggggaaaggtgtacgacgaggcctgggagcggattgacaagaaagtggaaggcctgagcaagcacatcaagctggaagaggaacggagaagcgaggacgcccagagcaaggccgccctgaccgactggctgcgggctaaggccagcttcgtgatcgagggcctgaaggaggccgacaaggacgagttctgcagatgcgagctgaagctgcagaagtggtacggggacctgcggggaaagcccttcgccatcgaagccgagaacagcatcctggacatcagcggcttcagcaagcagtacaactgtgccttcatctggcagaaggacggcgtgaagaagctgaacctgtacctgatcatcaactacttcaagggcggcaagctgcggttcaagaagatcaaacctgaagccttcgaagccaacagattctacaccgtgatcaacaaaaagagcggcgagatcgtgcccatggaggtgaacttcaacttcgacgaccccaacctgatcatcctgcctctggcctttggcaagagacagggcagagaattcatctggaacgacctgctgtccctggaaaccggcagcctgaagctggccaacggaagagtgatcgagaagacactgtacaacagaagaacccggcaggatgagcctgccctgttcgtggccctgaccttcgagcggcgggaggtcctggactcctccaatatcaaaccaatgaacctgatcggcgtggcaagaggcgaaaacatccccgccgtgatcgccctgaccgaccccgagggctgcccactgagccggtttaaggatagcctgggaaacccaacccacatcctgagaatcggcgagagctataaggagaagcagcggaccatccaggccaagaaggaggtggagcagcggagagccggcggctacagccggaagtacgccagcaaagccaagaatctggcagacgatatggtgagaaacaccgctagagatctgctgtactacgccgtgacccaggatgccatgctgatcttcgccaacctgagccggggcttcggccggcagggcaagcggaccttcatggccgagagacagtacacacggatggaggactggctgaccgccaagctggcctacgagggcctgagcaagacctacctgtccaagacactggcccagtacacctccaagacatgcagcaactgtgggtttaccatcaccagcgccgactacgacagggtgctggagaagctgaagaagacagcaacaggctggatgaccacaattaacggcaaggagctgaaggtggagggccagattacctactacaacagatacaagagacagaacgtagtcaaggacctgtccgtcgagctggatagactgagcgaagaatctgtgaacaacgacatctcctcctggacaaagggcagaagcggagaagctctgagcctcctgaagaaaagattctcccatagacccgtgcaggagaagttcgtgtgcctgaactgcggcttcgagacacacgcagccgagcaagccgccctgaacatcgccagatcctggctgttcctgcggagccaggagtacaagaaataccagacaaacaagacaaccggcaacaccgataagagagccttcgtcgagacctggcagtccttttaccggaagaagcttaaggaggtgtggaaacctgccgtgcggtctggcggatctggcggaggctccaccagccccaagaaaaagagaaaagtctaagctgccttctgcggggcttgccttctggccatgcccttcttctctcccttgcacctgtacctcttggtctttgaataaagcctgagtaggaaggctagcaaaaaaaaaaaaaaaaaaaaaaaaaaaaaaaaaaaaaaaaaaaaaaaaaaaaaaaaaaaaaaaaaaaaaaaaaaaaaaaagcccagccggctccccaacctctaccgaggagggcacctctgagtccgccacccccgagagcggccctggcacctccaccgagcccagcgagggcagcgcacccggcagccctgccggcagccccacctccacagaggagggaaccagcaccgagcccagcgaaggcagcgccccaggcaccagcaccgagcctagtgagcaggagattaaacggatcaacaagatcagaagaagacttgtgaaagacagcaacaccaagaaggccggcaagacaggccccatgaaaaccctgctggttagagtgatgacacccgatctgagagagcggctggaaaacctgagaaagaagcctgaaaatatcccccagcccatcagcaatacatctagagccaacctgaataagctgctgaccgattacaccgaaatgaagaaggcgatcctgcatgtgtactgggaagagttccagaaggaccctgtgggcctgatgagccgggtggcccagcctgccagcaagaagatcgatcagaacaagctgaaacctgagatggacgagaagggcaacctgaccaccgccggctttgcctgctctcagtgtggccagcccctgttcgtgtacaagctggagcaggtgtctgagaagggcaaggcttacaccaactacttcggacggtgcaatgtggccgagcacgaaaagctgatcctgctggcccagctgaagcccgagaaggatagcgacgaagccgtgacatatagcctgggaaagtttgggcagagggccctggatttctacagcattcatgtgaccaaggagtccacccaccccgtgaagcccctggcccagatcgccggaaacagatacgcctccggacctgtgggaaaggccctgagcgacgcatgtatgggcacaatcgcctccttcctgtctaagtaccaggacatcatcatcgaacaccagaaggtggtgaagggcaaccagaagagactggagagcctgcgggagctggccggcaaggaaaacctggaataccctagcgtgaccctgccacctcagcctcacaccaaggagggcgttgatgcctacaacgaagtgatcgcccgggtgcgaatgtgggtgaacctgaacctgtggcagaagctgaagctaagcagagatgatgccaagcctctgctgagactgaagggattcccttcctttcctctggtcgagagacaggccaacgaagtggactggtgggacatggtgtgtaacgtgaagaagctgatcaacgagaaaaaggaggatggcaaggtgttttggcagaatctggctggctacaagagacaggaagccctgagaccatacctgagcagcgaggaagatcggaagaagggaaagaaattcgctcggtaccagctgggcgacctgctgctgcacctggaaaagaagcacggcgaggactggggaaaggtgtacgacgaggcctgggagcggattgacaagaaagtggaaggcctgagcaagcacatcaagctggaagaggaacggagaagcgaggacgcccagagcaaggccgccctgaccgactggctgcgggctaaggccagcttcgtgatcgagggcctgaaggaggccgacaaggacgagttctgcagatgcgagctgaagctgcagaagtggtacggggacctgcggggaaagcccttcgccatcgaagccgagaacagcatcctggacatcagcggcttcagcaagcagtacaactgtgccttcatctggcagaaggacggcgtgaagaagctgaacctgtacctgatcatcaactacttcaagggcggcaagctgcggttcaagaagatcaaacctgaagccttcgaagccaacagattctacaccgtgatcaacaaaaagagcggcgagatcgtgcccatggaggtgaacttcaacttcgacgaccccaacctgatcatcctgcctctggcctttggcaagagacagggcagagaattcatctggaacgacctgctgtccctggaaaccggcagcctgaagctggccaacggaagagtgatcgagaagacactgtacaacagaagaacccggcaggatgagcctgccctgttcgtggccctgaccttcgagcggcgggaggtcctggactcctccaatatcaaaccaatgaacctgatcggcgtggcaagaggcgaaaacatccccgccgtgatcgccctgaccgaccccgagggctgcccactgagccggtttaaggatagcctgggaaacccaacccacatcctgagaatcggcgagagctataaggagaagcagcggaccatccaggccaagaaggaggtggagcagcggagagccggcggctacagccggaagtacgccagcaaagccaagaatctggcagacgatatggtgagaaacaccgctagagatctgctgtactacgccgtgacccaggatgccatgctgatcttcgccaacctgagccggggcttcggccggcagggcaagcggaccttcatggccgagagacagtacacacggatggaggactggctgaccgccaagctggcctacgagggcctgagcaagacctacctgtccaagacactggcccagtacacctccaagacatgcagcaactgtgggtttaccatcaccagcgccgactacgacagggtgctggagaagctgaagaagacagcaacaggctggatgaccacaattaacggcaaggagctgaaggtggagggccagattacctactacaacagatacaagagacagaacgtagtcaaggacctgtccgtcgagctggatagactgagcgaagaatctgtgaacaacgacatctcctcctggacaaagggcagaagcggagaagctctgagcctcctgaagaaaagattctcccatagacccgtgcaggagaagttcgtgtgcctgaactgcggcttcgagacacacgcagccgagcaagccgccctgaacatcgccagatcctggctgttcctgcggagccaggagtacaagaaataccagacaaacaagacaaccggcaacaccgataagagagccttcgtcgagacctggcagtccttttaccggaagaagcttaaggaggtgtggaaacctgccgtgcggtctggcggatctggcggaggctccaccagccccaagaaaaagagaaaagtctaagctgccttctgcggggcttgccttctggccatgcccttcttctctcccttgcacctgtacctcttggtctttgaataaagcctgagtaggaaggctagcaaaaaaaaaaaaaaaaaaaaaaaaaaaaaaaaaaaaaaaaaaaaaaaaaaaaaaaaaaaaaaaaaaaaaaaaaaaaaaaa

SEQ ID NO: 9156 - RNA, 8787 nt, synthetic construct
  source 1..8787: mol_type = other RNA
aggaaataagagagaaaagaagagtaagaagaaatataagagccaccatggcccctaagaagaagcgtaaagtgagccggatgaaccacgaccaggagttcgacccccctaaggtgtaccctcccgtccccgccgagaagagaaagcccatccgggtcctgagcctgttcgatggcatcgccaccggtctgctggtgctgaaggacctgggcatccaggtggataggtacattgcctccgaggtgtgcgaggactccatcaccgtgggaatggtgcgtcatcagggcaagatcatgtacgtgggcgacgtgcggagcgtgacacagaagcatatccaggagtggggccctttcgacctggtgatcggcggcagcccttgcaatgacctgagcatcgtgaacccagcccggaagggcctgtacgagggaaccggcagactgttcttcgagttttacagactgctgcacgacgcccggcctaaggaaggcgacgaccggcccttcttttggctgttcgagaatgtggtggccatgggagtcagcgacaagcgggatattagccggttcctggagagcaaccccgtgatgatcgatgccaaggaagtgagcgccgcccaccgggccagatacttctggggcaatctgcctggcatgaacagacccctggccagcaccgtgaacgacaagctggagctgcaggagtgcctggagcacggccggatcgccaagttcagcaaggtgagaaccatcaccacccgaagcaacagcatcaaacaaggcaaggaccagcactttcctgtgttcatgaacgagaaggaggacatcctgtggtgtaccgagatggagagagtgttcgggttcccagtccactacacagatgtcagcaacatgtctagactggccagacagagactgctgggaagaagctggtccgtccctgtgatcagacacctgttcgcccctctgaaggagtacttcgcctgcgtgagcagcggcaacagcaacgccaacagccggggccccagcttctctagcggcctggtgccactgtccctgagagggagccacatgggccccatggagatctacaaaaccgtgagcgcctggaagcggcagcctgtgcgcgtgctgagcctgtttcggaatatcgataaagtcctgaaaagcctgggattcctggagagcggctctggctccggcggtggcaccctgaagtacgtggaggatgtgacaaacgtggtcagacgggatgtggagaagtggggccccttcgatctggtgtacggcagcacccaacccctgggcagctcttgtgaccggtgccctggctggtacatgtttcagttccaccggatcctgcagtacgccctgccgagacaggagtcccagcggccattcttttggattttcatggacaacttgctgctgaccgaggatgaccaggaaactaccactcggttcctgcagaccgaagccgtgaccctgcaggacgtgagaggccgggactaccagaacgccatgcgggtgtggtccaacatccctggactgaaaagcaagcacgcacctctgacccctaaagaagaggagtacctgcaggcccaggtgcggagcagaagcaagctggacgcccctaaggtggatctgctggtgaagaattgcctcctgcccctgagagagtacttcaagtatttcagccagaatagtctgcccctgggaggcagcggcggcggccccgtgaggggccccggcgaggccaggcccagcaggaagaggggcaggaggcccagggccctgaagttcgtggacgtggccgtgtacttcagcagcgaggagtggggctgcctgaggcccgcccagagggccctgtacagggacgtgatgagggagacctacggccacctgggcgccctgggctgcgccggccccaagcccgccctgatcagctggctggagaggaacaccgacgactgggagggcggcccaagcagcggcgcccctcctcccagcggcggcaggcggcccaagcagcggcgcccctcctcccagcggcggcagcccagccggctccccaacctctaccgaggagggcacctctgagtccgccacccccgagagcggccctggcacctccaccgagcccagcgagggcagcgcacccggcagccctgccggcagccccacctccacagaggagggaaccagcaccgagcccagcgaaggcagcgccccaggcaccagcaccgagcctagtgagcaggagattaaacggatcaacaagatcagaagaagacttgtgaaagacagcaacaccaagaaggccggcaagacaggccccatgaaaaccctgctggttagagtgatgacacccgatctgagagagcggctggaaaacctgagaaagaagcctgaaaatatcccccagcccatcagcaatacatctagagccaacctgaataagctgctgaccgattacaccgaaatgaagaaggcgatcctgcatgtgtactgggaagagttccagaaggaccctgtgggcctgatgagccgggtggcccagcctgccagcaagaagatcgatcagaacaagctgaaacctgagatggacgagaagggcaacctgaccaccgccggctttgcctgctctcagtgtggccagcccctgttcgtgtacaagctggagcaggtgtctgagaagggcaaggcttacaccaactacttcggacggtgcaatgtggccgagcacgaaaagctgatcctgctggcccagctgaagcccgagaaggatagcgacgaagccgtgacatatagcctgggaaagtttgggcagagggccctggatttctacagcattcatgtgaccaaggagtccacccaccccgtgaagcccctggcccagatcgccggaaacagatacgcctccggacctgtgggaaaggccctgagcgacgcatgtatgggcacaatcgcctccttcctgtctaagtaccaggacatcatcatcgaacaccagaaggtggtgaagggcaaccagaagagactggagagcctgcgggagctggccggcaaggaaaacctggaataccctagcgtgaccctgccacctcagcctcacaccaaggagggcgttgatgcctacaacgaagtgatcgcccgggtgcgaatgtgggtgaacctgaacctgtggcagaagctgaagctaagcagagatgatgccaagcctctgctgagactgaagggattcccttcctttcctctggtcgagagacaggccaacgaagtggactggtgggacatggtgtgtaacgtgaagaagctgatcaacgagaaaaaggaggatggcaaggtgttttggcagaatctggctggctacaagagacaggaagccctgagaccatacctgagcagcgaggaagatcggaagaagggaaagaaattcgctcggtaccagctgggcgacctgctgctgcacctggaaaagaagcacggcgaggactggggaaaggtgtacgacgaggcctgggagcggattgacaagaaagtggaaggcctgagcaagcacatcaagctggaagaggaacggagaagcgaggacgcccagagcaaggccgccctgaccgactggctgcgggctaaggccagcttcgtgatcgagggcctgaaggaggccgacaaggacgagttctgcagatgcgagctgaagctgcagaagtggtacggggacctgcggggaaagcccttcgccatcgaagccgagaacagcatcctggacatcagcggcttcagcaagcagtacaactgtgccttcatctggcagaaggacggcgtgaagaagctgaacctgtacctgatcatcaactacttcaagggcggcaagctgcggttcaagaagatcaaacctgaagccttcgaagccaacagattctacaccgtgatcaacaaaaagagcggcgagatcgtgcccatggaggtgaacttcaacttcgacgaccccaacctgatcatcctgcctctggcctttggcaagagacagggcagagaattcatctggaacgacctgctgtccctggaaaccggcagcctgaagctggccaacggaagagtgatcgagaagacactgtacaacagaagaacccggcaggatgagcctgccctgttcgtggccctgaccttcgagcggcgggaggtcctggactcctccaatatcaaaccaatgaacctgatcggcgtggcaagaggcgaaaacatccccgccgtgatcgccctgaccgaccccgagggctgcccactgagccggtttaaggatagcctgggaaacccaacccacatcctgagaatcggcgagagctataaggagaagcagcggaccatccaggccaagaaggaggtggagcagcggagagccggcggctacagccggaagtacgccagcaaagccaagaatctggcagacgatatggtgagaaacaccgctagagatctgctgtactacgccgtgacccaggatgccatgctgatcttcgccaacctgagccggggcttcggccggcagggcaagcggaccttcatggccgagagacagtacacacggatggaggactggctgaccgccaagctggcctacgagggcctgagcaagacctacctgtccaagacactggcccagtacacctccaagacatgcagcaactgtgggtttaccatcaccagcgccgactacgacagggtgctggagaagctgaagaagacagcaacaggctggatgaccacaattaacggcaaggagctgaaggtggagggccagattacctactacaacagatacaagagacagaacgtagtcaaggacctgtccgtcgagctggatagactgagcgaagaatctgtgaacaacgacatctcctcctggacaaagggcagaagcggagaagctctgagcctcctgaagaaaagattctcccatagacccgtgcaggagaagttcgtgtgcctgaactgcggcttcgagacacacgcagccgagcaagccgccctgaacatcgccagatcctggctgttcctgcggagccaggagtacaagaaataccagacaaacaagacaaccggcaacaccgataagagagccttcgtcgagacctggcagtccttttaccggaagaagcttaaggaggtgtggaaacctgccgtgcggtctggcggatctggcggaggctccaccagccccaagaaaaagagaaaagtctaagctgccttctgcggggcttgccttctggccatgcccttcttctctcccttgcacctgtacctcttggtctttgaataaagcctgagtaggaaggctagcaaaaaaaaaaaaaaaaaaaaaaaaaaaaaaaaaaaaaaaaaaaaaaaaaaaaaaaaaaaaaaaaaaaaaaaaaaaaaaaagcccagccggctccccaacctctaccgaggagggcacctctgagtccgccacccccgagagcggccctggcacctccaccgagcccagcgagggcagcgcacccggcagccctgccggcagccccacctccacagaggagggaaccagcaccgagcccagcgaaggcagcgccccaggcaccagcaccgagcctagtgagcaggagattaaacggatcaacaagatcagaagaagacttgtgaaagacagcaacaccaagaaggccggcaagacaggccccatgaaaaccctgctggttagagtgatgacacccgatctgagagagcggctggaaaacctgagaaagaagcctgaaaatatcccccagcccatcagcaatacatctagagccaacctgaataagctgctgaccgattacaccgaaatgaagaaggcgatcctgcatgtgtactgggaagagttccagaaggaccctgtgggcctgatgagccgggtggcccagcctgccagcaagaagatcgatcagaacaagctgaaacctgagatggacgagaagggcaacctgaccaccgccggctttgcctgctctcagtgtggccagcccctgttcgtgtacaagctggagcaggtgtctgagaagggcaaggcttacaccaactacttcggacggtgcaatgtggccgagcacgaaaagctgatcctgctggcccagctgaagcccgagaaggatagcgacgaagccgtgacatatagcctgggaaagtttgggcagagggccctggatttctacagcattcatgtgaccaaggagtccacccaccccgtgaagcccctggcccagatcgccggaaacagatacgcctccggacctgtgggaaaggccctgagcgacgcatgtatgggcacaatcgcctccttcctgtctaagtaccaggacatcatcatcgaacaccagaaggtggtgaagggcaaccagaagagactggagagcctgcgggagctggccggcaaggaaaacctggaataccctagcgtgaccctgccacctcagcctcacaccaaggagggcgttgatgcctacaacgaagtgatcgcccgggtgcgaatgtgggtgaacctgaacctgtggcagaagctgaagctaagcagagatgatgccaagcctctgctgagactgaagggattcccttcctttcctctggtcgagagacaggccaacgaagtggactggtgggacatggtgtgtaacgtgaagaagctgatcaacgagaaaaaggaggatggcaaggtgttttggcagaatctggctggctacaagagacaggaagccctgagaccatacctgagcagcgaggaagatcggaagaagggaaagaaattcgctcggtaccagctgggcgacctgctgctgcacctggaaaagaagcacggcgaggactggggaaaggtgtacgacgaggcctgggagcggattgacaagaaagtggaaggcctgagcaagcacatcaagctggaagaggaacggagaagcgaggacgcccagagcaaggccgccctgaccgactggctgcgggctaaggccagcttcgtgatcgagggcctgaaggaggccgacaaggacgagttctgcagatgcgagctgaagctgcagaagtggtacggggacctgcggggaaagcccttcgccatcgaagccgagaacagcatcctggacatcagcggcttcagcaagcagtacaactgtgccttcatctggcagaaggacggcgtgaagaagctgaacctgtacctgatcatcaactacttcaagggcggcaagctgcggttcaagaagatcaaacctgaagccttcgaagccaacagattctacaccgtgatcaacaaaaagagcggcgagatcgtgcccatggaggtgaacttcaacttcgacgaccccaacctgatcatcctgcctctggcctttggcaagagacagggcagagaattcatctggaacgacctgctgtccctggaaaccggcagcctgaagctggccaacggaagagtgatcgagaagacactgtacaacagaagaacccggcaggatgagcctgccctgttcgtggccctgaccttcgagcggcgggaggtcctggactcctccaatatcaaaccaatgaacctgatcggcgtggcaagaggcgaaaacatccccgccgtgatcgccctgaccgaccccgagggctgcccactgagccggtttaaggatagcctgggaaacccaacccacatcctgagaatcggcgagagctataaggagaagcagcggaccatccaggccaagaaggaggtggagcagcggagagccggcggctacagccggaagtacgccagcaaagccaagaatctggcagacgatatggtgagaaacaccgctagagatctgctgtactacgccgtgacccaggatgccatgctgatcttcgccaacctgagccggggcttcggccggcagggcaagcggaccttcatggccgagagacagtacacacggatggaggactggctgaccgccaagctggcctacgagggcctgagcaagacctacctgtccaagacactggcccagtacacctccaagacatgcagcaactgtgggtttaccatcaccagcgccgactacgacagggtgctggagaagctgaagaagacagcaacaggctggatgaccacaattaacggcaaggagctgaaggtggagggccagattacctactacaacagatacaagagacagaacgtagtcaaggacctgtccgtcgagctggatagactgagcgaagaatctgtgaacaacgacatctcctcctggacaaagggcagaagcggagaagctctgagcctcctgaagaaaagattctcccatagacccgtgcaggagaagttcgtgtgcctgaactgcggcttcgagacacacgcagccgagcaagccgccctgaacatcgccagatcctggctgttcctgcggagccaggagtacaagaaataccagacaaacaagacaaccggcaacaccgataagagagccttcgtcgagacctggcagtccttttaccggaagaagcttaaggaggtgtggaaacctgccgtgcggtctggcggatctggcggaggctccaccagccccaagaaaaagagaaaagtctaagctgccttctgcggggcttgccttctggccatgcccttcttctctcccttgcacctgtacctcttggtctttgaataaagcctgagtaggaaggctagcaaaaaaaaaaaaaaaaaaaaaaaaaaaaaaaaaaaaaaaaaaaaaaaaaaaaaaaaaaaaaaaaaaaaaaaaaaaaaaaa

SEQ ID NO: 9157 - RNA, 8787 nt, synthetic construct
  source 1..8787: mol_type = other RNA
aggaaataagagagaaaagaagagtaagaagaaatataagagccaccatggcccctaagaagaagcgtaaagtgagccggatgaaccacgaccaggagttcgacccccctaaggtgtaccctcccgtccccgccgagaagagaaagcccatccgggtcctgagcctgttcgatggcatcgccaccggtctgctggtgctgaaggacctgggcatccaggtggataggtacattgcctccgaggtgtgcgaggactccatcaccgtgggaatggtgcgtcatcagggcaagatcatgtacgtgggcgacgtgcggagcgtgacacagaagcatatccaggagtggggccctttcgacctggtgatcggcggcagcccttgcaatgacctgagcatcgtgaacccagcccggaagggcctgtacgagggaaccggcagactgttcttcgagttttacagactgctgcacgacgcccggcctaaggaaggcgacgaccggcccttcttttggctgttcgagaatgtggtggccatgggagtcagcgacaagcgggatattagccggttcctggagagcaaccccgtgatgatcgatgccaaggaagtgagcgccgcccaccgggccagatacttctggggcaatctgcctggcatgaacagacccctggccagcaccgtgaacgacaagctggagctgcaggagtgcctggagcacggccggatcgccaagttcagcaaggtgagaaccatcaccacccgaagcaacagcatcaaacaaggcaaggaccagcactttcctgtgttcatgaacgagaaggaggacatcctgtggtgtaccgagatggagagagtgttcgggttcccagtccactacacagatgtcagcaacatgtctagactggccagacagagactgctgggaagaagctggtccgtccctgtgatcagacacctgttcgcccctctgaaggagtacttcgcctgcgtgagcagcggcaacagcaacgccaacagccggggccccagcttctctagcggcctggtgccactgtccctgagagggagccacatgggccccatggagatctacaaaaccgtgagcgcctggaagcggcagcctgtgcgcgtgctgagcctgtttcggaatatcgataaagtcctgaaaagcctgggattcctggagagcggctctggctccggcggtggcaccctgaagtacgtggaggatgtgacaaacgtggtcagacgggatgtggagaagtggggccccttcgatctggtgtacggcagcacccaacccctgggcagctcttgtgaccggtgccctggctggtacatgtttcagttccaccggatcctgcagtacgccctgccgagacaggagtcccagcggccattcttttggattttcatggacaacttgctgctgaccgaggatgaccaggaaactaccactcggttcctgcagaccgaagccgtgaccctgcaggacgtgagaggccgggactaccagaacgccatgcgggtgtggtccaacatccctggactgaaaagcaagcacgcacctctgacccctaaagaagaggagtacctgcaggcccaggtgcggagcagaagcaagctggacgcccctaaggtggatctgctggtgaagaattgcctcctgcccctgagagagtacttcaagtatttcagccagaatagtctgcccctgggaggcagcggcggcggcagcaaggcccccatcaccttcggcgacctggccatctacttcagccaggaggagtgggagtggctgagccccatccagaaggacctgtacgaggacgtgatgctggagaactacaggaacctggtgagcctgggcctgagcttcaggaggcccaacgtgatcaccctgctggagaagggcaaggccccctggatggtggagcccgccaggaggaggaggggccccgagctgaccgaggccagcggcggcccaagcagcggcgcccctcctcccagcggcggcaggcggcccaagcagcggcgcccctcctcccagcggcggcagcccagccggctccccaacctctaccgaggagggcacctctgagtccgccacccccgagagcggccctggcacctccaccgagcccagcgagggcagcgcacccggcagccctgccggcagccccacctccacagaggagggaaccagcaccgagcccagcgaaggcagcgccccaggcaccagcaccgagcctagtgagcaggagattaaacggatcaacaagatcagaagaagacttgtgaaagacagcaacaccaagaaggccggcaagacaggccccatgaaaaccctgctggttagagtgatgacacccgatctgagagagcggctggaaaacctgagaaagaagcctgaaaatatcccccagcccatcagcaatacatctagagccaacctgaataagctgctgaccgattacaccgaaatgaagaaggcgatcctgcatgtgtactgggaagagttccagaaggaccctgtgggcctgatgagccgggtggcccagcctgccagcaagaagatcgatcagaacaagctgaaacctgagatggacgagaagggcaacctgaccaccgccggctttgcctgctctcagtgtggccagcccctgttcgtgtacaagctggagcaggtgtctgagaagggcaaggcttacaccaactacttcggacggtgcaatgtggccgagcacgaaaagctgatcctgctggcccagctgaagcccgagaaggatagcgacgaagccgtgacatatagcctgggaaagtttgggcagagggccctggatttctacagcattcatgtgaccaaggagtccacccaccccgtgaagcccctggcccagatcgccggaaacagatacgcctccggacctgtgggaaaggccctgagcgacgcatgtatgggcacaatcgcctccttcctgtctaagtaccaggacatcatcatcgaacaccagaaggtggtgaagggcaaccagaagagactggagagcctgcgggagctggccggcaaggaaaacctggaataccctagcgtgaccctgccacctcagcctcacaccaaggagggcgttgatgcctacaacgaagtgatcgcccgggtgcgaatgtgggtgaacctgaacctgtggcagaagctgaagctaagcagagatgatgccaagcctctgctgagactgaagggattcccttcctttcctctggtcgagagacaggccaacgaagtggactggtgggacatggtgtgtaacgtgaagaagctgatcaacgagaaaaaggaggatggcaaggtgttttggcagaatctggctggctacaagagacaggaagccctgagaccatacctgagcagcgaggaagatcggaagaagggaaagaaattcgctcggtaccagctgggcgacctgctgctgcacctggaaaagaagcacggcgaggactggggaaaggtgtacgacgaggcctgggagcggattgacaagaaagtggaaggcctgagcaagcacatcaagctggaagaggaacggagaagcgaggacgcccagagcaaggccgccctgaccgactggctgcgggctaaggccagcttcgtgatcgagggcctgaaggaggccgacaaggacgagttctgcagatgcgagctgaagctgcagaagtggtacggggacctgcggggaaagcccttcgccatcgaagccgagaacagcatcctggacatcagcggcttcagcaagcagtacaactgtgccttcatctggcagaaggacggcgtgaagaagctgaacctgtacctgatcatcaactacttcaagggcggcaagctgcggttcaagaagatcaaacctgaagccttcgaagccaacagattctacaccgtgatcaacaaaaagagcggcgagatcgtgcccatggaggtgaacttcaacttcgacgaccccaacctgatcatcctgcctctggcctttggcaagagacagggcagagaattcatctggaacgacctgctgtccctggaaaccggcagcctgaagctggccaacggaagagtgatcgagaagacactgtacaacagaagaacccggcaggatgagcctgccctgttcgtggccctgaccttcgagcggcgggaggtcctggactcctccaatatcaaaccaatgaacctgatcggcgtggcaagaggcgaaaacatccccgccgtgatcgccctgaccgaccccgagggctgcccactgagccggtttaaggatagcctgggaaacccaacccacatcctgagaatcggcgagagctataaggagaagcagcggaccatccaggccaagaaggaggtggagcagcggagagccggcggctacagccggaagtacgccagcaaagccaagaatctggcagacgatatggtgagaaacaccgctagagatctgctgtactacgccgtgacccaggatgccatgctgatcttcgccaacctgagccggggcttcggccggcagggcaagcggaccttcatggccgagagacagtacacacggatggaggactggctgaccgccaagctggcctacgagggcctgagcaagacctacctgtccaagacactggcccagtacacctccaagacatgcagcaactgtgggtttaccatcaccagcgccgactacgacagggtgctggagaagctgaagaagacagcaacaggctggatgaccacaattaacggcaaggagctgaaggtggagggccagattacctactacaacagatacaagagacagaacgtagtcaaggacctgtccgtcgagctggatagactgagcgaagaatctgtgaacaacgacatctcctcctggacaaagggcagaagcggagaagctctgagcctcctgaagaaaagattctcccatagacccgtgcaggagaagttcgtgtgcctgaactgcggcttcgagacacacgcagccgagcaagccgccctgaacatcgccagatcctggctgttcctgcggagccaggagtacaagaaataccagacaaacaagacaaccggcaacaccgataagagagccttcgtcgagacctggcagtccttttaccggaagaagcttaaggaggtgtggaaacctgccgtgcggtctggcggatctggcggaggctccaccagccccaagaaaaagagaaaagtctaagctgccttctgcggggcttgccttctggccatgcccttcttctctcccttgcacctgtacctcttggtctttgaataaagcctgagtaggaaggctagcaaaaaaaaaaaaaaaaaaaaaaaaaaaaaaaaaaaaaaaaaaaaaaaaaaaaaaaaaaaaaaaaaaaaaaaaaaaaaaaagcccagccggctccccaacctctaccgaggagggcacctctgagtccgccacccccgagagcggccctggcacctccaccgagcccagcgagggcagcgcacccggcagccctgccggcagccccacctccacagaggagggaaccagcaccgagcccagcgaaggcagcgccccaggcaccagcaccgagcctagtgagcaggagattaaacggatcaacaagatcagaagaagacttgtgaaagacagcaacaccaagaaggccggcaagacaggccccatgaaaaccctgctggttagagtgatgacacccgatctgagagagcggctggaaaacctgagaaagaagcctgaaaatatcccccagcccatcagcaatacatctagagccaacctgaataagctgctgaccgattacaccgaaatgaagaaggcgatcctgcatgtgtactgggaagagttccagaaggaccctgtgggcctgatgagccgggtggcccagcctgccagcaagaagatcgatcagaacaagctgaaacctgagatggacgagaagggcaacctgaccaccgccggctttgcctgctctcagtgtggccagcccctgttcgtgtacaagctggagcaggtgtctgagaagggcaaggcttacaccaactacttcggacggtgcaatgtggccgagcacgaaaagctgatcctgctggcccagctgaagcccgagaaggatagcgacgaagccgtgacatatagcctgggaaagtttgggcagagggccctggatttctacagcattcatgtgaccaaggagtccacccaccccgtgaagcccctggcccagatcgccggaaacagatacgcctccggacctgtgggaaaggccctgagcgacgcatgtatgggcacaatcgcctccttcctgtctaagtaccaggacatcatcatcgaacaccagaaggtggtgaagggcaaccagaagagactggagagcctgcgggagctggccggcaaggaaaacctggaataccctagcgtgaccctgccacctcagcctcacaccaaggagggcgttgatgcctacaacgaagtgatcgcccgggtgcgaatgtgggtgaacctgaacctgtggcagaagctgaagctaagcagagatgatgccaagcctctgctgagactgaagggattcccttcctttcctctggtcgagagacaggccaacgaagtggactggtgggacatggtgtgtaacgtgaagaagctgatcaacgagaaaaaggaggatggcaaggtgttttggcagaatctggctggctacaagagacaggaagccctgagaccatacctgagcagcgaggaagatcggaagaagggaaagaaattcgctcggtaccagctgggcgacctgctgctgcacctggaaaagaagcacggcgaggactggggaaaggtgtacgacgaggcctgggagcggattgacaagaaagtggaaggcctgagcaagcacatcaagctggaagaggaacggagaagcgaggacgcccagagcaaggccgccctgaccgactggctgcgggctaaggccagcttcgtgatcgagggcctgaaggaggccgacaaggacgagttctgcagatgcgagctgaagctgcagaagtggtacggggacctgcggggaaagcccttcgccatcgaagccgagaacagcatcctggacatcagcggcttcagcaagcagtacaactgtgccttcatctggcagaaggacggcgtgaagaagctgaacctgtacctgatcatcaactacttcaagggcggcaagctgcggttcaagaagatcaaacctgaagccttcgaagccaacagattctacaccgtgatcaacaaaaagagcggcgagatcgtgcccatggaggtgaacttcaacttcgacgaccccaacctgatcatcctgcctctggcctttggcaagagacagggcagagaattcatctggaacgacctgctgtccctggaaaccggcagcctgaagctggccaacggaagagtgatcgagaagacactgtacaacagaagaacccggcaggatgagcctgccctgttcgtggccctgaccttcgagcggcgggaggtcctggactcctccaatatcaaaccaatgaacctgatcggcgtggcaagaggcgaaaacatccccgccgtgatcgccctgaccgaccccgagggctgcccactgagccggtttaaggatagcctgggaaacccaacccacatcctgagaatcggcgagagctataaggagaagcagcggaccatccaggccaagaaggaggtggagcagcggagagccggcggctacagccggaagtacgccagcaaagccaagaatctggcagacgatatggtgagaaacaccgctagagatctgctgtactacgccgtgacccaggatgccatgctgatcttcgccaacctgagccggggcttcggccggcagggcaagcggaccttcatggccgagagacagtacacacggatggaggactggctgaccgccaagctggcctacgagggcctgagcaagacctacctgtccaagacactggcccagtacacctccaagacatgcagcaactgtgggtttaccatcaccagcgccgactacgacagggtgctggagaagctgaagaagacagcaacaggctggatgaccacaattaacggcaaggagctgaaggtggagggccagattacctactacaacagatacaagagacagaacgtagtcaaggacctgtccgtcgagctggatagactgagcgaagaatctgtgaacaacgacatctcctcctggacaaagggcagaagcggagaagctctgagcctcctgaagaaaagattctcccatagacccgtgcaggagaagttcgtgtgcctgaactgcggcttcgagacacacgcagccgagcaagccgccctgaacatcgccagatcctggctgttcctgcggagccaggagtacaagaaataccagacaaacaagacaaccggcaacaccgataagagagccttcgtcgagacctggcagtccttttaccggaagaagcttaaggaggtgtggaaacctgccgtgcggtctggcggatctggcggaggctccaccagccccaagaaaaagagaaaagtctaagctgccttctgcggggcttgccttctggccatgcccttcttctctcccttgcacctgtacctcttggtctttgaataaagcctgagtaggaaggctagcaaaaaaaaaaaaaaaaaaaaaaaaaaaaaaaaaaaaaaaaaaaaaaaaaaaaaaaaaaaaaaaaaaaaaaaaaaaaaaaa

SEQ ID NO: 9158 - RNA, 8787 nt, synthetic construct
  source 1..8787: mol_type = other RNA
aggaaataagagagaaaagaagagtaagaagaaatataagagccaccatggcccctaagaagaagcgtaaagtgagccggatgaaccacgaccaggagttcgacccccctaaggtgtaccctcccgtccccgccgagaagagaaagcccatccgggtcctgagcctgttcgatggcatcgccaccggtctgctggtgctgaaggacctgggcatccaggtggataggtacattgcctccgaggtgtgcgaggactccatcaccgtgggaatggtgcgtcatcagggcaagatcatgtacgtgggcgacgtgcggagcgtgacacagaagcatatccaggagtggggccctttcgacctggtgatcggcggcagcccttgcaatgacctgagcatcgtgaacccagcccggaagggcctgtacgagggaaccggcagactgttcttcgagttttacagactgctgcacgacgcccggcctaaggaaggcgacgaccggcccttcttttggctgttcgagaatgtggtggccatgggagtcagcgacaagcgggatattagccggttcctggagagcaaccccgtgatgatcgatgccaaggaagtgagcgccgcccaccgggccagatacttctggggcaatctgcctggcatgaacagacccctggccagcaccgtgaacgacaagctggagctgcaggagtgcctggagcacggccggatcgccaagttcagcaaggtgagaaccatcaccacccgaagcaacagcatcaaacaaggcaaggaccagcactttcctgtgttcatgaacgagaaggaggacatcctgtggtgtaccgagatggagagagtgttcgggttcccagtccactacacagatgtcagcaacatgtctagactggccagacagagactgctgggaagaagctggtccgtccctgtgatcagacacctgttcgcccctctgaaggagtacttcgcctgcgtgagcagcggcaacagcaacgccaacagccggggccccagcttctctagcggcctggtgccactgtccctgagagggagccacatgggccccatggagatctacaaaaccgtgagcgcctggaagcggcagcctgtgcgcgtgctgagcctgtttcggaatatcgataaagtcctgaaaagcctgggattcctggagagcggctctggctccggcggtggcaccctgaagtacgtggaggatgtgacaaacgtggtcagacgggatgtggagaagtggggccccttcgatctggtgtacggcagcacccaacccctgggcagctcttgtgaccggtgccctggctggtacatgtttcagttccaccggatcctgcagtacgccctgccgagacaggagtcccagcggccattcttttggattttcatggacaacttgctgctgaccgaggatgaccaggaaactaccactcggttcctgcagaccgaagccgtgaccctgcaggacgtgagaggccgggactaccagaacgccatgcgggtgtggtccaacatccctggactgaaaagcaagcacgcacctctgacccctaaagaagaggagtacctgcaggcccaggtgcggagcagaagcaagctggacgcccctaaggtggatctgctggtgaagaattgcctcctgcccctgagagagtacttcaagtatttcagccagaatagtctgcccctgggaggcagcggcggcggcaggcccggcgccgtgagcttcgccgacgtggccgtgtacttcagccccgaggagtggggctgcctgaggcccgcccagagggccctgtacaggaacgtgatgagggagacctacggccacctgggcgccctgggcttcgccggccccaagcccgccctgatcagctggctggagaggaagaaggaggtgtggagccccgaggccgaggaccccgaggccggcgccaggcaccccggcagcggcggcggcccaagcagcggcgcccctcctcccagcggcggcaggcggcccaagcagcggcgcccctcctcccagcggcggcagcccagccggctccccaacctctaccgaggagggcacctctgagtccgccacccccgagagcggccctggcacctccaccgagcccagcgagggcagcgcacccggcagccctgccggcagccccacctccacagaggagggaaccagcaccgagcccagcgaaggcagcgccccaggcaccagcaccgagcctagtgagcaggagattaaacggatcaacaagatcagaagaagacttgtgaaagacagcaacaccaagaaggccggcaagacaggccccatgaaaaccctgctggttagagtgatgacacccgatctgagagagcggctggaaaacctgagaaagaagcctgaaaatatcccccagcccatcagcaatacatctagagccaacctgaataagctgctgaccgattacaccgaaatgaagaaggcgatcctgcatgtgtactgggaagagttccagaaggaccctgtgggcctgatgagccgggtggcccagcctgccagcaagaagatcgatcagaacaagctgaaacctgagatggacgagaagggcaacctgaccaccgccggctttgcctgctctcagtgtggccagcccctgttcgtgtacaagctggagcaggtgtctgagaagggcaaggcttacaccaactacttcggacggtgcaatgtggccgagcacgaaaagctgatcctgctggcccagctgaagcccgagaaggatagcgacgaagccgtgacatatagcctgggaaagtttgggcagagggccctggatttctacagcattcatgtgaccaaggagtccacccaccccgtgaagcccctggcccagatcgccggaaacagatacgcctccggacctgtgggaaaggccctgagcgacgcatgtatgggcacaatcgcctccttcctgtctaagtaccaggacatcatcatcgaacaccagaaggtggtgaagggcaaccagaagagactggagagcctgcgggagctggccggcaaggaaaacctggaataccctagcgtgaccctgccacctcagcctcacaccaaggagggcgttgatgcctacaacgaagtgatcgcccgggtgcgaatgtgggtgaacctgaacctgtggcagaagctgaagctaagcagagatgatgccaagcctctgctgagactgaagggattcccttcctttcctctggtcgagagacaggccaacgaagtggactggtgggacatggtgtgtaacgtgaagaagctgatcaacgagaaaaaggaggatggcaaggtgttttggcagaatctggctggctacaagagacaggaagccctgagaccatacctgagcagcgaggaagatcggaagaagggaaagaaattcgctcggtaccagctgggcgacctgctgctgcacctggaaaagaagcacggcgaggactggggaaaggtgtacgacgaggcctgggagcggattgacaagaaagtggaaggcctgagcaagcacatcaagctggaagaggaacggagaagcgaggacgcccagagcaaggccgccctgaccgactggctgcgggctaaggccagcttcgtgatcgagggcctgaaggaggccgacaaggacgagttctgcagatgcgagctgaagctgcagaagtggtacggggacctgcggggaaagcccttcgccatcgaagccgagaacagcatcctggacatcagcggcttcagcaagcagtacaactgtgccttcatctggcagaaggacggcgtgaagaagctgaacctgtacctgatcatcaactacttcaagggcggcaagctgcggttcaagaagatcaaacctgaagccttcgaagccaacagattctacaccgtgatcaacaaaaagagcggcgagatcgtgcccatggaggtgaacttcaacttcgacgaccccaacctgatcatcctgcctctggcctttggcaagagacagggcagagaattcatctggaacgacctgctgtccctggaaaccggcagcctgaagctggccaacggaagagtgatcgagaagacactgtacaacagaagaacccggcaggatgagcctgccctgttcgtggccctgaccttcgagcggcgggaggtcctggactcctccaatatcaaaccaatgaacctgatcggcgtggcaagaggcgaaaacatccccgccgtgatcgccctgaccgaccccgagggctgcccactgagccggtttaaggatagcctgggaaacccaacccacatcctgagaatcggcgagagctataaggagaagcagcggaccatccaggccaagaaggaggtggagcagcggagagccggcggctacagccggaagtacgccagcaaagccaagaatctggcagacgatatggtgagaaacaccgctagagatctgctgtactacgccgtgacccaggatgccatgctgatcttcgccaacctgagccggggcttcggccggcagggcaagcggaccttcatggccgagagacagtacacacggatggaggactggctgaccgccaagctggcctacgagggcctgagcaagacctacctgtccaagacactggcccagtacacctccaagacatgcagcaactgtgggtttaccatcaccagcgccgactacgacagggtgctggagaagctgaagaagacagcaacaggctggatgaccacaattaacggcaaggagctgaaggtggagggccagattacctactacaacagatacaagagacagaacgtagtcaaggacctgtccgtcgagctggatagactgagcgaagaatctgtgaacaacgacatctcctcctggacaaagggcagaagcggagaagctctgagcctcctgaagaaaagattctcccatagacccgtgcaggagaagttcgtgtgcctgaactgcggcttcgagacacacgcagccgagcaagccgccctgaacatcgccagatcctggctgttcctgcggagccaggagtacaagaaataccagacaaacaagacaaccggcaacaccgataagagagccttcgtcgagacctggcagtccttttaccggaagaagcttaaggaggtgtggaaacctgccgtgcggtctggcggatctggcggaggctccaccagccccaagaaaaagagaaaagtctaagctgccttctgcggggcttgccttctggccatgcccttcttctctcccttgcacctgtacctcttggtctttgaataaagcctgagtaggaaggctagcaaaaaaaaaaaaaaaaaaaaaaaaaaaaaaaaaaaaaaaaaaaaaaaaaaaaaaaaaaaaaaaaaaaaaaaaaaaaaaaagcccagccggctccccaacctctaccgaggagggcacctctgagtccgccacccccgagagcggccctggcacctccaccgagcccagcgagggcagcgcacccggcagccctgccggcagccccacctccacagaggagggaaccagcaccgagcccagcgaaggcagcgccccaggcaccagcaccgagcctagtgagcaggagattaaacggatcaacaagatcagaagaagacttgtgaaagacagcaacaccaagaaggccggcaagacaggccccatgaaaaccctgctggttagagtgatgacacccgatctgagagagcggctggaaaacctgagaaagaagcctgaaaatatcccccagcccatcagcaatacatctagagccaacctgaataagctgctgaccgattacaccgaaatgaagaaggcgatcctgcatgtgtactgggaagagttccagaaggaccctgtgggcctgatgagccgggtggcccagcctgccagcaagaagatcgatcagaacaagctgaaacctgagatggacgagaagggcaacctgaccaccgccggctttgcctgctctcagtgtggccagcccctgttcgtgtacaagctggagcaggtgtctgagaagggcaaggcttacaccaactacttcggacggtgcaatgtggccgagcacgaaaagctgatcctgctggcccagctgaagcccgagaaggatagcgacgaagccgtgacatatagcctgggaaagtttgggcagagggccctggatttctacagcattcatgtgaccaaggagtccacccaccccgtgaagcccctggcccagatcgccggaaacagatacgcctccggacctgtgggaaaggccctgagcgacgcatgtatgggcacaatcgcctccttcctgtctaagtaccaggacatcatcatcgaacaccagaaggtggtgaagggcaaccagaagagactggagagcctgcgggagctggccggcaaggaaaacctggaataccctagcgtgaccctgccacctcagcctcacaccaaggagggcgttgatgcctacaacgaagtgatcgcccgggtgcgaatgtgggtgaacctgaacctgtggcagaagctgaagctaagcagagatgatgccaagcctctgctgagactgaagggattcccttcctttcctctggtcgagagacaggccaacgaagtggactggtgggacatggtgtgtaacgtgaagaagctgatcaacgagaaaaaggaggatggcaaggtgttttggcagaatctggctggctacaagagacaggaagccctgagaccatacctgagcagcgaggaagatcggaagaagggaaagaaattcgctcggtaccagctgggcgacctgctgctgcacctggaaaagaagcacggcgaggactggggaaaggtgtacgacgaggcctgggagcggattgacaagaaagtggaaggcctgagcaagcacatcaagctggaagaggaacggagaagcgaggacgcccagagcaaggccgccctgaccgactggctgcgggctaaggccagcttcgtgatcgagggcctgaaggaggccgacaaggacgagttctgcagatgcgagctgaagctgcagaagtggtacggggacctgcggggaaagcccttcgccatcgaagccgagaacagcatcctggacatcagcggcttcagcaagcagtacaactgtgccttcatctggcagaaggacggcgtgaagaagctgaacctgtacctgatcatcaactacttcaagggcggcaagctgcggttcaagaagatcaaacctgaagccttcgaagccaacagattctacaccgtgatcaacaaaaagagcggcgagatcgtgcccatggaggtgaacttcaacttcgacgaccccaacctgatcatcctgcctctggcctttggcaagagacagggcagagaattcatctggaacgacctgctgtccctggaaaccggcagcctgaagctggccaacggaagagtgatcgagaagacactgtacaacagaagaacccggcaggatgagcctgccctgttcgtggccctgaccttcgagcggcgggaggtcctggactcctccaatatcaaaccaatgaacctgatcggcgtggcaagaggcgaaaacatccccgccgtgatcgccctgaccgaccccgagggctgcccactgagccggtttaaggatagcctgggaaacccaacccacatcctgagaatcggcgagagctataaggagaagcagcggaccatccaggccaagaaggaggtggagcagcggagagccggcggctacagccggaagtacgccagcaaagccaagaatctggcagacgatatggtgagaaacaccgctagagatctgctgtactacgccgtgacccaggatgccatgctgatcttcgccaacctgagccggggcttcggccggcagggcaagcggaccttcatggccgagagacagtacacacggatggaggactggctgaccgccaagctggcctacgagggcctgagcaagacctacctgtccaagacactggcccagtacacctccaagacatgcagcaactgtgggtttaccatcaccagcgccgactacgacagggtgctggagaagctgaagaagacagcaacaggctggatgaccacaattaacggcaaggagctgaaggtggagggccagattacctactacaacagatacaagagacagaacgtagtcaaggacctgtccgtcgagctggatagactgagcgaagaatctgtgaacaacgacatctcctcctggacaaagggcagaagcggagaagctctgagcctcctgaagaaaagattctcccatagacccgtgcaggagaagttcgtgtgcctgaactgcggcttcgagacacacgcagccgagcaagccgccctgaacatcgccagatcctggctgttcctgcggagccaggagtacaagaaataccagacaaacaagacaaccggcaacaccgataagagagccttcgtcgagacctggcagtccttttaccggaagaagcttaaggaggtgtggaaacctgccgtgcggtctggcggatctggcggaggctccaccagccccaagaaaaagagaaaagtctaagctgccttctgcggggcttgccttctggccatgcccttcttctctcccttgcacctgtacctcttggtctttgaataaagcctgagtaggaaggctagcaaaaaaaaaaaaaaaaaaaaaaaaaaaaaaaaaaaaaaaaaaaaaaaaaaaaaaaaaaaaaaaaaaaaaaaaaaaaaaaa

SEQ ID NO: 9159 - RNA, 8787 nt, synthetic construct
  source 1..8787: mol_type = other RNA
aggaaataagagagaaaagaagagtaagaagaaatataagagccaccatggcccctaagaagaagcgtaaagtgagccggatgaaccacgaccaggagttcgacccccctaaggtgtaccctcccgtccccgccgagaagagaaagcccatccgggtcctgagcctgttcgatggcatcgccaccggtctgctggtgctgaaggacctgggcatccaggtggataggtacattgcctccgaggtgtgcgaggactccatcaccgtgggaatggtgcgtcatcagggcaagatcatgtacgtgggcgacgtgcggagcgtgacacagaagcatatccaggagtggggccctttcgacctggtgatcggcggcagcccttgcaatgacctgagcatcgtgaacccagcccggaagggcctgtacgagggaaccggcagactgttcttcgagttttacagactgctgcacgacgcccggcctaaggaaggcgacgaccggcccttcttttggctgttcgagaatgtggtggccatgggagtcagcgacaagcgggatattagccggttcctggagagcaaccccgtgatgatcgatgccaaggaagtgagcgccgcccaccgggccagatacttctggggcaatctgcctggcatgaacagacccctggccagcaccgtgaacgacaagctggagctgcaggagtgcctggagcacggccggatcgccaagttcagcaaggtgagaaccatcaccacccgaagcaacagcatcaaacaaggcaaggaccagcactttcctgtgttcatgaacgagaaggaggacatcctgtggtgtaccgagatggagagagtgttcgggttcccagtccactacacagatgtcagcaacatgtctagactggccagacagagactgctgggaagaagctggtccgtccctgtgatcagacacctgttcgcccctctgaaggagtacttcgcctgcgtgagcagcggcaacagcaacgccaacagccggggccccagcttctctagcggcctggtgccactgtccctgagagggagccacatgggccccatggagatctacaaaaccgtgagcgcctggaagcggcagcctgtgcgcgtgctgagcctgtttcggaatatcgataaagtcctgaaaagcctgggattcctggagagcggctctggctccggcggtggcaccctgaagtacgtggaggatgtgacaaacgtggtcagacgggatgtggagaagtggggccccttcgatctggtgtacggcagcacccaacccctgggcagctcttgtgaccggtgccctggctggtacatgtttcagttccaccggatcctgcagtacgccctgccgagacaggagtcccagcggccattcttttggattttcatggacaacttgctgctgaccgaggatgaccaggaaactaccactcggttcctgcagaccgaagccgtgaccctgcaggacgtgagaggccgggactaccagaacgccatgcgggtgtggtccaacatccctggactgaaaagcaagcacgcacctctgacccctaaagaagaggagtacctgcaggcccaggtgcggagcagaagcaagctggacgcccctaaggtggatctgctggtgaagaattgcctcctgcccctgagagagtacttcaagtatttcagccagaatagtctgcccctgggaggcagcggcggcggcagcaaggcccccatcaccttcggcgacctggccatctacttcagccaggaggagtgggagtggctgagccccatccagaaggacctgtacgaggacgtgatgctggagaactacaggaacctggtgagcctgggcctgagcttcaggaggcccaacgtgatcaccctgctggagaagggcaaggccccctggatggtggagcccgtgaggaggaggcaggcccccgacagcggcagcaagtgcggcggcccaagcagcggcgcccctcctcccagcggcggcaggcggcccaagcagcggcgcccctcctcccagcggcggcagcccagccggctccccaacctctaccgaggagggcacctctgagtccgccacccccgagagcggccctggcacctccaccgagcccagcgagggcagcgcacccggcagccctgccggcagccccacctccacagaggagggaaccagcaccgagcccagcgaaggcagcgccccaggcaccagcaccgagcctagtgagcaggagattaaacggatcaacaagatcagaagaagacttgtgaaagacagcaacaccaagaaggccggcaagacaggccccatgaaaaccctgctggttagagtgatgacacccgatctgagagagcggctggaaaacctgagaaagaagcctgaaaatatcccccagcccatcagcaatacatctagagccaacctgaataagctgctgaccgattacaccgaaatgaagaaggcgatcctgcatgtgtactgggaagagttccagaaggaccctgtgggcctgatgagccgggtggcccagcctgccagcaagaagatcgatcagaacaagctgaaacctgagatggacgagaagggcaacctgaccaccgccggctttgcctgctctcagtgtggccagcccctgttcgtgtacaagctggagcaggtgtctgagaagggcaaggcttacaccaactacttcggacggtgcaatgtggccgagcacgaaaagctgatcctgctggcccagctgaagcccgagaaggatagcgacgaagccgtgacatatagcctgggaaagtttgggcagagggccctggatttctacagcattcatgtgaccaaggagtccacccaccccgtgaagcccctggcccagatcgccggaaacagatacgcctccggacctgtgggaaaggccctgagcgacgcatgtatgggcacaatcgcctccttcctgtctaagtaccaggacatcatcatcgaacaccagaaggtggtgaagggcaaccagaagagactggagagcctgcgggagctggccggcaaggaaaacctggaataccctagcgtgaccctgccacctcagcctcacaccaaggagggcgttgatgcctacaacgaagtgatcgcccgggtgcgaatgtgggtgaacctgaacctgtggcagaagctgaagctaagcagagatgatgccaagcctctgctgagactgaagggattcccttcctttcctctggtcgagagacaggccaacgaagtggactggtgggacatggtgtgtaacgtgaagaagctgatcaacgagaaaaaggaggatggcaaggtgttttggcagaatctggctggctacaagagacaggaagccctgagaccatacctgagcagcgaggaagatcggaagaagggaaagaaattcgctcggtaccagctgggcgacctgctgctgcacctggaaaagaagcacggcgaggactggggaaaggtgtacgacgaggcctgggagcggattgacaagaaagtggaaggcctgagcaagcacatcaagctggaagaggaacggagaagcgaggacgcccagagcaaggccgccctgaccgactggctgcgggctaaggccagcttcgtgatcgagggcctgaaggaggccgacaaggacgagttctgcagatgcgagctgaagctgcagaagtggtacggggacctgcggggaaagcccttcgccatcgaagccgagaacagcatcctggacatcagcggcttcagcaagcagtacaactgtgccttcatctggcagaaggacggcgtgaagaagctgaacctgtacctgatcatcaactacttcaagggcggcaagctgcggttcaagaagatcaaacctgaagccttcgaagccaacagattctacaccgtgatcaacaaaaagagcggcgagatcgtgcccatggaggtgaacttcaacttcgacgaccccaacctgatcatcctgcctctggcctttggcaagagacagggcagagaattcatctggaacgacctgctgtccctggaaaccggcagcctgaagctggccaacggaagagtgatcgagaagacactgtacaacagaagaacccggcaggatgagcctgccctgttcgtggccctgaccttcgagcggcgggaggtcctggactcctccaatatcaaaccaatgaacctgatcggcgtggcaagaggcgaaaacatccccgccgtgatcgccctgaccgaccccgagggctgcccactgagccggtttaaggatagcctgggaaacccaacccacatcctgagaatcggcgagagctataaggagaagcagcggaccatccaggccaagaaggaggtggagcagcggagagccggcggctacagccggaagtacgccagcaaagccaagaatctggcagacgatatggtgagaaacaccgctagagatctgctgtactacgccgtgacccaggatgccatgctgatcttcgccaacctgagccggggcttcggccggcagggcaagcggaccttcatggccgagagacagtacacacggatggaggactggctgaccgccaagctggcctacgagggcctgagcaagacctacctgtccaagacactggcccagtacacctccaagacatgcagcaactgtgggtttaccatcaccagcgccgactacgacagggtgctggagaagctgaagaagacagcaacaggctggatgaccacaattaacggcaaggagctgaaggtggagggccagattacctactacaacagatacaagagacagaacgtagtcaaggacctgtccgtcgagctggatagactgagcgaagaatctgtgaacaacgacatctcctcctggacaaagggcagaagcggagaagctctgagcctcctgaagaaaagattctcccatagacccgtgcaggagaagttcgtgtgcctgaactgcggcttcgagacacacgcagccgagcaagccgccctgaacatcgccagatcctggctgttcctgcggagccaggagtacaagaaataccagacaaacaagacaaccggcaacaccgataagagagccttcgtcgagacctggcagtccttttaccggaagaagcttaaggaggtgtggaaacctgccgtgcggtctggcggatctggcggaggctccaccagccccaagaaaaagagaaaagtctaagctgccttctgcggggcttgccttctggccatgcccttcttctctcccttgcacctgtacctcttggtctttgaataaagcctgagtaggaaggctagcaaaaaaaaaaaaaaaaaaaaaaaaaaaaaaaaaaaaaaaaaaaaaaaaaaaaaaaaaaaaaaaaaaaaaaaaaaaaaaaagcccagccggctccccaacctctaccgaggagggcacctctgagtccgccacccccgagagcggccctggcacctccaccgagcccagcgagggcagcgcacccggcagccctgccggcagccccacctccacagaggagggaaccagcaccgagcccagcgaaggcagcgccccaggcaccagcaccgagcctagtgagcaggagattaaacggatcaacaagatcagaagaagacttgtgaaagacagcaacaccaagaaggccggcaagacaggccccatgaaaaccctgctggttagagtgatgacacccgatctgagagagcggctggaaaacctgagaaagaagcctgaaaatatcccccagcccatcagcaatacatctagagccaacctgaataagctgctgaccgattacaccgaaatgaagaaggcgatcctgcatgtgtactgggaagagttccagaaggaccctgtgggcctgatgagccgggtggcccagcctgccagcaagaagatcgatcagaacaagctgaaacctgagatggacgagaagggcaacctgaccaccgccggctttgcctgctctcagtgtggccagcccctgttcgtgtacaagctggagcaggtgtctgagaagggcaaggcttacaccaactacttcggacggtgcaatgtggccgagcacgaaaagctgatcctgctggcccagctgaagcccgagaaggatagcgacgaagccgtgacatatagcctgggaaagtttgggcagagggccctggatttctacagcattcatgtgaccaaggagtccacccaccccgtgaagcccctggcccagatcgccggaaacagatacgcctccggacctgtgggaaaggccctgagcgacgcatgtatgggcacaatcgcctccttcctgtctaagtaccaggacatcatcatcgaacaccagaaggtggtgaagggcaaccagaagagactggagagcctgcgggagctggccggcaaggaaaacctggaataccctagcgtgaccctgccacctcagcctcacaccaaggagggcgttgatgcctacaacgaagtgatcgcccgggtgcgaatgtgggtgaacctgaacctgtggcagaagctgaagctaagcagagatgatgccaagcctctgctgagactgaagggattcccttcctttcctctggtcgagagacaggccaacgaagtggactggtgggacatggtgtgtaacgtgaagaagctgatcaacgagaaaaaggaggatggcaaggtgttttggcagaatctggctggctacaagagacaggaagccctgagaccatacctgagcagcgaggaagatcggaagaagggaaagaaattcgctcggtaccagctgggcgacctgctgctgcacctggaaaagaagcacggcgaggactggggaaaggtgtacgacgaggcctgggagcggattgacaagaaagtggaaggcctgagcaagcacatcaagctggaagaggaacggagaagcgaggacgcccagagcaaggccgccctgaccgactggctgcgggctaaggccagcttcgtgatcgagggcctgaaggaggccgacaaggacgagttctgcagatgcgagctgaagctgcagaagtggtacggggacctgcggggaaagcccttcgccatcgaagccgagaacagcatcctggacatcagcggcttcagcaagcagtacaactgtgccttcatctggcagaaggacggcgtgaagaagctgaacctgtacctgatcatcaactacttcaagggcggcaagctgcggttcaagaagatcaaacctgaagccttcgaagccaacagattctacaccgtgatcaacaaaaagagcggcgagatcgtgcccatggaggtgaacttcaacttcgacgaccccaacctgatcatcctgcctctggcctttggcaagagacagggcagagaattcatctggaacgacctgctgtccctggaaaccggcagcctgaagctggccaacggaagagtgatcgagaagacactgtacaacagaagaacccggcaggatgagcctgccctgttcgtggccctgaccttcgagcggcgggaggtcctggactcctccaatatcaaaccaatgaacctgatcggcgtggcaagaggcgaaaacatccccgccgtgatcgccctgaccgaccccgagggctgcccactgagccggtttaaggatagcctgggaaacccaacccacatcctgagaatcggcgagagctataaggagaagcagcggaccatccaggccaagaaggaggtggagcagcggagagccggcggctacagccggaagtacgccagcaaagccaagaatctggcagacgatatggtgagaaacaccgctagagatctgctgtactacgccgtgacccaggatgccatgctgatcttcgccaacctgagccggggcttcggccggcagggcaagcggaccttcatggccgagagacagtacacacggatggaggactggctgaccgccaagctggcctacgagggcctgagcaagacctacctgtccaagacactggcccagtacacctccaagacatgcagcaactgtgggtttaccatcaccagcgccgactacgacagggtgctggagaagctgaagaagacagcaacaggctggatgaccacaattaacggcaaggagctgaaggtggagggccagattacctactacaacagatacaagagacagaacgtagtcaaggacctgtccgtcgagctggatagactgagcgaagaatctgtgaacaacgacatctcctcctggacaaagggcagaagcggagaagctctgagcctcctgaagaaaagattctcccatagacccgtgcaggagaagttcgtgtgcctgaactgcggcttcgagacacacgcagccgagcaagccgccctgaacatcgccagatcctggctgttcctgcggagccaggagtacaagaaataccagacaaacaagacaaccggcaacaccgataagagagccttcgtcgagacctggcagtccttttaccggaagaagcttaaggaggtgtggaaacctgccgtgcggtctggcggatctggcggaggctccaccagccccaagaaaaagagaaaagtctaagctgccttctgcggggcttgccttctggccatgcccttcttctctcccttgcacctgtacctcttggtctttgaataaagcctgagtaggaaggctagcaaaaaaaaaaaaaaaaaaaaaaaaaaaaaaaaaaaaaaaaaaaaaaaaaaaaaaaaaaaaaaaaaaaaaaaaaaaaaaaa

SEQ ID NO: 9160 - RNA, 8787 nt, synthetic construct
  source 1..8787: mol_type = other RNA
aggaaataagagagaaaagaagagtaagaagaaatataagagccaccatggcccctaagaagaagcgtaaagtgagccggatgaaccacgaccaggagttcgacccccctaaggtgtaccctcccgtccccgccgagaagagaaagcccatccgggtcctgagcctgttcgatggcatcgccaccggtctgctggtgctgaaggacctgggcatccaggtggataggtacattgcctccgaggtgtgcgaggactccatcaccgtgggaatggtgcgtcatcagggcaagatcatgtacgtgggcgacgtgcggagcgtgacacagaagcatatccaggagtggggccctttcgacctggtgatcggcggcagcccttgcaatgacctgagcatcgtgaacccagcccggaagggcctgtacgagggaaccggcagactgttcttcgagttttacagactgctgcacgacgcccggcctaaggaaggcgacgaccggcccttcttttggctgttcgagaatgtggtggccatgggagtcagcgacaagcgggatattagccggttcctggagagcaaccccgtgatgatcgatgccaaggaagtgagcgccgcccaccgggccagatacttctggggcaatctgcctggcatgaacagacccctggccagcaccgtgaacgacaagctggagctgcaggagtgcctggagcacggccggatcgccaagttcagcaaggtgagaaccatcaccacccgaagcaacagcatcaaacaaggcaaggaccagcactttcctgtgttcatgaacgagaaggaggacatcctgtggtgtaccgagatggagagagtgttcgggttcccagtccactacacagatgtcagcaacatgtctagactggccagacagagactgctgggaagaagctggtccgtccctgtgatcagacacctgttcgcccctctgaaggagtacttcgcctgcgtgagcagcggcaacagcaacgccaacagccggggccccagcttctctagcggcctggtgccactgtccctgagagggagccacatgggccccatggagatctacaaaaccgtgagcgcctggaagcggcagcctgtgcgcgtgctgagcctgtttcggaatatcgataaagtcctgaaaagcctgggattcctggagagcggctctggctccggcggtggcaccctgaagtacgtggaggatgtgacaaacgtggtcagacgggatgtggagaagtggggccccttcgatctggtgtacggcagcacccaacccctgggcagctcttgtgaccggtgccctggctggtacatgtttcagttccaccggatcctgcagtacgccctgccgagacaggagtcccagcggccattcttttggattttcatggacaacttgctgctgaccgaggatgaccaggaaactaccactcggttcctgcagaccgaagccgtgaccctgcaggacgtgagaggccgggactaccagaacgccatgcgggtgtggtccaacatccctggactgaaaagcaagcacgcacctctgacccctaaagaagaggagtacctgcaggcccaggtgcggagcagaagcaagctggacgcccctaaggtggatctgctggtgaagaattgcctcctgcccctgagagagtacttcaagtatttcagccagaatagtctgcccctgggaggcagcggcggcggcatggtgaccttcgaggacgtggccgtgcacttcaccaagaccgagtggaccggcctgagccccgcccagagggccctgtacaggagcgtgatgctggagaacttcggcaacctgaccgccctgggctaccccgtgcccaagcccgccctgatcagcctgctggagggcggcgacatggcctggggcctggaggcccaggacgacccccccgccgagaggaccaagaacgtgtgcaaggtgatcggcggcccaagcagcggcgcccctcctcccagcggcggcaggcggcccaagcagcggcgcccctcctcccagcggcggcagcccagccggctccccaacctctaccgaggagggcacctctgagtccgccacccccgagagcggccctggcacctccaccgagcccagcgagggcagcgcacccggcagccctgccggcagccccacctccacagaggagggaaccagcaccgagcccagcgaaggcagcgccccaggcaccagcaccgagcctagtgagcaggagattaaacggatcaacaagatcagaagaagacttgtgaaagacagcaacaccaagaaggccggcaagacaggccccatgaaaaccctgctggttagagtgatgacacccgatctgagagagcggctggaaaacctgagaaagaagcctgaaaatatcccccagcccatcagcaatacatctagagccaacctgaataagctgctgaccgattacaccgaaatgaagaaggcgatcctgcatgtgtactgggaagagttccagaaggaccctgtgggcctgatgagccgggtggcccagcctgccagcaagaagatcgatcagaacaagctgaaacctgagatggacgagaagggcaacctgaccaccgccggctttgcctgctctcagtgtggccagcccctgttcgtgtacaagctggagcaggtgtctgagaagggcaaggcttacaccaactacttcggacggtgcaatgtggccgagcacgaaaagctgatcctgctggcccagctgaagcccgagaaggatagcgacgaagccgtgacatatagcctgggaaagtttgggcagagggccctggatttctacagcattcatgtgaccaaggagtccacccaccccgtgaagcccctggcccagatcgccggaaacagatacgcctccggacctgtgggaaaggccctgagcgacgcatgtatgggcacaatcgcctccttcctgtctaagtaccaggacatcatcatcgaacaccagaaggtggtgaagggcaaccagaagagactggagagcctgcgggagctggccggcaaggaaaacctggaataccctagcgtgaccctgccacctcagcctcacaccaaggagggcgttgatgcctacaacgaagtgatcgcccgggtgcgaatgtgggtgaacctgaacctgtggcagaagctgaagctaagcagagatgatgccaagcctctgctgagactgaagggattcccttcctttcctctggtcgagagacaggccaacgaagtggactggtgggacatggtgtgtaacgtgaagaagctgatcaacgagaaaaaggaggatggcaaggtgttttggcagaatctggctggctacaagagacaggaagccctgagaccatacctgagcagcgaggaagatcggaagaagggaaagaaattcgctcggtaccagctgggcgacctgctgctgcacctggaaaagaagcacggcgaggactggggaaaggtgtacgacgaggcctgggagcggattgacaagaaagtggaaggcctgagcaagcacatcaagctggaagaggaacggagaagcgaggacgcccagagcaaggccgccctgaccgactggctgcgggctaaggccagcttcgtgatcgagggcctgaaggaggccgacaaggacgagttctgcagatgcgagctgaagctgcagaagtggtacggggacctgcggggaaagcccttcgccatcgaagccgagaacagcatcctggacatcagcggcttcagcaagcagtacaactgtgccttcatctggcagaaggacggcgtgaagaagctgaacctgtacctgatcatcaactacttcaagggcggcaagctgcggttcaagaagatcaaacctgaagccttcgaagccaacagattctacaccgtgatcaacaaaaagagcggcgagatcgtgcccatggaggtgaacttcaacttcgacgaccccaacctgatcatcctgcctctggcctttggcaagagacagggcagagaattcatctggaacgacctgctgtccctggaaaccggcagcctgaagctggccaacggaagagtgatcgagaagacactgtacaacagaagaacccggcaggatgagcctgccctgttcgtggccctgaccttcgagcggcgggaggtcctggactcctccaatatcaaaccaatgaacctgatcggcgtggcaagaggcgaaaacatccccgccgtgatcgccctgaccgaccccgagggctgcccactgagccggtttaaggatagcctgggaaacccaacccacatcctgagaatcggcgagagctataaggagaagcagcggaccatccaggccaagaaggaggtggagcagcggagagccggcggctacagccggaagtacgccagcaaagccaagaatctggcagacgatatggtgagaaacaccgctagagatctgctgtactacgccgtgacccaggatgccatgctgatcttcgccaacctgagccggggcttcggccggcagggcaagcggaccttcatggccgagagacagtacacacggatggaggactggctgaccgccaagctggcctacgagggcctgagcaagacctacctgtccaagacactggcccagtacacctccaagacatgcagcaactgtgggtttaccatcaccagcgccgactacgacagggtgctggagaagctgaagaagacagcaacaggctggatgaccacaattaacggcaaggagctgaaggtggagggccagattacctactacaacagatacaagagacagaacgtagtcaaggacctgtccgtcgagctggatagactgagcgaagaatctgtgaacaacgacatctcctcctggacaaagggcagaagcggagaagctctgagcctcctgaagaaaagattctcccatagacccgtgcaggagaagttcgtgtgcctgaactgcggcttcgagacacacgcagccgagcaagccgccctgaacatcgccagatcctggctgttcctgcggagccaggagtacaagaaataccagacaaacaagacaaccggcaacaccgataagagagccttcgtcgagacctggcagtccttttaccggaagaagcttaaggaggtgtggaaacctgccgtgcggtctggcggatctggcggaggctccaccagccccaagaaaaagagaaaagtctaagctgccttctgcggggcttgccttctggccatgcccttcttctctcccttgcacctgtacctcttggtctttgaataaagcctgagtaggaaggctagcaaaaaaaaaaaaaaaaaaaaaaaaaaaaaaaaaaaaaaaaaaaaaaaaaaaaaaaaaaaaaaaaaaaaaaaaaaaaaaaagcccagccggctccccaacctctaccgaggagggcacctctgagtccgccacccccgagagcggccctggcacctccaccgagcccagcgagggcagcgcacccggcagccctgccggcagccccacctccacagaggagggaaccagcaccgagcccagcgaaggcagcgccccaggcaccagcaccgagcctagtgagcaggagattaaacggatcaacaagatcagaagaagacttgtgaaagacagcaacaccaagaaggccggcaagacaggccccatgaaaaccctgctggttagagtgatgacacccgatctgagagagcggctggaaaacctgagaaagaagcctgaaaatatcccccagcccatcagcaatacatctagagccaacctgaataagctgctgaccgattacaccgaaatgaagaaggcgatcctgcatgtgtactgggaagagttccagaaggaccctgtgggcctgatgagccgggtggcccagcctgccagcaagaagatcgatcagaacaagctgaaacctgagatggacgagaagggcaacctgaccaccgccggctttgcctgctctcagtgtggccagcccctgttcgtgtacaagctggagcaggtgtctgagaagggcaaggcttacaccaactacttcggacggtgcaatgtggccgagcacgaaaagctgatcctgctggcccagctgaagcccgagaaggatagcgacgaagccgtgacatatagcctgggaaagtttgggcagagggccctggatttctacagcattcatgtgaccaaggagtccacccaccccgtgaagcccctggcccagatcgccggaaacagatacgcctccggacctgtgggaaaggccctgagcgacgcatgtatgggcacaatcgcctccttcctgtctaagtaccaggacatcatcatcgaacaccagaaggtggtgaagggcaaccagaagagactggagagcctgcgggagctggccggcaaggaaaacctggaataccctagcgtgaccctgccacctcagcctcacaccaaggagggcgttgatgcctacaacgaagtgatcgcccgggtgcgaatgtgggtgaacctgaacctgtggcagaagctgaagctaagcagagatgatgccaagcctctgctgagactgaagggattcccttcctttcctctggtcgagagacaggccaacgaagtggactggtgggacatggtgtgtaacgtgaagaagctgatcaacgagaaaaaggaggatggcaaggtgttttggcagaatctggctggctacaagagacaggaagccctgagaccatacctgagcagcgaggaagatcggaagaagggaaagaaattcgctcggtaccagctgggcgacctgctgctgcacctggaaaagaagcacggcgaggactggggaaaggtgtacgacgaggcctgggagcggattgacaagaaagtggaaggcctgagcaagcacatcaagctggaagaggaacggagaagcgaggacgcccagagcaaggccgccctgaccgactggctgcgggctaaggccagcttcgtgatcgagggcctgaaggaggccgacaaggacgagttctgcagatgcgagctgaagctgcagaagtggtacggggacctgcggggaaagcccttcgccatcgaagccgagaacagcatcctggacatcagcggcttcagcaagcagtacaactgtgccttcatctggcagaaggacggcgtgaagaagctgaacctgtacctgatcatcaactacttcaagggcggcaagctgcggttcaagaagatcaaacctgaagccttcgaagccaacagattctacaccgtgatcaacaaaaagagcggcgagatcgtgcccatggaggtgaacttcaacttcgacgaccccaacctgatcatcctgcctctggcctttggcaagagacagggcagagaattcatctggaacgacctgctgtccctggaaaccggcagcctgaagctggccaacggaagagtgatcgagaagacactgtacaacagaagaacccggcaggatgagcctgccctgttcgtggccctgaccttcgagcggcgggaggtcctggactcctccaatatcaaaccaatgaacctgatcggcgtggcaagaggcgaaaacatccccgccgtgatcgccctgaccgaccccgagggctgcccactgagccggtttaaggatagcctgggaaacccaacccacatcctgagaatcggcgagagctataaggagaagcagcggaccatccaggccaagaaggaggtggagcagcggagagccggcggctacagccggaagtacgccagcaaagccaagaatctggcagacgatatggtgagaaacaccgctagagatctgctgtactacgccgtgacccaggatgccatgctgatcttcgccaacctgagccggggcttcggccggcagggcaagcggaccttcatggccgagagacagtacacacggatggaggactggctgaccgccaagctggcctacgagggcctgagcaagacctacctgtccaagacactggcccagtacacctccaagacatgcagcaactgtgggtttaccatcaccagcgccgactacgacagggtgctggagaagctgaagaagacagcaacaggctggatgaccacaattaacggcaaggagctgaaggtggagggccagattacctactacaacagatacaagagacagaacgtagtcaaggacctgtccgtcgagctggatagactgagcgaagaatctgtgaacaacgacatctcctcctggacaaagggcagaagcggagaagctctgagcctcctgaagaaaagattctcccatagacccgtgcaggagaagttcgtgtgcctgaactgcggcttcgagacacacgcagccgagcaagccgccctgaacatcgccagatcctggctgttcctgcggagccaggagtacaagaaataccagacaaacaagacaaccggcaacaccgataagagagccttcgtcgagacctggcagtccttttaccggaagaagcttaaggaggtgtggaaacctgccgtgcggtctggcggatctggcggaggctccaccagccccaagaaaaagagaaaagtctaagctgccttctgcggggcttgccttctggccatgcccttcttctctcccttgcacctgtacctcttggtctttgaataaagcctgagtaggaaggctagcaaaaaaaaaaaaaaaaaaaaaaaaaaaaaaaaaaaaaaaaaaaaaaaaaaaaaaaaaaaaaaaaaaaaaaaaaaaaaaaa

SEQ ID NO: 9161 - RNA, 8787 nt, synthetic construct
  source 1..8787: mol_type = other RNA
aggaaataagagagaaaagaagagtaagaagaaatataagagccaccatggcccctaagaagaagcgtaaagtgagccggatgaaccacgaccaggagttcgacccccctaaggtgtaccctcccgtccccgccgagaagagaaagcccatccgggtcctgagcctgttcgatggcatcgccaccggtctgctggtgctgaaggacctgggcatccaggtggataggtacattgcctccgaggtgtgcgaggactccatcaccgtgggaatggtgcgtcatcagggcaagatcatgtacgtgggcgacgtgcggagcgtgacacagaagcatatccaggagtggggccctttcgacctggtgatcggcggcagcccttgcaatgacctgagcatcgtgaacccagcccggaagggcctgtacgagggaaccggcagactgttcttcgagttttacagactgctgcacgacgcccggcctaaggaaggcgacgaccggcccttcttttggctgttcgagaatgtggtggccatgggagtcagcgacaagcgggatattagccggttcctggagagcaaccccgtgatgatcgatgccaaggaagtgagcgccgcccaccgggccagatacttctggggcaatctgcctggcatgaacagacccctggccagcaccgtgaacgacaagctggagctgcaggagtgcctggagcacggccggatcgccaagttcagcaaggtgagaaccatcaccacccgaagcaacagcatcaaacaaggcaaggaccagcactttcctgtgttcatgaacgagaaggaggacatcctgtggtgtaccgagatggagagagtgttcgggttcccagtccactacacagatgtcagcaacatgtctagactggccagacagagactgctgggaagaagctggtccgtccctgtgatcagacacctgttcgcccctctgaaggagtacttcgcctgcgtgagcagcggcaacagcaacgccaacagccggggccccagcttctctagcggcctggtgccactgtccctgagagggagccacatgggccccatggagatctacaaaaccgtgagcgcctggaagcggcagcctgtgcgcgtgctgagcctgtttcggaatatcgataaagtcctgaaaagcctgggattcctggagagcggctctggctccggcggtggcaccctgaagtacgtggaggatgtgacaaacgtggtcagacgggatgtggagaagtggggccccttcgatctggtgtacggcagcacccaacccctgggcagctcttgtgaccggtgccctggctggtacatgtttcagttccaccggatcctgcagtacgccctgccgagacaggagtcccagcggccattcttttggattttcatggacaacttgctgctgaccgaggatgaccaggaaactaccactcggttcctgcagaccgaagccgtgaccctgcaggacgtgagaggccgggactaccagaacgccatgcgggtgtggtccaacatccctggactgaaaagcaagcacgcacctctgacccctaaagaagaggagtacctgcaggcccaggtgcggagcagaagcaagctggacgcccctaaggtggatctgctggtgaagaattgcctcctgcccctgagagagtacttcaagtatttcagccagaatagtctgcccctgggaggcagcggcggcggcagcaaggcccccgtgaccttcggcgacctggccatctacttcagccaggaggagtgggagtggctgagccccatccagaaggacctgtacgaggacgtgatgctggagaactaccagaacctggtgagcctgggcctgagcttcaggaggcccaacgtgatcaccctgctggagaagggcaaggccccctggatggtggagcccgtgaagaggaggaggggcctggacctgggcagcaagtgcggcggcccaagcagcggcgcccctcctcccagcggcggcaggcggcccaagcagcggcgcccctcctcccagcggcggcagcccagccggctccccaacctctaccgaggagggcacctctgagtccgccacccccgagagcggccctggcacctccaccgagcccagcgagggcagcgcacccggcagccctgccggcagccccacctccacagaggagggaaccagcaccgagcccagcgaaggcagcgccccaggcaccagcaccgagcctagtgagcaggagattaaacggatcaacaagatcagaagaagacttgtgaaagacagcaacaccaagaaggccggcaagacaggccccatgaaaaccctgctggttagagtgatgacacccgatctgagagagcggctggaaaacctgagaaagaagcctgaaaatatcccccagcccatcagcaatacatctagagccaacctgaataagctgctgaccgattacaccgaaatgaagaaggcgatcctgcatgtgtactgggaagagttccagaaggaccctgtgggcctgatgagccgggtggcccagcctgccagcaagaagatcgatcagaacaagctgaaacctgagatggacgagaagggcaacctgaccaccgccggctttgcctgctctcagtgtggccagcccctgttcgtgtacaagctggagcaggtgtctgagaagggcaaggcttacaccaactacttcggacggtgcaatgtggccgagcacgaaaagctgatcctgctggcccagctgaagcccgagaaggatagcgacgaagccgtgacatatagcctgggaaagtttgggcagagggccctggatttctacagcattcatgtgaccaaggagtccacccaccccgtgaagcccctggcccagatcgccggaaacagatacgcctccggacctgtgggaaaggccctgagcgacgcatgtatgggcacaatcgcctccttcctgtctaagtaccaggacatcatcatcgaacaccagaaggtggtgaagggcaaccagaagagactggagagcctgcgggagctggccggcaaggaaaacctggaataccctagcgtgaccctgccacctcagcctcacaccaaggagggcgttgatgcctacaacgaagtgatcgcccgggtgcgaatgtgggtgaacctgaacctgtggcagaagctgaagctaagcagagatgatgccaagcctctgctgagactgaagggattcccttcctttcctctggtcgagagacaggccaacgaagtggactggtgggacatggtgtgtaacgtgaagaagctgatcaacgagaaaaaggaggatggcaaggtgttttggcagaatctggctggctacaagagacaggaagccctgagaccatacctgagcagcgaggaagatcggaagaagggaaagaaattcgctcggtaccagctgggcgacctgctgctgcacctggaaaagaagcacggcgaggactggggaaaggtgtacgacgaggcctgggagcggattgacaagaaagtggaaggcctgagcaagcacatcaagctggaagaggaacggagaagcgaggacgcccagagcaaggccgccctgaccgactggctgcgggctaaggccagcttcgtgatcgagggcctgaaggaggccgacaaggacgagttctgcagatgcgagctgaagctgcagaagtggtacggggacctgcggggaaagcccttcgccatcgaagccgagaacagcatcctggacatcagcggcttcagcaagcagtacaactgtgccttcatctggcagaaggacggcgtgaagaagctgaacctgtacctgatcatcaactacttcaagggcggcaagctgcggttcaagaagatcaaacctgaagccttcgaagccaacagattctacaccgtgatcaacaaaaagagcggcgagatcgtgcccatggaggtgaacttcaacttcgacgaccccaacctgatcatcctgcctctggcctttggcaagagacagggcagagaattcatctggaacgacctgctgtccctggaaaccggcagcctgaagctggccaacggaagagtgatcgagaagacactgtacaacagaagaacccggcaggatgagcctgccctgttcgtggccctgaccttcgagcggcgggaggtcctggactcctccaatatcaaaccaatgaacctgatcggcgtggcaagaggcgaaaacatccccgccgtgatcgccctgaccgaccccgagggctgcccactgagccggtttaaggatagcctgggaaacccaacccacatcctgagaatcggcgagagctataaggagaagcagcggaccatccaggccaagaaggaggtggagcagcggagagccggcggctacagccggaagtacgccagcaaagccaagaatctggcagacgatatggtgagaaacaccgctagagatctgctgtactacgccgtgacccaggatgccatgctgatcttcgccaacctgagccggggcttcggccggcagggcaagcggaccttcatggccgagagacagtacacacggatggaggactggctgaccgccaagctggcctacgagggcctgagcaagacctacctgtccaagacactggcccagtacacctccaagacatgcagcaactgtgggtttaccatcaccagcgccgactacgacagggtgctggagaagctgaagaagacagcaacaggctggatgaccacaattaacggcaaggagctgaaggtggagggccagattacctactacaacagatacaagagacagaacgtagtcaaggacctgtccgtcgagctggatagactgagcgaagaatctgtgaacaacgacatctcctcctggacaaagggcagaagcggagaagctctgagcctcctgaagaaaagattctcccatagacccgtgcaggagaagttcgtgtgcctgaactgcggcttcgagacacacgcagccgagcaagccgccctgaacatcgccagatcctggctgttcctgcggagccaggagtacaagaaataccagacaaacaagacaaccggcaacaccgataagagagccttcgtcgagacctggcagtccttttaccggaagaagcttaaggaggtgtggaaacctgccgtgcggtctggcggatctggcggaggctccaccagccccaagaaaaagagaaaagtctaagctgccttctgcggggcttgccttctggccatgcccttcttctctcccttgcacctgtacctcttggtctttgaataaagcctgagtaggaaggctagcaaaaaaaaaaaaaaaaaaaaaaaaaaaaaaaaaaaaaaaaaaaaaaaaaaaaaaaaaaaaaaaaaaaaaaaaaaaaaaaagcccagccggctccccaacctctaccgaggagggcacctctgagtccgccacccccgagagcggccctggcacctccaccgagcccagcgagggcagcgcacccggcagccctgccggcagccccacctccacagaggagggaaccagcaccgagcccagcgaaggcagcgccccaggcaccagcaccgagcctagtgagcaggagattaaacggatcaacaagatcagaagaagacttgtgaaagacagcaacaccaagaaggccggcaagacaggccccatgaaaaccctgctggttagagtgatgacacccgatctgagagagcggctggaaaacctgagaaagaagcctgaaaatatcccccagcccatcagcaatacatctagagccaacctgaataagctgctgaccgattacaccgaaatgaagaaggcgatcctgcatgtgtactgggaagagttccagaaggaccctgtgggcctgatgagccgggtggcccagcctgccagcaagaagatcgatcagaacaagctgaaacctgagatggacgagaagggcaacctgaccaccgccggctttgcctgctctcagtgtggccagcccctgttcgtgtacaagctggagcaggtgtctgagaagggcaaggcttacaccaactacttcggacggtgcaatgtggccgagcacgaaaagctgatcctgctggcccagctgaagcccgagaaggatagcgacgaagccgtgacatatagcctgggaaagtttgggcagagggccctggatttctacagcattcatgtgaccaaggagtccacccaccccgtgaagcccctggcccagatcgccggaaacagatacgcctccggacctgtgggaaaggccctgagcgacgcatgtatgggcacaatcgcctccttcctgtctaagtaccaggacatcatcatcgaacaccagaaggtggtgaagggcaaccagaagagactggagagcctgcgggagctggccggcaaggaaaacctggaataccctagcgtgaccctgccacctcagcctcacaccaaggagggcgttgatgcctacaacgaagtgatcgcccgggtgcgaatgtgggtgaacctgaacctgtggcagaagctgaagctaagcagagatgatgccaagcctctgctgagactgaagggattcccttcctttcctctggtcgagagacaggccaacgaagtggactggtgggacatggtgtgtaacgtgaagaagctgatcaacgagaaaaaggaggatggcaaggtgttttggcagaatctggctggctacaagagacaggaagccctgagaccatacctgagcagcgaggaagatcggaagaagggaaagaaattcgctcggtaccagctgggcgacctgctgctgcacctggaaaagaagcacggcgaggactggggaaaggtgtacgacgaggcctgggagcggattgacaagaaagtggaaggcctgagcaagcacatcaagctggaagaggaacggagaagcgaggacgcccagagcaaggccgccctgaccgactggctgcgggctaaggccagcttcgtgatcgagggcctgaaggaggccgacaaggacgagttctgcagatgcgagctgaagctgcagaagtggtacggggacctgcggggaaagcccttcgccatcgaagccgagaacagcatcctggacatcagcggcttcagcaagcagtacaactgtgccttcatctggcagaaggacggcgtgaagaagctgaacctgtacctgatcatcaactacttcaagggcggcaagctgcggttcaagaagatcaaacctgaagccttcgaagccaacagattctacaccgtgatcaacaaaaagagcggcgagatcgtgcccatggaggtgaacttcaacttcgacgaccccaacctgatcatcctgcctctggcctttggcaagagacagggcagagaattcatctggaacgacctgctgtccctggaaaccggcagcctgaagctggccaacggaagagtgatcgagaagacactgtacaacagaagaacccggcaggatgagcctgccctgttcgtggccctgaccttcgagcggcgggaggtcctggactcctccaatatcaaaccaatgaacctgatcggcgtggcaagaggcgaaaacatccccgccgtgatcgccctgaccgaccccgagggctgcccactgagccggtttaaggatagcctgggaaacccaacccacatcctgagaatcggcgagagctataaggagaagcagcggaccatccaggccaagaaggaggtggagcagcggagagccggcggctacagccggaagtacgccagcaaagccaagaatctggcagacgatatggtgagaaacaccgctagagatctgctgtactacgccgtgacccaggatgccatgctgatcttcgccaacctgagccggggcttcggccggcagggcaagcggaccttcatggccgagagacagtacacacggatggaggactggctgaccgccaagctggcctacgagggcctgagcaagacctacctgtccaagacactggcccagtacacctccaagacatgcagcaactgtgggtttaccatcaccagcgccgactacgacagggtgctggagaagctgaagaagacagcaacaggctggatgaccacaattaacggcaaggagctgaaggtggagggccagattacctactacaacagatacaagagacagaacgtagtcaaggacctgtccgtcgagctggatagactgagcgaagaatctgtgaacaacgacatctcctcctggacaaagggcagaagcggagaagctctgagcctcctgaagaaaagattctcccatagacccgtgcaggagaagttcgtgtgcctgaactgcggcttcgagacacacgcagccgagcaagccgccctgaacatcgccagatcctggctgttcctgcggagccaggagtacaagaaataccagacaaacaagacaaccggcaacaccgataagagagccttcgtcgagacctggcagtccttttaccggaagaagcttaaggaggtgtggaaacctgccgtgcggtctggcggatctggcggaggctccaccagccccaagaaaaagagaaaagtctaagctgccttctgcggggcttgccttctggccatgcccttcttctctcccttgcacctgtacctcttggtctttgaataaagcctgagtaggaaggctagcaaaaaaaaaaaaaaaaaaaaaaaaaaaaaaaaaaaaaaaaaaaaaaaaaaaaaaaaaaaaaaaaaaaaaaaaaaaaaaaa

SEQ ID NO: 9162 - RNA, 8787 nt, synthetic construct
  source 1..8787: mol_type = other RNA
aggaaataagagagaaaagaagagtaagaagaaatataagagccaccatggcccctaagaagaagcgtaaagtgagccggatgaaccacgaccaggagttcgacccccctaaggtgtaccctcccgtccccgccgagaagagaaagcccatccgggtcctgagcctgttcgatggcatcgccaccggtctgctggtgctgaaggacctgggcatccaggtggataggtacattgcctccgaggtgtgcgaggactccatcaccgtgggaatggtgcgtcatcagggcaagatcatgtacgtgggcgacgtgcggagcgtgacacagaagcatatccaggagtggggccctttcgacctggtgatcggcggcagcccttgcaatgacctgagcatcgtgaacccagcccggaagggcctgtacgagggaaccggcagactgttcttcgagttttacagactgctgcacgacgcccggcctaaggaaggcgacgaccggcccttcttttggctgttcgagaatgtggtggccatgggagtcagcgacaagcgggatattagccggttcctggagagcaaccccgtgatgatcgatgccaaggaagtgagcgccgcccaccgggccagatacttctggggcaatctgcctggcatgaacagacccctggccagcaccgtgaacgacaagctggagctgcaggagtgcctggagcacggccggatcgccaagttcagcaaggtgagaaccatcaccacccgaagcaacagcatcaaacaaggcaaggaccagcactttcctgtgttcatgaacgagaaggaggacatcctgtggtgtaccgagatggagagagtgttcgggttcccagtccactacacagatgtcagcaacatgtctagactggccagacagagactgctgggaagaagctggtccgtccctgtgatcagacacctgttcgcccctctgaaggagtacttcgcctgcgtgagcagcggcaacagcaacgccaacagccggggccccagcttctctagcggcctggtgccactgtccctgagagggagccacatgggccccatggagatctacaaaaccgtgagcgcctggaagcggcagcctgtgcgcgtgctgagcctgtttcggaatatcgataaagtcctgaaaagcctgggattcctggagagcggctctggctccggcggtggcaccctgaagtacgtggaggatgtgacaaacgtggtcagacgggatgtggagaagtggggccccttcgatctggtgtacggcagcacccaacccctgggcagctcttgtgaccggtgccctggctggtacatgtttcagttccaccggatcctgcagtacgccctgccgagacaggagtcccagcggccattcttttggattttcatggacaacttgctgctgaccgaggatgaccaggaaactaccactcggttcctgcagaccgaagccgtgaccctgcaggacgtgagaggccgggactaccagaacgccatgcgggtgtggtccaacatccctggactgaaaagcaagcacgcacctctgacccctaaagaagaggagtacctgcaggcccaggtgcggagcagaagcaagctggacgcccctaaggtggatctgctggtgaagaattgcctcctgcccctgagagagtacttcaagtatttcagccagaatagtctgcccctgggaggcagcggcggcggcagcaaggcccccgtgaccttcggcgacctggccatctacttcagccaggaggagtgggagtggctgagccccatccagaaggacctgtacgaggacgtgatgctggagaactaccagaacctggtgagcctgggcctgagcttcaggaggcccaacgtgatcgccctgctggagaagggcaaggccccctggatggtggagcccgtgaagaggaggaggggcctggacagcggcagcaagtgcggcggcccaagcagcggcgcccctcctcccagcggcggcaggcggcccaagcagcggcgcccctcctcccagcggcggcagcccagccggctccccaacctctaccgaggagggcacctctgagtccgccacccccgagagcggccctggcacctccaccgagcccagcgagggcagcgcacccggcagccctgccggcagccccacctccacagaggagggaaccagcaccgagcccagcgaaggcagcgccccaggcaccagcaccgagcctagtgagcaggagattaaacggatcaacaagatcagaagaagacttgtgaaagacagcaacaccaagaaggccggcaagacaggccccatgaaaaccctgctggttagagtgatgacacccgatctgagagagcggctggaaaacctgagaaagaagcctgaaaatatcccccagcccatcagcaatacatctagagccaacctgaataagctgctgaccgattacaccgaaatgaagaaggcgatcctgcatgtgtactgggaagagttccagaaggaccctgtgggcctgatgagccgggtggcccagcctgccagcaagaagatcgatcagaacaagctgaaacctgagatggacgagaagggcaacctgaccaccgccggctttgcctgctctcagtgtggccagcccctgttcgtgtacaagctggagcaggtgtctgagaagggcaaggcttacaccaactacttcggacggtgcaatgtggccgagcacgaaaagctgatcctgctggcccagctgaagcccgagaaggatagcgacgaagccgtgacatatagcctgggaaagtttgggcagagggccctggatttctacagcattcatgtgaccaaggagtccacccaccccgtgaagcccctggcccagatcgccggaaacagatacgcctccggacctgtgggaaaggccctgagcgacgcatgtatgggcacaatcgcctccttcctgtctaagtaccaggacatcatcatcgaacaccagaaggtggtgaagggcaaccagaagagactggagagcctgcgggagctggccggcaaggaaaacctggaataccctagcgtgaccctgccacctcagcctcacaccaaggagggcgttgatgcctacaacgaagtgatcgcccgggtgcgaatgtgggtgaacctgaacctgtggcagaagctgaagctaagcagagatgatgccaagcctctgctgagactgaagggattcccttcctttcctctggtcgagagacaggccaacgaagtggactggtgggacatggtgtgtaacgtgaagaagctgatcaacgagaaaaaggaggatggcaaggtgttttggcagaatctggctggctacaagagacaggaagccctgagaccatacctgagcagcgaggaagatcggaagaagggaaagaaattcgctcggtaccagctgggcgacctgctgctgcacctggaaaagaagcacggcgaggactggggaaaggtgtacgacgaggcctgggagcggattgacaagaaagtggaaggcctgagcaagcacatcaagctggaagaggaacggagaagcgaggacgcccagagcaaggccgccctgaccgactggctgcgggctaaggccagcttcgtgatcgagggcctgaaggaggccgacaaggacgagttctgcagatgcgagctgaagctgcagaagtggtacggggacctgcggggaaagcccttcgccatcgaagccgagaacagcatcctggacatcagcggcttcagcaagcagtacaactgtgccttcatctggcagaaggacggcgtgaagaagctgaacctgtacctgatcatcaactacttcaagggcggcaagctgcggttcaagaagatcaaacctgaagccttcgaagccaacagattctacaccgtgatcaacaaaaagagcggcgagatcgtgcccatggaggtgaacttcaacttcgacgaccccaacctgatcatcctgcctctggcctttggcaagagacagggcagagaattcatctggaacgacctgctgtccctggaaaccggcagcctgaagctggccaacggaagagtgatcgagaagacactgtacaacagaagaacccggcaggatgagcctgccctgttcgtggccctgaccttcgagcggcgggaggtcctggactcctccaatatcaaaccaatgaacctgatcggcgtggcaagaggcgaaaacatccccgccgtgatcgccctgaccgaccccgagggctgcccactgagccggtttaaggatagcctgggaaacccaacccacatcctgagaatcggcgagagctataaggagaagcagcggaccatccaggccaagaaggaggtggagcagcggagagccggcggctacagccggaagtacgccagcaaagccaagaatctggcagacgatatggtgagaaacaccgctagagatctgctgtactacgccgtgacccaggatgccatgctgatcttcgccaacctgagccggggcttcggccggcagggcaagcggaccttcatggccgagagacagtacacacggatggaggactggctgaccgccaagctggcctacgagggcctgagcaagacctacctgtccaagacactggcccagtacacctccaagacatgcagcaactgtgggtttaccatcaccagcgccgactacgacagggtgctggagaagctgaagaagacagcaacaggctggatgaccacaattaacggcaaggagctgaaggtggagggccagattacctactacaacagatacaagagacagaacgtagtcaaggacctgtccgtcgagctggatagactgagcgaagaatctgtgaacaacgacatctcctcctggacaaagggcagaagcggagaagctctgagcctcctgaagaaaagattctcccatagacccgtgcaggagaagttcgtgtgcctgaactgcggcttcgagacacacgcagccgagcaagccgccctgaacatcgccagatcctggctgttcctgcggagccaggagtacaagaaataccagacaaacaagacaaccggcaacaccgataagagagccttcgtcgagacctggcagtccttttaccggaagaagcttaaggaggtgtggaaacctgccgtgcggtctggcggatctggcggaggctccaccagccccaagaaaaagagaaaagtctaagctgccttctgcggggcttgccttctggccatgcccttcttctctcccttgcacctgtacctcttggtctttgaataaagcctgagtaggaaggctagcaaaaaaaaaaaaaaaaaaaaaaaaaaaaaaaaaaaaaaaaaaaaaaaaaaaaaaaaaaaaaaaaaaaaaaaaaaaaaaaagcccagccggctccccaacctctaccgaggagggcacctctgagtccgccacccccgagagcggccctggcacctccaccgagcccagcgagggcagcgcacccggcagccctgccggcagccccacctccacagaggagggaaccagcaccgagcccagcgaaggcagcgccccaggcaccagcaccgagcctagtgagcaggagattaaacggatcaacaagatcagaagaagacttgtgaaagacagcaacaccaagaaggccggcaagacaggccccatgaaaaccctgctggttagagtgatgacacccgatctgagagagcggctggaaaacctgagaaagaagcctgaaaatatcccccagcccatcagcaatacatctagagccaacctgaataagctgctgaccgattacaccgaaatgaagaaggcgatcctgcatgtgtactgggaagagttccagaaggaccctgtgggcctgatgagccgggtggcccagcctgccagcaagaagatcgatcagaacaagctgaaacctgagatggacgagaagggcaacctgaccaccgccggctttgcctgctctcagtgtggccagcccctgttcgtgtacaagctggagcaggtgtctgagaagggcaaggcttacaccaactacttcggacggtgcaatgtggccgagcacgaaaagctgatcctgctggcccagctgaagcccgagaaggatagcgacgaagccgtgacatatagcctgggaaagtttgggcagagggccctggatttctacagcattcatgtgaccaaggagtccacccaccccgtgaagcccctggcccagatcgccggaaacagatacgcctccggacctgtgggaaaggccctgagcgacgcatgtatgggcacaatcgcctccttcctgtctaagtaccaggacatcatcatcgaacaccagaaggtggtgaagggcaaccagaagagactggagagcctgcgggagctggccggcaaggaaaacctggaataccctagcgtgaccctgccacctcagcctcacaccaaggagggcgttgatgcctacaacgaagtgatcgcccgggtgcgaatgtgggtgaacctgaacctgtggcagaagctgaagctaagcagagatgatgccaagcctctgctgagactgaagggattcccttcctttcctctggtcgagagacaggccaacgaagtggactggtgggacatggtgtgtaacgtgaagaagctgatcaacgagaaaaaggaggatggcaaggtgttttggcagaatctggctggctacaagagacaggaagccctgagaccatacctgagcagcgaggaagatcggaagaagggaaagaaattcgctcggtaccagctgggcgacctgctgctgcacctggaaaagaagcacggcgaggactggggaaaggtgtacgacgaggcctgggagcggattgacaagaaagtggaaggcctgagcaagcacatcaagctggaagaggaacggagaagcgaggacgcccagagcaaggccgccctgaccgactggctgcgggctaaggccagcttcgtgatcgagggcctgaaggaggccgacaaggacgagttctgcagatgcgagctgaagctgcagaagtggtacggggacctgcggggaaagcccttcgccatcgaagccgagaacagcatcctggacatcagcggcttcagcaagcagtacaactgtgccttcatctggcagaaggacggcgtgaagaagctgaacctgtacctgatcatcaactacttcaagggcggcaagctgcggttcaagaagatcaaacctgaagccttcgaagccaacagattctacaccgtgatcaacaaaaagagcggcgagatcgtgcccatggaggtgaacttcaacttcgacgaccccaacctgatcatcctgcctctggcctttggcaagagacagggcagagaattcatctggaacgacctgctgtccctggaaaccggcagcctgaagctggccaacggaagagtgatcgagaagacactgtacaacagaagaacccggcaggatgagcctgccctgttcgtggccctgaccttcgagcggcgggaggtcctggactcctccaatatcaaaccaatgaacctgatcggcgtggcaagaggcgaaaacatccccgccgtgatcgccctgaccgaccccgagggctgcccactgagccggtttaaggatagcctgggaaacccaacccacatcctgagaatcggcgagagctataaggagaagcagcggaccatccaggccaagaaggaggtggagcagcggagagccggcggctacagccggaagtacgccagcaaagccaagaatctggcagacgatatggtgagaaacaccgctagagatctgctgtactacgccgtgacccaggatgccatgctgatcttcgccaacctgagccggggcttcggccggcagggcaagcggaccttcatggccgagagacagtacacacggatggaggactggctgaccgccaagctggcctacgagggcctgagcaagacctacctgtccaagacactggcccagtacacctccaagacatgcagcaactgtgggtttaccatcaccagcgccgactacgacagggtgctggagaagctgaagaagacagcaacaggctggatgaccacaattaacggcaaggagctgaaggtggagggccagattacctactacaacagatacaagagacagaacgtagtcaaggacctgtccgtcgagctggatagactgagcgaagaatctgtgaacaacgacatctcctcctggacaaagggcagaagcggagaagctctgagcctcctgaagaaaagattctcccatagacccgtgcaggagaagttcgtgtgcctgaactgcggcttcgagacacacgcagccgagcaagccgccctgaacatcgccagatcctggctgttcctgcggagccaggagtacaagaaataccagacaaacaagacaaccggcaacaccgataagagagccttcgtcgagacctggcagtccttttaccggaagaagcttaaggaggtgtggaaacctgccgtgcggtctggcggatctggcggaggctccaccagccccaagaaaaagagaaaagtctaagctgccttctgcggggcttgccttctggccatgcccttcttctctcccttgcacctgtacctcttggtctttgaataaagcctgagtaggaaggctagcaaaaaaaaaaaaaaaaaaaaaaaaaaaaaaaaaaaaaaaaaaaaaaaaaaaaaaaaaaaaaaaaaaaaaaaaaaaaaaaa

SEQ ID NO: 9163 - RNA, 8787 nt, synthetic construct
  source 1..8787: mol_type = other RNA
aggaaataagagagaaaagaagagtaagaagaaatataagagccaccatggcccctaagaagaagcgtaaagtgagccggatgaaccacgaccaggagttcgacccccctaaggtgtaccctcccgtccccgccgagaagagaaagcccatccgggtcctgagcctgttcgatggcatcgccaccggtctgctggtgctgaaggacctgggcatccaggtggataggtacattgcctccgaggtgtgcgaggactccatcaccgtgggaatggtgcgtcatcagggcaagatcatgtacgtgggcgacgtgcggagcgtgacacagaagcatatccaggagtggggccctttcgacctggtgatcggcggcagcccttgcaatgacctgagcatcgtgaacccagcccggaagggcctgtacgagggaaccggcagactgttcttcgagttttacagactgctgcacgacgcccggcctaaggaaggcgacgaccggcccttcttttggctgttcgagaatgtggtggccatgggagtcagcgacaagcgggatattagccggttcctggagagcaaccccgtgatgatcgatgccaaggaagtgagcgccgcccaccgggccagatacttctggggcaatctgcctggcatgaacagacccctggccagcaccgtgaacgacaagctggagctgcaggagtgcctggagcacggccggatcgccaagttcagcaaggtgagaaccatcaccacccgaagcaacagcatcaaacaaggcaaggaccagcactttcctgtgttcatgaacgagaaggaggacatcctgtggtgtaccgagatggagagagtgttcgggttcccagtccactacacagatgtcagcaacatgtctagactggccagacagagactgctgggaagaagctggtccgtccctgtgatcagacacctgttcgcccctctgaaggagtacttcgcctgcgtgagcagcggcaacagcaacgccaacagccggggccccagcttctctagcggcctggtgccactgtccctgagagggagccacatgggccccatggagatctacaaaaccgtgagcgcctggaagcggcagcctgtgcgcgtgctgagcctgtttcggaatatcgataaagtcctgaaaagcctgggattcctggagagcggctctggctccggcggtggcaccctgaagtacgtggaggatgtgacaaacgtggtcagacgggatgtggagaagtggggccccttcgatctggtgtacggcagcacccaacccctgggcagctcttgtgaccggtgccctggctggtacatgtttcagttccaccggatcctgcagtacgccctgccgagacaggagtcccagcggccattcttttggattttcatggacaacttgctgctgaccgaggatgaccaggaaactaccactcggttcctgcagaccgaagccgtgaccctgcaggacgtgagaggccgggactaccagaacgccatgcgggtgtggtccaacatccctggactgaaaagcaagcacgcacctctgacccctaaagaagaggagtacctgcaggcccaggtgcggagcagaagcaagctggacgcccctaaggtggatctgctggtgaagaattgcctcctgcccctgagagagtacttcaagtatttcagccagaatagtctgcccctgggaggcagcggcggcggcaggcccagggccctgaagttcgccgacgtggccgtgtacttcagcctggaggagtggggctgcctgaggcccgcccagaggaccctgtacaggaacgtgatgagggagacctacggccacctgggcgccctgggctgcgccggccccaagcccgccctgatcagctggctggagaggaacaccgacgactgggagcccgccgccctggacccccaggagtaccccaggggcgtgaccgtgcagggcggcccaagcagcggcgcccctcctcccagcggcggcaggcggcccaagcagcggcgcccctcctcccagcggcggcagcccagccggctccccaacctctaccgaggagggcacctctgagtccgccacccccgagagcggccctggcacctccaccgagcccagcgagggcagcgcacccggcagccctgccggcagccccacctccacagaggagggaaccagcaccgagcccagcgaaggcagcgccccaggcaccagcaccgagcctagtgagcaggagattaaacggatcaacaagatcagaagaagacttgtgaaagacagcaacaccaagaaggccggcaagacaggccccatgaaaaccctgctggttagagtgatgacacccgatctgagagagcggctggaaaacctgagaaagaagcctgaaaatatcccccagcccatcagcaatacatctagagccaacctgaataagctgctgaccgattacaccgaaatgaagaaggcgatcctgcatgtgtactgggaagagttccagaaggaccctgtgggcctgatgagccgggtggcccagcctgccagcaagaagatcgatcagaacaagctgaaacctgagatggacgagaagggcaacctgaccaccgccggctttgcctgctctcagtgtggccagcccctgttcgtgtacaagctggagcaggtgtctgagaagggcaaggcttacaccaactacttcggacggtgcaatgtggccgagcacgaaaagctgatcctgctggcccagctgaagcccgagaaggatagcgacgaagccgtgacatatagcctgggaaagtttgggcagagggccctggatttctacagcattcatgtgaccaaggagtccacccaccccgtgaagcccctggcccagatcgccggaaacagatacgcctccggacctgtgggaaaggccctgagcgacgcatgtatgggcacaatcgcctccttcctgtctaagtaccaggacatcatcatcgaacaccagaaggtggtgaagggcaaccagaagagactggagagcctgcgggagctggccggcaaggaaaacctggaataccctagcgtgaccctgccacctcagcctcacaccaaggagggcgttgatgcctacaacgaagtgatcgcccgggtgcgaatgtgggtgaacctgaacctgtggcagaagctgaagctaagcagagatgatgccaagcctctgctgagactgaagggattcccttcctttcctctggtcgagagacaggccaacgaagtggactggtgggacatggtgtgtaacgtgaagaagctgatcaacgagaaaaaggaggatggcaaggtgttttggcagaatctggctggctacaagagacaggaagccctgagaccatacctgagcagcgaggaagatcggaagaagggaaagaaattcgctcggtaccagctgggcgacctgctgctgcacctggaaaagaagcacggcgaggactggggaaaggtgtacgacgaggcctgggagcggattgacaagaaagtggaaggcctgagcaagcacatcaagctggaagaggaacggagaagcgaggacgcccagagcaaggccgccctgaccgactggctgcgggctaaggccagcttcgtgatcgagggcctgaaggaggccgacaaggacgagttctgcagatgcgagctgaagctgcagaagtggtacggggacctgcggggaaagcccttcgccatcgaagccgagaacagcatcctggacatcagcggcttcagcaagcagtacaactgtgccttcatctggcagaaggacggcgtgaagaagctgaacctgtacctgatcatcaactacttcaagggcggcaagctgcggttcaagaagatcaaacctgaagccttcgaagccaacagattctacaccgtgatcaacaaaaagagcggcgagatcgtgcccatggaggtgaacttcaacttcgacgaccccaacctgatcatcctgcctctggcctttggcaagagacagggcagagaattcatctggaacgacctgctgtccctggaaaccggcagcctgaagctggccaacggaagagtgatcgagaagacactgtacaacagaagaacccggcaggatgagcctgccctgttcgtggccctgaccttcgagcggcgggaggtcctggactcctccaatatcaaaccaatgaacctgatcggcgtggcaagaggcgaaaacatccccgccgtgatcgccctgaccgaccccgagggctgcccactgagccggtttaaggatagcctgggaaacccaacccacatcctgagaatcggcgagagctataaggagaagcagcggaccatccaggccaagaaggaggtggagcagcggagagccggcggctacagccggaagtacgccagcaaagccaagaatctggcagacgatatggtgagaaacaccgctagagatctgctgtactacgccgtgacccaggatgccatgctgatcttcgccaacctgagccggggcttcggccggcagggcaagcggaccttcatggccgagagacagtacacacggatggaggactggctgaccgccaagctggcctacgagggcctgagcaagacctacctgtccaagacactggcccagtacacctccaagacatgcagcaactgtgggtttaccatcaccagcgccgactacgacagggtgctggagaagctgaagaagacagcaacaggctggatgaccacaattaacggcaaggagctgaaggtggagggccagattacctactacaacagatacaagagacagaacgtagtcaaggacctgtccgtcgagctggatagactgagcgaagaatctgtgaacaacgacatctcctcctggacaaagggcagaagcggagaagctctgagcctcctgaagaaaagattctcccatagacccgtgcaggagaagttcgtgtgcctgaactgcggcttcgagacacacgcagccgagcaagccgccctgaacatcgccagatcctggctgttcctgcggagccaggagtacaagaaataccagacaaacaagacaaccggcaacaccgataagagagccttcgtcgagacctggcagtccttttaccggaagaagcttaaggaggtgtggaaacctgccgtgcggtctggcggatctggcggaggctccaccagccccaagaaaaagagaaaagtctaagctgccttctgcggggcttgccttctggccatgcccttcttctctcccttgcacctgtacctcttggtctttgaataaagcctgagtaggaaggctagcaaaaaaaaaaaaaaaaaaaaaaaaaaaaaaaaaaaaaaaaaaaaaaaaaaaaaaaaaaaaaaaaaaaaaaaaaaaaaaaagcccagccggctccccaacctctaccgaggagggcacctctgagtccgccacccccgagagcggccctggcacctccaccgagcccagcgagggcagcgcacccggcagccctgccggcagccccacctccacagaggagggaaccagcaccgagcccagcgaaggcagcgccccaggcaccagcaccgagcctagtgagcaggagattaaacggatcaacaagatcagaagaagacttgtgaaagacagcaacaccaagaaggccggcaagacaggccccatgaaaaccctgctggttagagtgatgacacccgatctgagagagcggctggaaaacctgagaaagaagcctgaaaatatcccccagcccatcagcaatacatctagagccaacctgaataagctgctgaccgattacaccgaaatgaagaaggcgatcctgcatgtgtactgggaagagttccagaaggaccctgtgggcctgatgagccgggtggcccagcctgccagcaagaagatcgatcagaacaagctgaaacctgagatggacgagaagggcaacctgaccaccgccggctttgcctgctctcagtgtggccagcccctgttcgtgtacaagctggagcaggtgtctgagaagggcaaggcttacaccaactacttcggacggtgcaatgtggccgagcacgaaaagctgatcctgctggcccagctgaagcccgagaaggatagcgacgaagccgtgacatatagcctgggaaagtttgggcagagggccctggatttctacagcattcatgtgaccaaggagtccacccaccccgtgaagcccctggcccagatcgccggaaacagatacgcctccggacctgtgggaaaggccctgagcgacgcatgtatgggcacaatcgcctccttcctgtctaagtaccaggacatcatcatcgaacaccagaaggtggtgaagggcaaccagaagagactggagagcctgcgggagctggccggcaaggaaaacctggaataccctagcgtgaccctgccacctcagcctcacaccaaggagggcgttgatgcctacaacgaagtgatcgcccgggtgcgaatgtgggtgaacctgaacctgtggcagaagctgaagctaagcagagatgatgccaagcctctgctgagactgaagggattcccttcctttcctctggtcgagagacaggccaacgaagtggactggtgggacatggtgtgtaacgtgaagaagctgatcaacgagaaaaaggaggatggcaaggtgttttggcagaatctggctggctacaagagacaggaagccctgagaccatacctgagcagcgaggaagatcggaagaagggaaagaaattcgctcggtaccagctgggcgacctgctgctgcacctggaaaagaagcacggcgaggactggggaaaggtgtacgacgaggcctgggagcggattgacaagaaagtggaaggcctgagcaagcacatcaagctggaagaggaacggagaagcgaggacgcccagagcaaggccgccctgaccgactggctgcgggctaaggccagcttcgtgatcgagggcctgaaggaggccgacaaggacgagttctgcagatgcgagctgaagctgcagaagtggtacggggacctgcggggaaagcccttcgccatcgaagccgagaacagcatcctggacatcagcggcttcagcaagcagtacaactgtgccttcatctggcagaaggacggcgtgaagaagctgaacctgtacctgatcatcaactacttcaagggcggcaagctgcggttcaagaagatcaaacctgaagccttcgaagccaacagattctacaccgtgatcaacaaaaagagcggcgagatcgtgcccatggaggtgaacttcaacttcgacgaccccaacctgatcatcctgcctctggcctttggcaagagacagggcagagaattcatctggaacgacctgctgtccctggaaaccggcagcctgaagctggccaacggaagagtgatcgagaagacactgtacaacagaagaacccggcaggatgagcctgccctgttcgtggccctgaccttcgagcggcgggaggtcctggactcctccaatatcaaaccaatgaacctgatcggcgtggcaagaggcgaaaacatccccgccgtgatcgccctgaccgaccccgagggctgcccactgagccggtttaaggatagcctgggaaacccaacccacatcctgagaatcggcgagagctataaggagaagcagcggaccatccaggccaagaaggaggtggagcagcggagagccggcggctacagccggaagtacgccagcaaagccaagaatctggcagacgatatggtgagaaacaccgctagagatctgctgtactacgccgtgacccaggatgccatgctgatcttcgccaacctgagccggggcttcggccggcagggcaagcggaccttcatggccgagagacagtacacacggatggaggactggctgaccgccaagctggcctacgagggcctgagcaagacctacctgtccaagacactggcccagtacacctccaagacatgcagcaactgtgggtttaccatcaccagcgccgactacgacagggtgctggagaagctgaagaagacagcaacaggctggatgaccacaattaacggcaaggagctgaaggtggagggccagattacctactacaacagatacaagagacagaacgtagtcaaggacctgtccgtcgagctggatagactgagcgaagaatctgtgaacaacgacatctcctcctggacaaagggcagaagcggagaagctctgagcctcctgaagaaaagattctcccatagacccgtgcaggagaagttcgtgtgcctgaactgcggcttcgagacacacgcagccgagcaagccgccctgaacatcgccagatcctggctgttcctgcggagccaggagtacaagaaataccagacaaacaagacaaccggcaacaccgataagagagccttcgtcgagacctggcagtccttttaccggaagaagcttaaggaggtgtggaaacctgccgtgcggtctggcggatctggcggaggctccaccagccccaagaaaaagagaaaagtctaagctgccttctgcggggcttgccttctggccatgcccttcttctctcccttgcacctgtacctcttggtctttgaataaagcctgagtaggaaggctagcaaaaaaaaaaaaaaaaaaaaaaaaaaaaaaaaaaaaaaaaaaaaaaaaaaaaaaaaaaaaaaaaaaaaaaaaaaaaaaaa

SEQ ID NO: 9164 - RNA, 8796 nt, synthetic construct
  source 1..8796: mol_type = other RNA
aggaaataagagagaaaagaagagtaagaagaaatataagagccaccatggcccctaagaagaagcgtaaagtgagccggatgaaccacgaccaggagttcgacccccctaaggtgtaccctcccgtccccgccgagaagagaaagcccatccgggtcctgagcctgttcgatggcatcgccaccggtctgctggtgctgaaggacctgggcatccaggtggataggtacattgcctccgaggtgtgcgaggactccatcaccgtgggaatggtgcgtcatcagggcaagatcatgtacgtgggcgacgtgcggagcgtgacacagaagcatatccaggagtggggccctttcgacctggtgatcggcggcagcccttgcaatgacctgagcatcgtgaacccagcccggaagggcctgtacgagggaaccggcagactgttcttcgagttttacagactgctgcacgacgcccggcctaaggaaggcgacgaccggcccttcttttggctgttcgagaatgtggtggccatgggagtcagcgacaagcgggatattagccggttcctggagagcaaccccgtgatgatcgatgccaaggaagtgagcgccgcccaccgggccagatacttctggggcaatctgcctggcatgaacagacccctggccagcaccgtgaacgacaagctggagctgcaggagtgcctggagcacggccggatcgccaagttcagcaaggtgagaaccatcaccacccgaagcaacagcatcaaacaaggcaaggaccagcactttcctgtgttcatgaacgagaaggaggacatcctgtggtgtaccgagatggagagagtgttcgggttcccagtccactacacagatgtcagcaacatgtctagactggccagacagagactgctgggaagaagctggtccgtccctgtgatcagacacctgttcgcccctctgaaggagtacttcgcctgcgtgagcagcggcaacagcaacgccaacagccggggccccagcttctctagcggcctggtgccactgtccctgagagggagccacatgggccccatggagatctacaaaaccgtgagcgcctggaagcggcagcctgtgcgcgtgctgagcctgtttcggaatatcgataaagtcctgaaaagcctgggattcctggagagcggctctggctccggcggtggcaccctgaagtacgtggaggatgtgacaaacgtggtcagacgggatgtggagaagtggggccccttcgatctggtgtacggcagcacccaacccctgggcagctcttgtgaccggtgccctggctggtacatgtttcagttccaccggatcctgcagtacgccctgccgagacaggagtcccagcggccattcttttggattttcatggacaacttgctgctgaccgaggatgaccaggaaactaccactcggttcctgcagaccgaagccgtgaccctgcaggacgtgagaggccgggactaccagaacgccatgcgggtgtggtccaacatccctggactgaaaagcaagcacgcacctctgacccctaaagaagaggagtacctgcaggcccaggtgcggagcagaagcaagctggacgcccctaaggtggatctgctggtgaagaattgcctcctgcccctgagagagtacttcaagtatttcagccagaatagtctgcccctgggaggcagcggcggcggcctgacctacgacgacgtgcagatcaacttcaccagcgaggagtggagcctgctggacaccagccagaagaacctgtacaaggacgtgatgctggagacctacaagaacctgaccgacatcggctacacctgggaggactgcagcatcgaggagcactgcgccagcagcaagaggaaggagaggcccaagaggagccagaccggcgagaagcccagcgcctacacccagtgcgccaaggacttcgcctacagcggcggcccaagcagcggcgcccctcctcccagcggcggcaggcggcccaagcagcggcgcccctcctcccagcggcggcagcccagccggctccccaacctctaccgaggagggcacctctgagtccgccacccccgagagcggccctggcacctccaccgagcccagcgagggcagcgcacccggcagccctgccggcagccccacctccacagaggagggaaccagcaccgagcccagcgaaggcagcgccccaggcaccagcaccgagcctagtgagcaggagattaaacggatcaacaagatcagaagaagacttgtgaaagacagcaacaccaagaaggccggcaagacaggccccatgaaaaccctgctggttagagtgatgacacccgatctgagagagcggctggaaaacctgagaaagaagcctgaaaatatcccccagcccatcagcaatacatctagagccaacctgaataagctgctgaccgattacaccgaaatgaagaaggcgatcctgcatgtgtactgggaagagttccagaaggaccctgtgggcctgatgagccgggtggcccagcctgccagcaagaagatcgatcagaacaagctgaaacctgagatggacgagaagggcaacctgaccaccgccggctttgcctgctctcagtgtggccagcccctgttcgtgtacaagctggagcaggtgtctgagaagggcaaggcttacaccaactacttcggacggtgcaatgtggccgagcacgaaaagctgatcctgctggcccagctgaagcccgagaaggatagcgacgaagccgtgacatatagcctgggaaagtttgggcagagggccctggatttctacagcattcatgtgaccaaggagtccacccaccccgtgaagcccctggcccagatcgccggaaacagatacgcctccggacctgtgggaaaggccctgagcgacgcatgtatgggcacaatcgcctccttcctgtctaagtaccaggacatcatcatcgaacaccagaaggtggtgaagggcaaccagaagagactggagagcctgcgggagctggccggcaaggaaaacctggaataccctagcgtgaccctgccacctcagcctcacaccaaggagggcgttgatgcctacaacgaagtgatcgcccgggtgcgaatgtgggtgaacctgaacctgtggcagaagctgaagctaagcagagatgatgccaagcctctgctgagactgaagggattcccttcctttcctctggtcgagagacaggccaacgaagtggactggtgggacatggtgtgtaacgtgaagaagctgatcaacgagaaaaaggaggatggcaaggtgttttggcagaatctggctggctacaagagacaggaagccctgagaccatacctgagcagcgaggaagatcggaagaagggaaagaaattcgctcggtaccagctgggcgacctgctgctgcacctggaaaagaagcacggcgaggactggggaaaggtgtacgacgaggcctgggagcggattgacaagaaagtggaaggcctgagcaagcacatcaagctggaagaggaacggagaagcgaggacgcccagagcaaggccgccctgaccgactggctgcgggctaaggccagcttcgtgatcgagggcctgaaggaggccgacaaggacgagttctgcagatgcgagctgaagctgcagaagtggtacggggacctgcggggaaagcccttcgccatcgaagccgagaacagcatcctggacatcagcggcttcagcaagcagtacaactgtgccttcatctggcagaaggacggcgtgaagaagctgaacctgtacctgatcatcaactacttcaagggcggcaagctgcggttcaagaagatcaaacctgaagccttcgaagccaacagattctacaccgtgatcaacaaaaagagcggcgagatcgtgcccatggaggtgaacttcaacttcgacgaccccaacctgatcatcctgcctctggcctttggcaagagacagggcagagaattcatctggaacgacctgctgtccctggaaaccggcagcctgaagctggccaacggaagagtgatcgagaagacactgtacaacagaagaacccggcaggatgagcctgccctgttcgtggccctgaccttcgagcggcgggaggtcctggactcctccaatatcaaaccaatgaacctgatcggcgtggcaagaggcgaaaacatccccgccgtgatcgccctgaccgaccccgagggctgcccactgagccggtttaaggatagcctgggaaacccaacccacatcctgagaatcggcgagagctataaggagaagcagcggaccatccaggccaagaaggaggtggagcagcggagagccggcggctacagccggaagtacgccagcaaagccaagaatctggcagacgatatggtgagaaacaccgctagagatctgctgtactacgccgtgacccaggatgccatgctgatcttcgccaacctgagccggggcttcggccggcagggcaagcggaccttcatggccgagagacagtacacacggatggaggactggctgaccgccaagctggcctacgagggcctgagcaagacctacctgtccaagacactggcccagtacacctccaagacatgcagcaactgtgggtttaccatcaccagcgccgactacgacagggtgctggagaagctgaagaagacagcaacaggctggatgaccacaattaacggcaaggagctgaaggtggagggccagattacctactacaacagatacaagagacagaacgtagtcaaggacctgtccgtcgagctggatagactgagcgaagaatctgtgaacaacgacatctcctcctggacaaagggcagaagcggagaagctctgagcctcctgaagaaaagattctcccatagacccgtgcaggagaagttcgtgtgcctgaactgcggcttcgagacacacgcagccgagcaagccgccctgaacatcgccagatcctggctgttcctgcggagccaggagtacaagaaataccagacaaacaagacaaccggcaacaccgataagagagccttcgtcgagacctggcagtccttttaccggaagaagcttaaggaggtgtggaaacctgccgtgcggtctggcggatctggcggaggctccaccagccccaagaaaaagagaaaagtctaagctgccttctgcggggcttgccttctggccatgcccttcttctctcccttgcacctgtacctcttggtctttgaataaagcctgagtaggaaggctagcaaaaaaaaaaaaaaaaaaaaaaaaaaaaaaaaaaaaaaaaaaaaaaaaaaaaaaaaaaaaaaaaaaaaaaaaaaaaaaaagcccagccggctccccaacctctaccgaggagggcacctctgagtccgccacccccgagagcggccctggcacctccaccgagcccagcgagggcagcgcacccggcagccctgccggcagccccacctccacagaggagggaaccagcaccgagcccagcgaaggcagcgccccaggcaccagcaccgagcctagtgagcaggagattaaacggatcaacaagatcagaagaagacttgtgaaagacagcaacaccaagaaggccggcaagacaggccccatgaaaaccctgctggttagagtgatgacacccgatctgagagagcggctggaaaacctgagaaagaagcctgaaaatatcccccagcccatcagcaatacatctagagccaacctgaataagctgctgaccgattacaccgaaatgaagaaggcgatcctgcatgtgtactgggaagagttccagaaggaccctgtgggcctgatgagccgggtggcccagcctgccagcaagaagatcgatcagaacaagctgaaacctgagatggacgagaagggcaacctgaccaccgccggctttgcctgctctcagtgtggccagcccctgttcgtgtacaagctggagcaggtgtctgagaagggcaaggcttacaccaactacttcggacggtgcaatgtggccgagcacgaaaagctgatcctgctggcccagctgaagcccgagaaggatagcgacgaagccgtgacatatagcctgggaaagtttgggcagagggccctggatttctacagcattcatgtgaccaaggagtccacccaccccgtgaagcccctggcccagatcgccggaaacagatacgcctccggacctgtgggaaaggccctgagcgacgcatgtatgggcacaatcgcctccttcctgtctaagtaccaggacatcatcatcgaacaccagaaggtggtgaagggcaaccagaagagactggagagcctgcgggagctggccggcaaggaaaacctggaataccctagcgtgaccctgccacctcagcctcacaccaaggagggcgttgatgcctacaacgaagtgatcgcccgggtgcgaatgtgggtgaacctgaacctgtggcagaagctgaagctaagcagagatgatgccaagcctctgctgagactgaagggattcccttcctttcctctggtcgagagacaggccaacgaagtggactggtgggacatggtgtgtaacgtgaagaagctgatcaacgagaaaaaggaggatggcaaggtgttttggcagaatctggctggctacaagagacaggaagccctgagaccatacctgagcagcgaggaagatcggaagaagggaaagaaattcgctcggtaccagctgggcgacctgctgctgcacctggaaaagaagcacggcgaggactggggaaaggtgtacgacgaggcctgggagcggattgacaagaaagtggaaggcctgagcaagcacatcaagctggaagaggaacggagaagcgaggacgcccagagcaaggccgccctgaccgactggctgcgggctaaggccagcttcgtgatcgagggcctgaaggaggccgacaaggacgagttctgcagatgcgagctgaagctgcagaagtggtacggggacctgcggggaaagcccttcgccatcgaagccgagaacagcatcctggacatcagcggcttcagcaagcagtacaactgtgccttcatctggcagaaggacggcgtgaagaagctgaacctgtacctgatcatcaactacttcaagggcggcaagctgcggttcaagaagatcaaacctgaagccttcgaagccaacagattctacaccgtgatcaacaaaaagagcggcgagatcgtgcccatggaggtgaacttcaacttcgacgaccccaacctgatcatcctgcctctggcctttggcaagagacagggcagagaattcatctggaacgacctgctgtccctggaaaccggcagcctgaagctggccaacggaagagtgatcgagaagacactgtacaacagaagaacccggcaggatgagcctgccctgttcgtggccctgaccttcgagcggcgggaggtcctggactcctccaatatcaaaccaatgaacctgatcggcgtggcaagaggcgaaaacatccccgccgtgatcgccctgaccgaccccgagggctgcccactgagccggtttaaggatagcctgggaaacccaacccacatcctgagaatcggcgagagctataaggagaagcagcggaccatccaggccaagaaggaggtggagcagcggagagccggcggctacagccggaagtacgccagcaaagccaagaatctggcagacgatatggtgagaaacaccgctagagatctgctgtactacgccgtgacccaggatgccatgctgatcttcgccaacctgagccggggcttcggccggcagggcaagcggaccttcatggccgagagacagtacacacggatggaggactggctgaccgccaagctggcctacgagggcctgagcaagacctacctgtccaagacactggcccagtacacctccaagacatgcagcaactgtgggtttaccatcaccagcgccgactacgacagggtgctggagaagctgaagaagacagcaacaggctggatgaccacaattaacggcaaggagctgaaggtggagggccagattacctactacaacagatacaagagacagaacgtagtcaaggacctgtccgtcgagctggatagactgagcgaagaatctgtgaacaacgacatctcctcctggacaaagggcagaagcggagaagctctgagcctcctgaagaaaagattctcccatagacccgtgcaggagaagttcgtgtgcctgaactgcggcttcgagacacacgcagccgagcaagccgccctgaacatcgccagatcctggctgttcctgcggagccaggagtacaagaaataccagacaaacaagacaaccggcaacaccgataagagagccttcgtcgagacctggcagtccttttaccggaagaagcttaaggaggtgtggaaacctgccgtgcggtctggcggatctggcggaggctccaccagccccaagaaaaagagaaaagtctaagctgccttctgcggggcttgccttctggccatgcccttcttctctcccttgcacctgtacctcttggtctttgaataaagcctgagtaggaaggctagcaaaaaaaaaaaaaaaaaaaaaaaaaaaaaaaaaaaaaaaaaaaaaaaaaaaaaaaaaaaaaaaaaaaaaaaaaaaaaaaa

SEQ ID NO: 9165 - RNA, 8787 nt, synthetic construct
  source 1..8787: mol_type = other RNA
aggaaataagagagaaaagaagagtaagaagaaatataagagccaccatggcccctaagaagaagcgtaaagtgagccggatgaaccacgaccaggagttcgacccccctaaggtgtaccctcccgtccccgccgagaagagaaagcccatccgggtcctgagcctgttcgatggcatcgccaccggtctgctggtgctgaaggacctgggcatccaggtggataggtacattgcctccgaggtgtgcgaggactccatcaccgtgggaatggtgcgtcatcagggcaagatcatgtacgtgggcgacgtgcggagcgtgacacagaagcatatccaggagtggggccctttcgacctggtgatcggcggcagcccttgcaatgacctgagcatcgtgaacccagcccggaagggcctgtacgagggaaccggcagactgttcttcgagttttacagactgctgcacgacgcccggcctaaggaaggcgacgaccggcccttcttttggctgttcgagaatgtggtggccatgggagtcagcgacaagcgggatattagccggttcctggagagcaaccccgtgatgatcgatgccaaggaagtgagcgccgcccaccgggccagatacttctggggcaatctgcctggcatgaacagacccctggccagcaccgtgaacgacaagctggagctgcaggagtgcctggagcacggccggatcgccaagttcagcaaggtgagaaccatcaccacccgaagcaacagcatcaaacaaggcaaggaccagcactttcctgtgttcatgaacgagaaggaggacatcctgtggtgtaccgagatggagagagtgttcgggttcccagtccactacacagatgtcagcaacatgtctagactggccagacagagactgctgggaagaagctggtccgtccctgtgatcagacacctgttcgcccctctgaaggagtacttcgcctgcgtgagcagcggcaacagcaacgccaacagccggggccccagcttctctagcggcctggtgccactgtccctgagagggagccacatgggccccatggagatctacaaaaccgtgagcgcctggaagcggcagcctgtgcgcgtgctgagcctgtttcggaatatcgataaagtcctgaaaagcctgggattcctggagagcggctctggctccggcggtggcaccctgaagtacgtggaggatgtgacaaacgtggtcagacgggatgtggagaagtggggccccttcgatctggtgtacggcagcacccaacccctgggcagctcttgtgaccggtgccctggctggtacatgtttcagttccaccggatcctgcagtacgccctgccgagacaggagtcccagcggccattcttttggattttcatggacaacttgctgctgaccgaggatgaccaggaaactaccactcggttcctgcagaccgaagccgtgaccctgcaggacgtgagaggccgggactaccagaacgccatgcgggtgtggtccaacatccctggactgaaaagcaagcacgcacctctgacccctaaagaagaggagtacctgcaggcccaggtgcggagcagaagcaagctggacgcccctaaggtggatctgctggtgaagaattgcctcctgcccctgagagagtacttcaagtatttcagccagaatagtctgcccctgggaggcagcggcggcggcaggcaggccttcctggccttcggcgacgtgaccgtggacttcacccagaaggagtggaggctgctgagccccgcccagagggccctgtacagggaggtgaccctggagaactacagccacctggtgagcctgggcatcctgcacagcaagcccgagctgatcaggaggctggagcagggcgaggccccctggggcgaggagaggaggaggaggcccggcccctgcgccggcatctacgccgagggcggcccaagcagcggcgcccctcctcccagcggcggcaggcggcccaagcagcggcgcccctcctcccagcggcggcagcccagccggctccccaacctctaccgaggagggcacctctgagtccgccacccccgagagcggccctggcacctccaccgagcccagcgagggcagcgcacccggcagccctgccggcagccccacctccacagaggagggaaccagcaccgagcccagcgaaggcagcgccccaggcaccagcaccgagcctagtgagcaggagattaaacggatcaacaagatcagaagaagacttgtgaaagacagcaacaccaagaaggccggcaagacaggccccatgaaaaccctgctggttagagtgatgacacccgatctgagagagcggctggaaaacctgagaaagaagcctgaaaatatcccccagcccatcagcaatacatctagagccaacctgaataagctgctgaccgattacaccgaaatgaagaaggcgatcctgcatgtgtactgggaagagttccagaaggaccctgtgggcctgatgagccgggtggcccagcctgccagcaagaagatcgatcagaacaagctgaaacctgagatggacgagaagggcaacctgaccaccgccggctttgcctgctctcagtgtggccagcccctgttcgtgtacaagctggagcaggtgtctgagaagggcaaggcttacaccaactacttcggacggtgcaatgtggccgagcacgaaaagctgatcctgctggcccagctgaagcccgagaaggatagcgacgaagccgtgacatatagcctgggaaagtttgggcagagggccctggatttctacagcattcatgtgaccaaggagtccacccaccccgtgaagcccctggcccagatcgccggaaacagatacgcctccggacctgtgggaaaggccctgagcgacgcatgtatgggcacaatcgcctccttcctgtctaagtaccaggacatcatcatcgaacaccagaaggtggtgaagggcaaccagaagagactggagagcctgcgggagctggccggcaaggaaaacctggaataccctagcgtgaccctgccacctcagcctcacaccaaggagggcgttgatgcctacaacgaagtgatcgcccgggtgcgaatgtgggtgaacctgaacctgtggcagaagctgaagctaagcagagatgatgccaagcctctgctgagactgaagggattcccttcctttcctctggtcgagagacaggccaacgaagtggactggtgggacatggtgtgtaacgtgaagaagctgatcaacgagaaaaaggaggatggcaaggtgttttggcagaatctggctggctacaagagacaggaagccctgagaccatacctgagcagcgaggaagatcggaagaagggaaagaaattcgctcggtaccagctgggcgacctgctgctgcacctggaaaagaagcacggcgaggactggggaaaggtgtacgacgaggcctgggagcggattgacaagaaagtggaaggcctgagcaagcacatcaagctggaagaggaacggagaagcgaggacgcccagagcaaggccgccctgaccgactggctgcgggctaaggccagcttcgtgatcgagggcctgaaggaggccgacaaggacgagttctgcagatgcgagctgaagctgcagaagtggtacggggacctgcggggaaagcccttcgccatcgaagccgagaacagcatcctggacatcagcggcttcagcaagcagtacaactgtgccttcatctggcagaaggacggcgtgaagaagctgaacctgtacctgatcatcaactacttcaagggcggcaagctgcggttcaagaagatcaaacctgaagccttcgaagccaacagattctacaccgtgatcaacaaaaagagcggcgagatcgtgcccatggaggtgaacttcaacttcgacgaccccaacctgatcatcctgcctctggcctttggcaagagacagggcagagaattcatctggaacgacctgctgtccctggaaaccggcagcctgaagctggccaacggaagagtgatcgagaagacactgtacaacagaagaacccggcaggatgagcctgccctgttcgtggccctgaccttcgagcggcgggaggtcctggactcctccaatatcaaaccaatgaacctgatcggcgtggcaagaggcgaaaacatccccgccgtgatcgccctgaccgaccccgagggctgcccactgagccggtttaaggatagcctgggaaacccaacccacatcctgagaatcggcgagagctataaggagaagcagcggaccatccaggccaagaaggaggtggagcagcggagagccggcggctacagccggaagtacgccagcaaagccaagaatctggcagacgatatggtgagaaacaccgctagagatctgctgtactacgccgtgacccaggatgccatgctgatcttcgccaacctgagccggggcttcggccggcagggcaagcggaccttcatggccgagagacagtacacacggatggaggactggctgaccgccaagctggcctacgagggcctgagcaagacctacctgtccaagacactggcccagtacacctccaagacatgcagcaactgtgggtttaccatcaccagcgccgactacgacagggtgctggagaagctgaagaagacagcaacaggctggatgaccacaattaacggcaaggagctgaaggtggagggccagattacctactacaacagatacaagagacagaacgtagtcaaggacctgtccgtcgagctggatagactgagcgaagaatctgtgaacaacgacatctcctcctggacaaagggcagaagcggagaagctctgagcctcctgaagaaaagattctcccatagacccgtgcaggagaagttcgtgtgcctgaactgcggcttcgagacacacgcagccgagcaagccgccctgaacatcgccagatcctggctgttcctgcggagccaggagtacaagaaataccagacaaacaagacaaccggcaacaccgataagagagccttcgtcgagacctggcagtccttttaccggaagaagcttaaggaggtgtggaaacctgccgtgcggtctggcggatctggcggaggctccaccagccccaagaaaaagagaaaagtctaagctgccttctgcggggcttgccttctggccatgcccttcttctctcccttgcacctgtacctcttggtctttgaataaagcctgagtaggaaggctagcaaaaaaaaaaaaaaaaaaaaaaaaaaaaaaaaaaaaaaaaaaaaaaaaaaaaaaaaaaaaaaaaaaaaaaaaaaaaaaaagcccagccggctccccaacctctaccgaggagggcacctctgagtccgccacccccgagagcggccctggcacctccaccgagcccagcgagggcagcgcacccggcagccctgccggcagccccacctccacagaggagggaaccagcaccgagcccagcgaaggcagcgccccaggcaccagcaccgagcctagtgagcaggagattaaacggatcaacaagatcagaagaagacttgtgaaagacagcaacaccaagaaggccggcaagacaggccccatgaaaaccctgctggttagagtgatgacacccgatctgagagagcggctggaaaacctgagaaagaagcctgaaaatatcccccagcccatcagcaatacatctagagccaacctgaataagctgctgaccgattacaccgaaatgaagaaggcgatcctgcatgtgtactgggaagagttccagaaggaccctgtgggcctgatgagccgggtggcccagcctgccagcaagaagatcgatcagaacaagctgaaacctgagatggacgagaagggcaacctgaccaccgccggctttgcctgctctcagtgtggccagcccctgttcgtgtacaagctggagcaggtgtctgagaagggcaaggcttacaccaactacttcggacggtgcaatgtggccgagcacgaaaagctgatcctgctggcccagctgaagcccgagaaggatagcgacgaagccgtgacatatagcctgggaaagtttgggcagagggccctggatttctacagcattcatgtgaccaaggagtccacccaccccgtgaagcccctggcccagatcgccggaaacagatacgcctccggacctgtgggaaaggccctgagcgacgcatgtatgggcacaatcgcctccttcctgtctaagtaccaggacatcatcatcgaacaccagaaggtggtgaagggcaaccagaagagactggagagcctgcgggagctggccggcaaggaaaacctggaataccctagcgtgaccctgccacctcagcctcacaccaaggagggcgttgatgcctacaacgaagtgatcgcccgggtgcgaatgtgggtgaacctgaacctgtggcagaagctgaagctaagcagagatgatgccaagcctctgctgagactgaagggattcccttcctttcctctggtcgagagacaggccaacgaagtggactggtgggacatggtgtgtaacgtgaagaagctgatcaacgagaaaaaggaggatggcaaggtgttttggcagaatctggctggctacaagagacaggaagccctgagaccatacctgagcagcgaggaagatcggaagaagggaaagaaattcgctcggtaccagctgggcgacctgctgctgcacctggaaaagaagcacggcgaggactggggaaaggtgtacgacgaggcctgggagcggattgacaagaaagtggaaggcctgagcaagcacatcaagctggaagaggaacggagaagcgaggacgcccagagcaaggccgccctgaccgactggctgcgggctaaggccagcttcgtgatcgagggcctgaaggaggccgacaaggacgagttctgcagatgcgagctgaagctgcagaagtggtacggggacctgcggggaaagcccttcgccatcgaagccgagaacagcatcctggacatcagcggcttcagcaagcagtacaactgtgccttcatctggcagaaggacggcgtgaagaagctgaacctgtacctgatcatcaactacttcaagggcggcaagctgcggttcaagaagatcaaacctgaagccttcgaagccaacagattctacaccgtgatcaacaaaaagagcggcgagatcgtgcccatggaggtgaacttcaacttcgacgaccccaacctgatcatcctgcctctggcctttggcaagagacagggcagagaattcatctggaacgacctgctgtccctggaaaccggcagcctgaagctggccaacggaagagtgatcgagaagacactgtacaacagaagaacccggcaggatgagcctgccctgttcgtggccctgaccttcgagcggcgggaggtcctggactcctccaatatcaaaccaatgaacctgatcggcgtggcaagaggcgaaaacatccccgccgtgatcgccctgaccgaccccgagggctgcccactgagccggtttaaggatagcctgggaaacccaacccacatcctgagaatcggcgagagctataaggagaagcagcggaccatccaggccaagaaggaggtggagcagcggagagccggcggctacagccggaagtacgccagcaaagccaagaatctggcagacgatatggtgagaaacaccgctagagatctgctgtactacgccgtgacccaggatgccatgctgatcttcgccaacctgagccggggcttcggccggcagggcaagcggaccttcatggccgagagacagtacacacggatggaggactggctgaccgccaagctggcctacgagggcctgagcaagacctacctgtccaagacactggcccagtacacctccaagacatgcagcaactgtgggtttaccatcaccagcgccgactacgacagggtgctggagaagctgaagaagacagcaacaggctggatgaccacaattaacggcaaggagctgaaggtggagggccagattacctactacaacagatacaagagacagaacgtagtcaaggacctgtccgtcgagctggatagactgagcgaagaatctgtgaacaacgacatctcctcctggacaaagggcagaagcggagaagctctgagcctcctgaagaaaagattctcccatagacccgtgcaggagaagttcgtgtgcctgaactgcggcttcgagacacacgcagccgagcaagccgccctgaacatcgccagatcctggctgttcctgcggagccaggagtacaagaaataccagacaaacaagacaaccggcaacaccgataagagagccttcgtcgagacctggcagtccttttaccggaagaagcttaaggaggtgtggaaacctgccgtgcggtctggcggatctggcggaggctccaccagccccaagaaaaagagaaaagtctaagctgccttctgcggggcttgccttctggccatgcccttcttctctcccttgcacctgtacctcttggtctttgaataaagcctgagtaggaaggctagcaaaaaaaaaaaaaaaaaaaaaaaaaaaaaaaaaaaaaaaaaaaaaaaaaaaaaaaaaaaaaaaaaaaaaaaaaaaaaaaa

SEQ ID NO: 9166 - RNA, 8787 nt, synthetic construct
  source 1..8787: mol_type = other RNA
aggaaataagagagaaaagaagagtaagaagaaatataagagccaccatggcccctaagaagaagcgtaaagtgagccggatgaaccacgaccaggagttcgacccccctaaggtgtaccctcccgtccccgccgagaagagaaagcccatccgggtcctgagcctgttcgatggcatcgccaccggtctgctggtgctgaaggacctgggcatccaggtggataggtacattgcctccgaggtgtgcgaggactccatcaccgtgggaatggtgcgtcatcagggcaagatcatgtacgtgggcgacgtgcggagcgtgacacagaagcatatccaggagtggggccctttcgacctggtgatcggcggcagcccttgcaatgacctgagcatcgtgaacccagcccggaagggcctgtacgagggaaccggcagactgttcttcgagttttacagactgctgcacgacgcccggcctaaggaaggcgacgaccggcccttcttttggctgttcgagaatgtggtggccatgggagtcagcgacaagcgggatattagccggttcctggagagcaaccccgtgatgatcgatgccaaggaagtgagcgccgcccaccgggccagatacttctggggcaatctgcctggcatgaacagacccctggccagcaccgtgaacgacaagctggagctgcaggagtgcctggagcacggccggatcgccaagttcagcaaggtgagaaccatcaccacccgaagcaacagcatcaaacaaggcaaggaccagcactttcctgtgttcatgaacgagaaggaggacatcctgtggtgtaccgagatggagagagtgttcgggttcccagtccactacacagatgtcagcaacatgtctagactggccagacagagactgctgggaagaagctggtccgtccctgtgatcagacacctgttcgcccctctgaaggagtacttcgcctgcgtgagcagcggcaacagcaacgccaacagccggggccccagcttctctagcggcctggtgccactgtccctgagagggagccacatgggccccatggagatctacaaaaccgtgagcgcctggaagcggcagcctgtgcgcgtgctgagcctgtttcggaatatcgataaagtcctgaaaagcctgggattcctggagagcggctctggctccggcggtggcaccctgaagtacgtggaggatgtgacaaacgtggtcagacgggatgtggagaagtggggccccttcgatctggtgtacggcagcacccaacccctgggcagctcttgtgaccggtgccctggctggtacatgtttcagttccaccggatcctgcagtacgccctgccgagacaggagtcccagcggccattcttttggattttcatggacaacttgctgctgaccgaggatgaccaggaaactaccactcggttcctgcagaccgaagccgtgaccctgcaggacgtgagaggccgggactaccagaacgccatgcgggtgtggtccaacatccctggactgaaaagcaagcacgcacctctgacccctaaagaagaggagtacctgcaggcccaggtgcggagcagaagcaagctggacgcccctaaggtggatctgctggtgaagaattgcctcctgcccctgagagagtacttcaagtatttcagccagaatagtctgcccctgggaggcagcggcggcggcaggcccagggccctgaagttcgtggacgtggccgtgtacttcagcagcgaggagtggggctgcctgaggcccgcccagagggccctgtacagggacgtgatgagggagacctacggccacctgggcgccctgggcttccccggccccaagcccgccctgatcagctggatggagcaggagagcgaggcctggagcagcgccgcccaggaccccgagaagggcgagaacctgggcggcgccaggggcggcccaagcagcggcgcccctcctcccagcggcggcaggcggcccaagcagcggcgcccctcctcccagcggcggcagcccagccggctccccaacctctaccgaggagggcacctctgagtccgccacccccgagagcggccctggcacctccaccgagcccagcgagggcagcgcacccggcagccctgccggcagccccacctccacagaggagggaaccagcaccgagcccagcgaaggcagcgccccaggcaccagcaccgagcctagtgagcaggagattaaacggatcaacaagatcagaagaagacttgtgaaagacagcaacaccaagaaggccggcaagacaggccccatgaaaaccctgctggttagagtgatgacacccgatctgagagagcggctggaaaacctgagaaagaagcctgaaaatatcccccagcccatcagcaatacatctagagccaacctgaataagctgctgaccgattacaccgaaatgaagaaggcgatcctgcatgtgtactgggaagagttccagaaggaccctgtgggcctgatgagccgggtggcccagcctgccagcaagaagatcgatcagaacaagctgaaacctgagatggacgagaagggcaacctgaccaccgccggctttgcctgctctcagtgtggccagcccctgttcgtgtacaagctggagcaggtgtctgagaagggcaaggcttacaccaactacttcggacggtgcaatgtggccgagcacgaaaagctgatcctgctggcccagctgaagcccgagaaggatagcgacgaagccgtgacatatagcctgggaaagtttgggcagagggccctggatttctacagcattcatgtgaccaaggagtccacccaccccgtgaagcccctggcccagatcgccggaaacagatacgcctccggacctgtgggaaaggccctgagcgacgcatgtatgggcacaatcgcctccttcctgtctaagtaccaggacatcatcatcgaacaccagaaggtggtgaagggcaaccagaagagactggagagcctgcgggagctggccggcaaggaaaacctggaataccctagcgtgaccctgccacctcagcctcacaccaaggagggcgttgatgcctacaacgaagtgatcgcccgggtgcgaatgtgggtgaacctgaacctgtggcagaagctgaagctaagcagagatgatgccaagcctctgctgagactgaagggattcccttcctttcctctggtcgagagacaggccaacgaagtggactggtgggacatggtgtgtaacgtgaagaagctgatcaacgagaaaaaggaggatggcaaggtgttttggcagaatctggctggctacaagagacaggaagccctgagaccatacctgagcagcgaggaagatcggaagaagggaaagaaattcgctcggtaccagctgggcgacctgctgctgcacctggaaaagaagcacggcgaggactggggaaaggtgtacgacgaggcctgggagcggattgacaagaaagtggaaggcctgagcaagcacatcaagctggaagaggaacggagaagcgaggacgcccagagcaaggccgccctgaccgactggctgcgggctaaggccagcttcgtgatcgagggcctgaaggaggccgacaaggacgagttctgcagatgcgagctgaagctgcagaagtggtacggggacctgcggggaaagcccttcgccatcgaagccgagaacagcatcctggacatcagcggcttcagcaagcagtacaactgtgccttcatctggcagaaggacggcgtgaagaagctgaacctgtacctgatcatcaactacttcaagggcggcaagctgcggttcaagaagatcaaacctgaagccttcgaagccaacagattctacaccgtgatcaacaaaaagagcggcgagatcgtgcccatggaggtgaacttcaacttcgacgaccccaacctgatcatcctgcctctggcctttggcaagagacagggcagagaattcatctggaacgacctgctgtccctggaaaccggcagcctgaagctggccaacggaagagtgatcgagaagacactgtacaacagaagaacccggcaggatgagcctgccctgttcgtggccctgaccttcgagcggcgggaggtcctggactcctccaatatcaaaccaatgaacctgatcggcgtggcaagaggcgaaaacatccccgccgtgatcgccctgaccgaccccgagggctgcccactgagccggtttaaggatagcctgggaaacccaacccacatcctgagaatcggcgagagctataaggagaagcagcggaccatccaggccaagaaggaggtggagcagcggagagccggcggctacagccggaagtacgccagcaaagccaagaatctggcagacgatatggtgagaaacaccgctagagatctgctgtactacgccgtgacccaggatgccatgctgatcttcgccaacctgagccggggcttcggccggcagggcaagcggaccttcatggccgagagacagtacacacggatggaggactggctgaccgccaagctggcctacgagggcctgagcaagacctacctgtccaagacactggcccagtacacctccaagacatgcagcaactgtgggtttaccatcaccagcgccgactacgacagggtgctggagaagctgaagaagacagcaacaggctggatgaccacaattaacggcaaggagctgaaggtggagggccagattacctactacaacagatacaagagacagaacgtagtcaaggacctgtccgtcgagctggatagactgagcgaagaatctgtgaacaacgacatctcctcctggacaaagggcagaagcggagaagctctgagcctcctgaagaaaagattctcccatagacccgtgcaggagaagttcgtgtgcctgaactgcggcttcgagacacacgcagccgagcaagccgccctgaacatcgccagatcctggctgttcctgcggagccaggagtacaagaaataccagacaaacaagacaaccggcaacaccgataagagagccttcgtcgagacctggcagtccttttaccggaagaagcttaaggaggtgtggaaacctgccgtgcggtctggcggatctggcggaggctccaccagccccaagaaaaagagaaaagtctaagctgccttctgcggggcttgccttctggccatgcccttcttctctcccttgcacctgtacctcttggtctttgaataaagcctgagtaggaaggctagcaaaaaaaaaaaaaaaaaaaaaaaaaaaaaaaaaaaaaaaaaaaaaaaaaaaaaaaaaaaaaaaaaaaaaaaaaaaaaaaagcccagccggctccccaacctctaccgaggagggcacctctgagtccgccacccccgagagcggccctggcacctccaccgagcccagcgagggcagcgcacccggcagccctgccggcagccccacctccacagaggagggaaccagcaccgagcccagcgaaggcagcgccccaggcaccagcaccgagcctagtgagcaggagattaaacggatcaacaagatcagaagaagacttgtgaaagacagcaacaccaagaaggccggcaagacaggccccatgaaaaccctgctggttagagtgatgacacccgatctgagagagcggctggaaaacctgagaaagaagcctgaaaatatcccccagcccatcagcaatacatctagagccaacctgaataagctgctgaccgattacaccgaaatgaagaaggcgatcctgcatgtgtactgggaagagttccagaaggaccctgtgggcctgatgagccgggtggcccagcctgccagcaagaagatcgatcagaacaagctgaaacctgagatggacgagaagggcaacctgaccaccgccggctttgcctgctctcagtgtggccagcccctgttcgtgtacaagctggagcaggtgtctgagaagggcaaggcttacaccaactacttcggacggtgcaatgtggccgagcacgaaaagctgatcctgctggcccagctgaagcccgagaaggatagcgacgaagccgtgacatatagcctgggaaagtttgggcagagggccctggatttctacagcattcatgtgaccaaggagtccacccaccccgtgaagcccctggcccagatcgccggaaacagatacgcctccggacctgtgggaaaggccctgagcgacgcatgtatgggcacaatcgcctccttcctgtctaagtaccaggacatcatcatcgaacaccagaaggtggtgaagggcaaccagaagagactggagagcctgcgggagctggccggcaaggaaaacctggaataccctagcgtgaccctgccacctcagcctcacaccaaggagggcgttgatgcctacaacgaagtgatcgcccgggtgcgaatgtgggtgaacctgaacctgtggcagaagctgaagctaagcagagatgatgccaagcctctgctgagactgaagggattcccttcctttcctctggtcgagagacaggccaacgaagtggactggtgggacatggtgtgtaacgtgaagaagctgatcaacgagaaaaaggaggatggcaaggtgttttggcagaatctggctggctacaagagacaggaagccctgagaccatacctgagcagcgaggaagatcggaagaagggaaagaaattcgctcggtaccagctgggcgacctgctgctgcacctggaaaagaagcacggcgaggactggggaaaggtgtacgacgaggcctgggagcggattgacaagaaagtggaaggcctgagcaagcacatcaagctggaagaggaacggagaagcgaggacgcccagagcaaggccgccctgaccgactggctgcgggctaaggccagcttcgtgatcgagggcctgaaggaggccgacaaggacgagttctgcagatgcgagctgaagctgcagaagtggtacggggacctgcggggaaagcccttcgccatcgaagccgagaacagcatcctggacatcagcggcttcagcaagcagtacaactgtgccttcatctggcagaaggacggcgtgaagaagctgaacctgtacctgatcatcaactacttcaagggcggcaagctgcggttcaagaagatcaaacctgaagccttcgaagccaacagattctacaccgtgatcaacaaaaagagcggcgagatcgtgcccatggaggtgaacttcaacttcgacgaccccaacctgatcatcctgcctctggcctttggcaagagacagggcagagaattcatctggaacgacctgctgtccctggaaaccggcagcctgaagctggccaacggaagagtgatcgagaagacactgtacaacagaagaacccggcaggatgagcctgccctgttcgtggccctgaccttcgagcggcgggaggtcctggactcctccaatatcaaaccaatgaacctgatcggcgtggcaagaggcgaaaacatccccgccgtgatcgccctgaccgaccccgagggctgcccactgagccggtttaaggatagcctgggaaacccaacccacatcctgagaatcggcgagagctataaggagaagcagcggaccatccaggccaagaaggaggtggagcagcggagagccggcggctacagccggaagtacgccagcaaagccaagaatctggcagacgatatggtgagaaacaccgctagagatctgctgtactacgccgtgacccaggatgccatgctgatcttcgccaacctgagccggggcttcggccggcagggcaagcggaccttcatggccgagagacagtacacacggatggaggactggctgaccgccaagctggcctacgagggcctgagcaagacctacctgtccaagacactggcccagtacacctccaagacatgcagcaactgtgggtttaccatcaccagcgccgactacgacagggtgctggagaagctgaagaagacagcaacaggctggatgaccacaattaacggcaaggagctgaaggtggagggccagattacctactacaacagatacaagagacagaacgtagtcaaggacctgtccgtcgagctggatagactgagcgaagaatctgtgaacaacgacatctcctcctggacaaagggcagaagcggagaagctctgagcctcctgaagaaaagattctcccatagacccgtgcaggagaagttcgtgtgcctgaactgcggcttcgagacacacgcagccgagcaagccgccctgaacatcgccagatcctggctgttcctgcggagccaggagtacaagaaataccagacaaacaagacaaccggcaacaccgataagagagccttcgtcgagacctggcagtccttttaccggaagaagcttaaggaggtgtggaaacctgccgtgcggtctggcggatctggcggaggctccaccagccccaagaaaaagagaaaagtctaagctgccttctgcggggcttgccttctggccatgcccttcttctctcccttgcacctgtacctcttggtctttgaataaagcctgagtaggaaggctagcaaaaaaaaaaaaaaaaaaaaaaaaaaaaaaaaaaaaaaaaaaaaaaaaaaaaaaaaaaaaaaaaaaaaaaaaaaaaaaaa

SEQ ID NO: 9167 - RNA, 8787 nt, synthetic construct
  source 1..8787: mol_type = other RNA
aggaaataagagagaaaagaagagtaagaagaaatataagagccaccatggcccctaagaagaagcgtaaagtgagccggatgaaccacgaccaggagttcgacccccctaaggtgtaccctcccgtccccgccgagaagagaaagcccatccgggtcctgagcctgttcgatggcatcgccaccggtctgctggtgctgaaggacctgggcatccaggtggataggtacattgcctccgaggtgtgcgaggactccatcaccgtgggaatggtgcgtcatcagggcaagatcatgtacgtgggcgacgtgcggagcgtgacacagaagcatatccaggagtggggccctttcgacctggtgatcggcggcagcccttgcaatgacctgagcatcgtgaacccagcccggaagggcctgtacgagggaaccggcagactgttcttcgagttttacagactgctgcacgacgcccggcctaaggaaggcgacgaccggcccttcttttggctgttcgagaatgtggtggccatgggagtcagcgacaagcgggatattagccggttcctggagagcaaccccgtgatgatcgatgccaaggaagtgagcgccgcccaccgggccagatacttctggggcaatctgcctggcatgaacagacccctggccagcaccgtgaacgacaagctggagctgcaggagtgcctggagcacggccggatcgccaagttcagcaaggtgagaaccatcaccacccgaagcaacagcatcaaacaaggcaaggaccagcactttcctgtgttcatgaacgagaaggaggacatcctgtggtgtaccgagatggagagagtgttcgggttcccagtccactacacagatgtcagcaacatgtctagactggccagacagagactgctgggaagaagctggtccgtccctgtgatcagacacctgttcgcccctctgaaggagtacttcgcctgcgtgagcagcggcaacagcaacgccaacagccggggccccagcttctctagcggcctggtgccactgtccctgagagggagccacatgggccccatggagatctacaaaaccgtgagcgcctggaagcggcagcctgtgcgcgtgctgagcctgtttcggaatatcgataaagtcctgaaaagcctgggattcctggagagcggctctggctccggcggtggcaccctgaagtacgtggaggatgtgacaaacgtggtcagacgggatgtggagaagtggggccccttcgatctggtgtacggcagcacccaacccctgggcagctcttgtgaccggtgccctggctggtacatgtttcagttccaccggatcctgcagtacgccctgccgagacaggagtcccagcggccattcttttggattttcatggacaacttgctgctgaccgaggatgaccaggaaactaccactcggttcctgcagaccgaagccgtgaccctgcaggacgtgagaggccgggactaccagaacgccatgcgggtgtggtccaacatccctggactgaaaagcaagcacgcacctctgacccctaaagaagaggagtacctgcaggcccaggtgcggagcagaagcaagctggacgcccctaaggtggatctgctggtgaagaattgcctcctgcccctgagagagtacttcaagtatttcagccagaatagtctgcccctgggaggcagcggcggcggcgagcccgtgaccttcgaggacgtggccgtgtacttcagccagaaccagtgggccagcctggacagcgcccagagggccctgtacagggaggtgatgctggagaactacgccaacgtggccagcctggtgagccccttccccaggcccgacctgatcagccagctggagaggggcgaggccccctgggaccccaacccctgggaggccgaggacctgaggggcatctgccccggcggcgagaggggcggcccaagcagcggcgcccctcctcccagcggcggcaggcggcccaagcagcggcgcccctcctcccagcggcggcagcccagccggctccccaacctctaccgaggagggcacctctgagtccgccacccccgagagcggccctggcacctccaccgagcccagcgagggcagcgcacccggcagccctgccggcagccccacctccacagaggagggaaccagcaccgagcccagcgaaggcagcgccccaggcaccagcaccgagcctagtgagcaggagattaaacggatcaacaagatcagaagaagacttgtgaaagacagcaacaccaagaaggccggcaagacaggccccatgaaaaccctgctggttagagtgatgacacccgatctgagagagcggctggaaaacctgagaaagaagcctgaaaatatcccccagcccatcagcaatacatctagagccaacctgaataagctgctgaccgattacaccgaaatgaagaaggcgatcctgcatgtgtactgggaagagttccagaaggaccctgtgggcctgatgagccgggtggcccagcctgccagcaagaagatcgatcagaacaagctgaaacctgagatggacgagaagggcaacctgaccaccgccggctttgcctgctctcagtgtggccagcccctgttcgtgtacaagctggagcaggtgtctgagaagggcaaggcttacaccaactacttcggacggtgcaatgtggccgagcacgaaaagctgatcctgctggcccagctgaagcccgagaaggatagcgacgaagccgtgacatatagcctgggaaagtttgggcagagggccctggatttctacagcattcatgtgaccaaggagtccacccaccccgtgaagcccctggcccagatcgccggaaacagatacgcctccggacctgtgggaaaggccctgagcgacgcatgtatgggcacaatcgcctccttcctgtctaagtaccaggacatcatcatcgaacaccagaaggtggtgaagggcaaccagaagagactggagagcctgcgggagctggccggcaaggaaaacctggaataccctagcgtgaccctgccacctcagcctcacaccaaggagggcgttgatgcctacaacgaagtgatcgcccgggtgcgaatgtgggtgaacctgaacctgtggcagaagctgaagctaagcagagatgatgccaagcctctgctgagactgaagggattcccttcctttcctctggtcgagagacaggccaacgaagtggactggtgggacatggtgtgtaacgtgaagaagctgatcaacgagaaaaaggaggatggcaaggtgttttggcagaatctggctggctacaagagacaggaagccctgagaccatacctgagcagcgaggaagatcggaagaagggaaagaaattcgctcggtaccagctgggcgacctgctgctgcacctggaaaagaagcacggcgaggactggggaaaggtgtacgacgaggcctgggagcggattgacaagaaagtggaaggcctgagcaagcacatcaagctggaagaggaacggagaagcgaggacgcccagagcaaggccgccctgaccgactggctgcgggctaaggccagcttcgtgatcgagggcctgaaggaggccgacaaggacgagttctgcagatgcgagctgaagctgcagaagtggtacggggacctgcggggaaagcccttcgccatcgaagccgagaacagcatcctggacatcagcggcttcagcaagcagtacaactgtgccttcatctggcagaaggacggcgtgaagaagctgaacctgtacctgatcatcaactacttcaagggcggcaagctgcggttcaagaagatcaaacctgaagccttcgaagccaacagattctacaccgtgatcaacaaaaagagcggcgagatcgtgcccatggaggtgaacttcaacttcgacgaccccaacctgatcatcctgcctctggcctttggcaagagacagggcagagaattcatctggaacgacctgctgtccctggaaaccggcagcctgaagctggccaacggaagagtgatcgagaagacactgtacaacagaagaacccggcaggatgagcctgccctgttcgtggccctgaccttcgagcggcgggaggtcctggactcctccaatatcaaaccaatgaacctgatcggcgtggcaagaggcgaaaacatccccgccgtgatcgccctgaccgaccccgagggctgcccactgagccggtttaaggatagcctgggaaacccaacccacatcctgagaatcggcgagagctataaggagaagcagcggaccatccaggccaagaaggaggtggagcagcggagagccggcggctacagccggaagtacgccagcaaagccaagaatctggcagacgatatggtgagaaacaccgctagagatctgctgtactacgccgtgacccaggatgccatgctgatcttcgccaacctgagccggggcttcggccggcagggcaagcggaccttcatggccgagagacagtacacacggatggaggactggctgaccgccaagctggcctacgagggcctgagcaagacctacctgtccaagacactggcccagtacacctccaagacatgcagcaactgtgggtttaccatcaccagcgccgactacgacagggtgctggagaagctgaagaagacagcaacaggctggatgaccacaattaacggcaaggagctgaaggtggagggccagattacctactacaacagatacaagagacagaacgtagtcaaggacctgtccgtcgagctggatagactgagcgaagaatctgtgaacaacgacatctcctcctggacaaagggcagaagcggagaagctctgagcctcctgaagaaaagattctcccatagacccgtgcaggagaagttcgtgtgcctgaactgcggcttcgagacacacgcagccgagcaagccgccctgaacatcgccagatcctggctgttcctgcggagccaggagtacaagaaataccagacaaacaagacaaccggcaacaccgataagagagccttcgtcgagacctggcagtccttttaccggaagaagcttaaggaggtgtggaaacctgccgtgcggtctggcggatctggcggaggctccaccagccccaagaaaaagagaaaagtctaagctgccttctgcggggcttgccttctggccatgcccttcttctctcccttgcacctgtacctcttggtctttgaataaagcctgagtaggaaggctagcaaaaaaaaaaaaaaaaaaaaaaaaaaaaaaaaaaaaaaaaaaaaaaaaaaaaaaaaaaaaaaaaaaaaaaaaaaaaaaaagcccagccggctccccaacctctaccgaggagggcacctctgagtccgccacccccgagagcggccctggcacctccaccgagcccagcgagggcagcgcacccggcagccctgccggcagccccacctccacagaggagggaaccagcaccgagcccagcgaaggcagcgccccaggcaccagcaccgagcctagtgagcaggagattaaacggatcaacaagatcagaagaagacttgtgaaagacagcaacaccaagaaggccggcaagacaggccccatgaaaaccctgctggttagagtgatgacacccgatctgagagagcggctggaaaacctgagaaagaagcctgaaaatatcccccagcccatcagcaatacatctagagccaacctgaataagctgctgaccgattacaccgaaatgaagaaggcgatcctgcatgtgtactgggaagagttccagaaggaccctgtgggcctgatgagccgggtggcccagcctgccagcaagaagatcgatcagaacaagctgaaacctgagatggacgagaagggcaacctgaccaccgccggctttgcctgctctcagtgtggccagcccctgttcgtgtacaagctggagcaggtgtctgagaagggcaaggcttacaccaactacttcggacggtgcaatgtggccgagcacgaaaagctgatcctgctggcccagctgaagcccgagaaggatagcgacgaagccgtgacatatagcctgggaaagtttgggcagagggccctggatttctacagcattcatgtgaccaaggagtccacccaccccgtgaagcccctggcccagatcgccggaaacagatacgcctccggacctgtgggaaaggccctgagcgacgcatgtatgggcacaatcgcctccttcctgtctaagtaccaggacatcatcatcgaacaccagaaggtggtgaagggcaaccagaagagactggagagcctgcgggagctggccggcaaggaaaacctggaataccctagcgtgaccctgccacctcagcctcacaccaaggagggcgttgatgcctacaacgaagtgatcgcccgggtgcgaatgtgggtgaacctgaacctgtggcagaagctgaagctaagcagagatgatgccaagcctctgctgagactgaagggattcccttcctttcctctggtcgagagacaggccaacgaagtggactggtgggacatggtgtgtaacgtgaagaagctgatcaacgagaaaaaggaggatggcaaggtgttttggcagaatctggctggctacaagagacaggaagccctgagaccatacctgagcagcgaggaagatcggaagaagggaaagaaattcgctcggtaccagctgggcgacctgctgctgcacctggaaaagaagcacggcgaggactggggaaaggtgtacgacgaggcctgggagcggattgacaagaaagtggaaggcctgagcaagcacatcaagctggaagaggaacggagaagcgaggacgcccagagcaaggccgccctgaccgactggctgcgggctaaggccagcttcgtgatcgagggcctgaaggaggccgacaaggacgagttctgcagatgcgagctgaagctgcagaagtggtacggggacctgcggggaaagcccttcgccatcgaagccgagaacagcatcctggacatcagcggcttcagcaagcagtacaactgtgccttcatctggcagaaggacggcgtgaagaagctgaacctgtacctgatcatcaactacttcaagggcggcaagctgcggttcaagaagatcaaacctgaagccttcgaagccaacagattctacaccgtgatcaacaaaaagagcggcgagatcgtgcccatggaggtgaacttcaacttcgacgaccccaacctgatcatcctgcctctggcctttggcaagagacagggcagagaattcatctggaacgacctgctgtccctggaaaccggcagcctgaagctggccaacggaagagtgatcgagaagacactgtacaacagaagaacccggcaggatgagcctgccctgttcgtggccctgaccttcgagcggcgggaggtcctggactcctccaatatcaaaccaatgaacctgatcggcgtggcaagaggcgaaaacatccccgccgtgatcgccctgaccgaccccgagggctgcccactgagccggtttaaggatagcctgggaaacccaacccacatcctgagaatcggcgagagctataaggagaagcagcggaccatccaggccaagaaggaggtggagcagcggagagccggcggctacagccggaagtacgccagcaaagccaagaatctggcagacgatatggtgagaaacaccgctagagatctgctgtactacgccgtgacccaggatgccatgctgatcttcgccaacctgagccggggcttcggccggcagggcaagcggaccttcatggccgagagacagtacacacggatggaggactggctgaccgccaagctggcctacgagggcctgagcaagacctacctgtccaagacactggcccagtacacctccaagacatgcagcaactgtgggtttaccatcaccagcgccgactacgacagggtgctggagaagctgaagaagacagcaacaggctggatgaccacaattaacggcaaggagctgaaggtggagggccagattacctactacaacagatacaagagacagaacgtagtcaaggacctgtccgtcgagctggatagactgagcgaagaatctgtgaacaacgacatctcctcctggacaaagggcagaagcggagaagctctgagcctcctgaagaaaagattctcccatagacccgtgcaggagaagttcgtgtgcctgaactgcggcttcgagacacacgcagccgagcaagccgccctgaacatcgccagatcctggctgttcctgcggagccaggagtacaagaaataccagacaaacaagacaaccggcaacaccgataagagagccttcgtcgagacctggcagtccttttaccggaagaagcttaaggaggtgtggaaacctgccgtgcggtctggcggatctggcggaggctccaccagccccaagaaaaagagaaaagtctaagctgccttctgcggggcttgccttctggccatgcccttcttctctcccttgcacctgtacctcttggtctttgaataaagcctgagtaggaaggctagcaaaaaaaaaaaaaaaaaaaaaaaaaaaaaaaaaaaaaaaaaaaaaaaaaaaaaaaaaaaaaaaaaaaaaaaaaaaaaaaa

SEQ ID NO: 9168 - RNA, 8787 nt, synthetic construct
  source 1..8787: mol_type = other RNA
aggaaataagagagaaaagaagagtaagaagaaatataagagccaccatggcccctaagaagaagcgtaaagtgagccggatgaaccacgaccaggagttcgacccccctaaggtgtaccctcccgtccccgccgagaagagaaagcccatccgggtcctgagcctgttcgatggcatcgccaccggtctgctggtgctgaaggacctgggcatccaggtggataggtacattgcctccgaggtgtgcgaggactccatcaccgtgggaatggtgcgtcatcagggcaagatcatgtacgtgggcgacgtgcggagcgtgacacagaagcatatccaggagtggggccctttcgacctggtgatcggcggcagcccttgcaatgacctgagcatcgtgaacccagcccggaagggcctgtacgagggaaccggcagactgttcttcgagttttacagactgctgcacgacgcccggcctaaggaaggcgacgaccggcccttcttttggctgttcgagaatgtggtggccatgggagtcagcgacaagcgggatattagccggttcctggagagcaaccccgtgatgatcgatgccaaggaagtgagcgccgcccaccgggccagatacttctggggcaatctgcctggcatgaacagacccctggccagcaccgtgaacgacaagctggagctgcaggagtgcctggagcacggccggatcgccaagttcagcaaggtgagaaccatcaccacccgaagcaacagcatcaaacaaggcaaggaccagcactttcctgtgttcatgaacgagaaggaggacatcctgtggtgtaccgagatggagagagtgttcgggttcccagtccactacacagatgtcagcaacatgtctagactggccagacagagactgctgggaagaagctggtccgtccctgtgatcagacacctgttcgcccctctgaaggagtacttcgcctgcgtgagcagcggcaacagcaacgccaacagccggggccccagcttctctagcggcctggtgccactgtccctgagagggagccacatgggccccatggagatctacaaaaccgtgagcgcctggaagcggcagcctgtgcgcgtgctgagcctgtttcggaatatcgataaagtcctgaaaagcctgggattcctggagagcggctctggctccggcggtggcaccctgaagtacgtggaggatgtgacaaacgtggtcagacgggatgtggagaagtggggccccttcgatctggtgtacggcagcacccaacccctgggcagctcttgtgaccggtgccctggctggtacatgtttcagttccaccggatcctgcagtacgccctgccgagacaggagtcccagcggccattcttttggattttcatggacaacttgctgctgaccgaggatgaccaggaaactaccactcggttcctgcagaccgaagccgtgaccctgcaggacgtgagaggccgggactaccagaacgccatgcgggtgtggtccaacatccctggactgaaaagcaagcacgcacctctgacccctaaagaagaggagtacctgcaggcccaggtgcggagcagaagcaagctggacgcccctaaggtggatctgctggtgaagaattgcctcctgcccctgagagagtacttcaagtatttcagccagaatagtctgcccctgggaggcagcggcggcggcatccacgagagcgtgaccttcgaggacgtggccgtgaacttcaccgacagggagtggcagtgcctgacccacgcccagaggcacctgtacaaggacgtgatgctggagaactacggcaacatggtgagcctgggcttccccttccccaagccccccctgatcagccacctggagagggagaccgagccctgggtgcaggacctgcaggacagggagagcctgagcagcttctaccccgtgagcggcggcccaagcagcggcgcccctcctcccagcggcggcaggcggcccaagcagcggcgcccctcctcccagcggcggcagcccagccggctccccaacctctaccgaggagggcacctctgagtccgccacccccgagagcggccctggcacctccaccgagcccagcgagggcagcgcacccggcagccctgccggcagccccacctccacagaggagggaaccagcaccgagcccagcgaaggcagcgccccaggcaccagcaccgagcctagtgagcaggagattaaacggatcaacaagatcagaagaagacttgtgaaagacagcaacaccaagaaggccggcaagacaggccccatgaaaaccctgctggttagagtgatgacacccgatctgagagagcggctggaaaacctgagaaagaagcctgaaaatatcccccagcccatcagcaatacatctagagccaacctgaataagctgctgaccgattacaccgaaatgaagaaggcgatcctgcatgtgtactgggaagagttccagaaggaccctgtgggcctgatgagccgggtggcccagcctgccagcaagaagatcgatcagaacaagctgaaacctgagatggacgagaagggcaacctgaccaccgccggctttgcctgctctcagtgtggccagcccctgttcgtgtacaagctggagcaggtgtctgagaagggcaaggcttacaccaactacttcggacggtgcaatgtggccgagcacgaaaagctgatcctgctggcccagctgaagcccgagaaggatagcgacgaagccgtgacatatagcctgggaaagtttgggcagagggccctggatttctacagcattcatgtgaccaaggagtccacccaccccgtgaagcccctggcccagatcgccggaaacagatacgcctccggacctgtgggaaaggccctgagcgacgcatgtatgggcacaatcgcctccttcctgtctaagtaccaggacatcatcatcgaacaccagaaggtggtgaagggcaaccagaagagactggagagcctgcgggagctggccggcaaggaaaacctggaataccctagcgtgaccctgccacctcagcctcacaccaaggagggcgttgatgcctacaacgaagtgatcgcccgggtgcgaatgtgggtgaacctgaacctgtggcagaagctgaagctaagcagagatgatgccaagcctctgctgagactgaagggattcccttcctttcctctggtcgagagacaggccaacgaagtggactggtgggacatggtgtgtaacgtgaagaagctgatcaacgagaaaaaggaggatggcaaggtgttttggcagaatctggctggctacaagagacaggaagccctgagaccatacctgagcagcgaggaagatcggaagaagggaaagaaattcgctcggtaccagctgggcgacctgctgctgcacctggaaaagaagcacggcgaggactggggaaaggtgtacgacgaggcctgggagcggattgacaagaaagtggaaggcctgagcaagcacatcaagctggaagaggaacggagaagcgaggacgcccagagcaaggccgccctgaccgactggctgcgggctaaggccagcttcgtgatcgagggcctgaaggaggccgacaaggacgagttctgcagatgcgagctgaagctgcagaagtggtacggggacctgcggggaaagcccttcgccatcgaagccgagaacagcatcctggacatcagcggcttcagcaagcagtacaactgtgccttcatctggcagaaggacggcgtgaagaagctgaacctgtacctgatcatcaactacttcaagggcggcaagctgcggttcaagaagatcaaacctgaagccttcgaagccaacagattctacaccgtgatcaacaaaaagagcggcgagatcgtgcccatggaggtgaacttcaacttcgacgaccccaacctgatcatcctgcctctggcctttggcaagagacagggcagagaattcatctggaacgacctgctgtccctggaaaccggcagcctgaagctggccaacggaagagtgatcgagaagacactgtacaacagaagaacccggcaggatgagcctgccctgttcgtggccctgaccttcgagcggcgggaggtcctggactcctccaatatcaaaccaatgaacctgatcggcgtggcaagaggcgaaaacatccccgccgtgatcgccctgaccgaccccgagggctgcccactgagccggtttaaggatagcctgggaaacccaacccacatcctgagaatcggcgagagctataaggagaagcagcggaccatccaggccaagaaggaggtggagcagcggagagccggcggctacagccggaagtacgccagcaaagccaagaatctggcagacgatatggtgagaaacaccgctagagatctgctgtactacgccgtgacccaggatgccatgctgatcttcgccaacctgagccggggcttcggccggcagggcaagcggaccttcatggccgagagacagtacacacggatggaggactggctgaccgccaagctggcctacgagggcctgagcaagacctacctgtccaagacactggcccagtacacctccaagacatgcagcaactgtgggtttaccatcaccagcgccgactacgacagggtgctggagaagctgaagaagacagcaacaggctggatgaccacaattaacggcaaggagctgaaggtggagggccagattacctactacaacagatacaagagacagaacgtagtcaaggacctgtccgtcgagctggatagactgagcgaagaatctgtgaacaacgacatctcctcctggacaaagggcagaagcggagaagctctgagcctcctgaagaaaagattctcccatagacccgtgcaggagaagttcgtgtgcctgaactgcggcttcgagacacacgcagccgagcaagccgccctgaacatcgccagatcctggctgttcctgcggagccaggagtacaagaaataccagacaaacaagacaaccggcaacaccgataagagagccttcgtcgagacctggcagtccttttaccggaagaagcttaaggaggtgtggaaacctgccgtgcggtctggcggatctggcggaggctccaccagccccaagaaaaagagaaaagtctaagctgccttctgcggggcttgccttctggccatgcccttcttctctcccttgcacctgtacctcttggtctttgaataaagcctgagtaggaaggctagcaaaaaaaaaaaaaaaaaaaaaaaaaaaaaaaaaaaaaaaaaaaaaaaaaaaaaaaaaaaaaaaaaaaaaaaaaaaaaaaagcccagccggctccccaacctctaccgaggagggcacctctgagtccgccacccccgagagcggccctggcacctccaccgagcccagcgagggcagcgcacccggcagccctgccggcagccccacctccacagaggagggaaccagcaccgagcccagcgaaggcagcgccccaggcaccagcaccgagcctagtgagcaggagattaaacggatcaacaagatcagaagaagacttgtgaaagacagcaacaccaagaaggccggcaagacaggccccatgaaaaccctgctggttagagtgatgacacccgatctgagagagcggctggaaaacctgagaaagaagcctgaaaatatcccccagcccatcagcaatacatctagagccaacctgaataagctgctgaccgattacaccgaaatgaagaaggcgatcctgcatgtgtactgggaagagttccagaaggaccctgtgggcctgatgagccgggtggcccagcctgccagcaagaagatcgatcagaacaagctgaaacctgagatggacgagaagggcaacctgaccaccgccggctttgcctgctctcagtgtggccagcccctgttcgtgtacaagctggagcaggtgtctgagaagggcaaggcttacaccaactacttcggacggtgcaatgtggccgagcacgaaaagctgatcctgctggcccagctgaagcccgagaaggatagcgacgaagccgtgacatatagcctgggaaagtttgggcagagggccctggatttctacagcattcatgtgaccaaggagtccacccaccccgtgaagcccctggcccagatcgccggaaacagatacgcctccggacctgtgggaaaggccctgagcgacgcatgtatgggcacaatcgcctccttcctgtctaagtaccaggacatcatcatcgaacaccagaaggtggtgaagggcaaccagaagagactggagagcctgcgggagctggccggcaaggaaaacctggaataccctagcgtgaccctgccacctcagcctcacaccaaggagggcgttgatgcctacaacgaagtgatcgcccgggtgcgaatgtgggtgaacctgaacctgtggcagaagctgaagctaagcagagatgatgccaagcctctgctgagactgaagggattcccttcctttcctctggtcgagagacaggccaacgaagtggactggtgggacatggtgtgtaacgtgaagaagctgatcaacgagaaaaaggaggatggcaaggtgttttggcagaatctggctggctacaagagacaggaagccctgagaccatacctgagcagcgaggaagatcggaagaagggaaagaaattcgctcggtaccagctgggcgacctgctgctgcacctggaaaagaagcacggcgaggactggggaaaggtgtacgacgaggcctgggagcggattgacaagaaagtggaaggcctgagcaagcacatcaagctggaagaggaacggagaagcgaggacgcccagagcaaggccgccctgaccgactggctgcgggctaaggccagcttcgtgatcgagggcctgaaggaggccgacaaggacgagttctgcagatgcgagctgaagctgcagaagtggtacggggacctgcggggaaagcccttcgccatcgaagccgagaacagcatcctggacatcagcggcttcagcaagcagtacaactgtgccttcatctggcagaaggacggcgtgaagaagctgaacctgtacctgatcatcaactacttcaagggcggcaagctgcggttcaagaagatcaaacctgaagccttcgaagccaacagattctacaccgtgatcaacaaaaagagcggcgagatcgtgcccatggaggtgaacttcaacttcgacgaccccaacctgatcatcctgcctctggcctttggcaagagacagggcagagaattcatctggaacgacctgctgtccctggaaaccggcagcctgaagctggccaacggaagagtgatcgagaagacactgtacaacagaagaacccggcaggatgagcctgccctgttcgtggccctgaccttcgagcggcgggaggtcctggactcctccaatatcaaaccaatgaacctgatcggcgtggcaagaggcgaaaacatccccgccgtgatcgccctgaccgaccccgagggctgcccactgagccggtttaaggatagcctgggaaacccaacccacatcctgagaatcggcgagagctataaggagaagcagcggaccatccaggccaagaaggaggtggagcagcggagagccggcggctacagccggaagtacgccagcaaagccaagaatctggcagacgatatggtgagaaacaccgctagagatctgctgtactacgccgtgacccaggatgccatgctgatcttcgccaacctgagccggggcttcggccggcagggcaagcggaccttcatggccgagagacagtacacacggatggaggactggctgaccgccaagctggcctacgagggcctgagcaagacctacctgtccaagacactggcccagtacacctccaagacatgcagcaactgtgggtttaccatcaccagcgccgactacgacagggtgctggagaagctgaagaagacagcaacaggctggatgaccacaattaacggcaaggagctgaaggtggagggccagattacctactacaacagatacaagagacagaacgtagtcaaggacctgtccgtcgagctggatagactgagcgaagaatctgtgaacaacgacatctcctcctggacaaagggcagaagcggagaagctctgagcctcctgaagaaaagattctcccatagacccgtgcaggagaagttcgtgtgcctgaactgcggcttcgagacacacgcagccgagcaagccgccctgaacatcgccagatcctggctgttcctgcggagccaggagtacaagaaataccagacaaacaagacaaccggcaacaccgataagagagccttcgtcgagacctggcagtccttttaccggaagaagcttaaggaggtgtggaaacctgccgtgcggtctggcggatctggcggaggctccaccagccccaagaaaaagagaaaagtctaagctgccttctgcggggcttgccttctggccatgcccttcttctctcccttgcacctgtacctcttggtctttgaataaagcctgagtaggaaggctagcaaaaaaaaaaaaaaaaaaaaaaaaaaaaaaaaaaaaaaaaaaaaaaaaaaaaaaaaaaaaaaaaaaaaaaaaaaaaaaaa

SEQ ID NO: 9169 - RNA, 8787 nt, synthetic construct
  source 1..8787: mol_type = other RNA
aggaaataagagagaaaagaagagtaagaagaaatataagagccaccatggcccctaagaagaagcgtaaagtgagccggatgaaccacgaccaggagttcgacccccctaaggtgtaccctcccgtccccgccgagaagagaaagcccatccgggtcctgagcctgttcgatggcatcgccaccggtctgctggtgctgaaggacctgggcatccaggtggataggtacattgcctccgaggtgtgcgaggactccatcaccgtgggaatggtgcgtcatcagggcaagatcatgtacgtgggcgacgtgcggagcgtgacacagaagcatatccaggagtggggccctttcgacctggtgatcggcggcagcccttgcaatgacctgagcatcgtgaacccagcccggaagggcctgtacgagggaaccggcagactgttcttcgagttttacagactgctgcacgacgcccggcctaaggaaggcgacgaccggcccttcttttggctgttcgagaatgtggtggccatgggagtcagcgacaagcgggatattagccggttcctggagagcaaccccgtgatgatcgatgccaaggaagtgagcgccgcccaccgggccagatacttctggggcaatctgcctggcatgaacagacccctggccagcaccgtgaacgacaagctggagctgcaggagtgcctggagcacggccggatcgccaagttcagcaaggtgagaaccatcaccacccgaagcaacagcatcaaacaaggcaaggaccagcactttcctgtgttcatgaacgagaaggaggacatcctgtggtgtaccgagatggagagagtgttcgggttcccagtccactacacagatgtcagcaacatgtctagactggccagacagagactgctgggaagaagctggtccgtccctgtgatcagacacctgttcgcccctctgaaggagtacttcgcctgcgtgagcagcggcaacagcaacgccaacagccggggccccagcttctctagcggcctggtgccactgtccctgagagggagccacatgggccccatggagatctacaaaaccgtgagcgcctggaagcggcagcctgtgcgcgtgctgagcctgtttcggaatatcgataaagtcctgaaaagcctgggattcctggagagcggctctggctccggcggtggcaccctgaagtacgtggaggatgtgacaaacgtggtcagacgggatgtggagaagtggggccccttcgatctggtgtacggcagcacccaacccctgggcagctcttgtgaccggtgccctggctggtacatgtttcagttccaccggatcctgcagtacgccctgccgagacaggagtcccagcggccattcttttggattttcatggacaacttgctgctgaccgaggatgaccaggaaactaccactcggttcctgcagaccgaagccgtgaccctgcaggacgtgagaggccgggactaccagaacgccatgcgggtgtggtccaacatccctggactgaaaagcaagcacgcacctctgacccctaaagaagaggagtacctgcaggcccaggtgcggagcagaagcaagctggacgcccctaaggtggatctgctggtgaagaattgcctcctgcccctgagagagtacttcaagtatttcagccagaatagtctgcccctgggaggcagcggcggcggcagccaggagcaggtgagcttcaaggacgtgtgcgtggacttcaccagggaggagtggtacctgctggaccccgcccagaagatcctgtacagggacgtgatcctggagaactacagccacctggtgagcgtgggcaactgcatcaccaagcccgaggtgatcttcaagatcgagcagggcgaggagccctggatcctggaggagaggttccccaagcagtgctgcagcgagaggaactggaagggcggcccaagcagcggcgcccctcctcccagcggcggcaggcggcccaagcagcggcgcccctcctcccagcggcggcagcccagccggctccccaacctctaccgaggagggcacctctgagtccgccacccccgagagcggccctggcacctccaccgagcccagcgagggcagcgcacccggcagccctgccggcagccccacctccacagaggagggaaccagcaccgagcccagcgaaggcagcgccccaggcaccagcaccgagcctagtgagcaggagattaaacggatcaacaagatcagaagaagacttgtgaaagacagcaacaccaagaaggccggcaagacaggccccatgaaaaccctgctggttagagtgatgacacccgatctgagagagcggctggaaaacctgagaaagaagcctgaaaatatcccccagcccatcagcaatacatctagagccaacctgaataagctgctgaccgattacaccgaaatgaagaaggcgatcctgcatgtgtactgggaagagttccagaaggaccctgtgggcctgatgagccgggtggcccagcctgccagcaagaagatcgatcagaacaagctgaaacctgagatggacgagaagggcaacctgaccaccgccggctttgcctgctctcagtgtggccagcccctgttcgtgtacaagctggagcaggtgtctgagaagggcaaggcttacaccaactacttcggacggtgcaatgtggccgagcacgaaaagctgatcctgctggcccagctgaagcccgagaaggatagcgacgaagccgtgacatatagcctgggaaagtttgggcagagggccctggatttctacagcattcatgtgaccaaggagtccacccaccccgtgaagcccctggcccagatcgccggaaacagatacgcctccggacctgtgggaaaggccctgagcgacgcatgtatgggcacaatcgcctccttcctgtctaagtaccaggacatcatcatcgaacaccagaaggtggtgaagggcaaccagaagagactggagagcctgcgggagctggccggcaaggaaaacctggaataccctagcgtgaccctgccacctcagcctcacaccaaggagggcgttgatgcctacaacgaagtgatcgcccgggtgcgaatgtgggtgaacctgaacctgtggcagaagctgaagctaagcagagatgatgccaagcctctgctgagactgaagggattcccttcctttcctctggtcgagagacaggccaacgaagtggactggtgggacatggtgtgtaacgtgaagaagctgatcaacgagaaaaaggaggatggcaaggtgttttggcagaatctggctggctacaagagacaggaagccctgagaccatacctgagcagcgaggaagatcggaagaagggaaagaaattcgctcggtaccagctgggcgacctgctgctgcacctggaaaagaagcacggcgaggactggggaaaggtgtacgacgaggcctgggagcggattgacaagaaagtggaaggcctgagcaagcacatcaagctggaagaggaacggagaagcgaggacgcccagagcaaggccgccctgaccgactggctgcgggctaaggccagcttcgtgatcgagggcctgaaggaggccgacaaggacgagttctgcagatgcgagctgaagctgcagaagtggtacggggacctgcggggaaagcccttcgccatcgaagccgagaacagcatcctggacatcagcggcttcagcaagcagtacaactgtgccttcatctggcagaaggacggcgtgaagaagctgaacctgtacctgatcatcaactacttcaagggcggcaagctgcggttcaagaagatcaaacctgaagccttcgaagccaacagattctacaccgtgatcaacaaaaagagcggcgagatcgtgcccatggaggtgaacttcaacttcgacgaccccaacctgatcatcctgcctctggcctttggcaagagacagggcagagaattcatctggaacgacctgctgtccctggaaaccggcagcctgaagctggccaacggaagagtgatcgagaagacactgtacaacagaagaacccggcaggatgagcctgccctgttcgtggccctgaccttcgagcggcgggaggtcctggactcctccaatatcaaaccaatgaacctgatcggcgtggcaagaggcgaaaacatccccgccgtgatcgccctgaccgaccccgagggctgcccactgagccggtttaaggatagcctgggaaacccaacccacatcctgagaatcggcgagagctataaggagaagcagcggaccatccaggccaagaaggaggtggagcagcggagagccggcggctacagccggaagtacgccagcaaagccaagaatctggcagacgatatggtgagaaacaccgctagagatctgctgtactacgccgtgacccaggatgccatgctgatcttcgccaacctgagccggggcttcggccggcagggcaagcggaccttcatggccgagagacagtacacacggatggaggactggctgaccgccaagctggcctacgagggcctgagcaagacctacctgtccaagacactggcccagtacacctccaagacatgcagcaactgtgggtttaccatcaccagcgccgactacgacagggtgctggagaagctgaagaagacagcaacaggctggatgaccacaattaacggcaaggagctgaaggtggagggccagattacctactacaacagatacaagagacagaacgtagtcaaggacctgtccgtcgagctggatagactgagcgaagaatctgtgaacaacgacatctcctcctggacaaagggcagaagcggagaagctctgagcctcctgaagaaaagattctcccatagacccgtgcaggagaagttcgtgtgcctgaactgcggcttcgagacacacgcagccgagcaagccgccctgaacatcgccagatcctggctgttcctgcggagccaggagtacaagaaataccagacaaacaagacaaccggcaacaccgataagagagccttcgtcgagacctggcagtccttttaccggaagaagcttaaggaggtgtggaaacctgccgtgcggtctggcggatctggcggaggctccaccagccccaagaaaaagagaaaagtctaagctgccttctgcggggcttgccttctggccatgcccttcttctctcccttgcacctgtacctcttggtctttgaataaagcctgagtaggaaggctagcaaaaaaaaaaaaaaaaaaaaaaaaaaaaaaaaaaaaaaaaaaaaaaaaaaaaaaaaaaaaaaaaaaaaaaaaaaaaaaaagcccagccggctccccaacctctaccgaggagggcacctctgagtccgccacccccgagagcggccctggcacctccaccgagcccagcgagggcagcgcacccggcagccctgccggcagccccacctccacagaggagggaaccagcaccgagcccagcgaaggcagcgccccaggcaccagcaccgagcctagtgagcaggagattaaacggatcaacaagatcagaagaagacttgtgaaagacagcaacaccaagaaggccggcaagacaggccccatgaaaaccctgctggttagagtgatgacacccgatctgagagagcggctggaaaacctgagaaagaagcctgaaaatatcccccagcccatcagcaatacatctagagccaacctgaataagctgctgaccgattacaccgaaatgaagaaggcgatcctgcatgtgtactgggaagagttccagaaggaccctgtgggcctgatgagccgggtggcccagcctgccagcaagaagatcgatcagaacaagctgaaacctgagatggacgagaagggcaacctgaccaccgccggctttgcctgctctcagtgtggccagcccctgttcgtgtacaagctggagcaggtgtctgagaagggcaaggcttacaccaactacttcggacggtgcaatgtggccgagcacgaaaagctgatcctgctggcccagctgaagcccgagaaggatagcgacgaagccgtgacatatagcctgggaaagtttgggcagagggccctggatttctacagcattcatgtgaccaaggagtccacccaccccgtgaagcccctggcccagatcgccggaaacagatacgcctccggacctgtgggaaaggccctgagcgacgcatgtatgggcacaatcgcctccttcctgtctaagtaccaggacatcatcatcgaacaccagaaggtggtgaagggcaaccagaagagactggagagcctgcgggagctggccggcaaggaaaacctggaataccctagcgtgaccctgccacctcagcctcacaccaaggagggcgttgatgcctacaacgaagtgatcgcccgggtgcgaatgtgggtgaacctgaacctgtggcagaagctgaagctaagcagagatgatgccaagcctctgctgagactgaagggattcccttcctttcctctggtcgagagacaggccaacgaagtggactggtgggacatggtgtgtaacgtgaagaagctgatcaacgagaaaaaggaggatggcaaggtgttttggcagaatctggctggctacaagagacaggaagccctgagaccatacctgagcagcgaggaagatcggaagaagggaaagaaattcgctcggtaccagctgggcgacctgctgctgcacctggaaaagaagcacggcgaggactggggaaaggtgtacgacgaggcctgggagcggattgacaagaaagtggaaggcctgagcaagcacatcaagctggaagaggaacggagaagcgaggacgcccagagcaaggccgccctgaccgactggctgcgggctaaggccagcttcgtgatcgagggcctgaaggaggccgacaaggacgagttctgcagatgcgagctgaagctgcagaagtggtacggggacctgcggggaaagcccttcgccatcgaagccgagaacagcatcctggacatcagcggcttcagcaagcagtacaactgtgccttcatctggcagaaggacggcgtgaagaagctgaacctgtacctgatcatcaactacttcaagggcggcaagctgcggttcaagaagatcaaacctgaagccttcgaagccaacagattctacaccgtgatcaacaaaaagagcggcgagatcgtgcccatggaggtgaacttcaacttcgacgaccccaacctgatcatcctgcctctggcctttggcaagagacagggcagagaattcatctggaacgacctgctgtccctggaaaccggcagcctgaagctggccaacggaagagtgatcgagaagacactgtacaacagaagaacccggcaggatgagcctgccctgttcgtggccctgaccttcgagcggcgggaggtcctggactcctccaatatcaaaccaatgaacctgatcggcgtggcaagaggcgaaaacatccccgccgtgatcgccctgaccgaccccgagggctgcccactgagccggtttaaggatagcctgggaaacccaacccacatcctgagaatcggcgagagctataaggagaagcagcggaccatccaggccaagaaggaggtggagcagcggagagccggcggctacagccggaagtacgccagcaaagccaagaatctggcagacgatatggtgagaaacaccgctagagatctgctgtactacgccgtgacccaggatgccatgctgatcttcgccaacctgagccggggcttcggccggcagggcaagcggaccttcatggccgagagacagtacacacggatggaggactggctgaccgccaagctggcctacgagggcctgagcaagacctacctgtccaagacactggcccagtacacctccaagacatgcagcaactgtgggtttaccatcaccagcgccgactacgacagggtgctggagaagctgaagaagacagcaacaggctggatgaccacaattaacggcaaggagctgaaggtggagggccagattacctactacaacagatacaagagacagaacgtagtcaaggacctgtccgtcgagctggatagactgagcgaagaatctgtgaacaacgacatctcctcctggacaaagggcagaagcggagaagctctgagcctcctgaagaaaagattctcccatagacccgtgcaggagaagttcgtgtgcctgaactgcggcttcgagacacacgcagccgagcaagccgccctgaacatcgccagatcctggctgttcctgcggagccaggagtacaagaaataccagacaaacaagacaaccggcaacaccgataagagagccttcgtcgagacctggcagtccttttaccggaagaagcttaaggaggtgtggaaacctgccgtgcggtctggcggatctggcggaggctccaccagccccaagaaaaagagaaaagtctaagctgccttctgcggggcttgccttctggccatgcccttcttctctcccttgcacctgtacctcttggtctttgaataaagcctgagtaggaaggctagcaaaaaaaaaaaaaaaaaaaaaaaaaaaaaaaaaaaaaaaaaaaaaaaaaaaaaaaaaaaaaaaaaaaaaaaaaaaaaaaa

SEQ ID NO: 9170 - RNA, 8784 nt, synthetic construct
  source 1..8784: mol_type = other RNA
aggaaataagagagaaaagaagagtaagaagaaatataagagccaccatggcccctaagaagaagcgtaaagtgagccggatgaaccacgaccaggagttcgacccccctaaggtgtaccctcccgtccccgccgagaagagaaagcccatccgggtcctgagcctgttcgatggcatcgccaccggtctgctggtgctgaaggacctgggcatccaggtggataggtacattgcctccgaggtgtgcgaggactccatcaccgtgggaatggtgcgtcatcagggcaagatcatgtacgtgggcgacgtgcggagcgtgacacagaagcatatccaggagtggggccctttcgacctggtgatcggcggcagcccttgcaatgacctgagcatcgtgaacccagcccggaagggcctgtacgagggaaccggcagactgttcttcgagttttacagactgctgcacgacgcccggcctaaggaaggcgacgaccggcccttcttttggctgttcgagaatgtggtggccatgggagtcagcgacaagcgggatattagccggttcctggagagcaaccccgtgatgatcgatgccaaggaagtgagcgccgcccaccgggccagatacttctggggcaatctgcctggcatgaacagacccctggccagcaccgtgaacgacaagctggagctgcaggagtgcctggagcacggccggatcgccaagttcagcaaggtgagaaccatcaccacccgaagcaacagcatcaaacaaggcaaggaccagcactttcctgtgttcatgaacgagaaggaggacatcctgtggtgtaccgagatggagagagtgttcgggttcccagtccactacacagatgtcagcaacatgtctagactggccagacagagactgctgggaagaagctggtccgtccctgtgatcagacacctgttcgcccctctgaaggagtacttcgcctgcgtgagcagcggcaacagcaacgccaacagccggggccccagcttctctagcggcctggtgccactgtccctgagagggagccacatgggccccatggagatctacaaaaccgtgagcgcctggaagcggcagcctgtgcgcgtgctgagcctgtttcggaatatcgataaagtcctgaaaagcctgggattcctggagagcggctctggctccggcggtggcaccctgaagtacgtggaggatgtgacaaacgtggtcagacgggatgtggagaagtggggccccttcgatctggtgtacggcagcacccaacccctgggcagctcttgtgaccggtgccctggctggtacatgtttcagttccaccggatcctgcagtacgccctgccgagacaggagtcccagcggccattcttttggattttcatggacaacttgctgctgaccgaggatgaccaggaaactaccactcggttcctgcagaccgaagccgtgaccctgcaggacgtgagaggccgggactaccagaacgccatgcgggtgtggtccaacatccctggactgaaaagcaagcacgcacctctgacccctaaagaagaggagtacctgcaggcccaggtgcggagcagaagcaagctggacgcccctaaggtggatctgctggtgaagaattgcctcctgcccctgagagagtacttcaagtatttcagccagaatagtctgcccctgggaggcagcggcggcggccaggaccccagcgccgagggcctgagcgaggaggtgcccgtggtgttcgaggagctgcccgtggtgttcgaggacgtggccgtgtacttcaccagagaggagtggggcatgctggacaagagacagaaggagctgtacagagacgtgatgagaatgaactacgagctgctggccagcctgggccccgccgccgccaagcccgacctgatcagcaagctggagagaagagccgccccctggggcggcccaagcagcggcgcccctcctcccagcggcggcaggcggcccaagcagcggcgcccctcctcccagcggcggcagcccagccggctccccaacctctaccgaggagggcacctctgagtccgccacccccgagagcggccctggcacctccaccgagcccagcgagggcagcgcacccggcagccctgccggcagccccacctccacagaggagggaaccagcaccgagcccagcgaaggcagcgccccaggcaccagcaccgagcctagtgagcaggagattaaacggatcaacaagatcagaagaagacttgtgaaagacagcaacaccaagaaggccggcaagacaggccccatgaaaaccctgctggttagagtgatgacacccgatctgagagagcggctggaaaacctgagaaagaagcctgaaaatatcccccagcccatcagcaatacatctagagccaacctgaataagctgctgaccgattacaccgaaatgaagaaggcgatcctgcatgtgtactgggaagagttccagaaggaccctgtgggcctgatgagccgggtggcccagcctgccagcaagaagatcgatcagaacaagctgaaacctgagatggacgagaagggcaacctgaccaccgccggctttgcctgctctcagtgtggccagcccctgttcgtgtacaagctggagcaggtgtctgagaagggcaaggcttacaccaactacttcggacggtgcaatgtggccgagcacgaaaagctgatcctgctggcccagctgaagcccgagaaggatagcgacgaagccgtgacatatagcctgggaaagtttgggcagagggccctggatttctacagcattcatgtgaccaaggagtccacccaccccgtgaagcccctggcccagatcgccggaaacagatacgcctccggacctgtgggaaaggccctgagcgacgcatgtatgggcacaatcgcctccttcctgtctaagtaccaggacatcatcatcgaacaccagaaggtggtgaagggcaaccagaagagactggagagcctgcgggagctggccggcaaggaaaacctggaataccctagcgtgaccctgccacctcagcctcacaccaaggagggcgttgatgcctacaacgaagtgatcgcccgggtgcgaatgtgggtgaacctgaacctgtggcagaagctgaagctaagcagagatgatgccaagcctctgctgagactgaagggattcccttcctttcctctggtcgagagacaggccaacgaagtggactggtgggacatggtgtgtaacgtgaagaagctgatcaacgagaaaaaggaggatggcaaggtgttttggcagaatctggctggctacaagagacaggaagccctgagaccatacctgagcagcgaggaagatcggaagaagggaaagaaattcgctcggtaccagctgggcgacctgctgctgcacctggaaaagaagcacggcgaggactggggaaaggtgtacgacgaggcctgggagcggattgacaagaaagtggaaggcctgagcaagcacatcaagctggaagaggaacggagaagcgaggacgcccagagcaaggccgccctgaccgactggctgcgggctaaggccagcttcgtgatcgagggcctgaaggaggccgacaaggacgagttctgcagatgcgagctgaagctgcagaagtggtacggggacctgcggggaaagcccttcgccatcgaagccgagaacagcatcctggacatcagcggcttcagcaagcagtacaactgtgccttcatctggcagaaggacggcgtgaagaagctgaacctgtacctgatcatcaactacttcaagggcggcaagctgcggttcaagaagatcaaacctgaagccttcgaagccaacagattctacaccgtgatcaacaaaaagagcggcgagatcgtgcccatggaggtgaacttcaacttcgacgaccccaacctgatcatcctgcctctggcctttggcaagagacagggcagagaattcatctggaacgacctgctgtccctggaaaccggcagcctgaagctggccaacggaagagtgatcgagaagacactgtacaacagaagaacccggcaggatgagcctgccctgttcgtggccctgaccttcgagcggcgggaggtcctggactcctccaatatcaaaccaatgaacctgatcggcgtggcaagaggcgaaaacatccccgccgtgatcgccctgaccgaccccgagggctgcccactgagccggtttaaggatagcctgggaaacccaacccacatcctgagaatcggcgagagctataaggagaagcagcggaccatccaggccaagaaggaggtggagcagcggagagccggcggctacagccggaagtacgccagcaaagccaagaatctggcagacgatatggtgagaaacaccgctagagatctgctgtactacgccgtgacccaggatgccatgctgatcttcgccaacctgagccggggcttcggccggcagggcaagcggaccttcatggccgagagacagtacacacggatggaggactggctgaccgccaagctggcctacgagggcctgagcaagacctacctgtccaagacactggcccagtacacctccaagacatgcagcaactgtgggtttaccatcaccagcgccgactacgacagggtgctggagaagctgaagaagacagcaacaggctggatgaccacaattaacggcaaggagctgaaggtggagggccagattacctactacaacagatacaagagacagaacgtagtcaaggacctgtccgtcgagctggatagactgagcgaagaatctgtgaacaacgacatctcctcctggacaaagggcagaagcggagaagctctgagcctcctgaagaaaagattctcccatagacccgtgcaggagaagttcgtgtgcctgaactgcggcttcgagacacacgcagccgagcaagccgccctgaacatcgccagatcctggctgttcctgcggagccaggagtacaagaaataccagacaaacaagacaaccggcaacaccgataagagagccttcgtcgagacctggcagtccttttaccggaagaagcttaaggaggtgtggaaacctgccgtgcggtctggcggatctggcggaggctccaccagccccaagaaaaagagaaaagtctaagctgccttctgcggggcttgccttctggccatgcccttcttctctcccttgcacctgtacctcttggtctttgaataaagcctgagtaggaaggctagcaaaaaaaaaaaaaaaaaaaaaaaaaaaaaaaaaaaaaaaaaaaaaaaaaaaaaaaaaaaaaaaaaaaaaaaaaaaaaaaagcccagccggctccccaacctctaccgaggagggcacctctgagtccgccacccccgagagcggccctggcacctccaccgagcccagcgagggcagcgcacccggcagccctgccggcagccccacctccacagaggagggaaccagcaccgagcccagcgaaggcagcgccccaggcaccagcaccgagcctagtgagcaggagattaaacggatcaacaagatcagaagaagacttgtgaaagacagcaacaccaagaaggccggcaagacaggccccatgaaaaccctgctggttagagtgatgacacccgatctgagagagcggctggaaaacctgagaaagaagcctgaaaatatcccccagcccatcagcaatacatctagagccaacctgaataagctgctgaccgattacaccgaaatgaagaaggcgatcctgcatgtgtactgggaagagttccagaaggaccctgtgggcctgatgagccgggtggcccagcctgccagcaagaagatcgatcagaacaagctgaaacctgagatggacgagaagggcaacctgaccaccgccggctttgcctgctctcagtgtggccagcccctgttcgtgtacaagctggagcaggtgtctgagaagggcaaggcttacaccaactacttcggacggtgcaatgtggccgagcacgaaaagctgatcctgctggcccagctgaagcccgagaaggatagcgacgaagccgtgacatatagcctgggaaagtttgggcagagggccctggatttctacagcattcatgtgaccaaggagtccacccaccccgtgaagcccctggcccagatcgccggaaacagatacgcctccggacctgtgggaaaggccctgagcgacgcatgtatgggcacaatcgcctccttcctgtctaagtaccaggacatcatcatcgaacaccagaaggtggtgaagggcaaccagaagagactggagagcctgcgggagctggccggcaaggaaaacctggaataccctagcgtgaccctgccacctcagcctcacaccaaggagggcgttgatgcctacaacgaagtgatcgcccgggtgcgaatgtgggtgaacctgaacctgtggcagaagctgaagctaagcagagatgatgccaagcctctgctgagactgaagggattcccttcctttcctctggtcgagagacaggccaacgaagtggactggtgggacatggtgtgtaacgtgaagaagctgatcaacgagaaaaaggaggatggcaaggtgttttggcagaatctggctggctacaagagacaggaagccctgagaccatacctgagcagcgaggaagatcggaagaagggaaagaaattcgctcggtaccagctgggcgacctgctgctgcacctggaaaagaagcacggcgaggactggggaaaggtgtacgacgaggcctgggagcggattgacaagaaagtggaaggcctgagcaagcacatcaagctggaagaggaacggagaagcgaggacgcccagagcaaggccgccctgaccgactggctgcgggctaaggccagcttcgtgatcgagggcctgaaggaggccgacaaggacgagttctgcagatgcgagctgaagctgcagaagtggtacggggacctgcggggaaagcccttcgccatcgaagccgagaacagcatcctggacatcagcggcttcagcaagcagtacaactgtgccttcatctggcagaaggacggcgtgaagaagctgaacctgtacctgatcatcaactacttcaagggcggcaagctgcggttcaagaagatcaaacctgaagccttcgaagccaacagattctacaccgtgatcaacaaaaagagcggcgagatcgtgcccatggaggtgaacttcaacttcgacgaccccaacctgatcatcctgcctctggcctttggcaagagacagggcagagaattcatctggaacgacctgctgtccctggaaaccggcagcctgaagctggccaacggaagagtgatcgagaagacactgtacaacagaagaacccggcaggatgagcctgccctgttcgtggccctgaccttcgagcggcgggaggtcctggactcctccaatatcaaaccaatgaacctgatcggcgtggcaagaggcgaaaacatccccgccgtgatcgccctgaccgaccccgagggctgcccactgagccggtttaaggatagcctgggaaacccaacccacatcctgagaatcggcgagagctataaggagaagcagcggaccatccaggccaagaaggaggtggagcagcggagagccggcggctacagccggaagtacgccagcaaagccaagaatctggcagacgatatggtgagaaacaccgctagagatctgctgtactacgccgtgacccaggatgccatgctgatcttcgccaacctgagccggggcttcggccggcagggcaagcggaccttcatggccgagagacagtacacacggatggaggactggctgaccgccaagctggcctacgagggcctgagcaagacctacctgtccaagacactggcccagtacacctccaagacatgcagcaactgtgggtttaccatcaccagcgccgactacgacagggtgctggagaagctgaagaagacagcaacaggctggatgaccacaattaacggcaaggagctgaaggtggagggccagattacctactacaacagatacaagagacagaacgtagtcaaggacctgtccgtcgagctggatagactgagcgaagaatctgtgaacaacgacatctcctcctggacaaagggcagaagcggagaagctctgagcctcctgaagaaaagattctcccatagacccgtgcaggagaagttcgtgtgcctgaactgcggcttcgagacacacgcagccgagcaagccgccctgaacatcgccagatcctggctgttcctgcggagccaggagtacaagaaataccagacaaacaagacaaccggcaacaccgataagagagccttcgtcgagacctggcagtccttttaccggaagaagcttaaggaggtgtggaaacctgccgtgcggtctggcggatctggcggaggctccaccagccccaagaaaaagagaaaagtctaagctgccttctgcggggcttgccttctggccatgcccttcttctctcccttgcacctgtacctcttggtctttgaataaagcctgagtaggaaggctagcaaaaaaaaaaaaaaaaaaaaaaaaaaaaaaaaaaaaaaaaaaaaaaaaaaaaaaaaaaaaaaaaaaaaaaaaaaaaaaaa

SEQ ID NO: 9171 - RNA, 8787 nt, synthetic construct
  source 1..8787: mol_type = other RNA
aggaaataagagagaaaagaagagtaagaagaaatataagagccaccatggcccctaagaagaagcgtaaagtgagccggatgaaccacgaccaggagttcgacccccctaaggtgtaccctcccgtccccgccgagaagagaaagcccatccgggtcctgagcctgttcgatggcatcgccaccggtctgctggtgctgaaggacctgggcatccaggtggataggtacattgcctccgaggtgtgcgaggactccatcaccgtgggaatggtgcgtcatcagggcaagatcatgtacgtgggcgacgtgcggagcgtgacacagaagcatatccaggagtggggccctttcgacctggtgatcggcggcagcccttgcaatgacctgagcatcgtgaacccagcccggaagggcctgtacgagggaaccggcagactgttcttcgagttttacagactgctgcacgacgcccggcctaaggaaggcgacgaccggcccttcttttggctgttcgagaatgtggtggccatgggagtcagcgacaagcgggatattagccggttcctggagagcaaccccgtgatgatcgatgccaaggaagtgagcgccgcccaccgggccagatacttctggggcaatctgcctggcatgaacagacccctggccagcaccgtgaacgacaagctggagctgcaggagtgcctggagcacggccggatcgccaagttcagcaaggtgagaaccatcaccacccgaagcaacagcatcaaacaaggcaaggaccagcactttcctgtgttcatgaacgagaaggaggacatcctgtggtgtaccgagatggagagagtgttcgggttcccagtccactacacagatgtcagcaacatgtctagactggccagacagagactgctgggaagaagctggtccgtccctgtgatcagacacctgttcgcccctctgaaggagtacttcgcctgcgtgagcagcggcaacagcaacgccaacagccggggccccagcttctctagcggcctggtgccactgtccctgagagggagccacatgggccccatggagatctacaaaaccgtgagcgcctggaagcggcagcctgtgcgcgtgctgagcctgtttcggaatatcgataaagtcctgaaaagcctgggattcctggagagcggctctggctccggcggtggcaccctgaagtacgtggaggatgtgacaaacgtggtcagacgggatgtggagaagtggggccccttcgatctggtgtacggcagcacccaacccctgggcagctcttgtgaccggtgccctggctggtacatgtttcagttccaccggatcctgcagtacgccctgccgagacaggagtcccagcggccattcttttggattttcatggacaacttgctgctgaccgaggatgaccaggaaactaccactcggttcctgcagaccgaagccgtgaccctgcaggacgtgagaggccgggactaccagaacgccatgcgggtgtggtccaacatccctggactgaaaagcaagcacgcacctctgacccctaaagaagaggagtacctgcaggcccaggtgcggagcagaagcaagctggacgcccctaaggtggatctgctggtgaagaattgcctcctgcccctgagagagtacttcaagtatttcagccagaatagtctgcccctgggaggcagcggcggcggcgtggtggagcccgtgagcttcgaggaggtggccgtgtacttcagcgaggaggagtgggccctgctggaccccggccagagggccctgtactgggccgtgatgcaggagaactacgaggccgtgagctggctgggcttcagcatccccaagcccgacctgatcacccagctggacaggggcgaggagccctgggtgcccgacctgcagcccagcaagaagctggagatcctgaggggcaccaggggcggcccaagcagcggcgcccctcctcccagcggcggcaggcggcccaagcagcggcgcccctcctcccagcggcggcagcccagccggctccccaacctctaccgaggagggcacctctgagtccgccacccccgagagcggccctggcacctccaccgagcccagcgagggcagcgcacccggcagccctgccggcagccccacctccacagaggagggaaccagcaccgagcccagcgaaggcagcgccccaggcaccagcaccgagcctagtgagcaggagattaaacggatcaacaagatcagaagaagacttgtgaaagacagcaacaccaagaaggccggcaagacaggccccatgaaaaccctgctggttagagtgatgacacccgatctgagagagcggctggaaaacctgagaaagaagcctgaaaatatcccccagcccatcagcaatacatctagagccaacctgaataagctgctgaccgattacaccgaaatgaagaaggcgatcctgcatgtgtactgggaagagttccagaaggaccctgtgggcctgatgagccgggtggcccagcctgccagcaagaagatcgatcagaacaagctgaaacctgagatggacgagaagggcaacctgaccaccgccggctttgcctgctctcagtgtggccagcccctgttcgtgtacaagctggagcaggtgtctgagaagggcaaggcttacaccaactacttcggacggtgcaatgtggccgagcacgaaaagctgatcctgctggcccagctgaagcccgagaaggatagcgacgaagccgtgacatatagcctgggaaagtttgggcagagggccctggatttctacagcattcatgtgaccaaggagtccacccaccccgtgaagcccctggcccagatcgccggaaacagatacgcctccggacctgtgggaaaggccctgagcgacgcatgtatgggcacaatcgcctccttcctgtctaagtaccaggacatcatcatcgaacaccagaaggtggtgaagggcaaccagaagagactggagagcctgcgggagctggccggcaaggaaaacctggaataccctagcgtgaccctgccacctcagcctcacaccaaggagggcgttgatgcctacaacgaagtgatcgcccgggtgcgaatgtgggtgaacctgaacctgtggcagaagctgaagctaagcagagatgatgccaagcctctgctgagactgaagggattcccttcctttcctctggtcgagagacaggccaacgaagtggactggtgggacatggtgtgtaacgtgaagaagctgatcaacgagaaaaaggaggatggcaaggtgttttggcagaatctggctggctacaagagacaggaagccctgagaccatacctgagcagcgaggaagatcggaagaagggaaagaaattcgctcggtaccagctgggcgacctgctgctgcacctggaaaagaagcacggcgaggactggggaaaggtgtacgacgaggcctgggagcggattgacaagaaagtggaaggcctgagcaagcacatcaagctggaagaggaacggagaagcgaggacgcccagagcaaggccgccctgaccgactggctgcgggctaaggccagcttcgtgatcgagggcctgaaggaggccgacaaggacgagttctgcagatgcgagctgaagctgcagaagtggtacggggacctgcggggaaagcccttcgccatcgaagccgagaacagcatcctggacatcagcggcttcagcaagcagtacaactgtgccttcatctggcagaaggacggcgtgaagaagctgaacctgtacctgatcatcaactacttcaagggcggcaagctgcggttcaagaagatcaaacctgaagccttcgaagccaacagattctacaccgtgatcaacaaaaagagcggcgagatcgtgcccatggaggtgaacttcaacttcgacgaccccaacctgatcatcctgcctctggcctttggcaagagacagggcagagaattcatctggaacgacctgctgtccctggaaaccggcagcctgaagctggccaacggaagagtgatcgagaagacactgtacaacagaagaacccggcaggatgagcctgccctgttcgtggccctgaccttcgagcggcgggaggtcctggactcctccaatatcaaaccaatgaacctgatcggcgtggcaagaggcgaaaacatccccgccgtgatcgccctgaccgaccccgagggctgcccactgagccggtttaaggatagcctgggaaacccaacccacatcctgagaatcggcgagagctataaggagaagcagcggaccatccaggccaagaaggaggtggagcagcggagagccggcggctacagccggaagtacgccagcaaagccaagaatctggcagacgatatggtgagaaacaccgctagagatctgctgtactacgccgtgacccaggatgccatgctgatcttcgccaacctgagccggggcttcggccggcagggcaagcggaccttcatggccgagagacagtacacacggatggaggactggctgaccgccaagctggcctacgagggcctgagcaagacctacctgtccaagacactggcccagtacacctccaagacatgcagcaactgtgggtttaccatcaccagcgccgactacgacagggtgctggagaagctgaagaagacagcaacaggctggatgaccacaattaacggcaaggagctgaaggtggagggccagattacctactacaacagatacaagagacagaacgtagtcaaggacctgtccgtcgagctggatagactgagcgaagaatctgtgaacaacgacatctcctcctggacaaagggcagaagcggagaagctctgagcctcctgaagaaaagattctcccatagacccgtgcaggagaagttcgtgtgcctgaactgcggcttcgagacacacgcagccgagcaagccgccctgaacatcgccagatcctggctgttcctgcggagccaggagtacaagaaataccagacaaacaagacaaccggcaacaccgataagagagccttcgtcgagacctggcagtccttttaccggaagaagcttaaggaggtgtggaaacctgccgtgcggtctggcggatctggcggaggctccaccagccccaagaaaaagagaaaagtctaagctgccttctgcggggcttgccttctggccatgcccttcttctctcccttgcacctgtacctcttggtctttgaataaagcctgagtaggaaggctagcaaaaaaaaaaaaaaaaaaaaaaaaaaaaaaaaaaaaaaaaaaaaaaaaaaaaaaaaaaaaaaaaaaaaaaaaaaaaaaaagcccagccggctccccaacctctaccgaggagggcacctctgagtccgccacccccgagagcggccctggcacctccaccgagcccagcgagggcagcgcacccggcagccctgccggcagccccacctccacagaggagggaaccagcaccgagcccagcgaaggcagcgccccaggcaccagcaccgagcctagtgagcaggagattaaacggatcaacaagatcagaagaagacttgtgaaagacagcaacaccaagaaggccggcaagacaggccccatgaaaaccctgctggttagagtgatgacacccgatctgagagagcggctggaaaacctgagaaagaagcctgaaaatatcccccagcccatcagcaatacatctagagccaacctgaataagctgctgaccgattacaccgaaatgaagaaggcgatcctgcatgtgtactgggaagagttccagaaggaccctgtgggcctgatgagccgggtggcccagcctgccagcaagaagatcgatcagaacaagctgaaacctgagatggacgagaagggcaacctgaccaccgccggctttgcctgctctcagtgtggccagcccctgttcgtgtacaagctggagcaggtgtctgagaagggcaaggcttacaccaactacttcggacggtgcaatgtggccgagcacgaaaagctgatcctgctggcccagctgaagcccgagaaggatagcgacgaagccgtgacatatagcctgggaaagtttgggcagagggccctggatttctacagcattcatgtgaccaaggagtccacccaccccgtgaagcccctggcccagatcgccggaaacagatacgcctccggacctgtgggaaaggccctgagcgacgcatgtatgggcacaatcgcctccttcctgtctaagtaccaggacatcatcatcgaacaccagaaggtggtgaagggcaaccagaagagactggagagcctgcgggagctggccggcaaggaaaacctggaataccctagcgtgaccctgccacctcagcctcacaccaaggagggcgttgatgcctacaacgaagtgatcgcccgggtgcgaatgtgggtgaacctgaacctgtggcagaagctgaagctaagcagagatgatgccaagcctctgctgagactgaagggattcccttcctttcctctggtcgagagacaggccaacgaagtggactggtgggacatggtgtgtaacgtgaagaagctgatcaacgagaaaaaggaggatggcaaggtgttttggcagaatctggctggctacaagagacaggaagccctgagaccatacctgagcagcgaggaagatcggaagaagggaaagaaattcgctcggtaccagctgggcgacctgctgctgcacctggaaaagaagcacggcgaggactggggaaaggtgtacgacgaggcctgggagcggattgacaagaaagtggaaggcctgagcaagcacatcaagctggaagaggaacggagaagcgaggacgcccagagcaaggccgccctgaccgactggctgcgggctaaggccagcttcgtgatcgagggcctgaaggaggccgacaaggacgagttctgcagatgcgagctgaagctgcagaagtggtacggggacctgcggggaaagcccttcgccatcgaagccgagaacagcatcctggacatcagcggcttcagcaagcagtacaactgtgccttcatctggcagaaggacggcgtgaagaagctgaacctgtacctgatcatcaactacttcaagggcggcaagctgcggttcaagaagatcaaacctgaagccttcgaagccaacagattctacaccgtgatcaacaaaaagagcggcgagatcgtgcccatggaggtgaacttcaacttcgacgaccccaacctgatcatcctgcctctggcctttggcaagagacagggcagagaattcatctggaacgacctgctgtccctggaaaccggcagcctgaagctggccaacggaagagtgatcgagaagacactgtacaacagaagaacccggcaggatgagcctgccctgttcgtggccctgaccttcgagcggcgggaggtcctggactcctccaatatcaaaccaatgaacctgatcggcgtggcaagaggcgaaaacatccccgccgtgatcgccctgaccgaccccgagggctgcccactgagccggtttaaggatagcctgggaaacccaacccacatcctgagaatcggcgagagctataaggagaagcagcggaccatccaggccaagaaggaggtggagcagcggagagccggcggctacagccggaagtacgccagcaaagccaagaatctggcagacgatatggtgagaaacaccgctagagatctgctgtactacgccgtgacccaggatgccatgctgatcttcgccaacctgagccggggcttcggccggcagggcaagcggaccttcatggccgagagacagtacacacggatggaggactggctgaccgccaagctggcctacgagggcctgagcaagacctacctgtccaagacactggcccagtacacctccaagacatgcagcaactgtgggtttaccatcaccagcgccgactacgacagggtgctggagaagctgaagaagacagcaacaggctggatgaccacaattaacggcaaggagctgaaggtggagggccagattacctactacaacagatacaagagacagaacgtagtcaaggacctgtccgtcgagctggatagactgagcgaagaatctgtgaacaacgacatctcctcctggacaaagggcagaagcggagaagctctgagcctcctgaagaaaagattctcccatagacccgtgcaggagaagttcgtgtgcctgaactgcggcttcgagacacacgcagccgagcaagccgccctgaacatcgccagatcctggctgttcctgcggagccaggagtacaagaaataccagacaaacaagacaaccggcaacaccgataagagagccttcgtcgagacctggcagtccttttaccggaagaagcttaaggaggtgtggaaacctgccgtgcggtctggcggatctggcggaggctccaccagccccaagaaaaagagaaaagtctaagctgccttctgcggggcttgccttctggccatgcccttcttctctcccttgcacctgtacctcttggtctttgaataaagcctgagtaggaaggctagcaaaaaaaaaaaaaaaaaaaaaaaaaaaaaaaaaaaaaaaaaaaaaaaaaaaaaaaaaaaaaaaaaaaaaaaaaaaaaaaa

SEQ ID NO: 9172 - RNA, 8787 nt, synthetic construct
  source 1..8787: mol_type = other RNA
aggaaataagagagaaaagaagagtaagaagaaatataagagccaccatggcccctaagaagaagcgtaaagtgagccggatgaaccacgaccaggagttcgacccccctaaggtgtaccctcccgtccccgccgagaagagaaagcccatccgggtcctgagcctgttcgatggcatcgccaccggtctgctggtgctgaaggacctgggcatccaggtggataggtacattgcctccgaggtgtgcgaggactccatcaccgtgggaatggtgcgtcatcagggcaagatcatgtacgtgggcgacgtgcggagcgtgacacagaagcatatccaggagtggggccctttcgacctggtgatcggcggcagcccttgcaatgacctgagcatcgtgaacccagcccggaagggcctgtacgagggaaccggcagactgttcttcgagttttacagactgctgcacgacgcccggcctaaggaaggcgacgaccggcccttcttttggctgttcgagaatgtggtggccatgggagtcagcgacaagcgggatattagccggttcctggagagcaaccccgtgatgatcgatgccaaggaagtgagcgccgcccaccgggccagatacttctggggcaatctgcctggcatgaacagacccctggccagcaccgtgaacgacaagctggagctgcaggagtgcctggagcacggccggatcgccaagttcagcaaggtgagaaccatcaccacccgaagcaacagcatcaaacaaggcaaggaccagcactttcctgtgttcatgaacgagaaggaggacatcctgtggtgtaccgagatggagagagtgttcgggttcccagtccactacacagatgtcagcaacatgtctagactggccagacagagactgctgggaagaagctggtccgtccctgtgatcagacacctgttcgcccctctgaaggagtacttcgcctgcgtgagcagcggcaacagcaacgccaacagccggggccccagcttctctagcggcctggtgccactgtccctgagagggagccacatgggccccatggagatctacaaaaccgtgagcgcctggaagcggcagcctgtgcgcgtgctgagcctgtttcggaatatcgataaagtcctgaaaagcctgggattcctggagagcggctctggctccggcggtggcaccctgaagtacgtggaggatgtgacaaacgtggtcagacgggatgtggagaagtggggccccttcgatctggtgtacggcagcacccaacccctgggcagctcttgtgaccggtgccctggctggtacatgtttcagttccaccggatcctgcagtacgccctgccgagacaggagtcccagcggccattcttttggattttcatggacaacttgctgctgaccgaggatgaccaggaaactaccactcggttcctgcagaccgaagccgtgaccctgcaggacgtgagaggccgggactaccagaacgccatgcgggtgtggtccaacatccctggactgaaaagcaagcacgcacctctgacccctaaagaagaggagtacctgcaggcccaggtgcggagcagaagcaagctggacgcccctaaggtggatctgctggtgaagaattgcctcctgcccctgagagagtacttcaagtatttcagccagaatagtctgcccctgggaggcagcggcggcggcgcccaggtgcccgtgaccttcgaggaggtggccgtgtacttcacccagggccagggcgccctgctgggccccgcccagagggccctgtacagggacgtgatgagggagaactacgagatggtgaccagcctgggcttccccgtgcccaagcccgacctggtggccaggctggagaggggcgaggagccctgggtgagcgactgcctggccagcgaggagggcggcaccaggaggggcaggggcggcggcccaagcagcggcgcccctcctcccagcggcggcaggcggcccaagcagcggcgcccctcctcccagcggcggcagcccagccggctccccaacctctaccgaggagggcacctctgagtccgccacccccgagagcggccctggcacctccaccgagcccagcgagggcagcgcacccggcagccctgccggcagccccacctccacagaggagggaaccagcaccgagcccagcgaaggcagcgccccaggcaccagcaccgagcctagtgagcaggagattaaacggatcaacaagatcagaagaagacttgtgaaagacagcaacaccaagaaggccggcaagacaggccccatgaaaaccctgctggttagagtgatgacacccgatctgagagagcggctggaaaacctgagaaagaagcctgaaaatatcccccagcccatcagcaatacatctagagccaacctgaataagctgctgaccgattacaccgaaatgaagaaggcgatcctgcatgtgtactgggaagagttccagaaggaccctgtgggcctgatgagccgggtggcccagcctgccagcaagaagatcgatcagaacaagctgaaacctgagatggacgagaagggcaacctgaccaccgccggctttgcctgctctcagtgtggccagcccctgttcgtgtacaagctggagcaggtgtctgagaagggcaaggcttacaccaactacttcggacggtgcaatgtggccgagcacgaaaagctgatcctgctggcccagctgaagcccgagaaggatagcgacgaagccgtgacatatagcctgggaaagtttgggcagagggccctggatttctacagcattcatgtgaccaaggagtccacccaccccgtgaagcccctggcccagatcgccggaaacagatacgcctccggacctgtgggaaaggccctgagcgacgcatgtatgggcacaatcgcctccttcctgtctaagtaccaggacatcatcatcgaacaccagaaggtggtgaagggcaaccagaagagactggagagcctgcgggagctggccggcaaggaaaacctggaataccctagcgtgaccctgccacctcagcctcacaccaaggagggcgttgatgcctacaacgaagtgatcgcccgggtgcgaatgtgggtgaacctgaacctgtggcagaagctgaagctaagcagagatgatgccaagcctctgctgagactgaagggattcccttcctttcctctggtcgagagacaggccaacgaagtggactggtgggacatggtgtgtaacgtgaagaagctgatcaacgagaaaaaggaggatggcaaggtgttttggcagaatctggctggctacaagagacaggaagccctgagaccatacctgagcagcgaggaagatcggaagaagggaaagaaattcgctcggtaccagctgggcgacctgctgctgcacctggaaaagaagcacggcgaggactggggaaaggtgtacgacgaggcctgggagcggattgacaagaaagtggaaggcctgagcaagcacatcaagctggaagaggaacggagaagcgaggacgcccagagcaaggccgccctgaccgactggctgcgggctaaggccagcttcgtgatcgagggcctgaaggaggccgacaaggacgagttctgcagatgcgagctgaagctgcagaagtggtacggggacctgcggggaaagcccttcgccatcgaagccgagaacagcatcctggacatcagcggcttcagcaagcagtacaactgtgccttcatctggcagaaggacggcgtgaagaagctgaacctgtacctgatcatcaactacttcaagggcggcaagctgcggttcaagaagatcaaacctgaagccttcgaagccaacagattctacaccgtgatcaacaaaaagagcggcgagatcgtgcccatggaggtgaacttcaacttcgacgaccccaacctgatcatcctgcctctggcctttggcaagagacagggcagagaattcatctggaacgacctgctgtccctggaaaccggcagcctgaagctggccaacggaagagtgatcgagaagacactgtacaacagaagaacccggcaggatgagcctgccctgttcgtggccctgaccttcgagcggcgggaggtcctggactcctccaatatcaaaccaatgaacctgatcggcgtggcaagaggcgaaaacatccccgccgtgatcgccctgaccgaccccgagggctgcccactgagccggtttaaggatagcctgggaaacccaacccacatcctgagaatcggcgagagctataaggagaagcagcggaccatccaggccaagaaggaggtggagcagcggagagccggcggctacagccggaagtacgccagcaaagccaagaatctggcagacgatatggtgagaaacaccgctagagatctgctgtactacgccgtgacccaggatgccatgctgatcttcgccaacctgagccggggcttcggccggcagggcaagcggaccttcatggccgagagacagtacacacggatggaggactggctgaccgccaagctggcctacgagggcctgagcaagacctacctgtccaagacactggcccagtacacctccaagacatgcagcaactgtgggtttaccatcaccagcgccgactacgacagggtgctggagaagctgaagaagacagcaacaggctggatgaccacaattaacggcaaggagctgaaggtggagggccagattacctactacaacagatacaagagacagaacgtagtcaaggacctgtccgtcgagctggatagactgagcgaagaatctgtgaacaacgacatctcctcctggacaaagggcagaagcggagaagctctgagcctcctgaagaaaagattctcccatagacccgtgcaggagaagttcgtgtgcctgaactgcggcttcgagacacacgcagccgagcaagccgccctgaacatcgccagatcctggctgttcctgcggagccaggagtacaagaaataccagacaaacaagacaaccggcaacaccgataagagagccttcgtcgagacctggcagtccttttaccggaagaagcttaaggaggtgtggaaacctgccgtgcggtctggcggatctggcggaggctccaccagccccaagaaaaagagaaaagtctaagctgccttctgcggggcttgccttctggccatgcccttcttctctcccttgcacctgtacctcttggtctttgaataaagcctgagtaggaaggctagcaaaaaaaaaaaaaaaaaaaaaaaaaaaaaaaaaaaaaaaaaaaaaaaaaaaaaaaaaaaaaaaaaaaaaaaaaaaaaaaagcccagccggctccccaacctctaccgaggagggcacctctgagtccgccacccccgagagcggccctggcacctccaccgagcccagcgagggcagcgcacccggcagccctgccggcagccccacctccacagaggagggaaccagcaccgagcccagcgaaggcagcgccccaggcaccagcaccgagcctagtgagcaggagattaaacggatcaacaagatcagaagaagacttgtgaaagacagcaacaccaagaaggccggcaagacaggccccatgaaaaccctgctggttagagtgatgacacccgatctgagagagcggctggaaaacctgagaaagaagcctgaaaatatcccccagcccatcagcaatacatctagagccaacctgaataagctgctgaccgattacaccgaaatgaagaaggcgatcctgcatgtgtactgggaagagttccagaaggaccctgtgggcctgatgagccgggtggcccagcctgccagcaagaagatcgatcagaacaagctgaaacctgagatggacgagaagggcaacctgaccaccgccggctttgcctgctctcagtgtggccagcccctgttcgtgtacaagctggagcaggtgtctgagaagggcaaggcttacaccaactacttcggacggtgcaatgtggccgagcacgaaaagctgatcctgctggcccagctgaagcccgagaaggatagcgacgaagccgtgacatatagcctgggaaagtttgggcagagggccctggatttctacagcattcatgtgaccaaggagtccacccaccccgtgaagcccctggcccagatcgccggaaacagatacgcctccggacctgtgggaaaggccctgagcgacgcatgtatgggcacaatcgcctccttcctgtctaagtaccaggacatcatcatcgaacaccagaaggtggtgaagggcaaccagaagagactggagagcctgcgggagctggccggcaaggaaaacctggaataccctagcgtgaccctgccacctcagcctcacaccaaggagggcgttgatgcctacaacgaagtgatcgcccgggtgcgaatgtgggtgaacctgaacctgtggcagaagctgaagctaagcagagatgatgccaagcctctgctgagactgaagggattcccttcctttcctctggtcgagagacaggccaacgaagtggactggtgggacatggtgtgtaacgtgaagaagctgatcaacgagaaaaaggaggatggcaaggtgttttggcagaatctggctggctacaagagacaggaagccctgagaccatacctgagcagcgaggaagatcggaagaagggaaagaaattcgctcggtaccagctgggcgacctgctgctgcacctggaaaagaagcacggcgaggactggggaaaggtgtacgacgaggcctgggagcggattgacaagaaagtggaaggcctgagcaagcacatcaagctggaagaggaacggagaagcgaggacgcccagagcaaggccgccctgaccgactggctgcgggctaaggccagcttcgtgatcgagggcctgaaggaggccgacaaggacgagttctgcagatgcgagctgaagctgcagaagtggtacggggacctgcggggaaagcccttcgccatcgaagccgagaacagcatcctggacatcagcggcttcagcaagcagtacaactgtgccttcatctggcagaaggacggcgtgaagaagctgaacctgtacctgatcatcaactacttcaagggcggcaagctgcggttcaagaagatcaaacctgaagccttcgaagccaacagattctacaccgtgatcaacaaaaagagcggcgagatcgtgcccatggaggtgaacttcaacttcgacgaccccaacctgatcatcctgcctctggcctttggcaagagacagggcagagaattcatctggaacgacctgctgtccctggaaaccggcagcctgaagctggccaacggaagagtgatcgagaagacactgtacaacagaagaacccggcaggatgagcctgccctgttcgtggccctgaccttcgagcggcgggaggtcctggactcctccaatatcaaaccaatgaacctgatcggcgtggcaagaggcgaaaacatccccgccgtgatcgccctgaccgaccccgagggctgcccactgagccggtttaaggatagcctgggaaacccaacccacatcctgagaatcggcgagagctataaggagaagcagcggaccatccaggccaagaaggaggtggagcagcggagagccggcggctacagccggaagtacgccagcaaagccaagaatctggcagacgatatggtgagaaacaccgctagagatctgctgtactacgccgtgacccaggatgccatgctgatcttcgccaacctgagccggggcttcggccggcagggcaagcggaccttcatggccgagagacagtacacacggatggaggactggctgaccgccaagctggcctacgagggcctgagcaagacctacctgtccaagacactggcccagtacacctccaagacatgcagcaactgtgggtttaccatcaccagcgccgactacgacagggtgctggagaagctgaagaagacagcaacaggctggatgaccacaattaacggcaaggagctgaaggtggagggccagattacctactacaacagatacaagagacagaacgtagtcaaggacctgtccgtcgagctggatagactgagcgaagaatctgtgaacaacgacatctcctcctggacaaagggcagaagcggagaagctctgagcctcctgaagaaaagattctcccatagacccgtgcaggagaagttcgtgtgcctgaactgcggcttcgagacacacgcagccgagcaagccgccctgaacatcgccagatcctggctgttcctgcggagccaggagtacaagaaataccagacaaacaagacaaccggcaacaccgataagagagccttcgtcgagacctggcagtccttttaccggaagaagcttaaggaggtgtggaaacctgccgtgcggtctggcggatctggcggaggctccaccagccccaagaaaaagagaaaagtctaagctgccttctgcggggcttgccttctggccatgcccttcttctctcccttgcacctgtacctcttggtctttgaataaagcctgagtaggaaggctagcaaaaaaaaaaaaaaaaaaaaaaaaaaaaaaaaaaaaaaaaaaaaaaaaaaaaaaaaaaaaaaaaaaaaaaaaaaaaaaaa

SEQ ID NO: 9173 - RNA, 8787 nt, synthetic construct
  source 1..8787: mol_type = other RNA
aggaaataagagagaaaagaagagtaagaagaaatataagagccaccatggcccctaagaagaagcgtaaagtgagccggatgaaccacgaccaggagttcgacccccctaaggtgtaccctcccgtccccgccgagaagagaaagcccatccgggtcctgagcctgttcgatggcatcgccaccggtctgctggtgctgaaggacctgggcatccaggtggataggtacattgcctccgaggtgtgcgaggactccatcaccgtgggaatggtgcgtcatcagggcaagatcatgtacgtgggcgacgtgcggagcgtgacacagaagcatatccaggagtggggccctttcgacctggtgatcggcggcagcccttgcaatgacctgagcatcgtgaacccagcccggaagggcctgtacgagggaaccggcagactgttcttcgagttttacagactgctgcacgacgcccggcctaaggaaggcgacgaccggcccttcttttggctgttcgagaatgtggtggccatgggagtcagcgacaagcgggatattagccggttcctggagagcaaccccgtgatgatcgatgccaaggaagtgagcgccgcccaccgggccagatacttctggggcaatctgcctggcatgaacagacccctggccagcaccgtgaacgacaagctggagctgcaggagtgcctggagcacggccggatcgccaagttcagcaaggtgagaaccatcaccacccgaagcaacagcatcaaacaaggcaaggaccagcactttcctgtgttcatgaacgagaaggaggacatcctgtggtgtaccgagatggagagagtgttcgggttcccagtccactacacagatgtcagcaacatgtctagactggccagacagagactgctgggaagaagctggtccgtccctgtgatcagacacctgttcgcccctctgaaggagtacttcgcctgcgtgagcagcggcaacagcaacgccaacagccggggccccagcttctctagcggcctggtgccactgtccctgagagggagccacatgggccccatggagatctacaaaaccgtgagcgcctggaagcggcagcctgtgcgcgtgctgagcctgtttcggaatatcgataaagtcctgaaaagcctgggattcctggagagcggctctggctccggcggtggcaccctgaagtacgtggaggatgtgacaaacgtggtcagacgggatgtggagaagtggggccccttcgatctggtgtacggcagcacccaacccctgggcagctcttgtgaccggtgccctggctggtacatgtttcagttccaccggatcctgcagtacgccctgccgagacaggagtcccagcggccattcttttggattttcatggacaacttgctgctgaccgaggatgaccaggaaactaccactcggttcctgcagaccgaagccgtgaccctgcaggacgtgagaggccgggactaccagaacgccatgcgggtgtggtccaacatccctggactgaaaagcaagcacgcacctctgacccctaaagaagaggagtacctgcaggcccaggtgcggagcagaagcaagctggacgcccctaaggtggatctgctggtgaagaattgcctcctgcccctgagagagtacttcaagtatttcagccagaatagtctgcccctgggaggcagcggcggcggcttccagatgcccgtgaccttcgaggaggtggccgtgtacttcacccagggccagggcgccctgctggaccccgcccagagggccctgtacagggacgtgatgcaggacaactacgagatggtgaccagcctgggcttccccatccccaagcccgagctgatcgccaggctggagaggggcgaggagccctgggtgcccgacctgcaggcctgcgaggagaggaggctgcccaggtgcaccaggggcggcccaagcagcggcgcccctcctcccagcggcggcaggcggcccaagcagcggcgcccctcctcccagcggcggcagcccagccggctccccaacctctaccgaggagggcacctctgagtccgccacccccgagagcggccctggcacctccaccgagcccagcgagggcagcgcacccggcagccctgccggcagccccacctccacagaggagggaaccagcaccgagcccagcgaaggcagcgccccaggcaccagcaccgagcctagtgagcaggagattaaacggatcaacaagatcagaagaagacttgtgaaagacagcaacaccaagaaggccggcaagacaggccccatgaaaaccctgctggttagagtgatgacacccgatctgagagagcggctggaaaacctgagaaagaagcctgaaaatatcccccagcccatcagcaatacatctagagccaacctgaataagctgctgaccgattacaccgaaatgaagaaggcgatcctgcatgtgtactgggaagagttccagaaggaccctgtgggcctgatgagccgggtggcccagcctgccagcaagaagatcgatcagaacaagctgaaacctgagatggacgagaagggcaacctgaccaccgccggctttgcctgctctcagtgtggccagcccctgttcgtgtacaagctggagcaggtgtctgagaagggcaaggcttacaccaactacttcggacggtgcaatgtggccgagcacgaaaagctgatcctgctggcccagctgaagcccgagaaggatagcgacgaagccgtgacatatagcctgggaaagtttgggcagagggccctggatttctacagcattcatgtgaccaaggagtccacccaccccgtgaagcccctggcccagatcgccggaaacagatacgcctccggacctgtgggaaaggccctgagcgacgcatgtatgggcacaatcgcctccttcctgtctaagtaccaggacatcatcatcgaacaccagaaggtggtgaagggcaaccagaagagactggagagcctgcgggagctggccggcaaggaaaacctggaataccctagcgtgaccctgccacctcagcctcacaccaaggagggcgttgatgcctacaacgaagtgatcgcccgggtgcgaatgtgggtgaacctgaacctgtggcagaagctgaagctaagcagagatgatgccaagcctctgctgagactgaagggattcccttcctttcctctggtcgagagacaggccaacgaagtggactggtgggacatggtgtgtaacgtgaagaagctgatcaacgagaaaaaggaggatggcaaggtgttttggcagaatctggctggctacaagagacaggaagccctgagaccatacctgagcagcgaggaagatcggaagaagggaaagaaattcgctcggtaccagctgggcgacctgctgctgcacctggaaaagaagcacggcgaggactggggaaaggtgtacgacgaggcctgggagcggattgacaagaaagtggaaggcctgagcaagcacatcaagctggaagaggaacggagaagcgaggacgcccagagcaaggccgccctgaccgactggctgcgggctaaggccagcttcgtgatcgagggcctgaaggaggccgacaaggacgagttctgcagatgcgagctgaagctgcagaagtggtacggggacctgcggggaaagcccttcgccatcgaagccgagaacagcatcctggacatcagcggcttcagcaagcagtacaactgtgccttcatctggcagaaggacggcgtgaagaagctgaacctgtacctgatcatcaactacttcaagggcggcaagctgcggttcaagaagatcaaacctgaagccttcgaagccaacagattctacaccgtgatcaacaaaaagagcggcgagatcgtgcccatggaggtgaacttcaacttcgacgaccccaacctgatcatcctgcctctggcctttggcaagagacagggcagagaattcatctggaacgacctgctgtccctggaaaccggcagcctgaagctggccaacggaagagtgatcgagaagacactgtacaacagaagaacccggcaggatgagcctgccctgttcgtggccctgaccttcgagcggcgggaggtcctggactcctccaatatcaaaccaatgaacctgatcggcgtggcaagaggcgaaaacatccccgccgtgatcgccctgaccgaccccgagggctgcccactgagccggtttaaggatagcctgggaaacccaacccacatcctgagaatcggcgagagctataaggagaagcagcggaccatccaggccaagaaggaggtggagcagcggagagccggcggctacagccggaagtacgccagcaaagccaagaatctggcagacgatatggtgagaaacaccgctagagatctgctgtactacgccgtgacccaggatgccatgctgatcttcgccaacctgagccggggcttcggccggcagggcaagcggaccttcatggccgagagacagtacacacggatggaggactggctgaccgccaagctggcctacgagggcctgagcaagacctacctgtccaagacactggcccagtacacctccaagacatgcagcaactgtgggtttaccatcaccagcgccgactacgacagggtgctggagaagctgaagaagacagcaacaggctggatgaccacaattaacggcaaggagctgaaggtggagggccagattacctactacaacagatacaagagacagaacgtagtcaaggacctgtccgtcgagctggatagactgagcgaagaatctgtgaacaacgacatctcctcctggacaaagggcagaagcggagaagctctgagcctcctgaagaaaagattctcccatagacccgtgcaggagaagttcgtgtgcctgaactgcggcttcgagacacacgcagccgagcaagccgccctgaacatcgccagatcctggctgttcctgcggagccaggagtacaagaaataccagacaaacaagacaaccggcaacaccgataagagagccttcgtcgagacctggcagtccttttaccggaagaagcttaaggaggtgtggaaacctgccgtgcggtctggcggatctggcggaggctccaccagccccaagaaaaagagaaaagtctaagctgccttctgcggggcttgccttctggccatgcccttcttctctcccttgcacctgtacctcttggtctttgaataaagcctgagtaggaaggctagcaaaaaaaaaaaaaaaaaaaaaaaaaaaaaaaaaaaaaaaaaaaaaaaaaaaaaaaaaaaaaaaaaaaaaaaaaaaaaaaagcccagccggctccccaacctctaccgaggagggcacctctgagtccgccacccccgagagcggccctggcacctccaccgagcccagcgagggcagcgcacccggcagccctgccggcagccccacctccacagaggagggaaccagcaccgagcccagcgaaggcagcgccccaggcaccagcaccgagcctagtgagcaggagattaaacggatcaacaagatcagaagaagacttgtgaaagacagcaacaccaagaaggccggcaagacaggccccatgaaaaccctgctggttagagtgatgacacccgatctgagagagcggctggaaaacctgagaaagaagcctgaaaatatcccccagcccatcagcaatacatctagagccaacctgaataagctgctgaccgattacaccgaaatgaagaaggcgatcctgcatgtgtactgggaagagttccagaaggaccctgtgggcctgatgagccgggtggcccagcctgccagcaagaagatcgatcagaacaagctgaaacctgagatggacgagaagggcaacctgaccaccgccggctttgcctgctctcagtgtggccagcccctgttcgtgtacaagctggagcaggtgtctgagaagggcaaggcttacaccaactacttcggacggtgcaatgtggccgagcacgaaaagctgatcctgctggcccagctgaagcccgagaaggatagcgacgaagccgtgacatatagcctgggaaagtttgggcagagggccctggatttctacagcattcatgtgaccaaggagtccacccaccccgtgaagcccctggcccagatcgccggaaacagatacgcctccggacctgtgggaaaggccctgagcgacgcatgtatgggcacaatcgcctccttcctgtctaagtaccaggacatcatcatcgaacaccagaaggtggtgaagggcaaccagaagagactggagagcctgcgggagctggccggcaaggaaaacctggaataccctagcgtgaccctgccacctcagcctcacaccaaggagggcgttgatgcctacaacgaagtgatcgcccgggtgcgaatgtgggtgaacctgaacctgtggcagaagctgaagctaagcagagatgatgccaagcctctgctgagactgaagggattcccttcctttcctctggtcgagagacaggccaacgaagtggactggtgggacatggtgtgtaacgtgaagaagctgatcaacgagaaaaaggaggatggcaaggtgttttggcagaatctggctggctacaagagacaggaagccctgagaccatacctgagcagcgaggaagatcggaagaagggaaagaaattcgctcggtaccagctgggcgacctgctgctgcacctggaaaagaagcacggcgaggactggggaaaggtgtacgacgaggcctgggagcggattgacaagaaagtggaaggcctgagcaagcacatcaagctggaagaggaacggagaagcgaggacgcccagagcaaggccgccctgaccgactggctgcgggctaaggccagcttcgtgatcgagggcctgaaggaggccgacaaggacgagttctgcagatgcgagctgaagctgcagaagtggtacggggacctgcggggaaagcccttcgccatcgaagccgagaacagcatcctggacatcagcggcttcagcaagcagtacaactgtgccttcatctggcagaaggacggcgtgaagaagctgaacctgtacctgatcatcaactacttcaagggcggcaagctgcggttcaagaagatcaaacctgaagccttcgaagccaacagattctacaccgtgatcaacaaaaagagcggcgagatcgtgcccatggaggtgaacttcaacttcgacgaccccaacctgatcatcctgcctctggcctttggcaagagacagggcagagaattcatctggaacgacctgctgtccctggaaaccggcagcctgaagctggccaacggaagagtgatcgagaagacactgtacaacagaagaacccggcaggatgagcctgccctgttcgtggccctgaccttcgagcggcgggaggtcctggactcctccaatatcaaaccaatgaacctgatcggcgtggcaagaggcgaaaacatccccgccgtgatcgccctgaccgaccccgagggctgcccactgagccggtttaaggatagcctgggaaacccaacccacatcctgagaatcggcgagagctataaggagaagcagcggaccatccaggccaagaaggaggtggagcagcggagagccggcggctacagccggaagtacgccagcaaagccaagaatctggcagacgatatggtgagaaacaccgctagagatctgctgtactacgccgtgacccaggatgccatgctgatcttcgccaacctgagccggggcttcggccggcagggcaagcggaccttcatggccgagagacagtacacacggatggaggactggctgaccgccaagctggcctacgagggcctgagcaagacctacctgtccaagacactggcccagtacacctccaagacatgcagcaactgtgggtttaccatcaccagcgccgactacgacagggtgctggagaagctgaagaagacagcaacaggctggatgaccacaattaacggcaaggagctgaaggtggagggccagattacctactacaacagatacaagagacagaacgtagtcaaggacctgtccgtcgagctggatagactgagcgaagaatctgtgaacaacgacatctcctcctggacaaagggcagaagcggagaagctctgagcctcctgaagaaaagattctcccatagacccgtgcaggagaagttcgtgtgcctgaactgcggcttcgagacacacgcagccgagcaagccgccctgaacatcgccagatcctggctgttcctgcggagccaggagtacaagaaataccagacaaacaagacaaccggcaacaccgataagagagccttcgtcgagacctggcagtccttttaccggaagaagcttaaggaggtgtggaaacctgccgtgcggtctggcggatctggcggaggctccaccagccccaagaaaaagagaaaagtctaagctgccttctgcggggcttgccttctggccatgcccttcttctctcccttgcacctgtacctcttggtctttgaataaagcctgagtaggaaggctagcaaaaaaaaaaaaaaaaaaaaaaaaaaaaaaaaaaaaaaaaaaaaaaaaaaaaaaaaaaaaaaaaaaaaaaaaaaaaaaaa

SEQ ID NO: 9174 - RNA, 8787 nt, synthetic construct
  source 1..8787: mol_type = other RNA
aggaaataagagagaaaagaagagtaagaagaaatataagagccaccatggcccctaagaagaagcgtaaagtgagccggatgaaccacgaccaggagttcgacccccctaaggtgtaccctcccgtccccgccgagaagagaaagcccatccgggtcctgagcctgttcgatggcatcgccaccggtctgctggtgctgaaggacctgggcatccaggtggataggtacattgcctccgaggtgtgcgaggactccatcaccgtgggaatggtgcgtcatcagggcaagatcatgtacgtgggcgacgtgcggagcgtgacacagaagcatatccaggagtggggccctttcgacctggtgatcggcggcagcccttgcaatgacctgagcatcgtgaacccagcccggaagggcctgtacgagggaaccggcagactgttcttcgagttttacagactgctgcacgacgcccggcctaaggaaggcgacgaccggcccttcttttggctgttcgagaatgtggtggccatgggagtcagcgacaagcgggatattagccggttcctggagagcaaccccgtgatgatcgatgccaaggaagtgagcgccgcccaccgggccagatacttctggggcaatctgcctggcatgaacagacccctggccagcaccgtgaacgacaagctggagctgcaggagtgcctggagcacggccggatcgccaagttcagcaaggtgagaaccatcaccacccgaagcaacagcatcaaacaaggcaaggaccagcactttcctgtgttcatgaacgagaaggaggacatcctgtggtgtaccgagatggagagagtgttcgggttcccagtccactacacagatgtcagcaacatgtctagactggccagacagagactgctgggaagaagctggtccgtccctgtgatcagacacctgttcgcccctctgaaggagtacttcgcctgcgtgagcagcggcaacagcaacgccaacagccggggccccagcttctctagcggcctggtgccactgtccctgagagggagccacatgggccccatggagatctacaaaaccgtgagcgcctggaagcggcagcctgtgcgcgtgctgagcctgtttcggaatatcgataaagtcctgaaaagcctgggattcctggagagcggctctggctccggcggtggcaccctgaagtacgtggaggatgtgacaaacgtggtcagacgggatgtggagaagtggggccccttcgatctggtgtacggcagcacccaacccctgggcagctcttgtgaccggtgccctggctggtacatgtttcagttccaccggatcctgcagtacgccctgccgagacaggagtcccagcggccattcttttggattttcatggacaacttgctgctgaccgaggatgaccaggaaactaccactcggttcctgcagaccgaagccgtgaccctgcaggacgtgagaggccgggactaccagaacgccatgcgggtgtggtccaacatccctggactgaaaagcaagcacgcacctctgacccctaaagaagaggagtacctgcaggcccaggtgcggagcagaagcaagctggacgcccctaaggtggatctgctggtgaagaattgcctcctgcccctgagagagtacttcaagtatttcagccagaatagtctgcccctgggaggcagcggcggcggctgcggcatgttccaggtgagcgtggccttcgaggacgtggccgtgaccttcacccaggaggagtgggccctgctggaccccagccagaagaccctgtacagggacgtgatgcaggagaacttcaggaacctggccagcgtgggcaagaagtggaaggcccagaacatctacgtggagtacaagaacctgaggaggaacctgaggaacctgaggggcaagaggctgttcgagagcaaggaggacggcggcccaagcagcggcgcccctcctcccagcggcggcaggcggcccaagcagcggcgcccctcctcccagcggcggcagcccagccggctccccaacctctaccgaggagggcacctctgagtccgccacccccgagagcggccctggcacctccaccgagcccagcgagggcagcgcacccggcagccctgccggcagccccacctccacagaggagggaaccagcaccgagcccagcgaaggcagcgccccaggcaccagcaccgagcctagtgagcaggagattaaacggatcaacaagatcagaagaagacttgtgaaagacagcaacaccaagaaggccggcaagacaggccccatgaaaaccctgctggttagagtgatgacacccgatctgagagagcggctggaaaacctgagaaagaagcctgaaaatatcccccagcccatcagcaatacatctagagccaacctgaataagctgctgaccgattacaccgaaatgaagaaggcgatcctgcatgtgtactgggaagagttccagaaggaccctgtgggcctgatgagccgggtggcccagcctgccagcaagaagatcgatcagaacaagctgaaacctgagatggacgagaagggcaacctgaccaccgccggctttgcctgctctcagtgtggccagcccctgttcgtgtacaagctggagcaggtgtctgagaagggcaaggcttacaccaactacttcggacggtgcaatgtggccgagcacgaaaagctgatcctgctggcccagctgaagcccgagaaggatagcgacgaagccgtgacatatagcctgggaaagtttgggcagagggccctggatttctacagcattcatgtgaccaaggagtccacccaccccgtgaagcccctggcccagatcgccggaaacagatacgcctccggacctgtgggaaaggccctgagcgacgcatgtatgggcacaatcgcctccttcctgtctaagtaccaggacatcatcatcgaacaccagaaggtggtgaagggcaaccagaagagactggagagcctgcgggagctggccggcaaggaaaacctggaataccctagcgtgaccctgccacctcagcctcacaccaaggagggcgttgatgcctacaacgaagtgatcgcccgggtgcgaatgtgggtgaacctgaacctgtggcagaagctgaagctaagcagagatgatgccaagcctctgctgagactgaagggattcccttcctttcctctggtcgagagacaggccaacgaagtggactggtgggacatggtgtgtaacgtgaagaagctgatcaacgagaaaaaggaggatggcaaggtgttttggcagaatctggctggctacaagagacaggaagccctgagaccatacctgagcagcgaggaagatcggaagaagggaaagaaattcgctcggtaccagctgggcgacctgctgctgcacctggaaaagaagcacggcgaggactggggaaaggtgtacgacgaggcctgggagcggattgacaagaaagtggaaggcctgagcaagcacatcaagctggaagaggaacggagaagcgaggacgcccagagcaaggccgccctgaccgactggctgcgggctaaggccagcttcgtgatcgagggcctgaaggaggccgacaaggacgagttctgcagatgcgagctgaagctgcagaagtggtacggggacctgcggggaaagcccttcgccatcgaagccgagaacagcatcctggacatcagcggcttcagcaagcagtacaactgtgccttcatctggcagaaggacggcgtgaagaagctgaacctgtacctgatcatcaactacttcaagggcggcaagctgcggttcaagaagatcaaacctgaagccttcgaagccaacagattctacaccgtgatcaacaaaaagagcggcgagatcgtgcccatggaggtgaacttcaacttcgacgaccccaacctgatcatcctgcctctggcctttggcaagagacagggcagagaattcatctggaacgacctgctgtccctggaaaccggcagcctgaagctggccaacggaagagtgatcgagaagacactgtacaacagaagaacccggcaggatgagcctgccctgttcgtggccctgaccttcgagcggcgggaggtcctggactcctccaatatcaaaccaatgaacctgatcggcgtggcaagaggcgaaaacatccccgccgtgatcgccctgaccgaccccgagggctgcccactgagccggtttaaggatagcctgggaaacccaacccacatcctgagaatcggcgagagctataaggagaagcagcggaccatccaggccaagaaggaggtggagcagcggagagccggcggctacagccggaagtacgccagcaaagccaagaatctggcagacgatatggtgagaaacaccgctagagatctgctgtactacgccgtgacccaggatgccatgctgatcttcgccaacctgagccggggcttcggccggcagggcaagcggaccttcatggccgagagacagtacacacggatggaggactggctgaccgccaagctggcctacgagggcctgagcaagacctacctgtccaagacactggcccagtacacctccaagacatgcagcaactgtgggtttaccatcaccagcgccgactacgacagggtgctggagaagctgaagaagacagcaacaggctggatgaccacaattaacggcaaggagctgaaggtggagggccagattacctactacaacagatacaagagacagaacgtagtcaaggacctgtccgtcgagctggatagactgagcgaagaatctgtgaacaacgacatctcctcctggacaaagggcagaagcggagaagctctgagcctcctgaagaaaagattctcccatagacccgtgcaggagaagttcgtgtgcctgaactgcggcttcgagacacacgcagccgagcaagccgccctgaacatcgccagatcctggctgttcctgcggagccaggagtacaagaaataccagacaaacaagacaaccggcaacaccgataagagagccttcgtcgagacctggcagtccttttaccggaagaagcttaaggaggtgtggaaacctgccgtgcggtctggcggatctggcggaggctccaccagccccaagaaaaagagaaaagtctaagctgccttctgcggggcttgccttctggccatgcccttcttctctcccttgcacctgtacctcttggtctttgaataaagcctgagtaggaaggctagcaaaaaaaaaaaaaaaaaaaaaaaaaaaaaaaaaaaaaaaaaaaaaaaaaaaaaaaaaaaaaaaaaaaaaaaaaaaaaaaagcccagccggctccccaacctctaccgaggagggcacctctgagtccgccacccccgagagcggccctggcacctccaccgagcccagcgagggcagcgcacccggcagccctgccggcagccccacctccacagaggagggaaccagcaccgagcccagcgaaggcagcgccccaggcaccagcaccgagcctagtgagcaggagattaaacggatcaacaagatcagaagaagacttgtgaaagacagcaacaccaagaaggccggcaagacaggccccatgaaaaccctgctggttagagtgatgacacccgatctgagagagcggctggaaaacctgagaaagaagcctgaaaatatcccccagcccatcagcaatacatctagagccaacctgaataagctgctgaccgattacaccgaaatgaagaaggcgatcctgcatgtgtactgggaagagttccagaaggaccctgtgggcctgatgagccgggtggcccagcctgccagcaagaagatcgatcagaacaagctgaaacctgagatggacgagaagggcaacctgaccaccgccggctttgcctgctctcagtgtggccagcccctgttcgtgtacaagctggagcaggtgtctgagaagggcaaggcttacaccaactacttcggacggtgcaatgtggccgagcacgaaaagctgatcctgctggcccagctgaagcccgagaaggatagcgacgaagccgtgacatatagcctgggaaagtttgggcagagggccctggatttctacagcattcatgtgaccaaggagtccacccaccccgtgaagcccctggcccagatcgccggaaacagatacgcctccggacctgtgggaaaggccctgagcgacgcatgtatgggcacaatcgcctccttcctgtctaagtaccaggacatcatcatcgaacaccagaaggtggtgaagggcaaccagaagagactggagagcctgcgggagctggccggcaaggaaaacctggaataccctagcgtgaccctgccacctcagcctcacaccaaggagggcgttgatgcctacaacgaagtgatcgcccgggtgcgaatgtgggtgaacctgaacctgtggcagaagctgaagctaagcagagatgatgccaagcctctgctgagactgaagggattcccttcctttcctctggtcgagagacaggccaacgaagtggactggtgggacatggtgtgtaacgtgaagaagctgatcaacgagaaaaaggaggatggcaaggtgttttggcagaatctggctggctacaagagacaggaagccctgagaccatacctgagcagcgaggaagatcggaagaagggaaagaaattcgctcggtaccagctgggcgacctgctgctgcacctggaaaagaagcacggcgaggactggggaaaggtgtacgacgaggcctgggagcggattgacaagaaagtggaaggcctgagcaagcacatcaagctggaagaggaacggagaagcgaggacgcccagagcaaggccgccctgaccgactggctgcgggctaaggccagcttcgtgatcgagggcctgaaggaggccgacaaggacgagttctgcagatgcgagctgaagctgcagaagtggtacggggacctgcggggaaagcccttcgccatcgaagccgagaacagcatcctggacatcagcggcttcagcaagcagtacaactgtgccttcatctggcagaaggacggcgtgaagaagctgaacctgtacctgatcatcaactacttcaagggcggcaagctgcggttcaagaagatcaaacctgaagccttcgaagccaacagattctacaccgtgatcaacaaaaagagcggcgagatcgtgcccatggaggtgaacttcaacttcgacgaccccaacctgatcatcctgcctctggcctttggcaagagacagggcagagaattcatctggaacgacctgctgtccctggaaaccggcagcctgaagctggccaacggaagagtgatcgagaagacactgtacaacagaagaacccggcaggatgagcctgccctgttcgtggccctgaccttcgagcggcgggaggtcctggactcctccaatatcaaaccaatgaacctgatcggcgtggcaagaggcgaaaacatccccgccgtgatcgccctgaccgaccccgagggctgcccactgagccggtttaaggatagcctgggaaacccaacccacatcctgagaatcggcgagagctataaggagaagcagcggaccatccaggccaagaaggaggtggagcagcggagagccggcggctacagccggaagtacgccagcaaagccaagaatctggcagacgatatggtgagaaacaccgctagagatctgctgtactacgccgtgacccaggatgccatgctgatcttcgccaacctgagccggggcttcggccggcagggcaagcggaccttcatggccgagagacagtacacacggatggaggactggctgaccgccaagctggcctacgagggcctgagcaagacctacctgtccaagacactggcccagtacacctccaagacatgcagcaactgtgggtttaccatcaccagcgccgactacgacagggtgctggagaagctgaagaagacagcaacaggctggatgaccacaattaacggcaaggagctgaaggtggagggccagattacctactacaacagatacaagagacagaacgtagtcaaggacctgtccgtcgagctggatagactgagcgaagaatctgtgaacaacgacatctcctcctggacaaagggcagaagcggagaagctctgagcctcctgaagaaaagattctcccatagacccgtgcaggagaagttcgtgtgcctgaactgcggcttcgagacacacgcagccgagcaagccgccctgaacatcgccagatcctggctgttcctgcggagccaggagtacaagaaataccagacaaacaagacaaccggcaacaccgataagagagccttcgtcgagacctggcagtccttttaccggaagaagcttaaggaggtgtggaaacctgccgtgcggtctggcggatctggcggaggctccaccagccccaagaaaaagagaaaagtctaagctgccttctgcggggcttgccttctggccatgcccttcttctctcccttgcacctgtacctcttggtctttgaataaagcctgagtaggaaggctagcaaaaaaaaaaaaaaaaaaaaaaaaaaaaaaaaaaaaaaaaaaaaaaaaaaaaaaaaaaaaaaaaaaaaaaaaaaaaaaaa

SEQ ID NO: 9175 - RNA, 8787 nt, synthetic construct
  source 1..8787: mol_type = other RNA
aggaaataagagagaaaagaagagtaagaagaaatataagagccaccatggcccctaagaagaagcgtaaagtgagccggatgaaccacgaccaggagttcgacccccctaaggtgtaccctcccgtccccgccgagaagagaaagcccatccgggtcctgagcctgttcgatggcatcgccaccggtctgctggtgctgaaggacctgggcatccaggtggataggtacattgcctccgaggtgtgcgaggactccatcaccgtgggaatggtgcgtcatcagggcaagatcatgtacgtgggcgacgtgcggagcgtgacacagaagcatatccaggagtggggccctttcgacctggtgatcggcggcagcccttgcaatgacctgagcatcgtgaacccagcccggaagggcctgtacgagggaaccggcagactgttcttcgagttttacagactgctgcacgacgcccggcctaaggaaggcgacgaccggcccttcttttggctgttcgagaatgtggtggccatgggagtcagcgacaagcgggatattagccggttcctggagagcaaccccgtgatgatcgatgccaaggaagtgagcgccgcccaccgggccagatacttctggggcaatctgcctggcatgaacagacccctggccagcaccgtgaacgacaagctggagctgcaggagtgcctggagcacggccggatcgccaagttcagcaaggtgagaaccatcaccacccgaagcaacagcatcaaacaaggcaaggaccagcactttcctgtgttcatgaacgagaaggaggacatcctgtggtgtaccgagatggagagagtgttcgggttcccagtccactacacagatgtcagcaacatgtctagactggccagacagagactgctgggaagaagctggtccgtccctgtgatcagacacctgttcgcccctctgaaggagtacttcgcctgcgtgagcagcggcaacagcaacgccaacagccggggccccagcttctctagcggcctggtgccactgtccctgagagggagccacatgggccccatggagatctacaaaaccgtgagcgcctggaagcggcagcctgtgcgcgtgctgagcctgtttcggaatatcgataaagtcctgaaaagcctgggattcctggagagcggctctggctccggcggtggcaccctgaagtacgtggaggatgtgacaaacgtggtcagacgggatgtggagaagtggggccccttcgatctggtgtacggcagcacccaacccctgggcagctcttgtgaccggtgccctggctggtacatgtttcagttccaccggatcctgcagtacgccctgccgagacaggagtcccagcggccattcttttggattttcatggacaacttgctgctgaccgaggatgaccaggaaactaccactcggttcctgcagaccgaagccgtgaccctgcaggacgtgagaggccgggactaccagaacgccatgcgggtgtggtccaacatccctggactgaaaagcaagcacgcacctctgacccctaaagaagaggagtacctgcaggcccaggtgcggagcagaagcaagctggacgcccctaaggtggatctgctggtgaagaattgcctcctgcccctgagagagtacttcaagtatttcagccagaatagtctgcccctgggaggcagcggcggcggcatggccttcgaggacgtggccgtgtacttcagccaggaggagtggggcctgctggacaccgcccagagggccctgtacaggcacgtgatgctggagaacttcaccctggtgaccagcctgggcctgagcaccagcaggccccacgtggtgatccagctggagaggggcgaggagccctgggtgcccagcggcaaggacatgaccctggccaggaacacctacaggaggctgaacgccggcagcggcggcccaagcagcggcgcccctcctcccagcggcggcaggcggcccaagcagcggcgcccctcctcccagcggcggcagcccagccggctccccaacctctaccgaggagggcacctctgagtccgccacccccgagagcggccctggcacctccaccgagcccagcgagggcagcgcacccggcagccctgccggcagccccacctccacagaggagggaaccagcaccgagcccagcgaaggcagcgccccaggcaccagcaccgagcctagtgagcaggagattaaacggatcaacaagatcagaagaagacttgtgaaagacagcaacaccaagaaggccggcaagacaggccccatgaaaaccctgctggttagagtgatgacacccgatctgagagagcggctggaaaacctgagaaagaagcctgaaaatatcccccagcccatcagcaatacatctagagccaacctgaataagctgctgaccgattacaccgaaatgaagaaggcgatcctgcatgtgtactgggaagagttccagaaggaccctgtgggcctgatgagccgggtggcccagcctgccagcaagaagatcgatcagaacaagctgaaacctgagatggacgagaagggcaacctgaccaccgccggctttgcctgctctcagtgtggccagcccctgttcgtgtacaagctggagcaggtgtctgagaagggcaaggcttacaccaactacttcggacggtgcaatgtggccgagcacgaaaagctgatcctgctggcccagctgaagcccgagaaggatagcgacgaagccgtgacatatagcctgggaaagtttgggcagagggccctggatttctacagcattcatgtgaccaaggagtccacccaccccgtgaagcccctggcccagatcgccggaaacagatacgcctccggacctgtgggaaaggccctgagcgacgcatgtatgggcacaatcgcctccttcctgtctaagtaccaggacatcatcatcgaacaccagaaggtggtgaagggcaaccagaagagactggagagcctgcgggagctggccggcaaggaaaacctggaataccctagcgtgaccctgccacctcagcctcacaccaaggagggcgttgatgcctacaacgaagtgatcgcccgggtgcgaatgtgggtgaacctgaacctgtggcagaagctgaagctaagcagagatgatgccaagcctctgctgagactgaagggattcccttcctttcctctggtcgagagacaggccaacgaagtggactggtgggacatggtgtgtaacgtgaagaagctgatcaacgagaaaaaggaggatggcaaggtgttttggcagaatctggctggctacaagagacaggaagccctgagaccatacctgagcagcgaggaagatcggaagaagggaaagaaattcgctcggtaccagctgggcgacctgctgctgcacctggaaaagaagcacggcgaggactggggaaaggtgtacgacgaggcctgggagcggattgacaagaaagtggaaggcctgagcaagcacatcaagctggaagaggaacggagaagcgaggacgcccagagcaaggccgccctgaccgactggctgcgggctaaggccagcttcgtgatcgagggcctgaaggaggccgacaaggacgagttctgcagatgcgagctgaagctgcagaagtggtacggggacctgcggggaaagcccttcgccatcgaagccgagaacagcatcctggacatcagcggcttcagcaagcagtacaactgtgccttcatctggcagaaggacggcgtgaagaagctgaacctgtacctgatcatcaactacttcaagggcggcaagctgcggttcaagaagatcaaacctgaagccttcgaagccaacagattctacaccgtgatcaacaaaaagagcggcgagatcgtgcccatggaggtgaacttcaacttcgacgaccccaacctgatcatcctgcctctggcctttggcaagagacagggcagagaattcatctggaacgacctgctgtccctggaaaccggcagcctgaagctggccaacggaagagtgatcgagaagacactgtacaacagaagaacccggcaggatgagcctgccctgttcgtggccctgaccttcgagcggcgggaggtcctggactcctccaatatcaaaccaatgaacctgatcggcgtggcaagaggcgaaaacatccccgccgtgatcgccctgaccgaccccgagggctgcccactgagccggtttaaggatagcctgggaaacccaacccacatcctgagaatcggcgagagctataaggagaagcagcggaccatccaggccaagaaggaggtggagcagcggagagccggcggctacagccggaagtacgccagcaaagccaagaatctggcagacgatatggtgagaaacaccgctagagatctgctgtactacgccgtgacccaggatgccatgctgatcttcgccaacctgagccggggcttcggccggcagggcaagcggaccttcatggccgagagacagtacacacggatggaggactggctgaccgccaagctggcctacgagggcctgagcaagacctacctgtccaagacactggcccagtacacctccaagacatgcagcaactgtgggtttaccatcaccagcgccgactacgacagggtgctggagaagctgaagaagacagcaacaggctggatgaccacaattaacggcaaggagctgaaggtggagggccagattacctactacaacagatacaagagacagaacgtagtcaaggacctgtccgtcgagctggatagactgagcgaagaatctgtgaacaacgacatctcctcctggacaaagggcagaagcggagaagctctgagcctcctgaagaaaagattctcccatagacccgtgcaggagaagttcgtgtgcctgaactgcggcttcgagacacacgcagccgagcaagccgccctgaacatcgccagatcctggctgttcctgcggagccaggagtacaagaaataccagacaaacaagacaaccggcaacaccgataagagagccttcgtcgagacctggcagtccttttaccggaagaagcttaaggaggtgtggaaacctgccgtgcggtctggcggatctggcggaggctccaccagccccaagaaaaagagaaaagtctaagctgccttctgcggggcttgccttctggccatgcccttcttctctcccttgcacctgtacctcttggtctttgaataaagcctgagtaggaaggctagcaaaaaaaaaaaaaaaaaaaaaaaaaaaaaaaaaaaaaaaaaaaaaaaaaaaaaaaaaaaaaaaaaaaaaaaaaaaaaaaagcccagccggctccccaacctctaccgaggagggcacctctgagtccgccacccccgagagcggccctggcacctccaccgagcccagcgagggcagcgcacccggcagccctgccggcagccccacctccacagaggagggaaccagcaccgagcccagcgaaggcagcgccccaggcaccagcaccgagcctagtgagcaggagattaaacggatcaacaagatcagaagaagacttgtgaaagacagcaacaccaagaaggccggcaagacaggccccatgaaaaccctgctggttagagtgatgacacccgatctgagagagcggctggaaaacctgagaaagaagcctgaaaatatcccccagcccatcagcaatacatctagagccaacctgaataagctgctgaccgattacaccgaaatgaagaaggcgatcctgcatgtgtactgggaagagttccagaaggaccctgtgggcctgatgagccgggtggcccagcctgccagcaagaagatcgatcagaacaagctgaaacctgagatggacgagaagggcaacctgaccaccgccggctttgcctgctctcagtgtggccagcccctgttcgtgtacaagctggagcaggtgtctgagaagggcaaggcttacaccaactacttcggacggtgcaatgtggccgagcacgaaaagctgatcctgctggcccagctgaagcccgagaaggatagcgacgaagccgtgacatatagcctgggaaagtttgggcagagggccctggatttctacagcattcatgtgaccaaggagtccacccaccccgtgaagcccctggcccagatcgccggaaacagatacgcctccggacctgtgggaaaggccctgagcgacgcatgtatgggcacaatcgcctccttcctgtctaagtaccaggacatcatcatcgaacaccagaaggtggtgaagggcaaccagaagagactggagagcctgcgggagctggccggcaaggaaaacctggaataccctagcgtgaccctgccacctcagcctcacaccaaggagggcgttgatgcctacaacgaagtgatcgcccgggtgcgaatgtgggtgaacctgaacctgtggcagaagctgaagctaagcagagatgatgccaagcctctgctgagactgaagggattcccttcctttcctctggtcgagagacaggccaacgaagtggactggtgggacatggtgtgtaacgtgaagaagctgatcaacgagaaaaaggaggatggcaaggtgttttggcagaatctggctggctacaagagacaggaagccctgagaccatacctgagcagcgaggaagatcggaagaagggaaagaaattcgctcggtaccagctgggcgacctgctgctgcacctggaaaagaagcacggcgaggactggggaaaggtgtacgacgaggcctgggagcggattgacaagaaagtggaaggcctgagcaagcacatcaagctggaagaggaacggagaagcgaggacgcccagagcaaggccgccctgaccgactggctgcgggctaaggccagcttcgtgatcgagggcctgaaggaggccgacaaggacgagttctgcagatgcgagctgaagctgcagaagtggtacggggacctgcggggaaagcccttcgccatcgaagccgagaacagcatcctggacatcagcggcttcagcaagcagtacaactgtgccttcatctggcagaaggacggcgtgaagaagctgaacctgtacctgatcatcaactacttcaagggcggcaagctgcggttcaagaagatcaaacctgaagccttcgaagccaacagattctacaccgtgatcaacaaaaagagcggcgagatcgtgcccatggaggtgaacttcaacttcgacgaccccaacctgatcatcctgcctctggcctttggcaagagacagggcagagaattcatctggaacgacctgctgtccctggaaaccggcagcctgaagctggccaacggaagagtgatcgagaagacactgtacaacagaagaacccggcaggatgagcctgccctgttcgtggccctgaccttcgagcggcgggaggtcctggactcctccaatatcaaaccaatgaacctgatcggcgtggcaagaggcgaaaacatccccgccgtgatcgccctgaccgaccccgagggctgcccactgagccggtttaaggatagcctgggaaacccaacccacatcctgagaatcggcgagagctataaggagaagcagcggaccatccaggccaagaaggaggtggagcagcggagagccggcggctacagccggaagtacgccagcaaagccaagaatctggcagacgatatggtgagaaacaccgctagagatctgctgtactacgccgtgacccaggatgccatgctgatcttcgccaacctgagccggggcttcggccggcagggcaagcggaccttcatggccgagagacagtacacacggatggaggactggctgaccgccaagctggcctacgagggcctgagcaagacctacctgtccaagacactggcccagtacacctccaagacatgcagcaactgtgggtttaccatcaccagcgccgactacgacagggtgctggagaagctgaagaagacagcaacaggctggatgaccacaattaacggcaaggagctgaaggtggagggccagattacctactacaacagatacaagagacagaacgtagtcaaggacctgtccgtcgagctggatagactgagcgaagaatctgtgaacaacgacatctcctcctggacaaagggcagaagcggagaagctctgagcctcctgaagaaaagattctcccatagacccgtgcaggagaagttcgtgtgcctgaactgcggcttcgagacacacgcagccgagcaagccgccctgaacatcgccagatcctggctgttcctgcggagccaggagtacaagaaataccagacaaacaagacaaccggcaacaccgataagagagccttcgtcgagacctggcagtccttttaccggaagaagcttaaggaggtgtggaaacctgccgtgcggtctggcggatctggcggaggctccaccagccccaagaaaaagagaaaagtctaagctgccttctgcggggcttgccttctggccatgcccttcttctctcccttgcacctgtacctcttggtctttgaataaagcctgagtaggaaggctagcaaaaaaaaaaaaaaaaaaaaaaaaaaaaaaaaaaaaaaaaaaaaaaaaaaaaaaaaaaaaaaaaaaaaaaaaaaaaaaaa

SEQ ID NO: 9176 - RNA, 8787 nt, synthetic construct
  source 1..8787: mol_type = other RNA
aggaaataagagagaaaagaagagtaagaagaaatataagagccaccatggcccctaagaagaagcgtaaagtgagccggatgaaccacgaccaggagttcgacccccctaaggtgtaccctcccgtccccgccgagaagagaaagcccatccgggtcctgagcctgttcgatggcatcgccaccggtctgctggtgctgaaggacctgggcatccaggtggataggtacattgcctccgaggtgtgcgaggactccatcaccgtgggaatggtgcgtcatcagggcaagatcatgtacgtgggcgacgtgcggagcgtgacacagaagcatatccaggagtggggccctttcgacctggtgatcggcggcagcccttgcaatgacctgagcatcgtgaacccagcccggaagggcctgtacgagggaaccggcagactgttcttcgagttttacagactgctgcacgacgcccggcctaaggaaggcgacgaccggcccttcttttggctgttcgagaatgtggtggccatgggagtcagcgacaagcgggatattagccggttcctggagagcaaccccgtgatgatcgatgccaaggaagtgagcgccgcccaccgggccagatacttctggggcaatctgcctggcatgaacagacccctggccagcaccgtgaacgacaagctggagctgcaggagtgcctggagcacggccggatcgccaagttcagcaaggtgagaaccatcaccacccgaagcaacagcatcaaacaaggcaaggaccagcactttcctgtgttcatgaacgagaaggaggacatcctgtggtgtaccgagatggagagagtgttcgggttcccagtccactacacagatgtcagcaacatgtctagactggccagacagagactgctgggaagaagctggtccgtccctgtgatcagacacctgttcgcccctctgaaggagtacttcgcctgcgtgagcagcggcaacagcaacgccaacagccggggccccagcttctctagcggcctggtgccactgtccctgagagggagccacatgggccccatggagatctacaaaaccgtgagcgcctggaagcggcagcctgtgcgcgtgctgagcctgtttcggaatatcgataaagtcctgaaaagcctgggattcctggagagcggctctggctccggcggtggcaccctgaagtacgtggaggatgtgacaaacgtggtcagacgggatgtggagaagtggggccccttcgatctggtgtacggcagcacccaacccctgggcagctcttgtgaccggtgccctggctggtacatgtttcagttccaccggatcctgcagtacgccctgccgagacaggagtcccagcggccattcttttggattttcatggacaacttgctgctgaccgaggatgaccaggaaactaccactcggttcctgcagaccgaagccgtgaccctgcaggacgtgagaggccgggactaccagaacgccatgcgggtgtggtccaacatccctggactgaaaagcaagcacgcacctctgacccctaaagaagaggagtacctgcaggcccaggtgcggagcagaagcaagctggacgcccctaaggtggatctgctggtgaagaattgcctcctgcccctgagagagtacttcaagtatttcagccagaatagtctgcccctgggaggcagcggcggcggcaggagcgaggccctgagcttcgccgacgtgagcgtgagcttcagcagggaggagtggggctgcctgaggcccgcccagaaggccctgtacagggacgtgatgagggagacctgcggcctgctgggcgccctgggcctgagcggccccaagcccgccttcatcagctggctggagggcgagatggaggcctggagccccgaggcccacgagcccgagagggagagcagggccgccgacgccaggggcggcccaagcagcggcgcccctcctcccagcggcggcaggcggcccaagcagcggcgcccctcctcccagcggcggcagcccagccggctccccaacctctaccgaggagggcacctctgagtccgccacccccgagagcggccctggcacctccaccgagcccagcgagggcagcgcacccggcagccctgccggcagccccacctccacagaggagggaaccagcaccgagcccagcgaaggcagcgccccaggcaccagcaccgagcctagtgagcaggagattaaacggatcaacaagatcagaagaagacttgtgaaagacagcaacaccaagaaggccggcaagacaggccccatgaaaaccctgctggttagagtgatgacacccgatctgagagagcggctggaaaacctgagaaagaagcctgaaaatatcccccagcccatcagcaatacatctagagccaacctgaataagctgctgaccgattacaccgaaatgaagaaggcgatcctgcatgtgtactgggaagagttccagaaggaccctgtgggcctgatgagccgggtggcccagcctgccagcaagaagatcgatcagaacaagctgaaacctgagatggacgagaagggcaacctgaccaccgccggctttgcctgctctcagtgtggccagcccctgttcgtgtacaagctggagcaggtgtctgagaagggcaaggcttacaccaactacttcggacggtgcaatgtggccgagcacgaaaagctgatcctgctggcccagctgaagcccgagaaggatagcgacgaagccgtgacatatagcctgggaaagtttgggcagagggccctggatttctacagcattcatgtgaccaaggagtccacccaccccgtgaagcccctggcccagatcgccggaaacagatacgcctccggacctgtgggaaaggccctgagcgacgcatgtatgggcacaatcgcctccttcctgtctaagtaccaggacatcatcatcgaacaccagaaggtggtgaagggcaaccagaagagactggagagcctgcgggagctggccggcaaggaaaacctggaataccctagcgtgaccctgccacctcagcctcacaccaaggagggcgttgatgcctacaacgaagtgatcgcccgggtgcgaatgtgggtgaacctgaacctgtggcagaagctgaagctaagcagagatgatgccaagcctctgctgagactgaagggattcccttcctttcctctggtcgagagacaggccaacgaagtggactggtgggacatggtgtgtaacgtgaagaagctgatcaacgagaaaaaggaggatggcaaggtgttttggcagaatctggctggctacaagagacaggaagccctgagaccatacctgagcagcgaggaagatcggaagaagggaaagaaattcgctcggtaccagctgggcgacctgctgctgcacctggaaaagaagcacggcgaggactggggaaaggtgtacgacgaggcctgggagcggattgacaagaaagtggaaggcctgagcaagcacatcaagctggaagaggaacggagaagcgaggacgcccagagcaaggccgccctgaccgactggctgcgggctaaggccagcttcgtgatcgagggcctgaaggaggccgacaaggacgagttctgcagatgcgagctgaagctgcagaagtggtacggggacctgcggggaaagcccttcgccatcgaagccgagaacagcatcctggacatcagcggcttcagcaagcagtacaactgtgccttcatctggcagaaggacggcgtgaagaagctgaacctgtacctgatcatcaactacttcaagggcggcaagctgcggttcaagaagatcaaacctgaagccttcgaagccaacagattctacaccgtgatcaacaaaaagagcggcgagatcgtgcccatggaggtgaacttcaacttcgacgaccccaacctgatcatcctgcctctggcctttggcaagagacagggcagagaattcatctggaacgacctgctgtccctggaaaccggcagcctgaagctggccaacggaagagtgatcgagaagacactgtacaacagaagaacccggcaggatgagcctgccctgttcgtggccctgaccttcgagcggcgggaggtcctggactcctccaatatcaaaccaatgaacctgatcggcgtggcaagaggcgaaaacatccccgccgtgatcgccctgaccgaccccgagggctgcccactgagccggtttaaggatagcctgggaaacccaacccacatcctgagaatcggcgagagctataaggagaagcagcggaccatccaggccaagaaggaggtggagcagcggagagccggcggctacagccggaagtacgccagcaaagccaagaatctggcagacgatatggtgagaaacaccgctagagatctgctgtactacgccgtgacccaggatgccatgctgatcttcgccaacctgagccggggcttcggccggcagggcaagcggaccttcatggccgagagacagtacacacggatggaggactggctgaccgccaagctggcctacgagggcctgagcaagacctacctgtccaagacactggcccagtacacctccaagacatgcagcaactgtgggtttaccatcaccagcgccgactacgacagggtgctggagaagctgaagaagacagcaacaggctggatgaccacaattaacggcaaggagctgaaggtggagggccagattacctactacaacagatacaagagacagaacgtagtcaaggacctgtccgtcgagctggatagactgagcgaagaatctgtgaacaacgacatctcctcctggacaaagggcagaagcggagaagctctgagcctcctgaagaaaagattctcccatagacccgtgcaggagaagttcgtgtgcctgaactgcggcttcgagacacacgcagccgagcaagccgccctgaacatcgccagatcctggctgttcctgcggagccaggagtacaagaaataccagacaaacaagacaaccggcaacaccgataagagagccttcgtcgagacctggcagtccttttaccggaagaagcttaaggaggtgtggaaacctgccgtgcggtctggcggatctggcggaggctccaccagccccaagaaaaagagaaaagtctaagctgccttctgcggggcttgccttctggccatgcccttcttctctcccttgcacctgtacctcttggtctttgaataaagcctgagtaggaaggctagcaaaaaaaaaaaaaaaaaaaaaaaaaaaaaaaaaaaaaaaaaaaaaaaaaaaaaaaaaaaaaaaaaaaaaaaaaaaaaaaagcccagccggctccccaacctctaccgaggagggcacctctgagtccgccacccccgagagcggccctggcacctccaccgagcccagcgagggcagcgcacccggcagccctgccggcagccccacctccacagaggagggaaccagcaccgagcccagcgaaggcagcgccccaggcaccagcaccgagcctagtgagcaggagattaaacggatcaacaagatcagaagaagacttgtgaaagacagcaacaccaagaaggccggcaagacaggccccatgaaaaccctgctggttagagtgatgacacccgatctgagagagcggctggaaaacctgagaaagaagcctgaaaatatcccccagcccatcagcaatacatctagagccaacctgaataagctgctgaccgattacaccgaaatgaagaaggcgatcctgcatgtgtactgggaagagttccagaaggaccctgtgggcctgatgagccgggtggcccagcctgccagcaagaagatcgatcagaacaagctgaaacctgagatggacgagaagggcaacctgaccaccgccggctttgcctgctctcagtgtggccagcccctgttcgtgtacaagctggagcaggtgtctgagaagggcaaggcttacaccaactacttcggacggtgcaatgtggccgagcacgaaaagctgatcctgctggcccagctgaagcccgagaaggatagcgacgaagccgtgacatatagcctgggaaagtttgggcagagggccctggatttctacagcattcatgtgaccaaggagtccacccaccccgtgaagcccctggcccagatcgccggaaacagatacgcctccggacctgtgggaaaggccctgagcgacgcatgtatgggcacaatcgcctccttcctgtctaagtaccaggacatcatcatcgaacaccagaaggtggtgaagggcaaccagaagagactggagagcctgcgggagctggccggcaaggaaaacctggaataccctagcgtgaccctgccacctcagcctcacaccaaggagggcgttgatgcctacaacgaagtgatcgcccgggtgcgaatgtgggtgaacctgaacctgtggcagaagctgaagctaagcagagatgatgccaagcctctgctgagactgaagggattcccttcctttcctctggtcgagagacaggccaacgaagtggactggtgggacatggtgtgtaacgtgaagaagctgatcaacgagaaaaaggaggatggcaaggtgttttggcagaatctggctggctacaagagacaggaagccctgagaccatacctgagcagcgaggaagatcggaagaagggaaagaaattcgctcggtaccagctgggcgacctgctgctgcacctggaaaagaagcacggcgaggactggggaaaggtgtacgacgaggcctgggagcggattgacaagaaagtggaaggcctgagcaagcacatcaagctggaagaggaacggagaagcgaggacgcccagagcaaggccgccctgaccgactggctgcgggctaaggccagcttcgtgatcgagggcctgaaggaggccgacaaggacgagttctgcagatgcgagctgaagctgcagaagtggtacggggacctgcggggaaagcccttcgccatcgaagccgagaacagcatcctggacatcagcggcttcagcaagcagtacaactgtgccttcatctggcagaaggacggcgtgaagaagctgaacctgtacctgatcatcaactacttcaagggcggcaagctgcggttcaagaagatcaaacctgaagccttcgaagccaacagattctacaccgtgatcaacaaaaagagcggcgagatcgtgcccatggaggtgaacttcaacttcgacgaccccaacctgatcatcctgcctctggcctttggcaagagacagggcagagaattcatctggaacgacctgctgtccctggaaaccggcagcctgaagctggccaacggaagagtgatcgagaagacactgtacaacagaagaacccggcaggatgagcctgccctgttcgtggccctgaccttcgagcggcgggaggtcctggactcctccaatatcaaaccaatgaacctgatcggcgtggcaagaggcgaaaacatccccgccgtgatcgccctgaccgaccccgagggctgcccactgagccggtttaaggatagcctgggaaacccaacccacatcctgagaatcggcgagagctataaggagaagcagcggaccatccaggccaagaaggaggtggagcagcggagagccggcggctacagccggaagtacgccagcaaagccaagaatctggcagacgatatggtgagaaacaccgctagagatctgctgtactacgccgtgacccaggatgccatgctgatcttcgccaacctgagccggggcttcggccggcagggcaagcggaccttcatggccgagagacagtacacacggatggaggactggctgaccgccaagctggcctacgagggcctgagcaagacctacctgtccaagacactggcccagtacacctccaagacatgcagcaactgtgggtttaccatcaccagcgccgactacgacagggtgctggagaagctgaagaagacagcaacaggctggatgaccacaattaacggcaaggagctgaaggtggagggccagattacctactacaacagatacaagagacagaacgtagtcaaggacctgtccgtcgagctggatagactgagcgaagaatctgtgaacaacgacatctcctcctggacaaagggcagaagcggagaagctctgagcctcctgaagaaaagattctcccatagacccgtgcaggagaagttcgtgtgcctgaactgcggcttcgagacacacgcagccgagcaagccgccctgaacatcgccagatcctggctgttcctgcggagccaggagtacaagaaataccagacaaacaagacaaccggcaacaccgataagagagccttcgtcgagacctggcagtccttttaccggaagaagcttaaggaggtgtggaaacctgccgtgcggtctggcggatctggcggaggctccaccagccccaagaaaaagagaaaagtctaagctgccttctgcggggcttgccttctggccatgcccttcttctctcccttgcacctgtacctcttggtctttgaataaagcctgagtaggaaggctagcaaaaaaaaaaaaaaaaaaaaaaaaaaaaaaaaaaaaaaaaaaaaaaaaaaaaaaaaaaaaaaaaaaaaaaaaaaaaaaaa

SEQ ID NO: 9177 - RNA, 8805 nt, synthetic construct
  source 1..8805: mol_type = other RNA
aggaaataagagagaaaagaagagtaagaagaaatataagagccaccatggcccctaagaagaagcgtaaagtgagccggatgaaccacgaccaggagttcgacccccctaaggtgtaccctcccgtccccgccgagaagagaaagcccatccgggtcctgagcctgttcgatggcatcgccaccggtctgctggtgctgaaggacctgggcatccaggtggataggtacattgcctccgaggtgtgcgaggactccatcaccgtgggaatggtgcgtcatcagggcaagatcatgtacgtgggcgacgtgcggagcgtgacacagaagcatatccaggagtggggccctttcgacctggtgatcggcggcagcccttgcaatgacctgagcatcgtgaacccagcccggaagggcctgtacgagggaaccggcagactgttcttcgagttttacagactgctgcacgacgcccggcctaaggaaggcgacgaccggcccttcttttggctgttcgagaatgtggtggccatgggagtcagcgacaagcgggatattagccggttcctggagagcaaccccgtgatgatcgatgccaaggaagtgagcgccgcccaccgggccagatacttctggggcaatctgcctggcatgaacagacccctggccagcaccgtgaacgacaagctggagctgcaggagtgcctggagcacggccggatcgccaagttcagcaaggtgagaaccatcaccacccgaagcaacagcatcaaacaaggcaaggaccagcactttcctgtgttcatgaacgagaaggaggacatcctgtggtgtaccgagatggagagagtgttcgggttcccagtccactacacagatgtcagcaacatgtctagactggccagacagagactgctgggaagaagctggtccgtccctgtgatcagacacctgttcgcccctctgaaggagtacttcgcctgcgtgagcagcggcaacagcaacgccaacagccggggccccagcttctctagcggcctggtgccactgtccctgagagggagccacatgggccccatggagatctacaaaaccgtgagcgcctggaagcggcagcctgtgcgcgtgctgagcctgtttcggaatatcgataaagtcctgaaaagcctgggattcctggagagcggctctggctccggcggtggcaccctgaagtacgtggaggatgtgacaaacgtggtcagacgggatgtggagaagtggggccccttcgatctggtgtacggcagcacccaacccctgggcagctcttgtgaccggtgccctggctggtacatgtttcagttccaccggatcctgcagtacgccctgccgagacaggagtcccagcggccattcttttggattttcatggacaacttgctgctgaccgaggatgaccaggaaactaccactcggttcctgcagaccgaagccgtgaccctgcaggacgtgagaggccgggactaccagaacgccatgcgggtgtggtccaacatccctggactgaaaagcaagcacgcacctctgacccctaaagaagaggagtacctgcaggcccaggtgcggagcagaagcaagctggacgcccctaaggtggatctgctggtgaagaattgcctcctgcccctgagagagtacttcaagtatttcagccagaatagtctgcccctgggaggcagcggcggcggcgtgaccttcgaggacgtggccgtgaacttcaccctggaggagtgggccctgctggaccccagccagaagaagctgtacagggacgtgatgagggagaccctgaggaacctggccagcgtgggcgagaagtgggaggaccacgacatcgaggaccagtacaagaaccagggcaggaagctgaggagccacgtgctggagaggctgtgcgagagcaaggagggcagccagtgcggcgagaacttcagcctgatccccaacctgggcggcccaagcagcggcgcccctcctcccagcggcggcaggcggcccaagcagcggcgcccctcctcccagcggcggcagcccagccggctccccaacctctaccgaggagggcacctctgagtccgccacccccgagagcggccctggcacctccaccgagcccagcgagggcagcgcacccggcagccctgccggcagccccacctccacagaggagggaaccagcaccgagcccagcgaaggcagcgccccaggcaccagcaccgagcctagtgagcaggagattaaacggatcaacaagatcagaagaagacttgtgaaagacagcaacaccaagaaggccggcaagacaggccccatgaaaaccctgctggttagagtgatgacacccgatctgagagagcggctggaaaacctgagaaagaagcctgaaaatatcccccagcccatcagcaatacatctagagccaacctgaataagctgctgaccgattacaccgaaatgaagaaggcgatcctgcatgtgtactgggaagagttccagaaggaccctgtgggcctgatgagccgggtggcccagcctgccagcaagaagatcgatcagaacaagctgaaacctgagatggacgagaagggcaacctgaccaccgccggctttgcctgctctcagtgtggccagcccctgttcgtgtacaagctggagcaggtgtctgagaagggcaaggcttacaccaactacttcggacggtgcaatgtggccgagcacgaaaagctgatcctgctggcccagctgaagcccgagaaggatagcgacgaagccgtgacatatagcctgggaaagtttgggcagagggccctggatttctacagcattcatgtgaccaaggagtccacccaccccgtgaagcccctggcccagatcgccggaaacagatacgcctccggacctgtgggaaaggccctgagcgacgcatgtatgggcacaatcgcctccttcctgtctaagtaccaggacatcatcatcgaacaccagaaggtggtgaagggcaaccagaagagactggagagcctgcgggagctggccggcaaggaaaacctggaataccctagcgtgaccctgccacctcagcctcacaccaaggagggcgttgatgcctacaacgaagtgatcgcccgggtgcgaatgtgggtgaacctgaacctgtggcagaagctgaagctaagcagagatgatgccaagcctctgctgagactgaagggattcccttcctttcctctggtcgagagacaggccaacgaagtggactggtgggacatggtgtgtaacgtgaagaagctgatcaacgagaaaaaggaggatggcaaggtgttttggcagaatctggctggctacaagagacaggaagccctgagaccatacctgagcagcgaggaagatcggaagaagggaaagaaattcgctcggtaccagctgggcgacctgctgctgcacctggaaaagaagcacggcgaggactggggaaaggtgtacgacgaggcctgggagcggattgacaagaaagtggaaggcctgagcaagcacatcaagctggaagaggaacggagaagcgaggacgcccagagcaaggccgccctgaccgactggctgcgggctaaggccagcttcgtgatcgagggcctgaaggaggccgacaaggacgagttctgcagatgcgagctgaagctgcagaagtggtacggggacctgcggggaaagcccttcgccatcgaagccgagaacagcatcctggacatcagcggcttcagcaagcagtacaactgtgccttcatctggcagaaggacggcgtgaagaagctgaacctgtacctgatcatcaactacttcaagggcggcaagctgcggttcaagaagatcaaacctgaagccttcgaagccaacagattctacaccgtgatcaacaaaaagagcggcgagatcgtgcccatggaggtgaacttcaacttcgacgaccccaacctgatcatcctgcctctggcctttggcaagagacagggcagagaattcatctggaacgacctgctgtccctggaaaccggcagcctgaagctggccaacggaagagtgatcgagaagacactgtacaacagaagaacccggcaggatgagcctgccctgttcgtggccctgaccttcgagcggcgggaggtcctggactcctccaatatcaaaccaatgaacctgatcggcgtggcaagaggcgaaaacatccccgccgtgatcgccctgaccgaccccgagggctgcccactgagccggtttaaggatagcctgggaaacccaacccacatcctgagaatcggcgagagctataaggagaagcagcggaccatccaggccaagaaggaggtggagcagcggagagccggcggctacagccggaagtacgccagcaaagccaagaatctggcagacgatatggtgagaaacaccgctagagatctgctgtactacgccgtgacccaggatgccatgctgatcttcgccaacctgagccggggcttcggccggcagggcaagcggaccttcatggccgagagacagtacacacggatggaggactggctgaccgccaagctggcctacgagggcctgagcaagacctacctgtccaagacactggcccagtacacctccaagacatgcagcaactgtgggtttaccatcaccagcgccgactacgacagggtgctggagaagctgaagaagacagcaacaggctggatgaccacaattaacggcaaggagctgaaggtggagggccagattacctactacaacagatacaagagacagaacgtagtcaaggacctgtccgtcgagctggatagactgagcgaagaatctgtgaacaacgacatctcctcctggacaaagggcagaagcggagaagctctgagcctcctgaagaaaagattctcccatagacccgtgcaggagaagttcgtgtgcctgaactgcggcttcgagacacacgcagccgagcaagccgccctgaacatcgccagatcctggctgttcctgcggagccaggagtacaagaaataccagacaaacaagacaaccggcaacaccgataagagagccttcgtcgagacctggcagtccttttaccggaagaagcttaaggaggtgtggaaacctgccgtgcggtctggcggatctggcggaggctccaccagccccaagaaaaagagaaaagtctaagctgccttctgcggggcttgccttctggccatgcccttcttctctcccttgcacctgtacctcttggtctttgaataaagcctgagtaggaaggctagcaaaaaaaaaaaaaaaaaaaaaaaaaaaaaaaaaaaaaaaaaaaaaaaaaaaaaaaaaaaaaaaaaaaaaaaaaaaaaaaagcccagccggctccccaacctctaccgaggagggcacctctgagtccgccacccccgagagcggccctggcacctccaccgagcccagcgagggcagcgcacccggcagccctgccggcagccccacctccacagaggagggaaccagcaccgagcccagcgaaggcagcgccccaggcaccagcaccgagcctagtgagcaggagattaaacggatcaacaagatcagaagaagacttgtgaaagacagcaacaccaagaaggccggcaagacaggccccatgaaaaccctgctggttagagtgatgacacccgatctgagagagcggctggaaaacctgagaaagaagcctgaaaatatcccccagcccatcagcaatacatctagagccaacctgaataagctgctgaccgattacaccgaaatgaagaaggcgatcctgcatgtgtactgggaagagttccagaaggaccctgtgggcctgatgagccgggtggcccagcctgccagcaagaagatcgatcagaacaagctgaaacctgagatggacgagaagggcaacctgaccaccgccggctttgcctgctctcagtgtggccagcccctgttcgtgtacaagctggagcaggtgtctgagaagggcaaggcttacaccaactacttcggacggtgcaatgtggccgagcacgaaaagctgatcctgctggcccagctgaagcccgagaaggatagcgacgaagccgtgacatatagcctgggaaagtttgggcagagggccctggatttctacagcattcatgtgaccaaggagtccacccaccccgtgaagcccctggcccagatcgccggaaacagatacgcctccggacctgtgggaaaggccctgagcgacgcatgtatgggcacaatcgcctccttcctgtctaagtaccaggacatcatcatcgaacaccagaaggtggtgaagggcaaccagaagagactggagagcctgcgggagctggccggcaaggaaaacctggaataccctagcgtgaccctgccacctcagcctcacaccaaggagggcgttgatgcctacaacgaagtgatcgcccgggtgcgaatgtgggtgaacctgaacctgtggcagaagctgaagctaagcagagatgatgccaagcctctgctgagactgaagggattcccttcctttcctctggtcgagagacaggccaacgaagtggactggtgggacatggtgtgtaacgtgaagaagctgatcaacgagaaaaaggaggatggcaaggtgttttggcagaatctggctggctacaagagacaggaagccctgagaccatacctgagcagcgaggaagatcggaagaagggaaagaaattcgctcggtaccagctgggcgacctgctgctgcacctggaaaagaagcacggcgaggactggggaaaggtgtacgacgaggcctgggagcggattgacaagaaagtggaaggcctgagcaagcacatcaagctggaagaggaacggagaagcgaggacgcccagagcaaggccgccctgaccgactggctgcgggctaaggccagcttcgtgatcgagggcctgaaggaggccgacaaggacgagttctgcagatgcgagctgaagctgcagaagtggtacggggacctgcggggaaagcccttcgccatcgaagccgagaacagcatcctggacatcagcggcttcagcaagcagtacaactgtgccttcatctggcagaaggacggcgtgaagaagctgaacctgtacctgatcatcaactacttcaagggcggcaagctgcggttcaagaagatcaaacctgaagccttcgaagccaacagattctacaccgtgatcaacaaaaagagcggcgagatcgtgcccatggaggtgaacttcaacttcgacgaccccaacctgatcatcctgcctctggcctttggcaagagacagggcagagaattcatctggaacgacctgctgtccctggaaaccggcagcctgaagctggccaacggaagagtgatcgagaagacactgtacaacagaagaacccggcaggatgagcctgccctgttcgtggccctgaccttcgagcggcgggaggtcctggactcctccaatatcaaaccaatgaacctgatcggcgtggcaagaggcgaaaacatccccgccgtgatcgccctgaccgaccccgagggctgcccactgagccggtttaaggatagcctgggaaacccaacccacatcctgagaatcggcgagagctataaggagaagcagcggaccatccaggccaagaaggaggtggagcagcggagagccggcggctacagccggaagtacgccagcaaagccaagaatctggcagacgatatggtgagaaacaccgctagagatctgctgtactacgccgtgacccaggatgccatgctgatcttcgccaacctgagccggggcttcggccggcagggcaagcggaccttcatggccgagagacagtacacacggatggaggactggctgaccgccaagctggcctacgagggcctgagcaagacctacctgtccaagacactggcccagtacacctccaagacatgcagcaactgtgggtttaccatcaccagcgccgactacgacagggtgctggagaagctgaagaagacagcaacaggctggatgaccacaattaacggcaaggagctgaaggtggagggccagattacctactacaacagatacaagagacagaacgtagtcaaggacctgtccgtcgagctggatagactgagcgaagaatctgtgaacaacgacatctcctcctggacaaagggcagaagcggagaagctctgagcctcctgaagaaaagattctcccatagacccgtgcaggagaagttcgtgtgcctgaactgcggcttcgagacacacgcagccgagcaagccgccctgaacatcgccagatcctggctgttcctgcggagccaggagtacaagaaataccagacaaacaagacaaccggcaacaccgataagagagccttcgtcgagacctggcagtccttttaccggaagaagcttaaggaggtgtggaaacctgccgtgcggtctggcggatctggcggaggctccaccagccccaagaaaaagagaaaagtctaagctgccttctgcggggcttgccttctggccatgcccttcttctctcccttgcacctgtacctcttggtctttgaataaagcctgagtaggaaggctagcaaaaaaaaaaaaaaaaaaaaaaaaaaaaaaaaaaaaaaaaaaaaaaaaaaaaaaaaaaaaaaaaaaaaaaaaaaaaaaaa

SEQ ID NO: 9178 - RNA, 8787 nt, synthetic construct
  source 1..8787: mol_type = other RNA
aggaaataagagagaaaagaagagtaagaagaaatataagagccaccatggcccctaagaagaagcgtaaagtgagccggatgaaccacgaccaggagttcgacccccctaaggtgtaccctcccgtccccgccgagaagagaaagcccatccgggtcctgagcctgttcgatggcatcgccaccggtctgctggtgctgaaggacctgggcatccaggtggataggtacattgcctccgaggtgtgcgaggactccatcaccgtgggaatggtgcgtcatcagggcaagatcatgtacgtgggcgacgtgcggagcgtgacacagaagcatatccaggagtggggccctttcgacctggtgatcggcggcagcccttgcaatgacctgagcatcgtgaacccagcccggaagggcctgtacgagggaaccggcagactgttcttcgagttttacagactgctgcacgacgcccggcctaaggaaggcgacgaccggcccttcttttggctgttcgagaatgtggtggccatgggagtcagcgacaagcgggatattagccggttcctggagagcaaccccgtgatgatcgatgccaaggaagtgagcgccgcccaccgggccagatacttctggggcaatctgcctggcatgaacagacccctggccagcaccgtgaacgacaagctggagctgcaggagtgcctggagcacggccggatcgccaagttcagcaaggtgagaaccatcaccacccgaagcaacagcatcaaacaaggcaaggaccagcactttcctgtgttcatgaacgagaaggaggacatcctgtggtgtaccgagatggagagagtgttcgggttcccagtccactacacagatgtcagcaacatgtctagactggccagacagagactgctgggaagaagctggtccgtccctgtgatcagacacctgttcgcccctctgaaggagtacttcgcctgcgtgagcagcggcaacagcaacgccaacagccggggccccagcttctctagcggcctggtgccactgtccctgagagggagccacatgggccccatggagatctacaaaaccgtgagcgcctggaagcggcagcctgtgcgcgtgctgagcctgtttcggaatatcgataaagtcctgaaaagcctgggattcctggagagcggctctggctccggcggtggcaccctgaagtacgtggaggatgtgacaaacgtggtcagacgggatgtggagaagtggggccccttcgatctggtgtacggcagcacccaacccctgggcagctcttgtgaccggtgccctggctggtacatgtttcagttccaccggatcctgcagtacgccctgccgagacaggagtcccagcggccattcttttggattttcatggacaacttgctgctgaccgaggatgaccaggaaactaccactcggttcctgcagaccgaagccgtgaccctgcaggacgtgagaggccgggactaccagaacgccatgcgggtgtggtccaacatccctggactgaaaagcaagcacgcacctctgacccctaaagaagaggagtacctgcaggcccaggtgcggagcagaagcaagctggacgcccctaaggtggatctgctggtgaagaattgcctcctgcccctgagagagtacttcaagtatttcagccagaatagtctgcccctgggaggcagcggcggcggcaagcccgagctggtgagcttcgaggacgtggccgtgtacttcagcccccacgagtggggctgcctgaggcccgcccagagggccctgtacagggaggtgatgagggagacctacggcctgctgggcgccctgggcttccccggccccaagcccgccctgatcagctggatggagcaggagagcgaggcctggagccccgccgcccaggaccccgccgagggcgagagcctgggcggcgccctgggcggcccaagcagcggcgcccctcctcccagcggcggcaggcggcccaagcagcggcgcccctcctcccagcggcggcagcccagccggctccccaacctctaccgaggagggcacctctgagtccgccacccccgagagcggccctggcacctccaccgagcccagcgagggcagcgcacccggcagccctgccggcagccccacctccacagaggagggaaccagcaccgagcccagcgaaggcagcgccccaggcaccagcaccgagcctagtgagcaggagattaaacggatcaacaagatcagaagaagacttgtgaaagacagcaacaccaagaaggccggcaagacaggccccatgaaaaccctgctggttagagtgatgacacccgatctgagagagcggctggaaaacctgagaaagaagcctgaaaatatcccccagcccatcagcaatacatctagagccaacctgaataagctgctgaccgattacaccgaaatgaagaaggcgatcctgcatgtgtactgggaagagttccagaaggaccctgtgggcctgatgagccgggtggcccagcctgccagcaagaagatcgatcagaacaagctgaaacctgagatggacgagaagggcaacctgaccaccgccggctttgcctgctctcagtgtggccagcccctgttcgtgtacaagctggagcaggtgtctgagaagggcaaggcttacaccaactacttcggacggtgcaatgtggccgagcacgaaaagctgatcctgctggcccagctgaagcccgagaaggatagcgacgaagccgtgacatatagcctgggaaagtttgggcagagggccctggatttctacagcattcatgtgaccaaggagtccacccaccccgtgaagcccctggcccagatcgccggaaacagatacgcctccggacctgtgggaaaggccctgagcgacgcatgtatgggcacaatcgcctccttcctgtctaagtaccaggacatcatcatcgaacaccagaaggtggtgaagggcaaccagaagagactggagagcctgcgggagctggccggcaaggaaaacctggaataccctagcgtgaccctgccacctcagcctcacaccaaggagggcgttgatgcctacaacgaagtgatcgcccgggtgcgaatgtgggtgaacctgaacctgtggcagaagctgaagctaagcagagatgatgccaagcctctgctgagactgaagggattcccttcctttcctctggtcgagagacaggccaacgaagtggactggtgggacatggtgtgtaacgtgaagaagctgatcaacgagaaaaaggaggatggcaaggtgttttggcagaatctggctggctacaagagacaggaagccctgagaccatacctgagcagcgaggaagatcggaagaagggaaagaaattcgctcggtaccagctgggcgacctgctgctgcacctggaaaagaagcacggcgaggactggggaaaggtgtacgacgaggcctgggagcggattgacaagaaagtggaaggcctgagcaagcacatcaagctggaagaggaacggagaagcgaggacgcccagagcaaggccgccctgaccgactggctgcgggctaaggccagcttcgtgatcgagggcctgaaggaggccgacaaggacgagttctgcagatgcgagctgaagctgcagaagtggtacggggacctgcggggaaagcccttcgccatcgaagccgagaacagcatcctggacatcagcggcttcagcaagcagtacaactgtgccttcatctggcagaaggacggcgtgaagaagctgaacctgtacctgatcatcaactacttcaagggcggcaagctgcggttcaagaagatcaaacctgaagccttcgaagccaacagattctacaccgtgatcaacaaaaagagcggcgagatcgtgcccatggaggtgaacttcaacttcgacgaccccaacctgatcatcctgcctctggcctttggcaagagacagggcagagaattcatctggaacgacctgctgtccctggaaaccggcagcctgaagctggccaacggaagagtgatcgagaagacactgtacaacagaagaacccggcaggatgagcctgccctgttcgtggccctgaccttcgagcggcgggaggtcctggactcctccaatatcaaaccaatgaacctgatcggcgtggcaagaggcgaaaacatccccgccgtgatcgccctgaccgaccccgagggctgcccactgagccggtttaaggatagcctgggaaacccaacccacatcctgagaatcggcgagagctataaggagaagcagcggaccatccaggccaagaaggaggtggagcagcggagagccggcggctacagccggaagtacgccagcaaagccaagaatctggcagacgatatggtgagaaacaccgctagagatctgctgtactacgccgtgacccaggatgccatgctgatcttcgccaacctgagccggggcttcggccggcagggcaagcggaccttcatggccgagagacagtacacacggatggaggactggctgaccgccaagctggcctacgagggcctgagcaagacctacctgtccaagacactggcccagtacacctccaagacatgcagcaactgtgggtttaccatcaccagcgccgactacgacagggtgctggagaagctgaagaagacagcaacaggctggatgaccacaattaacggcaaggagctgaaggtggagggccagattacctactacaacagatacaagagacagaacgtagtcaaggacctgtccgtcgagctggatagactgagcgaagaatctgtgaacaacgacatctcctcctggacaaagggcagaagcggagaagctctgagcctcctgaagaaaagattctcccatagacccgtgcaggagaagttcgtgtgcctgaactgcggcttcgagacacacgcagccgagcaagccgccctgaacatcgccagatcctggctgttcctgcggagccaggagtacaagaaataccagacaaacaagacaaccggcaacaccgataagagagccttcgtcgagacctggcagtccttttaccggaagaagcttaaggaggtgtggaaacctgccgtgcggtctggcggatctggcggaggctccaccagccccaagaaaaagagaaaagtctaagctgccttctgcggggcttgccttctggccatgcccttcttctctcccttgcacctgtacctcttggtctttgaataaagcctgagtaggaaggctagcaaaaaaaaaaaaaaaaaaaaaaaaaaaaaaaaaaaaaaaaaaaaaaaaaaaaaaaaaaaaaaaaaaaaaaaaaaaaaaaagcccagccggctccccaacctctaccgaggagggcacctctgagtccgccacccccgagagcggccctggcacctccaccgagcccagcgagggcagcgcacccggcagccctgccggcagccccacctccacagaggagggaaccagcaccgagcccagcgaaggcagcgccccaggcaccagcaccgagcctagtgagcaggagattaaacggatcaacaagatcagaagaagacttgtgaaagacagcaacaccaagaaggccggcaagacaggccccatgaaaaccctgctggttagagtgatgacacccgatctgagagagcggctggaaaacctgagaaagaagcctgaaaatatcccccagcccatcagcaatacatctagagccaacctgaataagctgctgaccgattacaccgaaatgaagaaggcgatcctgcatgtgtactgggaagagttccagaaggaccctgtgggcctgatgagccgggtggcccagcctgccagcaagaagatcgatcagaacaagctgaaacctgagatggacgagaagggcaacctgaccaccgccggctttgcctgctctcagtgtggccagcccctgttcgtgtacaagctggagcaggtgtctgagaagggcaaggcttacaccaactacttcggacggtgcaatgtggccgagcacgaaaagctgatcctgctggcccagctgaagcccgagaaggatagcgacgaagccgtgacatatagcctgggaaagtttgggcagagggccctggatttctacagcattcatgtgaccaaggagtccacccaccccgtgaagcccctggcccagatcgccggaaacagatacgcctccggacctgtgggaaaggccctgagcgacgcatgtatgggcacaatcgcctccttcctgtctaagtaccaggacatcatcatcgaacaccagaaggtggtgaagggcaaccagaagagactggagagcctgcgggagctggccggcaaggaaaacctggaataccctagcgtgaccctgccacctcagcctcacaccaaggagggcgttgatgcctacaacgaagtgatcgcccgggtgcgaatgtgggtgaacctgaacctgtggcagaagctgaagctaagcagagatgatgccaagcctctgctgagactgaagggattcccttcctttcctctggtcgagagacaggccaacgaagtggactggtgggacatggtgtgtaacgtgaagaagctgatcaacgagaaaaaggaggatggcaaggtgttttggcagaatctggctggctacaagagacaggaagccctgagaccatacctgagcagcgaggaagatcggaagaagggaaagaaattcgctcggtaccagctgggcgacctgctgctgcacctggaaaagaagcacggcgaggactggggaaaggtgtacgacgaggcctgggagcggattgacaagaaagtggaaggcctgagcaagcacatcaagctggaagaggaacggagaagcgaggacgcccagagcaaggccgccctgaccgactggctgcgggctaaggccagcttcgtgatcgagggcctgaaggaggccgacaaggacgagttctgcagatgcgagctgaagctgcagaagtggtacggggacctgcggggaaagcccttcgccatcgaagccgagaacagcatcctggacatcagcggcttcagcaagcagtacaactgtgccttcatctggcagaaggacggcgtgaagaagctgaacctgtacctgatcatcaactacttcaagggcggcaagctgcggttcaagaagatcaaacctgaagccttcgaagccaacagattctacaccgtgatcaacaaaaagagcggcgagatcgtgcccatggaggtgaacttcaacttcgacgaccccaacctgatcatcctgcctctggcctttggcaagagacagggcagagaattcatctggaacgacctgctgtccctggaaaccggcagcctgaagctggccaacggaagagtgatcgagaagacactgtacaacagaagaacccggcaggatgagcctgccctgttcgtggccctgaccttcgagcggcgggaggtcctggactcctccaatatcaaaccaatgaacctgatcggcgtggcaagaggcgaaaacatccccgccgtgatcgccctgaccgaccccgagggctgcccactgagccggtttaaggatagcctgggaaacccaacccacatcctgagaatcggcgagagctataaggagaagcagcggaccatccaggccaagaaggaggtggagcagcggagagccggcggctacagccggaagtacgccagcaaagccaagaatctggcagacgatatggtgagaaacaccgctagagatctgctgtactacgccgtgacccaggatgccatgctgatcttcgccaacctgagccggggcttcggccggcagggcaagcggaccttcatggccgagagacagtacacacggatggaggactggctgaccgccaagctggcctacgagggcctgagcaagacctacctgtccaagacactggcccagtacacctccaagacatgcagcaactgtgggtttaccatcaccagcgccgactacgacagggtgctggagaagctgaagaagacagcaacaggctggatgaccacaattaacggcaaggagctgaaggtggagggccagattacctactacaacagatacaagagacagaacgtagtcaaggacctgtccgtcgagctggatagactgagcgaagaatctgtgaacaacgacatctcctcctggacaaagggcagaagcggagaagctctgagcctcctgaagaaaagattctcccatagacccgtgcaggagaagttcgtgtgcctgaactgcggcttcgagacacacgcagccgagcaagccgccctgaacatcgccagatcctggctgttcctgcggagccaggagtacaagaaataccagacaaacaagacaaccggcaacaccgataagagagccttcgtcgagacctggcagtccttttaccggaagaagcttaaggaggtgtggaaacctgccgtgcggtctggcggatctggcggaggctccaccagccccaagaaaaagagaaaagtctaagctgccttctgcggggcttgccttctggccatgcccttcttctctcccttgcacctgtacctcttggtctttgaataaagcctgagtaggaaggctagcaaaaaaaaaaaaaaaaaaaaaaaaaaaaaaaaaaaaaaaaaaaaaaaaaaaaaaaaaaaaaaaaaaaaaaaaaaaaaaaa

SEQ ID NO: 9179 - RNA, 8787 nt, synthetic construct
  source 1..8787: mol_type = other RNA
aggaaataagagagaaaagaagagtaagaagaaatataagagccaccatggcccctaagaagaagcgtaaagtgagccggatgaaccacgaccaggagttcgacccccctaaggtgtaccctcccgtccccgccgagaagagaaagcccatccgggtcctgagcctgttcgatggcatcgccaccggtctgctggtgctgaaggacctgggcatccaggtggataggtacattgcctccgaggtgtgcgaggactccatcaccgtgggaatggtgcgtcatcagggcaagatcatgtacgtgggcgacgtgcggagcgtgacacagaagcatatccaggagtggggccctttcgacctggtgatcggcggcagcccttgcaatgacctgagcatcgtgaacccagcccggaagggcctgtacgagggaaccggcagactgttcttcgagttttacagactgctgcacgacgcccggcctaaggaaggcgacgaccggcccttcttttggctgttcgagaatgtggtggccatgggagtcagcgacaagcgggatattagccggttcctggagagcaaccccgtgatgatcgatgccaaggaagtgagcgccgcccaccgggccagatacttctggggcaatctgcctggcatgaacagacccctggccagcaccgtgaacgacaagctggagctgcaggagtgcctggagcacggccggatcgccaagttcagcaaggtgagaaccatcaccacccgaagcaacagcatcaaacaaggcaaggaccagcactttcctgtgttcatgaacgagaaggaggacatcctgtggtgtaccgagatggagagagtgttcgggttcccagtccactacacagatgtcagcaacatgtctagactggccagacagagactgctgggaagaagctggtccgtccctgtgatcagacacctgttcgcccctctgaaggagtacttcgcctgcgtgagcagcggcaacagcaacgccaacagccggggccccagcttctctagcggcctggtgccactgtccctgagagggagccacatgggccccatggagatctacaaaaccgtgagcgcctggaagcggcagcctgtgcgcgtgctgagcctgtttcggaatatcgataaagtcctgaaaagcctgggattcctggagagcggctctggctccggcggtggcaccctgaagtacgtggaggatgtgacaaacgtggtcagacgggatgtggagaagtggggccccttcgatctggtgtacggcagcacccaacccctgggcagctcttgtgaccggtgccctggctggtacatgtttcagttccaccggatcctgcagtacgccctgccgagacaggagtcccagcggccattcttttggattttcatggacaacttgctgctgaccgaggatgaccaggaaactaccactcggttcctgcagaccgaagccgtgaccctgcaggacgtgagaggccgggactaccagaacgccatgcgggtgtggtccaacatccctggactgaaaagcaagcacgcacctctgacccctaaagaagaggagtacctgcaggcccaggtgcggagcagaagcaagctggacgcccctaaggtggatctgctggtgaagaattgcctcctgcccctgagagagtacttcaagtatttcagccagaatagtctgcccctgggaggcagcggcggcggcgcccccgcccccgtgagcttcagggacgtggccgtggacttcaccaggcaggagtggcagctgctggcccccgcccagagggccctgtacagggaggtgatgctggagaactacaggaacgtggccagcctgggccaccccgtgagcaagcccaacgtgatcttccagctggagcagagcgaggccccctggatgcccgagggcgaggccgccaggagcctgccccccgactgggaggccaggggcggcccaagcagcggcgcccctcctcccagcggcggcaggcggcccaagcagcggcgcccctcctcccagcggcggcagcccagccggctccccaacctctaccgaggagggcacctctgagtccgccacccccgagagcggccctggcacctccaccgagcccagcgagggcagcgcacccggcagccctgccggcagccccacctccacagaggagggaaccagcaccgagcccagcgaaggcagcgccccaggcaccagcaccgagcctagtgagcaggagattaaacggatcaacaagatcagaagaagacttgtgaaagacagcaacaccaagaaggccggcaagacaggccccatgaaaaccctgctggttagagtgatgacacccgatctgagagagcggctggaaaacctgagaaagaagcctgaaaatatcccccagcccatcagcaatacatctagagccaacctgaataagctgctgaccgattacaccgaaatgaagaaggcgatcctgcatgtgtactgggaagagttccagaaggaccctgtgggcctgatgagccgggtggcccagcctgccagcaagaagatcgatcagaacaagctgaaacctgagatggacgagaagggcaacctgaccaccgccggctttgcctgctctcagtgtggccagcccctgttcgtgtacaagctggagcaggtgtctgagaagggcaaggcttacaccaactacttcggacggtgcaatgtggccgagcacgaaaagctgatcctgctggcccagctgaagcccgagaaggatagcgacgaagccgtgacatatagcctgggaaagtttgggcagagggccctggatttctacagcattcatgtgaccaaggagtccacccaccccgtgaagcccctggcccagatcgccggaaacagatacgcctccggacctgtgggaaaggccctgagcgacgcatgtatgggcacaatcgcctccttcctgtctaagtaccaggacatcatcatcgaacaccagaaggtggtgaagggcaaccagaagagactggagagcctgcgggagctggccggcaaggaaaacctggaataccctagcgtgaccctgccacctcagcctcacaccaaggagggcgttgatgcctacaacgaagtgatcgcccgggtgcgaatgtgggtgaacctgaacctgtggcagaagctgaagctaagcagagatgatgccaagcctctgctgagactgaagggattcccttcctttcctctggtcgagagacaggccaacgaagtggactggtgggacatggtgtgtaacgtgaagaagctgatcaacgagaaaaaggaggatggcaaggtgttttggcagaatctggctggctacaagagacaggaagccctgagaccatacctgagcagcgaggaagatcggaagaagggaaagaaattcgctcggtaccagctgggcgacctgctgctgcacctggaaaagaagcacggcgaggactggggaaaggtgtacgacgaggcctgggagcggattgacaagaaagtggaaggcctgagcaagcacatcaagctggaagaggaacggagaagcgaggacgcccagagcaaggccgccctgaccgactggctgcgggctaaggccagcttcgtgatcgagggcctgaaggaggccgacaaggacgagttctgcagatgcgagctgaagctgcagaagtggtacggggacctgcggggaaagcccttcgccatcgaagccgagaacagcatcctggacatcagcggcttcagcaagcagtacaactgtgccttcatctggcagaaggacggcgtgaagaagctgaacctgtacctgatcatcaactacttcaagggcggcaagctgcggttcaagaagatcaaacctgaagccttcgaagccaacagattctacaccgtgatcaacaaaaagagcggcgagatcgtgcccatggaggtgaacttcaacttcgacgaccccaacctgatcatcctgcctctggcctttggcaagagacagggcagagaattcatctggaacgacctgctgtccctggaaaccggcagcctgaagctggccaacggaagagtgatcgagaagacactgtacaacagaagaacccggcaggatgagcctgccctgttcgtggccctgaccttcgagcggcgggaggtcctggactcctccaatatcaaaccaatgaacctgatcggcgtggcaagaggcgaaaacatccccgccgtgatcgccctgaccgaccccgagggctgcccactgagccggtttaaggatagcctgggaaacccaacccacatcctgagaatcggcgagagctataaggagaagcagcggaccatccaggccaagaaggaggtggagcagcggagagccggcggctacagccggaagtacgccagcaaagccaagaatctggcagacgatatggtgagaaacaccgctagagatctgctgtactacgccgtgacccaggatgccatgctgatcttcgccaacctgagccggggcttcggccggcagggcaagcggaccttcatggccgagagacagtacacacggatggaggactggctgaccgccaagctggcctacgagggcctgagcaagacctacctgtccaagacactggcccagtacacctccaagacatgcagcaactgtgggtttaccatcaccagcgccgactacgacagggtgctggagaagctgaagaagacagcaacaggctggatgaccacaattaacggcaaggagctgaaggtggagggccagattacctactacaacagatacaagagacagaacgtagtcaaggacctgtccgtcgagctggatagactgagcgaagaatctgtgaacaacgacatctcctcctggacaaagggcagaagcggagaagctctgagcctcctgaagaaaagattctcccatagacccgtgcaggagaagttcgtgtgcctgaactgcggcttcgagacacacgcagccgagcaagccgccctgaacatcgccagatcctggctgttcctgcggagccaggagtacaagaaataccagacaaacaagacaaccggcaacaccgataagagagccttcgtcgagacctggcagtccttttaccggaagaagcttaaggaggtgtggaaacctgccgtgcggtctggcggatctggcggaggctccaccagccccaagaaaaagagaaaagtctaagctgccttctgcggggcttgccttctggccatgcccttcttctctcccttgcacctgtacctcttggtctttgaataaagcctgagtaggaaggctagcaaaaaaaaaaaaaaaaaaaaaaaaaaaaaaaaaaaaaaaaaaaaaaaaaaaaaaaaaaaaaaaaaaaaaaaaaaaaaaaagcccagccggctccccaacctctaccgaggagggcacctctgagtccgccacccccgagagcggccctggcacctccaccgagcccagcgagggcagcgcacccggcagccctgccggcagccccacctccacagaggagggaaccagcaccgagcccagcgaaggcagcgccccaggcaccagcaccgagcctagtgagcaggagattaaacggatcaacaagatcagaagaagacttgtgaaagacagcaacaccaagaaggccggcaagacaggccccatgaaaaccctgctggttagagtgatgacacccgatctgagagagcggctggaaaacctgagaaagaagcctgaaaatatcccccagcccatcagcaatacatctagagccaacctgaataagctgctgaccgattacaccgaaatgaagaaggcgatcctgcatgtgtactgggaagagttccagaaggaccctgtgggcctgatgagccgggtggcccagcctgccagcaagaagatcgatcagaacaagctgaaacctgagatggacgagaagggcaacctgaccaccgccggctttgcctgctctcagtgtggccagcccctgttcgtgtacaagctggagcaggtgtctgagaagggcaaggcttacaccaactacttcggacggtgcaatgtggccgagcacgaaaagctgatcctgctggcccagctgaagcccgagaaggatagcgacgaagccgtgacatatagcctgggaaagtttgggcagagggccctggatttctacagcattcatgtgaccaaggagtccacccaccccgtgaagcccctggcccagatcgccggaaacagatacgcctccggacctgtgggaaaggccctgagcgacgcatgtatgggcacaatcgcctccttcctgtctaagtaccaggacatcatcatcgaacaccagaaggtggtgaagggcaaccagaagagactggagagcctgcgggagctggccggcaaggaaaacctggaataccctagcgtgaccctgccacctcagcctcacaccaaggagggcgttgatgcctacaacgaagtgatcgcccgggtgcgaatgtgggtgaacctgaacctgtggcagaagctgaagctaagcagagatgatgccaagcctctgctgagactgaagggattcccttcctttcctctggtcgagagacaggccaacgaagtggactggtgggacatggtgtgtaacgtgaagaagctgatcaacgagaaaaaggaggatggcaaggtgttttggcagaatctggctggctacaagagacaggaagccctgagaccatacctgagcagcgaggaagatcggaagaagggaaagaaattcgctcggtaccagctgggcgacctgctgctgcacctggaaaagaagcacggcgaggactggggaaaggtgtacgacgaggcctgggagcggattgacaagaaagtggaaggcctgagcaagcacatcaagctggaagaggaacggagaagcgaggacgcccagagcaaggccgccctgaccgactggctgcgggctaaggccagcttcgtgatcgagggcctgaaggaggccgacaaggacgagttctgcagatgcgagctgaagctgcagaagtggtacggggacctgcggggaaagcccttcgccatcgaagccgagaacagcatcctggacatcagcggcttcagcaagcagtacaactgtgccttcatctggcagaaggacggcgtgaagaagctgaacctgtacctgatcatcaactacttcaagggcggcaagctgcggttcaagaagatcaaacctgaagccttcgaagccaacagattctacaccgtgatcaacaaaaagagcggcgagatcgtgcccatggaggtgaacttcaacttcgacgaccccaacctgatcatcctgcctctggcctttggcaagagacagggcagagaattcatctggaacgacctgctgtccctggaaaccggcagcctgaagctggccaacggaagagtgatcgagaagacactgtacaacagaagaacccggcaggatgagcctgccctgttcgtggccctgaccttcgagcggcgggaggtcctggactcctccaatatcaaaccaatgaacctgatcggcgtggcaagaggcgaaaacatccccgccgtgatcgccctgaccgaccccgagggctgcccactgagccggtttaaggatagcctgggaaacccaacccacatcctgagaatcggcgagagctataaggagaagcagcggaccatccaggccaagaaggaggtggagcagcggagagccggcggctacagccggaagtacgccagcaaagccaagaatctggcagacgatatggtgagaaacaccgctagagatctgctgtactacgccgtgacccaggatgccatgctgatcttcgccaacctgagccggggcttcggccggcagggcaagcggaccttcatggccgagagacagtacacacggatggaggactggctgaccgccaagctggcctacgagggcctgagcaagacctacctgtccaagacactggcccagtacacctccaagacatgcagcaactgtgggtttaccatcaccagcgccgactacgacagggtgctggagaagctgaagaagacagcaacaggctggatgaccacaattaacggcaaggagctgaaggtggagggccagattacctactacaacagatacaagagacagaacgtagtcaaggacctgtccgtcgagctggatagactgagcgaagaatctgtgaacaacgacatctcctcctggacaaagggcagaagcggagaagctctgagcctcctgaagaaaagattctcccatagacccgtgcaggagaagttcgtgtgcctgaactgcggcttcgagacacacgcagccgagcaagccgccctgaacatcgccagatcctggctgttcctgcggagccaggagtacaagaaataccagacaaacaagacaaccggcaacaccgataagagagccttcgtcgagacctggcagtccttttaccggaagaagcttaaggaggtgtggaaacctgccgtgcggtctggcggatctggcggaggctccaccagccccaagaaaaagagaaaagtctaagctgccttctgcggggcttgccttctggccatgcccttcttctctcccttgcacctgtacctcttggtctttgaataaagcctgagtaggaaggctagcaaaaaaaaaaaaaaaaaaaaaaaaaaaaaaaaaaaaaaaaaaaaaaaaaaaaaaaaaaaaaaaaaaaaaaaaaaaaaaaa

SEQ ID NO: 9180 - RNA, 8787 nt, synthetic construct
  source 1..8787: mol_type = other RNA
aggaaataagagagaaaagaagagtaagaagaaatataagagccaccatggcccctaagaagaagcgtaaagtgagccggatgaaccacgaccaggagttcgacccccctaaggtgtaccctcccgtccccgccgagaagagaaagcccatccgggtcctgagcctgttcgatggcatcgccaccggtctgctggtgctgaaggacctgggcatccaggtggataggtacattgcctccgaggtgtgcgaggactccatcaccgtgggaatggtgcgtcatcagggcaagatcatgtacgtgggcgacgtgcggagcgtgacacagaagcatatccaggagtggggccctttcgacctggtgatcggcggcagcccttgcaatgacctgagcatcgtgaacccagcccggaagggcctgtacgagggaaccggcagactgttcttcgagttttacagactgctgcacgacgcccggcctaaggaaggcgacgaccggcccttcttttggctgttcgagaatgtggtggccatgggagtcagcgacaagcgggatattagccggttcctggagagcaaccccgtgatgatcgatgccaaggaagtgagcgccgcccaccgggccagatacttctggggcaatctgcctggcatgaacagacccctggccagcaccgtgaacgacaagctggagctgcaggagtgcctggagcacggccggatcgccaagttcagcaaggtgagaaccatcaccacccgaagcaacagcatcaaacaaggcaaggaccagcactttcctgtgttcatgaacgagaaggaggacatcctgtggtgtaccgagatggagagagtgttcgggttcccagtccactacacagatgtcagcaacatgtctagactggccagacagagactgctgggaagaagctggtccgtccctgtgatcagacacctgttcgcccctctgaaggagtacttcgcctgcgtgagcagcggcaacagcaacgccaacagccggggccccagcttctctagcggcctggtgccactgtccctgagagggagccacatgggccccatggagatctacaaaaccgtgagcgcctggaagcggcagcctgtgcgcgtgctgagcctgtttcggaatatcgataaagtcctgaaaagcctgggattcctggagagcggctctggctccggcggtggcaccctgaagtacgtggaggatgtgacaaacgtggtcagacgggatgtggagaagtggggccccttcgatctggtgtacggcagcacccaacccctgggcagctcttgtgaccggtgccctggctggtacatgtttcagttccaccggatcctgcagtacgccctgccgagacaggagtcccagcggccattcttttggattttcatggacaacttgctgctgaccgaggatgaccaggaaactaccactcggttcctgcagaccgaagccgtgaccctgcaggacgtgagaggccgggactaccagaacgccatgcgggtgtggtccaacatccctggactgaaaagcaagcacgcacctctgacccctaaagaagaggagtacctgcaggcccaggtgcggagcagaagcaagctggacgcccctaaggtggatctgctggtgaagaattgcctcctgcccctgagagagtacttcaagtatttcagccagaatagtctgcccctgggaggcagcggcggcggcagcgtgatgttcaacgacatcagcatcgtgttcagccaggaggagtgggagtacctggacctggagcagaaggacctgtacaaggacgtgatgctggagaactacggcaacctggtgagcctgggctgcttcatcgccaagcccgacgtgatcagcctgctggagcagggcaaggagccctggaaggtgatcaggaagggcaggaggggctaccccgacctggagaccaggtacgagaccaagggcggcccaagcagcggcgcccctcctcccagcggcggcaggcggcccaagcagcggcgcccctcctcccagcggcggcagcccagccggctccccaacctctaccgaggagggcacctctgagtccgccacccccgagagcggccctggcacctccaccgagcccagcgagggcagcgcacccggcagccctgccggcagccccacctccacagaggagggaaccagcaccgagcccagcgaaggcagcgccccaggcaccagcaccgagcctagtgagcaggagattaaacggatcaacaagatcagaagaagacttgtgaaagacagcaacaccaagaaggccggcaagacaggccccatgaaaaccctgctggttagagtgatgacacccgatctgagagagcggctggaaaacctgagaaagaagcctgaaaatatcccccagcccatcagcaatacatctagagccaacctgaataagctgctgaccgattacaccgaaatgaagaaggcgatcctgcatgtgtactgggaagagttccagaaggaccctgtgggcctgatgagccgggtggcccagcctgccagcaagaagatcgatcagaacaagctgaaacctgagatggacgagaagggcaacctgaccaccgccggctttgcctgctctcagtgtggccagcccctgttcgtgtacaagctggagcaggtgtctgagaagggcaaggcttacaccaactacttcggacggtgcaatgtggccgagcacgaaaagctgatcctgctggcccagctgaagcccgagaaggatagcgacgaagccgtgacatatagcctgggaaagtttgggcagagggccctggatttctacagcattcatgtgaccaaggagtccacccaccccgtgaagcccctggcccagatcgccggaaacagatacgcctccggacctgtgggaaaggccctgagcgacgcatgtatgggcacaatcgcctccttcctgtctaagtaccaggacatcatcatcgaacaccagaaggtggtgaagggcaaccagaagagactggagagcctgcgggagctggccggcaaggaaaacctggaataccctagcgtgaccctgccacctcagcctcacaccaaggagggcgttgatgcctacaacgaagtgatcgcccgggtgcgaatgtgggtgaacctgaacctgtggcagaagctgaagctaagcagagatgatgccaagcctctgctgagactgaagggattcccttcctttcctctggtcgagagacaggccaacgaagtggactggtgggacatggtgtgtaacgtgaagaagctgatcaacgagaaaaaggaggatggcaaggtgttttggcagaatctggctggctacaagagacaggaagccctgagaccatacctgagcagcgaggaagatcggaagaagggaaagaaattcgctcggtaccagctgggcgacctgctgctgcacctggaaaagaagcacggcgaggactggggaaaggtgtacgacgaggcctgggagcggattgacaagaaagtggaaggcctgagcaagcacatcaagctggaagaggaacggagaagcgaggacgcccagagcaaggccgccctgaccgactggctgcgggctaaggccagcttcgtgatcgagggcctgaaggaggccgacaaggacgagttctgcagatgcgagctgaagctgcagaagtggtacggggacctgcggggaaagcccttcgccatcgaagccgagaacagcatcctggacatcagcggcttcagcaagcagtacaactgtgccttcatctggcagaaggacggcgtgaagaagctgaacctgtacctgatcatcaactacttcaagggcggcaagctgcggttcaagaagatcaaacctgaagccttcgaagccaacagattctacaccgtgatcaacaaaaagagcggcgagatcgtgcccatggaggtgaacttcaacttcgacgaccccaacctgatcatcctgcctctggcctttggcaagagacagggcagagaattcatctggaacgacctgctgtccctggaaaccggcagcctgaagctggccaacggaagagtgatcgagaagacactgtacaacagaagaacccggcaggatgagcctgccctgttcgtggccctgaccttcgagcggcgggaggtcctggactcctccaatatcaaaccaatgaacctgatcggcgtggcaagaggcgaaaacatccccgccgtgatcgccctgaccgaccccgagggctgcccactgagccggtttaaggatagcctgggaaacccaacccacatcctgagaatcggcgagagctataaggagaagcagcggaccatccaggccaagaaggaggtggagcagcggagagccggcggctacagccggaagtacgccagcaaagccaagaatctggcagacgatatggtgagaaacaccgctagagatctgctgtactacgccgtgacccaggatgccatgctgatcttcgccaacctgagccggggcttcggccggcagggcaagcggaccttcatggccgagagacagtacacacggatggaggactggctgaccgccaagctggcctacgagggcctgagcaagacctacctgtccaagacactggcccagtacacctccaagacatgcagcaactgtgggtttaccatcaccagcgccgactacgacagggtgctggagaagctgaagaagacagcaacaggctggatgaccacaattaacggcaaggagctgaaggtggagggccagattacctactacaacagatacaagagacagaacgtagtcaaggacctgtccgtcgagctggatagactgagcgaagaatctgtgaacaacgacatctcctcctggacaaagggcagaagcggagaagctctgagcctcctgaagaaaagattctcccatagacccgtgcaggagaagttcgtgtgcctgaactgcggcttcgagacacacgcagccgagcaagccgccctgaacatcgccagatcctggctgttcctgcggagccaggagtacaagaaataccagacaaacaagacaaccggcaacaccgataagagagccttcgtcgagacctggcagtccttttaccggaagaagcttaaggaggtgtggaaacctgccgtgcggtctggcggatctggcggaggctccaccagccccaagaaaaagagaaaagtctaagctgccttctgcggggcttgccttctggccatgcccttcttctctcccttgcacctgtacctcttggtctttgaataaagcctgagtaggaaggctagcaaaaaaaaaaaaaaaaaaaaaaaaaaaaaaaaaaaaaaaaaaaaaaaaaaaaaaaaaaaaaaaaaaaaaaaaaaaaaaaagcccagccggctccccaacctctaccgaggagggcacctctgagtccgccacccccgagagcggccctggcacctccaccgagcccagcgagggcagcgcacccggcagccctgccggcagccccacctccacagaggagggaaccagcaccgagcccagcgaaggcagcgccccaggcaccagcaccgagcctagtgagcaggagattaaacggatcaacaagatcagaagaagacttgtgaaagacagcaacaccaagaaggccggcaagacaggccccatgaaaaccctgctggttagagtgatgacacccgatctgagagagcggctggaaaacctgagaaagaagcctgaaaatatcccccagcccatcagcaatacatctagagccaacctgaataagctgctgaccgattacaccgaaatgaagaaggcgatcctgcatgtgtactgggaagagttccagaaggaccctgtgggcctgatgagccgggtggcccagcctgccagcaagaagatcgatcagaacaagctgaaacctgagatggacgagaagggcaacctgaccaccgccggctttgcctgctctcagtgtggccagcccctgttcgtgtacaagctggagcaggtgtctgagaagggcaaggcttacaccaactacttcggacggtgcaatgtggccgagcacgaaaagctgatcctgctggcccagctgaagcccgagaaggatagcgacgaagccgtgacatatagcctgggaaagtttgggcagagggccctggatttctacagcattcatgtgaccaaggagtccacccaccccgtgaagcccctggcccagatcgccggaaacagatacgcctccggacctgtgggaaaggccctgagcgacgcatgtatgggcacaatcgcctccttcctgtctaagtaccaggacatcatcatcgaacaccagaaggtggtgaagggcaaccagaagagactggagagcctgcgggagctggccggcaaggaaaacctggaataccctagcgtgaccctgccacctcagcctcacaccaaggagggcgttgatgcctacaacgaagtgatcgcccgggtgcgaatgtgggtgaacctgaacctgtggcagaagctgaagctaagcagagatgatgccaagcctctgctgagactgaagggattcccttcctttcctctggtcgagagacaggccaacgaagtggactggtgggacatggtgtgtaacgtgaagaagctgatcaacgagaaaaaggaggatggcaaggtgttttggcagaatctggctggctacaagagacaggaagccctgagaccatacctgagcagcgaggaagatcggaagaagggaaagaaattcgctcggtaccagctgggcgacctgctgctgcacctggaaaagaagcacggcgaggactggggaaaggtgtacgacgaggcctgggagcggattgacaagaaagtggaaggcctgagcaagcacatcaagctggaagaggaacggagaagcgaggacgcccagagcaaggccgccctgaccgactggctgcgggctaaggccagcttcgtgatcgagggcctgaaggaggccgacaaggacgagttctgcagatgcgagctgaagctgcagaagtggtacggggacctgcggggaaagcccttcgccatcgaagccgagaacagcatcctggacatcagcggcttcagcaagcagtacaactgtgccttcatctggcagaaggacggcgtgaagaagctgaacctgtacctgatcatcaactacttcaagggcggcaagctgcggttcaagaagatcaaacctgaagccttcgaagccaacagattctacaccgtgatcaacaaaaagagcggcgagatcgtgcccatggaggtgaacttcaacttcgacgaccccaacctgatcatcctgcctctggcctttggcaagagacagggcagagaattcatctggaacgacctgctgtccctggaaaccggcagcctgaagctggccaacggaagagtgatcgagaagacactgtacaacagaagaacccggcaggatgagcctgccctgttcgtggccctgaccttcgagcggcgggaggtcctggactcctccaatatcaaaccaatgaacctgatcggcgtggcaagaggcgaaaacatccccgccgtgatcgccctgaccgaccccgagggctgcccactgagccggtttaaggatagcctgggaaacccaacccacatcctgagaatcggcgagagctataaggagaagcagcggaccatccaggccaagaaggaggtggagcagcggagagccggcggctacagccggaagtacgccagcaaagccaagaatctggcagacgatatggtgagaaacaccgctagagatctgctgtactacgccgtgacccaggatgccatgctgatcttcgccaacctgagccggggcttcggccggcagggcaagcggaccttcatggccgagagacagtacacacggatggaggactggctgaccgccaagctggcctacgagggcctgagcaagacctacctgtccaagacactggcccagtacacctccaagacatgcagcaactgtgggtttaccatcaccagcgccgactacgacagggtgctggagaagctgaagaagacagcaacaggctggatgaccacaattaacggcaaggagctgaaggtggagggccagattacctactacaacagatacaagagacagaacgtagtcaaggacctgtccgtcgagctggatagactgagcgaagaatctgtgaacaacgacatctcctcctggacaaagggcagaagcggagaagctctgagcctcctgaagaaaagattctcccatagacccgtgcaggagaagttcgtgtgcctgaactgcggcttcgagacacacgcagccgagcaagccgccctgaacatcgccagatcctggctgttcctgcggagccaggagtacaagaaataccagacaaacaagacaaccggcaacaccgataagagagccttcgtcgagacctggcagtccttttaccggaagaagcttaaggaggtgtggaaacctgccgtgcggtctggcggatctggcggaggctccaccagccccaagaaaaagagaaaagtctaagctgccttctgcggggcttgccttctggccatgcccttcttctctcccttgcacctgtacctcttggtctttgaataaagcctgagtaggaaggctagcaaaaaaaaaaaaaaaaaaaaaaaaaaaaaaaaaaaaaaaaaaaaaaaaaaaaaaaaaaaaaaaaaaaaaaaaaaaaaaaa

SEQ ID NO: 9181 - RNA, 8787 nt, synthetic construct
  source 1..8787: mol_type = other RNA
aggaaataagagagaaaagaagagtaagaagaaatataagagccaccatggcccctaagaagaagcgtaaagtgagccggatgaaccacgaccaggagttcgacccccctaaggtgtaccctcccgtccccgccgagaagagaaagcccatccgggtcctgagcctgttcgatggcatcgccaccggtctgctggtgctgaaggacctgggcatccaggtggataggtacattgcctccgaggtgtgcgaggactccatcaccgtgggaatggtgcgtcatcagggcaagatcatgtacgtgggcgacgtgcggagcgtgacacagaagcatatccaggagtggggccctttcgacctggtgatcggcggcagcccttgcaatgacctgagcatcgtgaacccagcccggaagggcctgtacgagggaaccggcagactgttcttcgagttttacagactgctgcacgacgcccggcctaaggaaggcgacgaccggcccttcttttggctgttcgagaatgtggtggccatgggagtcagcgacaagcgggatattagccggttcctggagagcaaccccgtgatgatcgatgccaaggaagtgagcgccgcccaccgggccagatacttctggggcaatctgcctggcatgaacagacccctggccagcaccgtgaacgacaagctggagctgcaggagtgcctggagcacggccggatcgccaagttcagcaaggtgagaaccatcaccacccgaagcaacagcatcaaacaaggcaaggaccagcactttcctgtgttcatgaacgagaaggaggacatcctgtggtgtaccgagatggagagagtgttcgggttcccagtccactacacagatgtcagcaacatgtctagactggccagacagagactgctgggaagaagctggtccgtccctgtgatcagacacctgttcgcccctctgaaggagtacttcgcctgcgtgagcagcggcaacagcaacgccaacagccggggccccagcttctctagcggcctggtgccactgtccctgagagggagccacatgggccccatggagatctacaaaaccgtgagcgcctggaagcggcagcctgtgcgcgtgctgagcctgtttcggaatatcgataaagtcctgaaaagcctgggattcctggagagcggctctggctccggcggtggcaccctgaagtacgtggaggatgtgacaaacgtggtcagacgggatgtggagaagtggggccccttcgatctggtgtacggcagcacccaacccctgggcagctcttgtgaccggtgccctggctggtacatgtttcagttccaccggatcctgcagtacgccctgccgagacaggagtcccagcggccattcttttggattttcatggacaacttgctgctgaccgaggatgaccaggaaactaccactcggttcctgcagaccgaagccgtgaccctgcaggacgtgagaggccgggactaccagaacgccatgcgggtgtggtccaacatccctggactgaaaagcaagcacgcacctctgacccctaaagaagaggagtacctgcaggcccaggtgcggagcagaagcaagctggacgcccctaaggtggatctgctggtgaagaattgcctcctgcccctgagagagtacttcaagtatttcagccagaatagtctgcccctgggaggcagcggcggcggcatgatcaactaccagacccccgtgagcttcagggacgtggtggtgggcttcacccaggaggagtggcacaggctgaaccccacccagagggccctgtacagggacgtgatgctggagacctacagcaacctggtgagcgtgggctacgagggcaccaagcccgacgtgatcctgaggctggagcaggaggaggccccctggatcggcgaggccgcctgcctgggctgccactgctggggcaagggcggcccaagcagcggcgcccctcctcccagcggcggcaggcggcccaagcagcggcgcccctcctcccagcggcggcagcccagccggctccccaacctctaccgaggagggcacctctgagtccgccacccccgagagcggccctggcacctccaccgagcccagcgagggcagcgcacccggcagccctgccggcagccccacctccacagaggagggaaccagcaccgagcccagcgaaggcagcgccccaggcaccagcaccgagcctagtgagcaggagattaaacggatcaacaagatcagaagaagacttgtgaaagacagcaacaccaagaaggccggcaagacaggccccatgaaaaccctgctggttagagtgatgacacccgatctgagagagcggctggaaaacctgagaaagaagcctgaaaatatcccccagcccatcagcaatacatctagagccaacctgaataagctgctgaccgattacaccgaaatgaagaaggcgatcctgcatgtgtactgggaagagttccagaaggaccctgtgggcctgatgagccgggtggcccagcctgccagcaagaagatcgatcagaacaagctgaaacctgagatggacgagaagggcaacctgaccaccgccggctttgcctgctctcagtgtggccagcccctgttcgtgtacaagctggagcaggtgtctgagaagggcaaggcttacaccaactacttcggacggtgcaatgtggccgagcacgaaaagctgatcctgctggcccagctgaagcccgagaaggatagcgacgaagccgtgacatatagcctgggaaagtttgggcagagggccctggatttctacagcattcatgtgaccaaggagtccacccaccccgtgaagcccctggcccagatcgccggaaacagatacgcctccggacctgtgggaaaggccctgagcgacgcatgtatgggcacaatcgcctccttcctgtctaagtaccaggacatcatcatcgaacaccagaaggtggtgaagggcaaccagaagagactggagagcctgcgggagctggccggcaaggaaaacctggaataccctagcgtgaccctgccacctcagcctcacaccaaggagggcgttgatgcctacaacgaagtgatcgcccgggtgcgaatgtgggtgaacctgaacctgtggcagaagctgaagctaagcagagatgatgccaagcctctgctgagactgaagggattcccttcctttcctctggtcgagagacaggccaacgaagtggactggtgggacatggtgtgtaacgtgaagaagctgatcaacgagaaaaaggaggatggcaaggtgttttggcagaatctggctggctacaagagacaggaagccctgagaccatacctgagcagcgaggaagatcggaagaagggaaagaaattcgctcggtaccagctgggcgacctgctgctgcacctggaaaagaagcacggcgaggactggggaaaggtgtacgacgaggcctgggagcggattgacaagaaagtggaaggcctgagcaagcacatcaagctggaagaggaacggagaagcgaggacgcccagagcaaggccgccctgaccgactggctgcgggctaaggccagcttcgtgatcgagggcctgaaggaggccgacaaggacgagttctgcagatgcgagctgaagctgcagaagtggtacggggacctgcggggaaagcccttcgccatcgaagccgagaacagcatcctggacatcagcggcttcagcaagcagtacaactgtgccttcatctggcagaaggacggcgtgaagaagctgaacctgtacctgatcatcaactacttcaagggcggcaagctgcggttcaagaagatcaaacctgaagccttcgaagccaacagattctacaccgtgatcaacaaaaagagcggcgagatcgtgcccatggaggtgaacttcaacttcgacgaccccaacctgatcatcctgcctctggcctttggcaagagacagggcagagaattcatctggaacgacctgctgtccctggaaaccggcagcctgaagctggccaacggaagagtgatcgagaagacactgtacaacagaagaacccggcaggatgagcctgccctgttcgtggccctgaccttcgagcggcgggaggtcctggactcctccaatatcaaaccaatgaacctgatcggcgtggcaagaggcgaaaacatccccgccgtgatcgccctgaccgaccccgagggctgcccactgagccggtttaaggatagcctgggaaacccaacccacatcctgagaatcggcgagagctataaggagaagcagcggaccatccaggccaagaaggaggtggagcagcggagagccggcggctacagccggaagtacgccagcaaagccaagaatctggcagacgatatggtgagaaacaccgctagagatctgctgtactacgccgtgacccaggatgccatgctgatcttcgccaacctgagccggggcttcggccggcagggcaagcggaccttcatggccgagagacagtacacacggatggaggactggctgaccgccaagctggcctacgagggcctgagcaagacctacctgtccaagacactggcccagtacacctccaagacatgcagcaactgtgggtttaccatcaccagcgccgactacgacagggtgctggagaagctgaagaagacagcaacaggctggatgaccacaattaacggcaaggagctgaaggtggagggccagattacctactacaacagatacaagagacagaacgtagtcaaggacctgtccgtcgagctggatagactgagcgaagaatctgtgaacaacgacatctcctcctggacaaagggcagaagcggagaagctctgagcctcctgaagaaaagattctcccatagacccgtgcaggagaagttcgtgtgcctgaactgcggcttcgagacacacgcagccgagcaagccgccctgaacatcgccagatcctggctgttcctgcggagccaggagtacaagaaataccagacaaacaagacaaccggcaacaccgataagagagccttcgtcgagacctggcagtccttttaccggaagaagcttaaggaggtgtggaaacctgccgtgcggtctggcggatctggcggaggctccaccagccccaagaaaaagagaaaagtctaagctgccttctgcggggcttgccttctggccatgcccttcttctctcccttgcacctgtacctcttggtctttgaataaagcctgagtaggaaggctagcaaaaaaaaaaaaaaaaaaaaaaaaaaaaaaaaaaaaaaaaaaaaaaaaaaaaaaaaaaaaaaaaaaaaaaaaaaaaaaaagcccagccggctccccaacctctaccgaggagggcacctctgagtccgccacccccgagagcggccctggcacctccaccgagcccagcgagggcagcgcacccggcagccctgccggcagccccacctccacagaggagggaaccagcaccgagcccagcgaaggcagcgccccaggcaccagcaccgagcctagtgagcaggagattaaacggatcaacaagatcagaagaagacttgtgaaagacagcaacaccaagaaggccggcaagacaggccccatgaaaaccctgctggttagagtgatgacacccgatctgagagagcggctggaaaacctgagaaagaagcctgaaaatatcccccagcccatcagcaatacatctagagccaacctgaataagctgctgaccgattacaccgaaatgaagaaggcgatcctgcatgtgtactgggaagagttccagaaggaccctgtgggcctgatgagccgggtggcccagcctgccagcaagaagatcgatcagaacaagctgaaacctgagatggacgagaagggcaacctgaccaccgccggctttgcctgctctcagtgtggccagcccctgttcgtgtacaagctggagcaggtgtctgagaagggcaaggcttacaccaactacttcggacggtgcaatgtggccgagcacgaaaagctgatcctgctggcccagctgaagcccgagaaggatagcgacgaagccgtgacatatagcctgggaaagtttgggcagagggccctggatttctacagcattcatgtgaccaaggagtccacccaccccgtgaagcccctggcccagatcgccggaaacagatacgcctccggacctgtgggaaaggccctgagcgacgcatgtatgggcacaatcgcctccttcctgtctaagtaccaggacatcatcatcgaacaccagaaggtggtgaagggcaaccagaagagactggagagcctgcgggagctggccggcaaggaaaacctggaataccctagcgtgaccctgccacctcagcctcacaccaaggagggcgttgatgcctacaacgaagtgatcgcccgggtgcgaatgtgggtgaacctgaacctgtggcagaagctgaagctaagcagagatgatgccaagcctctgctgagactgaagggattcccttcctttcctctggtcgagagacaggccaacgaagtggactggtgggacatggtgtgtaacgtgaagaagctgatcaacgagaaaaaggaggatggcaaggtgttttggcagaatctggctggctacaagagacaggaagccctgagaccatacctgagcagcgaggaagatcggaagaagggaaagaaattcgctcggtaccagctgggcgacctgctgctgcacctggaaaagaagcacggcgaggactggggaaaggtgtacgacgaggcctgggagcggattgacaagaaagtggaaggcctgagcaagcacatcaagctggaagaggaacggagaagcgaggacgcccagagcaaggccgccctgaccgactggctgcgggctaaggccagcttcgtgatcgagggcctgaaggaggccgacaaggacgagttctgcagatgcgagctgaagctgcagaagtggtacggggacctgcggggaaagcccttcgccatcgaagccgagaacagcatcctggacatcagcggcttcagcaagcagtacaactgtgccttcatctggcagaaggacggcgtgaagaagctgaacctgtacctgatcatcaactacttcaagggcggcaagctgcggttcaagaagatcaaacctgaagccttcgaagccaacagattctacaccgtgatcaacaaaaagagcggcgagatcgtgcccatggaggtgaacttcaacttcgacgaccccaacctgatcatcctgcctctggcctttggcaagagacagggcagagaattcatctggaacgacctgctgtccctggaaaccggcagcctgaagctggccaacggaagagtgatcgagaagacactgtacaacagaagaacccggcaggatgagcctgccctgttcgtggccctgaccttcgagcggcgggaggtcctggactcctccaatatcaaaccaatgaacctgatcggcgtggcaagaggcgaaaacatccccgccgtgatcgccctgaccgaccccgagggctgcccactgagccggtttaaggatagcctgggaaacccaacccacatcctgagaatcggcgagagctataaggagaagcagcggaccatccaggccaagaaggaggtggagcagcggagagccggcggctacagccggaagtacgccagcaaagccaagaatctggcagacgatatggtgagaaacaccgctagagatctgctgtactacgccgtgacccaggatgccatgctgatcttcgccaacctgagccggggcttcggccggcagggcaagcggaccttcatggccgagagacagtacacacggatggaggactggctgaccgccaagctggcctacgagggcctgagcaagacctacctgtccaagacactggcccagtacacctccaagacatgcagcaactgtgggtttaccatcaccagcgccgactacgacagggtgctggagaagctgaagaagacagcaacaggctggatgaccacaattaacggcaaggagctgaaggtggagggccagattacctactacaacagatacaagagacagaacgtagtcaaggacctgtccgtcgagctggatagactgagcgaagaatctgtgaacaacgacatctcctcctggacaaagggcagaagcggagaagctctgagcctcctgaagaaaagattctcccatagacccgtgcaggagaagttcgtgtgcctgaactgcggcttcgagacacacgcagccgagcaagccgccctgaacatcgccagatcctggctgttcctgcggagccaggagtacaagaaataccagacaaacaagacaaccggcaacaccgataagagagccttcgtcgagacctggcagtccttttaccggaagaagcttaaggaggtgtggaaacctgccgtgcggtctggcggatctggcggaggctccaccagccccaagaaaaagagaaaagtctaagctgccttctgcggggcttgccttctggccatgcccttcttctctcccttgcacctgtacctcttggtctttgaataaagcctgagtaggaaggctagcaaaaaaaaaaaaaaaaaaaaaaaaaaaaaaaaaaaaaaaaaaaaaaaaaaaaaaaaaaaaaaaaaaaaaaaaaaaaaaaa

SEQ ID NO: 9182 - RNA, 8787 nt, synthetic construct
  source 1..8787: mol_type = other RNA
aggaaataagagagaaaagaagagtaagaagaaatataagagccaccatggcccctaagaagaagcgtaaagtgagccggatgaaccacgaccaggagttcgacccccctaaggtgtaccctcccgtccccgccgagaagagaaagcccatccgggtcctgagcctgttcgatggcatcgccaccggtctgctggtgctgaaggacctgggcatccaggtggataggtacattgcctccgaggtgtgcgaggactccatcaccgtgggaatggtgcgtcatcagggcaagatcatgtacgtgggcgacgtgcggagcgtgacacagaagcatatccaggagtggggccctttcgacctggtgatcggcggcagcccttgcaatgacctgagcatcgtgaacccagcccggaagggcctgtacgagggaaccggcagactgttcttcgagttttacagactgctgcacgacgcccggcctaaggaaggcgacgaccggcccttcttttggctgttcgagaatgtggtggccatgggagtcagcgacaagcgggatattagccggttcctggagagcaaccccgtgatgatcgatgccaaggaagtgagcgccgcccaccgggccagatacttctggggcaatctgcctggcatgaacagacccctggccagcaccgtgaacgacaagctggagctgcaggagtgcctggagcacggccggatcgccaagttcagcaaggtgagaaccatcaccacccgaagcaacagcatcaaacaaggcaaggaccagcactttcctgtgttcatgaacgagaaggaggacatcctgtggtgtaccgagatggagagagtgttcgggttcccagtccactacacagatgtcagcaacatgtctagactggccagacagagactgctgggaagaagctggtccgtccctgtgatcagacacctgttcgcccctctgaaggagtacttcgcctgcgtgagcagcggcaacagcaacgccaacagccggggccccagcttctctagcggcctggtgccactgtccctgagagggagccacatgggccccatggagatctacaaaaccgtgagcgcctggaagcggcagcctgtgcgcgtgctgagcctgtttcggaatatcgataaagtcctgaaaagcctgggattcctggagagcggctctggctccggcggtggcaccctgaagtacgtggaggatgtgacaaacgtggtcagacgggatgtggagaagtggggccccttcgatctggtgtacggcagcacccaacccctgggcagctcttgtgaccggtgccctggctggtacatgtttcagttccaccggatcctgcagtacgccctgccgagacaggagtcccagcggccattcttttggattttcatggacaacttgctgctgaccgaggatgaccaggaaactaccactcggttcctgcagaccgaagccgtgaccctgcaggacgtgagaggccgggactaccagaacgccatgcgggtgtggtccaacatccctggactgaaaagcaagcacgcacctctgacccctaaagaagaggagtacctgcaggcccaggtgcggagcagaagcaagctggacgcccctaaggtggatctgctggtgaagaattgcctcctgcccctgagagagtacttcaagtatttcagccagaatagtctgcccctgggaggcagcggcggcggcggcctgctgagcttcgaggacgtggccctgtacttcaccagggaggagtgggacaccctggactgggcccagaaggccctgtacagggacgtgatgctggacaactacaggcacatcgtgagcctgggcttccccttccccaagcccgaggtgatctgccagctggagcagtgggaggagccctggatcctggacctgcccagggccggcaccaggaaggccagcggcagcgcctgccccgacggcggcccaagcagcggcgcccctcctcccagcggcggcaggcggcccaagcagcggcgcccctcctcccagcggcggcagcccagccggctccccaacctctaccgaggagggcacctctgagtccgccacccccgagagcggccctggcacctccaccgagcccagcgagggcagcgcacccggcagccctgccggcagccccacctccacagaggagggaaccagcaccgagcccagcgaaggcagcgccccaggcaccagcaccgagcctagtgagcaggagattaaacggatcaacaagatcagaagaagacttgtgaaagacagcaacaccaagaaggccggcaagacaggccccatgaaaaccctgctggttagagtgatgacacccgatctgagagagcggctggaaaacctgagaaagaagcctgaaaatatcccccagcccatcagcaatacatctagagccaacctgaataagctgctgaccgattacaccgaaatgaagaaggcgatcctgcatgtgtactgggaagagttccagaaggaccctgtgggcctgatgagccgggtggcccagcctgccagcaagaagatcgatcagaacaagctgaaacctgagatggacgagaagggcaacctgaccaccgccggctttgcctgctctcagtgtggccagcccctgttcgtgtacaagctggagcaggtgtctgagaagggcaaggcttacaccaactacttcggacggtgcaatgtggccgagcacgaaaagctgatcctgctggcccagctgaagcccgagaaggatagcgacgaagccgtgacatatagcctgggaaagtttgggcagagggccctggatttctacagcattcatgtgaccaaggagtccacccaccccgtgaagcccctggcccagatcgccggaaacagatacgcctccggacctgtgggaaaggccctgagcgacgcatgtatgggcacaatcgcctccttcctgtctaagtaccaggacatcatcatcgaacaccagaaggtggtgaagggcaaccagaagagactggagagcctgcgggagctggccggcaaggaaaacctggaataccctagcgtgaccctgccacctcagcctcacaccaaggagggcgttgatgcctacaacgaagtgatcgcccgggtgcgaatgtgggtgaacctgaacctgtggcagaagctgaagctaagcagagatgatgccaagcctctgctgagactgaagggattcccttcctttcctctggtcgagagacaggccaacgaagtggactggtgggacatggtgtgtaacgtgaagaagctgatcaacgagaaaaaggaggatggcaaggtgttttggcagaatctggctggctacaagagacaggaagccctgagaccatacctgagcagcgaggaagatcggaagaagggaaagaaattcgctcggtaccagctgggcgacctgctgctgcacctggaaaagaagcacggcgaggactggggaaaggtgtacgacgaggcctgggagcggattgacaagaaagtggaaggcctgagcaagcacatcaagctggaagaggaacggagaagcgaggacgcccagagcaaggccgccctgaccgactggctgcgggctaaggccagcttcgtgatcgagggcctgaaggaggccgacaaggacgagttctgcagatgcgagctgaagctgcagaagtggtacggggacctgcggggaaagcccttcgccatcgaagccgagaacagcatcctggacatcagcggcttcagcaagcagtacaactgtgccttcatctggcagaaggacggcgtgaagaagctgaacctgtacctgatcatcaactacttcaagggcggcaagctgcggttcaagaagatcaaacctgaagccttcgaagccaacagattctacaccgtgatcaacaaaaagagcggcgagatcgtgcccatggaggtgaacttcaacttcgacgaccccaacctgatcatcctgcctctggcctttggcaagagacagggcagagaattcatctggaacgacctgctgtccctggaaaccggcagcctgaagctggccaacggaagagtgatcgagaagacactgtacaacagaagaacccggcaggatgagcctgccctgttcgtggccctgaccttcgagcggcgggaggtcctggactcctccaatatcaaaccaatgaacctgatcggcgtggcaagaggcgaaaacatccccgccgtgatcgccctgaccgaccccgagggctgcccactgagccggtttaaggatagcctgggaaacccaacccacatcctgagaatcggcgagagctataaggagaagcagcggaccatccaggccaagaaggaggtggagcagcggagagccggcggctacagccggaagtacgccagcaaagccaagaatctggcagacgatatggtgagaaacaccgctagagatctgctgtactacgccgtgacccaggatgccatgctgatcttcgccaacctgagccggggcttcggccggcagggcaagcggaccttcatggccgagagacagtacacacggatggaggactggctgaccgccaagctggcctacgagggcctgagcaagacctacctgtccaagacactggcccagtacacctccaagacatgcagcaactgtgggtttaccatcaccagcgccgactacgacagggtgctggagaagctgaagaagacagcaacaggctggatgaccacaattaacggcaaggagctgaaggtggagggccagattacctactacaacagatacaagagacagaacgtagtcaaggacctgtccgtcgagctggatagactgagcgaagaatctgtgaacaacgacatctcctcctggacaaagggcagaagcggagaagctctgagcctcctgaagaaaagattctcccatagacccgtgcaggagaagttcgtgtgcctgaactgcggcttcgagacacacgcagccgagcaagccgccctgaacatcgccagatcctggctgttcctgcggagccaggagtacaagaaataccagacaaacaagacaaccggcaacaccgataagagagccttcgtcgagacctggcagtccttttaccggaagaagcttaaggaggtgtggaaacctgccgtgcggtctggcggatctggcggaggctccaccagccccaagaaaaagagaaaagtctaagctgccttctgcggggcttgccttctggccatgcccttcttctctcccttgcacctgtacctcttggtctttgaataaagcctgagtaggaaggctagcaaaaaaaaaaaaaaaaaaaaaaaaaaaaaaaaaaaaaaaaaaaaaaaaaaaaaaaaaaaaaaaaaaaaaaaaaaaaaaaagcccagccggctccccaacctctaccgaggagggcacctctgagtccgccacccccgagagcggccctggcacctccaccgagcccagcgagggcagcgcacccggcagccctgccggcagccccacctccacagaggagggaaccagcaccgagcccagcgaaggcagcgccccaggcaccagcaccgagcctagtgagcaggagattaaacggatcaacaagatcagaagaagacttgtgaaagacagcaacaccaagaaggccggcaagacaggccccatgaaaaccctgctggttagagtgatgacacccgatctgagagagcggctggaaaacctgagaaagaagcctgaaaatatcccccagcccatcagcaatacatctagagccaacctgaataagctgctgaccgattacaccgaaatgaagaaggcgatcctgcatgtgtactgggaagagttccagaaggaccctgtgggcctgatgagccgggtggcccagcctgccagcaagaagatcgatcagaacaagctgaaacctgagatggacgagaagggcaacctgaccaccgccggctttgcctgctctcagtgtggccagcccctgttcgtgtacaagctggagcaggtgtctgagaagggcaaggcttacaccaactacttcggacggtgcaatgtggccgagcacgaaaagctgatcctgctggcccagctgaagcccgagaaggatagcgacgaagccgtgacatatagcctgggaaagtttgggcagagggccctggatttctacagcattcatgtgaccaaggagtccacccaccccgtgaagcccctggcccagatcgccggaaacagatacgcctccggacctgtgggaaaggccctgagcgacgcatgtatgggcacaatcgcctccttcctgtctaagtaccaggacatcatcatcgaacaccagaaggtggtgaagggcaaccagaagagactggagagcctgcgggagctggccggcaaggaaaacctggaataccctagcgtgaccctgccacctcagcctcacaccaaggagggcgttgatgcctacaacgaagtgatcgcccgggtgcgaatgtgggtgaacctgaacctgtggcagaagctgaagctaagcagagatgatgccaagcctctgctgagactgaagggattcccttcctttcctctggtcgagagacaggccaacgaagtggactggtgggacatggtgtgtaacgtgaagaagctgatcaacgagaaaaaggaggatggcaaggtgttttggcagaatctggctggctacaagagacaggaagccctgagaccatacctgagcagcgaggaagatcggaagaagggaaagaaattcgctcggtaccagctgggcgacctgctgctgcacctggaaaagaagcacggcgaggactggggaaaggtgtacgacgaggcctgggagcggattgacaagaaagtggaaggcctgagcaagcacatcaagctggaagaggaacggagaagcgaggacgcccagagcaaggccgccctgaccgactggctgcgggctaaggccagcttcgtgatcgagggcctgaaggaggccgacaaggacgagttctgcagatgcgagctgaagctgcagaagtggtacggggacctgcggggaaagcccttcgccatcgaagccgagaacagcatcctggacatcagcggcttcagcaagcagtacaactgtgccttcatctggcagaaggacggcgtgaagaagctgaacctgtacctgatcatcaactacttcaagggcggcaagctgcggttcaagaagatcaaacctgaagccttcgaagccaacagattctacaccgtgatcaacaaaaagagcggcgagatcgtgcccatggaggtgaacttcaacttcgacgaccccaacctgatcatcctgcctctggcctttggcaagagacagggcagagaattcatctggaacgacctgctgtccctggaaaccggcagcctgaagctggccaacggaagagtgatcgagaagacactgtacaacagaagaacccggcaggatgagcctgccctgttcgtggccctgaccttcgagcggcgggaggtcctggactcctccaatatcaaaccaatgaacctgatcggcgtggcaagaggcgaaaacatccccgccgtgatcgccctgaccgaccccgagggctgcccactgagccggtttaaggatagcctgggaaacccaacccacatcctgagaatcggcgagagctataaggagaagcagcggaccatccaggccaagaaggaggtggagcagcggagagccggcggctacagccggaagtacgccagcaaagccaagaatctggcagacgatatggtgagaaacaccgctagagatctgctgtactacgccgtgacccaggatgccatgctgatcttcgccaacctgagccggggcttcggccggcagggcaagcggaccttcatggccgagagacagtacacacggatggaggactggctgaccgccaagctggcctacgagggcctgagcaagacctacctgtccaagacactggcccagtacacctccaagacatgcagcaactgtgggtttaccatcaccagcgccgactacgacagggtgctggagaagctgaagaagacagcaacaggctggatgaccacaattaacggcaaggagctgaaggtggagggccagattacctactacaacagatacaagagacagaacgtagtcaaggacctgtccgtcgagctggatagactgagcgaagaatctgtgaacaacgacatctcctcctggacaaagggcagaagcggagaagctctgagcctcctgaagaaaagattctcccatagacccgtgcaggagaagttcgtgtgcctgaactgcggcttcgagacacacgcagccgagcaagccgccctgaacatcgccagatcctggctgttcctgcggagccaggagtacaagaaataccagacaaacaagacaaccggcaacaccgataagagagccttcgtcgagacctggcagtccttttaccggaagaagcttaaggaggtgtggaaacctgccgtgcggtctggcggatctggcggaggctccaccagccccaagaaaaagagaaaagtctaagctgccttctgcggggcttgccttctggccatgcccttcttctctcccttgcacctgtacctcttggtctttgaataaagcctgagtaggaaggctagcaaaaaaaaaaaaaaaaaaaaaaaaaaaaaaaaaaaaaaaaaaaaaaaaaaaaaaaaaaaaaaaaaaaaaaaaaaaaaaaa

SEQ ID NO: 9183 - RNA, 8787 nt, synthetic construct
  source 1..8787: mol_type = other RNA
aggaaataagagagaaaagaagagtaagaagaaatataagagccaccatggcccctaagaagaagcgtaaagtgagccggatgaaccacgaccaggagttcgacccccctaaggtgtaccctcccgtccccgccgagaagagaaagcccatccgggtcctgagcctgttcgatggcatcgccaccggtctgctggtgctgaaggacctgggcatccaggtggataggtacattgcctccgaggtgtgcgaggactccatcaccgtgggaatggtgcgtcatcagggcaagatcatgtacgtgggcgacgtgcggagcgtgacacagaagcatatccaggagtggggccctttcgacctggtgatcggcggcagcccttgcaatgacctgagcatcgtgaacccagcccggaagggcctgtacgagggaaccggcagactgttcttcgagttttacagactgctgcacgacgcccggcctaaggaaggcgacgaccggcccttcttttggctgttcgagaatgtggtggccatgggagtcagcgacaagcgggatattagccggttcctggagagcaaccccgtgatgatcgatgccaaggaagtgagcgccgcccaccgggccagatacttctggggcaatctgcctggcatgaacagacccctggccagcaccgtgaacgacaagctggagctgcaggagtgcctggagcacggccggatcgccaagttcagcaaggtgagaaccatcaccacccgaagcaacagcatcaaacaaggcaaggaccagcactttcctgtgttcatgaacgagaaggaggacatcctgtggtgtaccgagatggagagagtgttcgggttcccagtccactacacagatgtcagcaacatgtctagactggccagacagagactgctgggaagaagctggtccgtccctgtgatcagacacctgttcgcccctctgaaggagtacttcgcctgcgtgagcagcggcaacagcaacgccaacagccggggccccagcttctctagcggcctggtgccactgtccctgagagggagccacatgggccccatggagatctacaaaaccgtgagcgcctggaagcggcagcctgtgcgcgtgctgagcctgtttcggaatatcgataaagtcctgaaaagcctgggattcctggagagcggctctggctccggcggtggcaccctgaagtacgtggaggatgtgacaaacgtggtcagacgggatgtggagaagtggggccccttcgatctggtgtacggcagcacccaacccctgggcagctcttgtgaccggtgccctggctggtacatgtttcagttccaccggatcctgcagtacgccctgccgagacaggagtcccagcggccattcttttggattttcatggacaacttgctgctgaccgaggatgaccaggaaactaccactcggttcctgcagaccgaagccgtgaccctgcaggacgtgagaggccgggactaccagaacgccatgcgggtgtggtccaacatccctggactgaaaagcaagcacgcacctctgacccctaaagaagaggagtacctgcaggcccaggtgcggagcagaagcaagctggacgcccctaaggtggatctgctggtgaagaattgcctcctgcccctgagagagtacttcaagtatttcagccagaatagtctgcccctgggaggcagcggcggcggcgtgttccagggcagcctgagcttcgaggacgtgaccgtggacttcagcagggaggagtggaggctgctggacctggcccagaagagcctgtacagggacgtgatgctggagaactacttcaacctgatcagcgtgggctgccaggtgcccaagcaggaggtgctgttcagcctggagcaggaggagcccaggatgctggacggcgagatcagcagccacaactgcctgggcggcgacatcggcggcggcccaagcagcggcgcccctcctcccagcggcggcaggcggcccaagcagcggcgcccctcctcccagcggcggcagcccagccggctccccaacctctaccgaggagggcacctctgagtccgccacccccgagagcggccctggcacctccaccgagcccagcgagggcagcgcacccggcagccctgccggcagccccacctccacagaggagggaaccagcaccgagcccagcgaaggcagcgccccaggcaccagcaccgagcctagtgagcaggagattaaacggatcaacaagatcagaagaagacttgtgaaagacagcaacaccaagaaggccggcaagacaggccccatgaaaaccctgctggttagagtgatgacacccgatctgagagagcggctggaaaacctgagaaagaagcctgaaaatatcccccagcccatcagcaatacatctagagccaacctgaataagctgctgaccgattacaccgaaatgaagaaggcgatcctgcatgtgtactgggaagagttccagaaggaccctgtgggcctgatgagccgggtggcccagcctgccagcaagaagatcgatcagaacaagctgaaacctgagatggacgagaagggcaacctgaccaccgccggctttgcctgctctcagtgtggccagcccctgttcgtgtacaagctggagcaggtgtctgagaagggcaaggcttacaccaactacttcggacggtgcaatgtggccgagcacgaaaagctgatcctgctggcccagctgaagcccgagaaggatagcgacgaagccgtgacatatagcctgggaaagtttgggcagagggccctggatttctacagcattcatgtgaccaaggagtccacccaccccgtgaagcccctggcccagatcgccggaaacagatacgcctccggacctgtgggaaaggccctgagcgacgcatgtatgggcacaatcgcctccttcctgtctaagtaccaggacatcatcatcgaacaccagaaggtggtgaagggcaaccagaagagactggagagcctgcgggagctggccggcaaggaaaacctggaataccctagcgtgaccctgccacctcagcctcacaccaaggagggcgttgatgcctacaacgaagtgatcgcccgggtgcgaatgtgggtgaacctgaacctgtggcagaagctgaagctaagcagagatgatgccaagcctctgctgagactgaagggattcccttcctttcctctggtcgagagacaggccaacgaagtggactggtgggacatggtgtgtaacgtgaagaagctgatcaacgagaaaaaggaggatggcaaggtgttttggcagaatctggctggctacaagagacaggaagccctgagaccatacctgagcagcgaggaagatcggaagaagggaaagaaattcgctcggtaccagctgggcgacctgctgctgcacctggaaaagaagcacggcgaggactggggaaaggtgtacgacgaggcctgggagcggattgacaagaaagtggaaggcctgagcaagcacatcaagctggaagaggaacggagaagcgaggacgcccagagcaaggccgccctgaccgactggctgcgggctaaggccagcttcgtgatcgagggcctgaaggaggccgacaaggacgagttctgcagatgcgagctgaagctgcagaagtggtacggggacctgcggggaaagcccttcgccatcgaagccgagaacagcatcctggacatcagcggcttcagcaagcagtacaactgtgccttcatctggcagaaggacggcgtgaagaagctgaacctgtacctgatcatcaactacttcaagggcggcaagctgcggttcaagaagatcaaacctgaagccttcgaagccaacagattctacaccgtgatcaacaaaaagagcggcgagatcgtgcccatggaggtgaacttcaacttcgacgaccccaacctgatcatcctgcctctggcctttggcaagagacagggcagagaattcatctggaacgacctgctgtccctggaaaccggcagcctgaagctggccaacggaagagtgatcgagaagacactgtacaacagaagaacccggcaggatgagcctgccctgttcgtggccctgaccttcgagcggcgggaggtcctggactcctccaatatcaaaccaatgaacctgatcggcgtggcaagaggcgaaaacatccccgccgtgatcgccctgaccgaccccgagggctgcccactgagccggtttaaggatagcctgggaaacccaacccacatcctgagaatcggcgagagctataaggagaagcagcggaccatccaggccaagaaggaggtggagcagcggagagccggcggctacagccggaagtacgccagcaaagccaagaatctggcagacgatatggtgagaaacaccgctagagatctgctgtactacgccgtgacccaggatgccatgctgatcttcgccaacctgagccggggcttcggccggcagggcaagcggaccttcatggccgagagacagtacacacggatggaggactggctgaccgccaagctggcctacgagggcctgagcaagacctacctgtccaagacactggcccagtacacctccaagacatgcagcaactgtgggtttaccatcaccagcgccgactacgacagggtgctggagaagctgaagaagacagcaacaggctggatgaccacaattaacggcaaggagctgaaggtggagggccagattacctactacaacagatacaagagacagaacgtagtcaaggacctgtccgtcgagctggatagactgagcgaagaatctgtgaacaacgacatctcctcctggacaaagggcagaagcggagaagctctgagcctcctgaagaaaagattctcccatagacccgtgcaggagaagttcgtgtgcctgaactgcggcttcgagacacacgcagccgagcaagccgccctgaacatcgccagatcctggctgttcctgcggagccaggagtacaagaaataccagacaaacaagacaaccggcaacaccgataagagagccttcgtcgagacctggcagtccttttaccggaagaagcttaaggaggtgtggaaacctgccgtgcggtctggcggatctggcggaggctccaccagccccaagaaaaagagaaaagtctaagctgccttctgcggggcttgccttctggccatgcccttcttctctcccttgcacctgtacctcttggtctttgaataaagcctgagtaggaaggctagcaaaaaaaaaaaaaaaaaaaaaaaaaaaaaaaaaaaaaaaaaaaaaaaaaaaaaaaaaaaaaaaaaaaaaaaaaaaaaaaagcccagccggctccccaacctctaccgaggagggcacctctgagtccgccacccccgagagcggccctggcacctccaccgagcccagcgagggcagcgcacccggcagccctgccggcagccccacctccacagaggagggaaccagcaccgagcccagcgaaggcagcgccccaggcaccagcaccgagcctagtgagcaggagattaaacggatcaacaagatcagaagaagacttgtgaaagacagcaacaccaagaaggccggcaagacaggccccatgaaaaccctgctggttagagtgatgacacccgatctgagagagcggctggaaaacctgagaaagaagcctgaaaatatcccccagcccatcagcaatacatctagagccaacctgaataagctgctgaccgattacaccgaaatgaagaaggcgatcctgcatgtgtactgggaagagttccagaaggaccctgtgggcctgatgagccgggtggcccagcctgccagcaagaagatcgatcagaacaagctgaaacctgagatggacgagaagggcaacctgaccaccgccggctttgcctgctctcagtgtggccagcccctgttcgtgtacaagctggagcaggtgtctgagaagggcaaggcttacaccaactacttcggacggtgcaatgtggccgagcacgaaaagctgatcctgctggcccagctgaagcccgagaaggatagcgacgaagccgtgacatatagcctgggaaagtttgggcagagggccctggatttctacagcattcatgtgaccaaggagtccacccaccccgtgaagcccctggcccagatcgccggaaacagatacgcctccggacctgtgggaaaggccctgagcgacgcatgtatgggcacaatcgcctccttcctgtctaagtaccaggacatcatcatcgaacaccagaaggtggtgaagggcaaccagaagagactggagagcctgcgggagctggccggcaaggaaaacctggaataccctagcgtgaccctgccacctcagcctcacaccaaggagggcgttgatgcctacaacgaagtgatcgcccgggtgcgaatgtgggtgaacctgaacctgtggcagaagctgaagctaagcagagatgatgccaagcctctgctgagactgaagggattcccttcctttcctctggtcgagagacaggccaacgaagtggactggtgggacatggtgtgtaacgtgaagaagctgatcaacgagaaaaaggaggatggcaaggtgttttggcagaatctggctggctacaagagacaggaagccctgagaccatacctgagcagcgaggaagatcggaagaagggaaagaaattcgctcggtaccagctgggcgacctgctgctgcacctggaaaagaagcacggcgaggactggggaaaggtgtacgacgaggcctgggagcggattgacaagaaagtggaaggcctgagcaagcacatcaagctggaagaggaacggagaagcgaggacgcccagagcaaggccgccctgaccgactggctgcgggctaaggccagcttcgtgatcgagggcctgaaggaggccgacaaggacgagttctgcagatgcgagctgaagctgcagaagtggtacggggacctgcggggaaagcccttcgccatcgaagccgagaacagcatcctggacatcagcggcttcagcaagcagtacaactgtgccttcatctggcagaaggacggcgtgaagaagctgaacctgtacctgatcatcaactacttcaagggcggcaagctgcggttcaagaagatcaaacctgaagccttcgaagccaacagattctacaccgtgatcaacaaaaagagcggcgagatcgtgcccatggaggtgaacttcaacttcgacgaccccaacctgatcatcctgcctctggcctttggcaagagacagggcagagaattcatctggaacgacctgctgtccctggaaaccggcagcctgaagctggccaacggaagagtgatcgagaagacactgtacaacagaagaacccggcaggatgagcctgccctgttcgtggccctgaccttcgagcggcgggaggtcctggactcctccaatatcaaaccaatgaacctgatcggcgtggcaagaggcgaaaacatccccgccgtgatcgccctgaccgaccccgagggctgcccactgagccggtttaaggatagcctgggaaacccaacccacatcctgagaatcggcgagagctataaggagaagcagcggaccatccaggccaagaaggaggtggagcagcggagagccggcggctacagccggaagtacgccagcaaagccaagaatctggcagacgatatggtgagaaacaccgctagagatctgctgtactacgccgtgacccaggatgccatgctgatcttcgccaacctgagccggggcttcggccggcagggcaagcggaccttcatggccgagagacagtacacacggatggaggactggctgaccgccaagctggcctacgagggcctgagcaagacctacctgtccaagacactggcccagtacacctccaagacatgcagcaactgtgggtttaccatcaccagcgccgactacgacagggtgctggagaagctgaagaagacagcaacaggctggatgaccacaattaacggcaaggagctgaaggtggagggccagattacctactacaacagatacaagagacagaacgtagtcaaggacctgtccgtcgagctggatagactgagcgaagaatctgtgaacaacgacatctcctcctggacaaagggcagaagcggagaagctctgagcctcctgaagaaaagattctcccatagacccgtgcaggagaagttcgtgtgcctgaactgcggcttcgagacacacgcagccgagcaagccgccctgaacatcgccagatcctggctgttcctgcggagccaggagtacaagaaataccagacaaacaagacaaccggcaacaccgataagagagccttcgtcgagacctggcagtccttttaccggaagaagcttaaggaggtgtggaaacctgccgtgcggtctggcggatctggcggaggctccaccagccccaagaaaaagagaaaagtctaagctgccttctgcggggcttgccttctggccatgcccttcttctctcccttgcacctgtacctcttggtctttgaataaagcctgagtaggaaggctagcaaaaaaaaaaaaaaaaaaaaaaaaaaaaaaaaaaaaaaaaaaaaaaaaaaaaaaaaaaaaaaaaaaaaaaaaaaaaaaaa

SEQ ID NO: 9184 - RNA, 8787 nt, synthetic construct
  source 1..8787: mol_type = other RNA
aggaaataagagagaaaagaagagtaagaagaaatataagagccaccatggcccctaagaagaagcgtaaagtgagccggatgaaccacgaccaggagttcgacccccctaaggtgtaccctcccgtccccgccgagaagagaaagcccatccgggtcctgagcctgttcgatggcatcgccaccggtctgctggtgctgaaggacctgggcatccaggtggataggtacattgcctccgaggtgtgcgaggactccatcaccgtgggaatggtgcgtcatcagggcaagatcatgtacgtgggcgacgtgcggagcgtgacacagaagcatatccaggagtggggccctttcgacctggtgatcggcggcagcccttgcaatgacctgagcatcgtgaacccagcccggaagggcctgtacgagggaaccggcagactgttcttcgagttttacagactgctgcacgacgcccggcctaaggaaggcgacgaccggcccttcttttggctgttcgagaatgtggtggccatgggagtcagcgacaagcgggatattagccggttcctggagagcaaccccgtgatgatcgatgccaaggaagtgagcgccgcccaccgggccagatacttctggggcaatctgcctggcatgaacagacccctggccagcaccgtgaacgacaagctggagctgcaggagtgcctggagcacggccggatcgccaagttcagcaaggtgagaaccatcaccacccgaagcaacagcatcaaacaaggcaaggaccagcactttcctgtgttcatgaacgagaaggaggacatcctgtggtgtaccgagatggagagagtgttcgggttcccagtccactacacagatgtcagcaacatgtctagactggccagacagagactgctgggaagaagctggtccgtccctgtgatcagacacctgttcgcccctctgaaggagtacttcgcctgcgtgagcagcggcaacagcaacgccaacagccggggccccagcttctctagcggcctggtgccactgtccctgagagggagccacatgggccccatggagatctacaaaaccgtgagcgcctggaagcggcagcctgtgcgcgtgctgagcctgtttcggaatatcgataaagtcctgaaaagcctgggattcctggagagcggctctggctccggcggtggcaccctgaagtacgtggaggatgtgacaaacgtggtcagacgggatgtggagaagtggggccccttcgatctggtgtacggcagcacccaacccctgggcagctcttgtgaccggtgccctggctggtacatgtttcagttccaccggatcctgcagtacgccctgccgagacaggagtcccagcggccattcttttggattttcatggacaacttgctgctgaccgaggatgaccaggaaactaccactcggttcctgcagaccgaagccgtgaccctgcaggacgtgagaggccgggactaccagaacgccatgcgggtgtggtccaacatccctggactgaaaagcaagcacgcacctctgacccctaaagaagaggagtacctgcaggcccaggtgcggagcagaagcaagctggacgcccctaaggtggatctgctggtgaagaattgcctcctgcccctgagagagtacttcaagtatttcagccagaatagtctgcccctgggaggcagcggcggcggcatgcccgtgaccttcgaggaggtggccgtgtacttcacccagggccagggcgccctgctggaccccgcccagagggccctgtacagggacgtgatgcaggagaactacgagaccgtgaccagcctgggcttccccatccccaagcccgagctgatcgccaggctggagaggggcgaggagccctgggtgcccgacctgcaggcctgcaaggagaggaggctgcccaggtgcaccaggaccggcggcggcccaagcagcggcgcccctcctcccagcggcggcaggcggcccaagcagcggcgcccctcctcccagcggcggcagcccagccggctccccaacctctaccgaggagggcacctctgagtccgccacccccgagagcggccctggcacctccaccgagcccagcgagggcagcgcacccggcagccctgccggcagccccacctccacagaggagggaaccagcaccgagcccagcgaaggcagcgccccaggcaccagcaccgagcctagtgagcaggagattaaacggatcaacaagatcagaagaagacttgtgaaagacagcaacaccaagaaggccggcaagacaggccccatgaaaaccctgctggttagagtgatgacacccgatctgagagagcggctggaaaacctgagaaagaagcctgaaaatatcccccagcccatcagcaatacatctagagccaacctgaataagctgctgaccgattacaccgaaatgaagaaggcgatcctgcatgtgtactgggaagagttccagaaggaccctgtgggcctgatgagccgggtggcccagcctgccagcaagaagatcgatcagaacaagctgaaacctgagatggacgagaagggcaacctgaccaccgccggctttgcctgctctcagtgtggccagcccctgttcgtgtacaagctggagcaggtgtctgagaagggcaaggcttacaccaactacttcggacggtgcaatgtggccgagcacgaaaagctgatcctgctggcccagctgaagcccgagaaggatagcgacgaagccgtgacatatagcctgggaaagtttgggcagagggccctggatttctacagcattcatgtgaccaaggagtccacccaccccgtgaagcccctggcccagatcgccggaaacagatacgcctccggacctgtgggaaaggccctgagcgacgcatgtatgggcacaatcgcctccttcctgtctaagtaccaggacatcatcatcgaacaccagaaggtggtgaagggcaaccagaagagactggagagcctgcgggagctggccggcaaggaaaacctggaataccctagcgtgaccctgccacctcagcctcacaccaaggagggcgttgatgcctacaacgaagtgatcgcccgggtgcgaatgtgggtgaacctgaacctgtggcagaagctgaagctaagcagagatgatgccaagcctctgctgagactgaagggattcccttcctttcctctggtcgagagacaggccaacgaagtggactggtgggacatggtgtgtaacgtgaagaagctgatcaacgagaaaaaggaggatggcaaggtgttttggcagaatctggctggctacaagagacaggaagccctgagaccatacctgagcagcgaggaagatcggaagaagggaaagaaattcgctcggtaccagctgggcgacctgctgctgcacctggaaaagaagcacggcgaggactggggaaaggtgtacgacgaggcctgggagcggattgacaagaaagtggaaggcctgagcaagcacatcaagctggaagaggaacggagaagcgaggacgcccagagcaaggccgccctgaccgactggctgcgggctaaggccagcttcgtgatcgagggcctgaaggaggccgacaaggacgagttctgcagatgcgagctgaagctgcagaagtggtacggggacctgcggggaaagcccttcgccatcgaagccgagaacagcatcctggacatcagcggcttcagcaagcagtacaactgtgccttcatctggcagaaggacggcgtgaagaagctgaacctgtacctgatcatcaactacttcaagggcggcaagctgcggttcaagaagatcaaacctgaagccttcgaagccaacagattctacaccgtgatcaacaaaaagagcggcgagatcgtgcccatggaggtgaacttcaacttcgacgaccccaacctgatcatcctgcctctggcctttggcaagagacagggcagagaattcatctggaacgacctgctgtccctggaaaccggcagcctgaagctggccaacggaagagtgatcgagaagacactgtacaacagaagaacccggcaggatgagcctgccctgttcgtggccctgaccttcgagcggcgggaggtcctggactcctccaatatcaaaccaatgaacctgatcggcgtggcaagaggcgaaaacatccccgccgtgatcgccctgaccgaccccgagggctgcccactgagccggtttaaggatagcctgggaaacccaacccacatcctgagaatcggcgagagctataaggagaagcagcggaccatccaggccaagaaggaggtggagcagcggagagccggcggctacagccggaagtacgccagcaaagccaagaatctggcagacgatatggtgagaaacaccgctagagatctgctgtactacgccgtgacccaggatgccatgctgatcttcgccaacctgagccggggcttcggccggcagggcaagcggaccttcatggccgagagacagtacacacggatggaggactggctgaccgccaagctggcctacgagggcctgagcaagacctacctgtccaagacactggcccagtacacctccaagacatgcagcaactgtgggtttaccatcaccagcgccgactacgacagggtgctggagaagctgaagaagacagcaacaggctggatgaccacaattaacggcaaggagctgaaggtggagggccagattacctactacaacagatacaagagacagaacgtagtcaaggacctgtccgtcgagctggatagactgagcgaagaatctgtgaacaacgacatctcctcctggacaaagggcagaagcggagaagctctgagcctcctgaagaaaagattctcccatagacccgtgcaggagaagttcgtgtgcctgaactgcggcttcgagacacacgcagccgagcaagccgccctgaacatcgccagatcctggctgttcctgcggagccaggagtacaagaaataccagacaaacaagacaaccggcaacaccgataagagagccttcgtcgagacctggcagtccttttaccggaagaagcttaaggaggtgtggaaacctgccgtgcggtctggcggatctggcggaggctccaccagccccaagaaaaagagaaaagtctaagctgccttctgcggggcttgccttctggccatgcccttcttctctcccttgcacctgtacctcttggtctttgaataaagcctgagtaggaaggctagcaaaaaaaaaaaaaaaaaaaaaaaaaaaaaaaaaaaaaaaaaaaaaaaaaaaaaaaaaaaaaaaaaaaaaaaaaaaaaaaagcccagccggctccccaacctctaccgaggagggcacctctgagtccgccacccccgagagcggccctggcacctccaccgagcccagcgagggcagcgcacccggcagccctgccggcagccccacctccacagaggagggaaccagcaccgagcccagcgaaggcagcgccccaggcaccagcaccgagcctagtgagcaggagattaaacggatcaacaagatcagaagaagacttgtgaaagacagcaacaccaagaaggccggcaagacaggccccatgaaaaccctgctggttagagtgatgacacccgatctgagagagcggctggaaaacctgagaaagaagcctgaaaatatcccccagcccatcagcaatacatctagagccaacctgaataagctgctgaccgattacaccgaaatgaagaaggcgatcctgcatgtgtactgggaagagttccagaaggaccctgtgggcctgatgagccgggtggcccagcctgccagcaagaagatcgatcagaacaagctgaaacctgagatggacgagaagggcaacctgaccaccgccggctttgcctgctctcagtgtggccagcccctgttcgtgtacaagctggagcaggtgtctgagaagggcaaggcttacaccaactacttcggacggtgcaatgtggccgagcacgaaaagctgatcctgctggcccagctgaagcccgagaaggatagcgacgaagccgtgacatatagcctgggaaagtttgggcagagggccctggatttctacagcattcatgtgaccaaggagtccacccaccccgtgaagcccctggcccagatcgccggaaacagatacgcctccggacctgtgggaaaggccctgagcgacgcatgtatgggcacaatcgcctccttcctgtctaagtaccaggacatcatcatcgaacaccagaaggtggtgaagggcaaccagaagagactggagagcctgcgggagctggccggcaaggaaaacctggaataccctagcgtgaccctgccacctcagcctcacaccaaggagggcgttgatgcctacaacgaagtgatcgcccgggtgcgaatgtgggtgaacctgaacctgtggcagaagctgaagctaagcagagatgatgccaagcctctgctgagactgaagggattcccttcctttcctctggtcgagagacaggccaacgaagtggactggtgggacatggtgtgtaacgtgaagaagctgatcaacgagaaaaaggaggatggcaaggtgttttggcagaatctggctggctacaagagacaggaagccctgagaccatacctgagcagcgaggaagatcggaagaagggaaagaaattcgctcggtaccagctgggcgacctgctgctgcacctggaaaagaagcacggcgaggactggggaaaggtgtacgacgaggcctgggagcggattgacaagaaagtggaaggcctgagcaagcacatcaagctggaagaggaacggagaagcgaggacgcccagagcaaggccgccctgaccgactggctgcgggctaaggccagcttcgtgatcgagggcctgaaggaggccgacaaggacgagttctgcagatgcgagctgaagctgcagaagtggtacggggacctgcggggaaagcccttcgccatcgaagccgagaacagcatcctggacatcagcggcttcagcaagcagtacaactgtgccttcatctggcagaaggacggcgtgaagaagctgaacctgtacctgatcatcaactacttcaagggcggcaagctgcggttcaagaagatcaaacctgaagccttcgaagccaacagattctacaccgtgatcaacaaaaagagcggcgagatcgtgcccatggaggtgaacttcaacttcgacgaccccaacctgatcatcctgcctctggcctttggcaagagacagggcagagaattcatctggaacgacctgctgtccctggaaaccggcagcctgaagctggccaacggaagagtgatcgagaagacactgtacaacagaagaacccggcaggatgagcctgccctgttcgtggccctgaccttcgagcggcgggaggtcctggactcctccaatatcaaaccaatgaacctgatcggcgtggcaagaggcgaaaacatccccgccgtgatcgccctgaccgaccccgagggctgcccactgagccggtttaaggatagcctgggaaacccaacccacatcctgagaatcggcgagagctataaggagaagcagcggaccatccaggccaagaaggaggtggagcagcggagagccggcggctacagccggaagtacgccagcaaagccaagaatctggcagacgatatggtgagaaacaccgctagagatctgctgtactacgccgtgacccaggatgccatgctgatcttcgccaacctgagccggggcttcggccggcagggcaagcggaccttcatggccgagagacagtacacacggatggaggactggctgaccgccaagctggcctacgagggcctgagcaagacctacctgtccaagacactggcccagtacacctccaagacatgcagcaactgtgggtttaccatcaccagcgccgactacgacagggtgctggagaagctgaagaagacagcaacaggctggatgaccacaattaacggcaaggagctgaaggtggagggccagattacctactacaacagatacaagagacagaacgtagtcaaggacctgtccgtcgagctggatagactgagcgaagaatctgtgaacaacgacatctcctcctggacaaagggcagaagcggagaagctctgagcctcctgaagaaaagattctcccatagacccgtgcaggagaagttcgtgtgcctgaactgcggcttcgagacacacgcagccgagcaagccgccctgaacatcgccagatcctggctgttcctgcggagccaggagtacaagaaataccagacaaacaagacaaccggcaacaccgataagagagccttcgtcgagacctggcagtccttttaccggaagaagcttaaggaggtgtggaaacctgccgtgcggtctggcggatctggcggaggctccaccagccccaagaaaaagagaaaagtctaagctgccttctgcggggcttgccttctggccatgcccttcttctctcccttgcacctgtacctcttggtctttgaataaagcctgagtaggaaggctagcaaaaaaaaaaaaaaaaaaaaaaaaaaaaaaaaaaaaaaaaaaaaaaaaaaaaaaaaaaaaaaaaaaaaaaaaaaaaaaaa

SEQ ID NO: 9185 - RNA, 8787 nt, synthetic construct
  source 1..8787: mol_type = other RNA
aggaaataagagagaaaagaagagtaagaagaaatataagagccaccatggcccctaagaagaagcgtaaagtgagccggatgaaccacgaccaggagttcgacccccctaaggtgtaccctcccgtccccgccgagaagagaaagcccatccgggtcctgagcctgttcgatggcatcgccaccggtctgctggtgctgaaggacctgggcatccaggtggataggtacattgcctccgaggtgtgcgaggactccatcaccgtgggaatggtgcgtcatcagggcaagatcatgtacgtgggcgacgtgcggagcgtgacacagaagcatatccaggagtggggccctttcgacctggtgatcggcggcagcccttgcaatgacctgagcatcgtgaacccagcccggaagggcctgtacgagggaaccggcagactgttcttcgagttttacagactgctgcacgacgcccggcctaaggaaggcgacgaccggcccttcttttggctgttcgagaatgtggtggccatgggagtcagcgacaagcgggatattagccggttcctggagagcaaccccgtgatgatcgatgccaaggaagtgagcgccgcccaccgggccagatacttctggggcaatctgcctggcatgaacagacccctggccagcaccgtgaacgacaagctggagctgcaggagtgcctggagcacggccggatcgccaagttcagcaaggtgagaaccatcaccacccgaagcaacagcatcaaacaaggcaaggaccagcactttcctgtgttcatgaacgagaaggaggacatcctgtggtgtaccgagatggagagagtgttcgggttcccagtccactacacagatgtcagcaacatgtctagactggccagacagagactgctgggaagaagctggtccgtccctgtgatcagacacctgttcgcccctctgaaggagtacttcgcctgcgtgagcagcggcaacagcaacgccaacagccggggccccagcttctctagcggcctggtgccactgtccctgagagggagccacatgggccccatggagatctacaaaaccgtgagcgcctggaagcggcagcctgtgcgcgtgctgagcctgtttcggaatatcgataaagtcctgaaaagcctgggattcctggagagcggctctggctccggcggtggcaccctgaagtacgtggaggatgtgacaaacgtggtcagacgggatgtggagaagtggggccccttcgatctggtgtacggcagcacccaacccctgggcagctcttgtgaccggtgccctggctggtacatgtttcagttccaccggatcctgcagtacgccctgccgagacaggagtcccagcggccattcttttggattttcatggacaacttgctgctgaccgaggatgaccaggaaactaccactcggttcctgcagaccgaagccgtgaccctgcaggacgtgagaggccgggactaccagaacgccatgcgggtgtggtccaacatccctggactgaaaagcaagcacgcacctctgacccctaaagaagaggagtacctgcaggcccaggtgcggagcagaagcaagctggacgcccctaaggtggatctgctggtgaagaattgcctcctgcccctgagagagtacttcaagtatttcagccagaatagtctgcccctgggaggcagcggcggcggcagccagagcctggtgaccttcggcgacgtggccgtgaacttcagccaggaggagtgggagtggctgaacagcgcccagaggaacctgtacaggagcgtgatgctggagaactacaggaacctggtgagcctgggcctgtgcgtgagcaagcccgacatgatcagcagcctggagcagaggaaggagccctggatggtgaagaggaagctgaccaggggcaggtgccccgacctgaaggccgtgggcggcccaagcagcggcgcccctcctcccagcggcggcaggcggcccaagcagcggcgcccctcctcccagcggcggcagcccagccggctccccaacctctaccgaggagggcacctctgagtccgccacccccgagagcggccctggcacctccaccgagcccagcgagggcagcgcacccggcagccctgccggcagccccacctccacagaggagggaaccagcaccgagcccagcgaaggcagcgccccaggcaccagcaccgagcctagtgagcaggagattaaacggatcaacaagatcagaagaagacttgtgaaagacagcaacaccaagaaggccggcaagacaggccccatgaaaaccctgctggttagagtgatgacacccgatctgagagagcggctggaaaacctgagaaagaagcctgaaaatatcccccagcccatcagcaatacatctagagccaacctgaataagctgctgaccgattacaccgaaatgaagaaggcgatcctgcatgtgtactgggaagagttccagaaggaccctgtgggcctgatgagccgggtggcccagcctgccagcaagaagatcgatcagaacaagctgaaacctgagatggacgagaagggcaacctgaccaccgccggctttgcctgctctcagtgtggccagcccctgttcgtgtacaagctggagcaggtgtctgagaagggcaaggcttacaccaactacttcggacggtgcaatgtggccgagcacgaaaagctgatcctgctggcccagctgaagcccgagaaggatagcgacgaagccgtgacatatagcctgggaaagtttgggcagagggccctggatttctacagcattcatgtgaccaaggagtccacccaccccgtgaagcccctggcccagatcgccggaaacagatacgcctccggacctgtgggaaaggccctgagcgacgcatgtatgggcacaatcgcctccttcctgtctaagtaccaggacatcatcatcgaacaccagaaggtggtgaagggcaaccagaagagactggagagcctgcgggagctggccggcaaggaaaacctggaataccctagcgtgaccctgccacctcagcctcacaccaaggagggcgttgatgcctacaacgaagtgatcgcccgggtgcgaatgtgggtgaacctgaacctgtggcagaagctgaagctaagcagagatgatgccaagcctctgctgagactgaagggattcccttcctttcctctggtcgagagacaggccaacgaagtggactggtgggacatggtgtgtaacgtgaagaagctgatcaacgagaaaaaggaggatggcaaggtgttttggcagaatctggctggctacaagagacaggaagccctgagaccatacctgagcagcgaggaagatcggaagaagggaaagaaattcgctcggtaccagctgggcgacctgctgctgcacctggaaaagaagcacggcgaggactggggaaaggtgtacgacgaggcctgggagcggattgacaagaaagtggaaggcctgagcaagcacatcaagctggaagaggaacggagaagcgaggacgcccagagcaaggccgccctgaccgactggctgcgggctaaggccagcttcgtgatcgagggcctgaaggaggccgacaaggacgagttctgcagatgcgagctgaagctgcagaagtggtacggggacctgcggggaaagcccttcgccatcgaagccgagaacagcatcctggacatcagcggcttcagcaagcagtacaactgtgccttcatctggcagaaggacggcgtgaagaagctgaacctgtacctgatcatcaactacttcaagggcggcaagctgcggttcaagaagatcaaacctgaagccttcgaagccaacagattctacaccgtgatcaacaaaaagagcggcgagatcgtgcccatggaggtgaacttcaacttcgacgaccccaacctgatcatcctgcctctggcctttggcaagagacagggcagagaattcatctggaacgacctgctgtccctggaaaccggcagcctgaagctggccaacggaagagtgatcgagaagacactgtacaacagaagaacccggcaggatgagcctgccctgttcgtggccctgaccttcgagcggcgggaggtcctggactcctccaatatcaaaccaatgaacctgatcggcgtggcaagaggcgaaaacatccccgccgtgatcgccctgaccgaccccgagggctgcccactgagccggtttaaggatagcctgggaaacccaacccacatcctgagaatcggcgagagctataaggagaagcagcggaccatccaggccaagaaggaggtggagcagcggagagccggcggctacagccggaagtacgccagcaaagccaagaatctggcagacgatatggtgagaaacaccgctagagatctgctgtactacgccgtgacccaggatgccatgctgatcttcgccaacctgagccggggcttcggccggcagggcaagcggaccttcatggccgagagacagtacacacggatggaggactggctgaccgccaagctggcctacgagggcctgagcaagacctacctgtccaagacactggcccagtacacctccaagacatgcagcaactgtgggtttaccatcaccagcgccgactacgacagggtgctggagaagctgaagaagacagcaacaggctggatgaccacaattaacggcaaggagctgaaggtggagggccagattacctactacaacagatacaagagacagaacgtagtcaaggacctgtccgtcgagctggatagactgagcgaagaatctgtgaacaacgacatctcctcctggacaaagggcagaagcggagaagctctgagcctcctgaagaaaagattctcccatagacccgtgcaggagaagttcgtgtgcctgaactgcggcttcgagacacacgcagccgagcaagccgccctgaacatcgccagatcctggctgttcctgcggagccaggagtacaagaaataccagacaaacaagacaaccggcaacaccgataagagagccttcgtcgagacctggcagtccttttaccggaagaagcttaaggaggtgtggaaacctgccgtgcggtctggcggatctggcggaggctccaccagccccaagaaaaagagaaaagtctaagctgccttctgcggggcttgccttctggccatgcccttcttctctcccttgcacctgtacctcttggtctttgaataaagcctgagtaggaaggctagcaaaaaaaaaaaaaaaaaaaaaaaaaaaaaaaaaaaaaaaaaaaaaaaaaaaaaaaaaaaaaaaaaaaaaaaaaaaaaaaagcccagccggctccccaacctctaccgaggagggcacctctgagtccgccacccccgagagcggccctggcacctccaccgagcccagcgagggcagcgcacccggcagccctgccggcagccccacctccacagaggagggaaccagcaccgagcccagcgaaggcagcgccccaggcaccagcaccgagcctagtgagcaggagattaaacggatcaacaagatcagaagaagacttgtgaaagacagcaacaccaagaaggccggcaagacaggccccatgaaaaccctgctggttagagtgatgacacccgatctgagagagcggctggaaaacctgagaaagaagcctgaaaatatcccccagcccatcagcaatacatctagagccaacctgaataagctgctgaccgattacaccgaaatgaagaaggcgatcctgcatgtgtactgggaagagttccagaaggaccctgtgggcctgatgagccgggtggcccagcctgccagcaagaagatcgatcagaacaagctgaaacctgagatggacgagaagggcaacctgaccaccgccggctttgcctgctctcagtgtggccagcccctgttcgtgtacaagctggagcaggtgtctgagaagggcaaggcttacaccaactacttcggacggtgcaatgtggccgagcacgaaaagctgatcctgctggcccagctgaagcccgagaaggatagcgacgaagccgtgacatatagcctgggaaagtttgggcagagggccctggatttctacagcattcatgtgaccaaggagtccacccaccccgtgaagcccctggcccagatcgccggaaacagatacgcctccggacctgtgggaaaggccctgagcgacgcatgtatgggcacaatcgcctccttcctgtctaagtaccaggacatcatcatcgaacaccagaaggtggtgaagggcaaccagaagagactggagagcctgcgggagctggccggcaaggaaaacctggaataccctagcgtgaccctgccacctcagcctcacaccaaggagggcgttgatgcctacaacgaagtgatcgcccgggtgcgaatgtgggtgaacctgaacctgtggcagaagctgaagctaagcagagatgatgccaagcctctgctgagactgaagggattcccttcctttcctctggtcgagagacaggccaacgaagtggactggtgggacatggtgtgtaacgtgaagaagctgatcaacgagaaaaaggaggatggcaaggtgttttggcagaatctggctggctacaagagacaggaagccctgagaccatacctgagcagcgaggaagatcggaagaagggaaagaaattcgctcggtaccagctgggcgacctgctgctgcacctggaaaagaagcacggcgaggactggggaaaggtgtacgacgaggcctgggagcggattgacaagaaagtggaaggcctgagcaagcacatcaagctggaagaggaacggagaagcgaggacgcccagagcaaggccgccctgaccgactggctgcgggctaaggccagcttcgtgatcgagggcctgaaggaggccgacaaggacgagttctgcagatgcgagctgaagctgcagaagtggtacggggacctgcggggaaagcccttcgccatcgaagccgagaacagcatcctggacatcagcggcttcagcaagcagtacaactgtgccttcatctggcagaaggacggcgtgaagaagctgaacctgtacctgatcatcaactacttcaagggcggcaagctgcggttcaagaagatcaaacctgaagccttcgaagccaacagattctacaccgtgatcaacaaaaagagcggcgagatcgtgcccatggaggtgaacttcaacttcgacgaccccaacctgatcatcctgcctctggcctttggcaagagacagggcagagaattcatctggaacgacctgctgtccctggaaaccggcagcctgaagctggccaacggaagagtgatcgagaagacactgtacaacagaagaacccggcaggatgagcctgccctgttcgtggccctgaccttcgagcggcgggaggtcctggactcctccaatatcaaaccaatgaacctgatcggcgtggcaagaggcgaaaacatccccgccgtgatcgccctgaccgaccccgagggctgcccactgagccggtttaaggatagcctgggaaacccaacccacatcctgagaatcggcgagagctataaggagaagcagcggaccatccaggccaagaaggaggtggagcagcggagagccggcggctacagccggaagtacgccagcaaagccaagaatctggcagacgatatggtgagaaacaccgctagagatctgctgtactacgccgtgacccaggatgccatgctgatcttcgccaacctgagccggggcttcggccggcagggcaagcggaccttcatggccgagagacagtacacacggatggaggactggctgaccgccaagctggcctacgagggcctgagcaagacctacctgtccaagacactggcccagtacacctccaagacatgcagcaactgtgggtttaccatcaccagcgccgactacgacagggtgctggagaagctgaagaagacagcaacaggctggatgaccacaattaacggcaaggagctgaaggtggagggccagattacctactacaacagatacaagagacagaacgtagtcaaggacctgtccgtcgagctggatagactgagcgaagaatctgtgaacaacgacatctcctcctggacaaagggcagaagcggagaagctctgagcctcctgaagaaaagattctcccatagacccgtgcaggagaagttcgtgtgcctgaactgcggcttcgagacacacgcagccgagcaagccgccctgaacatcgccagatcctggctgttcctgcggagccaggagtacaagaaataccagacaaacaagacaaccggcaacaccgataagagagccttcgtcgagacctggcagtccttttaccggaagaagcttaaggaggtgtggaaacctgccgtgcggtctggcggatctggcggaggctccaccagccccaagaaaaagagaaaagtctaagctgccttctgcggggcttgccttctggccatgcccttcttctctcccttgcacctgtacctcttggtctttgaataaagcctgagtaggaaggctagcaaaaaaaaaaaaaaaaaaaaaaaaaaaaaaaaaaaaaaaaaaaaaaaaaaaaaaaaaaaaaaaaaaaaaaaaaaaaaaaa

SEQ ID NO: 9186 - RNA, 8787 nt, synthetic construct
  source 1..8787: mol_type = other RNA
aggaaataagagagaaaagaagagtaagaagaaatataagagccaccatggcccctaagaagaagcgtaaagtgagccggatgaaccacgaccaggagttcgacccccctaaggtgtaccctcccgtccccgccgagaagagaaagcccatccgggtcctgagcctgttcgatggcatcgccaccggtctgctggtgctgaaggacctgggcatccaggtggataggtacattgcctccgaggtgtgcgaggactccatcaccgtgggaatggtgcgtcatcagggcaagatcatgtacgtgggcgacgtgcggagcgtgacacagaagcatatccaggagtggggccctttcgacctggtgatcggcggcagcccttgcaatgacctgagcatcgtgaacccagcccggaagggcctgtacgagggaaccggcagactgttcttcgagttttacagactgctgcacgacgcccggcctaaggaaggcgacgaccggcccttcttttggctgttcgagaatgtggtggccatgggagtcagcgacaagcgggatattagccggttcctggagagcaaccccgtgatgatcgatgccaaggaagtgagcgccgcccaccgggccagatacttctggggcaatctgcctggcatgaacagacccctggccagcaccgtgaacgacaagctggagctgcaggagtgcctggagcacggccggatcgccaagttcagcaaggtgagaaccatcaccacccgaagcaacagcatcaaacaaggcaaggaccagcactttcctgtgttcatgaacgagaaggaggacatcctgtggtgtaccgagatggagagagtgttcgggttcccagtccactacacagatgtcagcaacatgtctagactggccagacagagactgctgggaagaagctggtccgtccctgtgatcagacacctgttcgcccctctgaaggagtacttcgcctgcgtgagcagcggcaacagcaacgccaacagccggggccccagcttctctagcggcctggtgccactgtccctgagagggagccacatgggccccatggagatctacaaaaccgtgagcgcctggaagcggcagcctgtgcgcgtgctgagcctgtttcggaatatcgataaagtcctgaaaagcctgggattcctggagagcggctctggctccggcggtggcaccctgaagtacgtggaggatgtgacaaacgtggtcagacgggatgtggagaagtggggccccttcgatctggtgtacggcagcacccaacccctgggcagctcttgtgaccggtgccctggctggtacatgtttcagttccaccggatcctgcagtacgccctgccgagacaggagtcccagcggccattcttttggattttcatggacaacttgctgctgaccgaggatgaccaggaaactaccactcggttcctgcagaccgaagccgtgaccctgcaggacgtgagaggccgggactaccagaacgccatgcgggtgtggtccaacatccctggactgaaaagcaagcacgcacctctgacccctaaagaagaggagtacctgcaggcccaggtgcggagcagaagcaagctggacgcccctaaggtggatctgctggtgaagaattgcctcctgcccctgagagagtacttcaagtatttcagccagaatagtctgcccctgggaggcagcggcggcggcgaggagctgcccgtggtgttcgaggacgtggccgtgtacttcaccagggaggagtggggcatgctggtgaagaggcagaaggagctgtacagggacgtgatgaggatgaactacgagctgctggccgccctgggccccgccgccgccaagcccgacctgatcagcaagctggagaggagggccgccccctggatcaaggaccccaacaggcccaagtggggcaagggcaggcccctgggcaagggcggcccaagcagcggcgcccctcctcccagcggcggcaggcggcccaagcagcggcgcccctcctcccagcggcggcagcccagccggctccccaacctctaccgaggagggcacctctgagtccgccacccccgagagcggccctggcacctccaccgagcccagcgagggcagcgcacccggcagccctgccggcagccccacctccacagaggagggaaccagcaccgagcccagcgaaggcagcgccccaggcaccagcaccgagcctagtgagcaggagattaaacggatcaacaagatcagaagaagacttgtgaaagacagcaacaccaagaaggccggcaagacaggccccatgaaaaccctgctggttagagtgatgacacccgatctgagagagcggctggaaaacctgagaaagaagcctgaaaatatcccccagcccatcagcaatacatctagagccaacctgaataagctgctgaccgattacaccgaaatgaagaaggcgatcctgcatgtgtactgggaagagttccagaaggaccctgtgggcctgatgagccgggtggcccagcctgccagcaagaagatcgatcagaacaagctgaaacctgagatggacgagaagggcaacctgaccaccgccggctttgcctgctctcagtgtggccagcccctgttcgtgtacaagctggagcaggtgtctgagaagggcaaggcttacaccaactacttcggacggtgcaatgtggccgagcacgaaaagctgatcctgctggcccagctgaagcccgagaaggatagcgacgaagccgtgacatatagcctgggaaagtttgggcagagggccctggatttctacagcattcatgtgaccaaggagtccacccaccccgtgaagcccctggcccagatcgccggaaacagatacgcctccggacctgtgggaaaggccctgagcgacgcatgtatgggcacaatcgcctccttcctgtctaagtaccaggacatcatcatcgaacaccagaaggtggtgaagggcaaccagaagagactggagagcctgcgggagctggccggcaaggaaaacctggaataccctagcgtgaccctgccacctcagcctcacaccaaggagggcgttgatgcctacaacgaagtgatcgcccgggtgcgaatgtgggtgaacctgaacctgtggcagaagctgaagctaagcagagatgatgccaagcctctgctgagactgaagggattcccttcctttcctctggtcgagagacaggccaacgaagtggactggtgggacatggtgtgtaacgtgaagaagctgatcaacgagaaaaaggaggatggcaaggtgttttggcagaatctggctggctacaagagacaggaagccctgagaccatacctgagcagcgaggaagatcggaagaagggaaagaaattcgctcggtaccagctgggcgacctgctgctgcacctggaaaagaagcacggcgaggactggggaaaggtgtacgacgaggcctgggagcggattgacaagaaagtggaaggcctgagcaagcacatcaagctggaagaggaacggagaagcgaggacgcccagagcaaggccgccctgaccgactggctgcgggctaaggccagcttcgtgatcgagggcctgaaggaggccgacaaggacgagttctgcagatgcgagctgaagctgcagaagtggtacggggacctgcggggaaagcccttcgccatcgaagccgagaacagcatcctggacatcagcggcttcagcaagcagtacaactgtgccttcatctggcagaaggacggcgtgaagaagctgaacctgtacctgatcatcaactacttcaagggcggcaagctgcggttcaagaagatcaaacctgaagccttcgaagccaacagattctacaccgtgatcaacaaaaagagcggcgagatcgtgcccatggaggtgaacttcaacttcgacgaccccaacctgatcatcctgcctctggcctttggcaagagacagggcagagaattcatctggaacgacctgctgtccctggaaaccggcagcctgaagctggccaacggaagagtgatcgagaagacactgtacaacagaagaacccggcaggatgagcctgccctgttcgtggccctgaccttcgagcggcgggaggtcctggactcctccaatatcaaaccaatgaacctgatcggcgtggcaagaggcgaaaacatccccgccgtgatcgccctgaccgaccccgagggctgcccactgagccggtttaaggatagcctgggaaacccaacccacatcctgagaatcggcgagagctataaggagaagcagcggaccatccaggccaagaaggaggtggagcagcggagagccggcggctacagccggaagtacgccagcaaagccaagaatctggcagacgatatggtgagaaacaccgctagagatctgctgtactacgccgtgacccaggatgccatgctgatcttcgccaacctgagccggggcttcggccggcagggcaagcggaccttcatggccgagagacagtacacacggatggaggactggctgaccgccaagctggcctacgagggcctgagcaagacctacctgtccaagacactggcccagtacacctccaagacatgcagcaactgtgggtttaccatcaccagcgccgactacgacagggtgctggagaagctgaagaagacagcaacaggctggatgaccacaattaacggcaaggagctgaaggtggagggccagattacctactacaacagatacaagagacagaacgtagtcaaggacctgtccgtcgagctggatagactgagcgaagaatctgtgaacaacgacatctcctcctggacaaagggcagaagcggagaagctctgagcctcctgaagaaaagattctcccatagacccgtgcaggagaagttcgtgtgcctgaactgcggcttcgagacacacgcagccgagcaagccgccctgaacatcgccagatcctggctgttcctgcggagccaggagtacaagaaataccagacaaacaagacaaccggcaacaccgataagagagccttcgtcgagacctggcagtccttttaccggaagaagcttaaggaggtgtggaaacctgccgtgcggtctggcggatctggcggaggctccaccagccccaagaaaaagagaaaagtctaagctgccttctgcggggcttgccttctggccatgcccttcttctctcccttgcacctgtacctcttggtctttgaataaagcctgagtaggaaggctagcaaaaaaaaaaaaaaaaaaaaaaaaaaaaaaaaaaaaaaaaaaaaaaaaaaaaaaaaaaaaaaaaaaaaaaaaaaaaaaaagcccagccggctccccaacctctaccgaggagggcacctctgagtccgccacccccgagagcggccctggcacctccaccgagcccagcgagggcagcgcacccggcagccctgccggcagccccacctccacagaggagggaaccagcaccgagcccagcgaaggcagcgccccaggcaccagcaccgagcctagtgagcaggagattaaacggatcaacaagatcagaagaagacttgtgaaagacagcaacaccaagaaggccggcaagacaggccccatgaaaaccctgctggttagagtgatgacacccgatctgagagagcggctggaaaacctgagaaagaagcctgaaaatatcccccagcccatcagcaatacatctagagccaacctgaataagctgctgaccgattacaccgaaatgaagaaggcgatcctgcatgtgtactgggaagagttccagaaggaccctgtgggcctgatgagccgggtggcccagcctgccagcaagaagatcgatcagaacaagctgaaacctgagatggacgagaagggcaacctgaccaccgccggctttgcctgctctcagtgtggccagcccctgttcgtgtacaagctggagcaggtgtctgagaagggcaaggcttacaccaactacttcggacggtgcaatgtggccgagcacgaaaagctgatcctgctggcccagctgaagcccgagaaggatagcgacgaagccgtgacatatagcctgggaaagtttgggcagagggccctggatttctacagcattcatgtgaccaaggagtccacccaccccgtgaagcccctggcccagatcgccggaaacagatacgcctccggacctgtgggaaaggccctgagcgacgcatgtatgggcacaatcgcctccttcctgtctaagtaccaggacatcatcatcgaacaccagaaggtggtgaagggcaaccagaagagactggagagcctgcgggagctggccggcaaggaaaacctggaataccctagcgtgaccctgccacctcagcctcacaccaaggagggcgttgatgcctacaacgaagtgatcgcccgggtgcgaatgtgggtgaacctgaacctgtggcagaagctgaagctaagcagagatgatgccaagcctctgctgagactgaagggattcccttcctttcctctggtcgagagacaggccaacgaagtggactggtgggacatggtgtgtaacgtgaagaagctgatcaacgagaaaaaggaggatggcaaggtgttttggcagaatctggctggctacaagagacaggaagccctgagaccatacctgagcagcgaggaagatcggaagaagggaaagaaattcgctcggtaccagctgggcgacctgctgctgcacctggaaaagaagcacggcgaggactggggaaaggtgtacgacgaggcctgggagcggattgacaagaaagtggaaggcctgagcaagcacatcaagctggaagaggaacggagaagcgaggacgcccagagcaaggccgccctgaccgactggctgcgggctaaggccagcttcgtgatcgagggcctgaaggaggccgacaaggacgagttctgcagatgcgagctgaagctgcagaagtggtacggggacctgcggggaaagcccttcgccatcgaagccgagaacagcatcctggacatcagcggcttcagcaagcagtacaactgtgccttcatctggcagaaggacggcgtgaagaagctgaacctgtacctgatcatcaactacttcaagggcggcaagctgcggttcaagaagatcaaacctgaagccttcgaagccaacagattctacaccgtgatcaacaaaaagagcggcgagatcgtgcccatggaggtgaacttcaacttcgacgaccccaacctgatcatcctgcctctggcctttggcaagagacagggcagagaattcatctggaacgacctgctgtccctggaaaccggcagcctgaagctggccaacggaagagtgatcgagaagacactgtacaacagaagaacccggcaggatgagcctgccctgttcgtggccctgaccttcgagcggcgggaggtcctggactcctccaatatcaaaccaatgaacctgatcggcgtggcaagaggcgaaaacatccccgccgtgatcgccctgaccgaccccgagggctgcccactgagccggtttaaggatagcctgggaaacccaacccacatcctgagaatcggcgagagctataaggagaagcagcggaccatccaggccaagaaggaggtggagcagcggagagccggcggctacagccggaagtacgccagcaaagccaagaatctggcagacgatatggtgagaaacaccgctagagatctgctgtactacgccgtgacccaggatgccatgctgatcttcgccaacctgagccggggcttcggccggcagggcaagcggaccttcatggccgagagacagtacacacggatggaggactggctgaccgccaagctggcctacgagggcctgagcaagacctacctgtccaagacactggcccagtacacctccaagacatgcagcaactgtgggtttaccatcaccagcgccgactacgacagggtgctggagaagctgaagaagacagcaacaggctggatgaccacaattaacggcaaggagctgaaggtggagggccagattacctactacaacagatacaagagacagaacgtagtcaaggacctgtccgtcgagctggatagactgagcgaagaatctgtgaacaacgacatctcctcctggacaaagggcagaagcggagaagctctgagcctcctgaagaaaagattctcccatagacccgtgcaggagaagttcgtgtgcctgaactgcggcttcgagacacacgcagccgagcaagccgccctgaacatcgccagatcctggctgttcctgcggagccaggagtacaagaaataccagacaaacaagacaaccggcaacaccgataagagagccttcgtcgagacctggcagtccttttaccggaagaagcttaaggaggtgtggaaacctgccgtgcggtctggcggatctggcggaggctccaccagccccaagaaaaagagaaaagtctaagctgccttctgcggggcttgccttctggccatgcccttcttctctcccttgcacctgtacctcttggtctttgaataaagcctgagtaggaaggctagcaaaaaaaaaaaaaaaaaaaaaaaaaaaaaaaaaaaaaaaaaaaaaaaaaaaaaaaaaaaaaaaaaaaaaaaaaaaaaaaa

SEQ ID NO: 9187 - RNA, 8787 nt, synthetic construct
  source 1..8787: mol_type = other RNA
aggaaataagagagaaaagaagagtaagaagaaatataagagccaccatggcccctaagaagaagcgtaaagtgagccggatgaaccacgaccaggagttcgacccccctaaggtgtaccctcccgtccccgccgagaagagaaagcccatccgggtcctgagcctgttcgatggcatcgccaccggtctgctggtgctgaaggacctgggcatccaggtggataggtacattgcctccgaggtgtgcgaggactccatcaccgtgggaatggtgcgtcatcagggcaagatcatgtacgtgggcgacgtgcggagcgtgacacagaagcatatccaggagtggggccctttcgacctggtgatcggcggcagcccttgcaatgacctgagcatcgtgaacccagcccggaagggcctgtacgagggaaccggcagactgttcttcgagttttacagactgctgcacgacgcccggcctaaggaaggcgacgaccggcccttcttttggctgttcgagaatgtggtggccatgggagtcagcgacaagcgggatattagccggttcctggagagcaaccccgtgatgatcgatgccaaggaagtgagcgccgcccaccgggccagatacttctggggcaatctgcctggcatgaacagacccctggccagcaccgtgaacgacaagctggagctgcaggagtgcctggagcacggccggatcgccaagttcagcaaggtgagaaccatcaccacccgaagcaacagcatcaaacaaggcaaggaccagcactttcctgtgttcatgaacgagaaggaggacatcctgtggtgtaccgagatggagagagtgttcgggttcccagtccactacacagatgtcagcaacatgtctagactggccagacagagactgctgggaagaagctggtccgtccctgtgatcagacacctgttcgcccctctgaaggagtacttcgcctgcgtgagcagcggcaacagcaacgccaacagccggggccccagcttctctagcggcctggtgccactgtccctgagagggagccacatgggccccatggagatctacaaaaccgtgagcgcctggaagcggcagcctgtgcgcgtgctgagcctgtttcggaatatcgataaagtcctgaaaagcctgggattcctggagagcggctctggctccggcggtggcaccctgaagtacgtggaggatgtgacaaacgtggtcagacgggatgtggagaagtggggccccttcgatctggtgtacggcagcacccaacccctgggcagctcttgtgaccggtgccctggctggtacatgtttcagttccaccggatcctgcagtacgccctgccgagacaggagtcccagcggccattcttttggattttcatggacaacttgctgctgaccgaggatgaccaggaaactaccactcggttcctgcagaccgaagccgtgaccctgcaggacgtgagaggccgggactaccagaacgccatgcgggtgtggtccaacatccctggactgaaaagcaagcacgcacctctgacccctaaagaagaggagtacctgcaggcccaggtgcggagcagaagcaagctggacgcccctaaggtggatctgctggtgaagaattgcctcctgcccctgagagagtacttcaagtatttcagccagaatagtctgcccctgggaggcagcggcggcggcccccagaagagcgtgaccttcgaggacgtggccgtgtacttcacccagaccgagtgggacggcctgagccccgcccagagggccctgtacagggacgtgatgctggagaactacggcaacgtggccagcctgggcttcagcctgctgaagcccgccgtgatcagccagctggagggcgccggcgagctgggcaggcccagccccctggtggccggcaccgagatcggcctgcagggcctgtggggcggcccaagcagcggcgcccctcctcccagcggcggcaggcggcccaagcagcggcgcccctcctcccagcggcggcagcccagccggctccccaacctctaccgaggagggcacctctgagtccgccacccccgagagcggccctggcacctccaccgagcccagcgagggcagcgcacccggcagccctgccggcagccccacctccacagaggagggaaccagcaccgagcccagcgaaggcagcgccccaggcaccagcaccgagcctagtgagcaggagattaaacggatcaacaagatcagaagaagacttgtgaaagacagcaacaccaagaaggccggcaagacaggccccatgaaaaccctgctggttagagtgatgacacccgatctgagagagcggctggaaaacctgagaaagaagcctgaaaatatcccccagcccatcagcaatacatctagagccaacctgaataagctgctgaccgattacaccgaaatgaagaaggcgatcctgcatgtgtactgggaagagttccagaaggaccctgtgggcctgatgagccgggtggcccagcctgccagcaagaagatcgatcagaacaagctgaaacctgagatggacgagaagggcaacctgaccaccgccggctttgcctgctctcagtgtggccagcccctgttcgtgtacaagctggagcaggtgtctgagaagggcaaggcttacaccaactacttcggacggtgcaatgtggccgagcacgaaaagctgatcctgctggcccagctgaagcccgagaaggatagcgacgaagccgtgacatatagcctgggaaagtttgggcagagggccctggatttctacagcattcatgtgaccaaggagtccacccaccccgtgaagcccctggcccagatcgccggaaacagatacgcctccggacctgtgggaaaggccctgagcgacgcatgtatgggcacaatcgcctccttcctgtctaagtaccaggacatcatcatcgaacaccagaaggtggtgaagggcaaccagaagagactggagagcctgcgggagctggccggcaaggaaaacctggaataccctagcgtgaccctgccacctcagcctcacaccaaggagggcgttgatgcctacaacgaagtgatcgcccgggtgcgaatgtgggtgaacctgaacctgtggcagaagctgaagctaagcagagatgatgccaagcctctgctgagactgaagggattcccttcctttcctctggtcgagagacaggccaacgaagtggactggtgggacatggtgtgtaacgtgaagaagctgatcaacgagaaaaaggaggatggcaaggtgttttggcagaatctggctggctacaagagacaggaagccctgagaccatacctgagcagcgaggaagatcggaagaagggaaagaaattcgctcggtaccagctgggcgacctgctgctgcacctggaaaagaagcacggcgaggactggggaaaggtgtacgacgaggcctgggagcggattgacaagaaagtggaaggcctgagcaagcacatcaagctggaagaggaacggagaagcgaggacgcccagagcaaggccgccctgaccgactggctgcgggctaaggccagcttcgtgatcgagggcctgaaggaggccgacaaggacgagttctgcagatgcgagctgaagctgcagaagtggtacggggacctgcggggaaagcccttcgccatcgaagccgagaacagcatcctggacatcagcggcttcagcaagcagtacaactgtgccttcatctggcagaaggacggcgtgaagaagctgaacctgtacctgatcatcaactacttcaagggcggcaagctgcggttcaagaagatcaaacctgaagccttcgaagccaacagattctacaccgtgatcaacaaaaagagcggcgagatcgtgcccatggaggtgaacttcaacttcgacgaccccaacctgatcatcctgcctctggcctttggcaagagacagggcagagaattcatctggaacgacctgctgtccctggaaaccggcagcctgaagctggccaacggaagagtgatcgagaagacactgtacaacagaagaacccggcaggatgagcctgccctgttcgtggccctgaccttcgagcggcgggaggtcctggactcctccaatatcaaaccaatgaacctgatcggcgtggcaagaggcgaaaacatccccgccgtgatcgccctgaccgaccccgagggctgcccactgagccggtttaaggatagcctgggaaacccaacccacatcctgagaatcggcgagagctataaggagaagcagcggaccatccaggccaagaaggaggtggagcagcggagagccggcggctacagccggaagtacgccagcaaagccaagaatctggcagacgatatggtgagaaacaccgctagagatctgctgtactacgccgtgacccaggatgccatgctgatcttcgccaacctgagccggggcttcggccggcagggcaagcggaccttcatggccgagagacagtacacacggatggaggactggctgaccgccaagctggcctacgagggcctgagcaagacctacctgtccaagacactggcccagtacacctccaagacatgcagcaactgtgggtttaccatcaccagcgccgactacgacagggtgctggagaagctgaagaagacagcaacaggctggatgaccacaattaacggcaaggagctgaaggtggagggccagattacctactacaacagatacaagagacagaacgtagtcaaggacctgtccgtcgagctggatagactgagcgaagaatctgtgaacaacgacatctcctcctggacaaagggcagaagcggagaagctctgagcctcctgaagaaaagattctcccatagacccgtgcaggagaagttcgtgtgcctgaactgcggcttcgagacacacgcagccgagcaagccgccctgaacatcgccagatcctggctgttcctgcggagccaggagtacaagaaataccagacaaacaagacaaccggcaacaccgataagagagccttcgtcgagacctggcagtccttttaccggaagaagcttaaggaggtgtggaaacctgccgtgcggtctggcggatctggcggaggctccaccagccccaagaaaaagagaaaagtctaagctgccttctgcggggcttgccttctggccatgcccttcttctctcccttgcacctgtacctcttggtctttgaataaagcctgagtaggaaggctagcaaaaaaaaaaaaaaaaaaaaaaaaaaaaaaaaaaaaaaaaaaaaaaaaaaaaaaaaaaaaaaaaaaaaaaaaaaaaaaaagcccagccggctccccaacctctaccgaggagggcacctctgagtccgccacccccgagagcggccctggcacctccaccgagcccagcgagggcagcgcacccggcagccctgccggcagccccacctccacagaggagggaaccagcaccgagcccagcgaaggcagcgccccaggcaccagcaccgagcctagtgagcaggagattaaacggatcaacaagatcagaagaagacttgtgaaagacagcaacaccaagaaggccggcaagacaggccccatgaaaaccctgctggttagagtgatgacacccgatctgagagagcggctggaaaacctgagaaagaagcctgaaaatatcccccagcccatcagcaatacatctagagccaacctgaataagctgctgaccgattacaccgaaatgaagaaggcgatcctgcatgtgtactgggaagagttccagaaggaccctgtgggcctgatgagccgggtggcccagcctgccagcaagaagatcgatcagaacaagctgaaacctgagatggacgagaagggcaacctgaccaccgccggctttgcctgctctcagtgtggccagcccctgttcgtgtacaagctggagcaggtgtctgagaagggcaaggcttacaccaactacttcggacggtgcaatgtggccgagcacgaaaagctgatcctgctggcccagctgaagcccgagaaggatagcgacgaagccgtgacatatagcctgggaaagtttgggcagagggccctggatttctacagcattcatgtgaccaaggagtccacccaccccgtgaagcccctggcccagatcgccggaaacagatacgcctccggacctgtgggaaaggccctgagcgacgcatgtatgggcacaatcgcctccttcctgtctaagtaccaggacatcatcatcgaacaccagaaggtggtgaagggcaaccagaagagactggagagcctgcgggagctggccggcaaggaaaacctggaataccctagcgtgaccctgccacctcagcctcacaccaaggagggcgttgatgcctacaacgaagtgatcgcccgggtgcgaatgtgggtgaacctgaacctgtggcagaagctgaagctaagcagagatgatgccaagcctctgctgagactgaagggattcccttcctttcctctggtcgagagacaggccaacgaagtggactggtgggacatggtgtgtaacgtgaagaagctgatcaacgagaaaaaggaggatggcaaggtgttttggcagaatctggctggctacaagagacaggaagccctgagaccatacctgagcagcgaggaagatcggaagaagggaaagaaattcgctcggtaccagctgggcgacctgctgctgcacctggaaaagaagcacggcgaggactggggaaaggtgtacgacgaggcctgggagcggattgacaagaaagtggaaggcctgagcaagcacatcaagctggaagaggaacggagaagcgaggacgcccagagcaaggccgccctgaccgactggctgcgggctaaggccagcttcgtgatcgagggcctgaaggaggccgacaaggacgagttctgcagatgcgagctgaagctgcagaagtggtacggggacctgcggggaaagcccttcgccatcgaagccgagaacagcatcctggacatcagcggcttcagcaagcagtacaactgtgccttcatctggcagaaggacggcgtgaagaagctgaacctgtacctgatcatcaactacttcaagggcggcaagctgcggttcaagaagatcaaacctgaagccttcgaagccaacagattctacaccgtgatcaacaaaaagagcggcgagatcgtgcccatggaggtgaacttcaacttcgacgaccccaacctgatcatcctgcctctggcctttggcaagagacagggcagagaattcatctggaacgacctgctgtccctggaaaccggcagcctgaagctggccaacggaagagtgatcgagaagacactgtacaacagaagaacccggcaggatgagcctgccctgttcgtggccctgaccttcgagcggcgggaggtcctggactcctccaatatcaaaccaatgaacctgatcggcgtggcaagaggcgaaaacatccccgccgtgatcgccctgaccgaccccgagggctgcccactgagccggtttaaggatagcctgggaaacccaacccacatcctgagaatcggcgagagctataaggagaagcagcggaccatccaggccaagaaggaggtggagcagcggagagccggcggctacagccggaagtacgccagcaaagccaagaatctggcagacgatatggtgagaaacaccgctagagatctgctgtactacgccgtgacccaggatgccatgctgatcttcgccaacctgagccggggcttcggccggcagggcaagcggaccttcatggccgagagacagtacacacggatggaggactggctgaccgccaagctggcctacgagggcctgagcaagacctacctgtccaagacactggcccagtacacctccaagacatgcagcaactgtgggtttaccatcaccagcgccgactacgacagggtgctggagaagctgaagaagacagcaacaggctggatgaccacaattaacggcaaggagctgaaggtggagggccagattacctactacaacagatacaagagacagaacgtagtcaaggacctgtccgtcgagctggatagactgagcgaagaatctgtgaacaacgacatctcctcctggacaaagggcagaagcggagaagctctgagcctcctgaagaaaagattctcccatagacccgtgcaggagaagttcgtgtgcctgaactgcggcttcgagacacacgcagccgagcaagccgccctgaacatcgccagatcctggctgttcctgcggagccaggagtacaagaaataccagacaaacaagacaaccggcaacaccgataagagagccttcgtcgagacctggcagtccttttaccggaagaagcttaaggaggtgtggaaacctgccgtgcggtctggcggatctggcggaggctccaccagccccaagaaaaagagaaaagtctaagctgccttctgcggggcttgccttctggccatgcccttcttctctcccttgcacctgtacctcttggtctttgaataaagcctgagtaggaaggctagcaaaaaaaaaaaaaaaaaaaaaaaaaaaaaaaaaaaaaaaaaaaaaaaaaaaaaaaaaaaaaaaaaaaaaaaaaaaaaaaa

SEQ ID NO: 9188 - RNA, 8787 nt, synthetic construct
  source 1..8787: mol_type = other RNA
aggaaataagagagaaaagaagagtaagaagaaatataagagccaccatggcccctaagaagaagcgtaaagtgagccggatgaaccacgaccaggagttcgacccccctaaggtgtaccctcccgtccccgccgagaagagaaagcccatccgggtcctgagcctgttcgatggcatcgccaccggtctgctggtgctgaaggacctgggcatccaggtggataggtacattgcctccgaggtgtgcgaggactccatcaccgtgggaatggtgcgtcatcagggcaagatcatgtacgtgggcgacgtgcggagcgtgacacagaagcatatccaggagtggggccctttcgacctggtgatcggcggcagcccttgcaatgacctgagcatcgtgaacccagcccggaagggcctgtacgagggaaccggcagactgttcttcgagttttacagactgctgcacgacgcccggcctaaggaaggcgacgaccggcccttcttttggctgttcgagaatgtggtggccatgggagtcagcgacaagcgggatattagccggttcctggagagcaaccccgtgatgatcgatgccaaggaagtgagcgccgcccaccgggccagatacttctggggcaatctgcctggcatgaacagacccctggccagcaccgtgaacgacaagctggagctgcaggagtgcctggagcacggccggatcgccaagttcagcaaggtgagaaccatcaccacccgaagcaacagcatcaaacaaggcaaggaccagcactttcctgtgttcatgaacgagaaggaggacatcctgtggtgtaccgagatggagagagtgttcgggttcccagtccactacacagatgtcagcaacatgtctagactggccagacagagactgctgggaagaagctggtccgtccctgtgatcagacacctgttcgcccctctgaaggagtacttcgcctgcgtgagcagcggcaacagcaacgccaacagccggggccccagcttctctagcggcctggtgccactgtccctgagagggagccacatgggccccatggagatctacaaaaccgtgagcgcctggaagcggcagcctgtgcgcgtgctgagcctgtttcggaatatcgataaagtcctgaaaagcctgggattcctggagagcggctctggctccggcggtggcaccctgaagtacgtggaggatgtgacaaacgtggtcagacgggatgtggagaagtggggccccttcgatctggtgtacggcagcacccaacccctgggcagctcttgtgaccggtgccctggctggtacatgtttcagttccaccggatcctgcagtacgccctgccgagacaggagtcccagcggccattcttttggattttcatggacaacttgctgctgaccgaggatgaccaggaaactaccactcggttcctgcagaccgaagccgtgaccctgcaggacgtgagaggccgggactaccagaacgccatgcgggtgtggtccaacatccctggactgaaaagcaagcacgcacctctgacccctaaagaagaggagtacctgcaggcccaggtgcggagcagaagcaagctggacgcccctaaggtggatctgctggtgaagaattgcctcctgcccctgagagagtacttcaagtatttcagccagaatagtctgcccctgggaggcagcggcggcggcgcccaggaggtggtgagcttcaaggacgtggccgtggacttcaccagggaggagtggaggctgctgagccccccccagaaggagctgtacaaggaggtgatgctggagaacgccaggaacctgctgagcgtgggcctgcccgcccccagcgaggaggtgatcagctacctggagcagagggaggccccctggatcctggagcaggagggcctgaggaactgctgcagcgagggcgagatcaggggcggcccaagcagcggcgcccctcctcccagcggcggcaggcggcccaagcagcggcgcccctcctcccagcggcggcagcccagccggctccccaacctctaccgaggagggcacctctgagtccgccacccccgagagcggccctggcacctccaccgagcccagcgagggcagcgcacccggcagccctgccggcagccccacctccacagaggagggaaccagcaccgagcccagcgaaggcagcgccccaggcaccagcaccgagcctagtgagcaggagattaaacggatcaacaagatcagaagaagacttgtgaaagacagcaacaccaagaaggccggcaagacaggccccatgaaaaccctgctggttagagtgatgacacccgatctgagagagcggctggaaaacctgagaaagaagcctgaaaatatcccccagcccatcagcaatacatctagagccaacctgaataagctgctgaccgattacaccgaaatgaagaaggcgatcctgcatgtgtactgggaagagttccagaaggaccctgtgggcctgatgagccgggtggcccagcctgccagcaagaagatcgatcagaacaagctgaaacctgagatggacgagaagggcaacctgaccaccgccggctttgcctgctctcagtgtggccagcccctgttcgtgtacaagctggagcaggtgtctgagaagggcaaggcttacaccaactacttcggacggtgcaatgtggccgagcacgaaaagctgatcctgctggcccagctgaagcccgagaaggatagcgacgaagccgtgacatatagcctgggaaagtttgggcagagggccctggatttctacagcattcatgtgaccaaggagtccacccaccccgtgaagcccctggcccagatcgccggaaacagatacgcctccggacctgtgggaaaggccctgagcgacgcatgtatgggcacaatcgcctccttcctgtctaagtaccaggacatcatcatcgaacaccagaaggtggtgaagggcaaccagaagagactggagagcctgcgggagctggccggcaaggaaaacctggaataccctagcgtgaccctgccacctcagcctcacaccaaggagggcgttgatgcctacaacgaagtgatcgcccgggtgcgaatgtgggtgaacctgaacctgtggcagaagctgaagctaagcagagatgatgccaagcctctgctgagactgaagggattcccttcctttcctctggtcgagagacaggccaacgaagtggactggtgggacatggtgtgtaacgtgaagaagctgatcaacgagaaaaaggaggatggcaaggtgttttggcagaatctggctggctacaagagacaggaagccctgagaccatacctgagcagcgaggaagatcggaagaagggaaagaaattcgctcggtaccagctgggcgacctgctgctgcacctggaaaagaagcacggcgaggactggggaaaggtgtacgacgaggcctgggagcggattgacaagaaagtggaaggcctgagcaagcacatcaagctggaagaggaacggagaagcgaggacgcccagagcaaggccgccctgaccgactggctgcgggctaaggccagcttcgtgatcgagggcctgaaggaggccgacaaggacgagttctgcagatgcgagctgaagctgcagaagtggtacggggacctgcggggaaagcccttcgccatcgaagccgagaacagcatcctggacatcagcggcttcagcaagcagtacaactgtgccttcatctggcagaaggacggcgtgaagaagctgaacctgtacctgatcatcaactacttcaagggcggcaagctgcggttcaagaagatcaaacctgaagccttcgaagccaacagattctacaccgtgatcaacaaaaagagcggcgagatcgtgcccatggaggtgaacttcaacttcgacgaccccaacctgatcatcctgcctctggcctttggcaagagacagggcagagaattcatctggaacgacctgctgtccctggaaaccggcagcctgaagctggccaacggaagagtgatcgagaagacactgtacaacagaagaacccggcaggatgagcctgccctgttcgtggccctgaccttcgagcggcgggaggtcctggactcctccaatatcaaaccaatgaacctgatcggcgtggcaagaggcgaaaacatccccgccgtgatcgccctgaccgaccccgagggctgcccactgagccggtttaaggatagcctgggaaacccaacccacatcctgagaatcggcgagagctataaggagaagcagcggaccatccaggccaagaaggaggtggagcagcggagagccggcggctacagccggaagtacgccagcaaagccaagaatctggcagacgatatggtgagaaacaccgctagagatctgctgtactacgccgtgacccaggatgccatgctgatcttcgccaacctgagccggggcttcggccggcagggcaagcggaccttcatggccgagagacagtacacacggatggaggactggctgaccgccaagctggcctacgagggcctgagcaagacctacctgtccaagacactggcccagtacacctccaagacatgcagcaactgtgggtttaccatcaccagcgccgactacgacagggtgctggagaagctgaagaagacagcaacaggctggatgaccacaattaacggcaaggagctgaaggtggagggccagattacctactacaacagatacaagagacagaacgtagtcaaggacctgtccgtcgagctggatagactgagcgaagaatctgtgaacaacgacatctcctcctggacaaagggcagaagcggagaagctctgagcctcctgaagaaaagattctcccatagacccgtgcaggagaagttcgtgtgcctgaactgcggcttcgagacacacgcagccgagcaagccgccctgaacatcgccagatcctggctgttcctgcggagccaggagtacaagaaataccagacaaacaagacaaccggcaacaccgataagagagccttcgtcgagacctggcagtccttttaccggaagaagcttaaggaggtgtggaaacctgccgtgcggtctggcggatctggcggaggctccaccagccccaagaaaaagagaaaagtctaagctgccttctgcggggcttgccttctggccatgcccttcttctctcccttgcacctgtacctcttggtctttgaataaagcctgagtaggaaggctagcaaaaaaaaaaaaaaaaaaaaaaaaaaaaaaaaaaaaaaaaaaaaaaaaaaaaaaaaaaaaaaaaaaaaaaaaaaaaaaaagcccagccggctccccaacctctaccgaggagggcacctctgagtccgccacccccgagagcggccctggcacctccaccgagcccagcgagggcagcgcacccggcagccctgccggcagccccacctccacagaggagggaaccagcaccgagcccagcgaaggcagcgccccaggcaccagcaccgagcctagtgagcaggagattaaacggatcaacaagatcagaagaagacttgtgaaagacagcaacaccaagaaggccggcaagacaggccccatgaaaaccctgctggttagagtgatgacacccgatctgagagagcggctggaaaacctgagaaagaagcctgaaaatatcccccagcccatcagcaatacatctagagccaacctgaataagctgctgaccgattacaccgaaatgaagaaggcgatcctgcatgtgtactgggaagagttccagaaggaccctgtgggcctgatgagccgggtggcccagcctgccagcaagaagatcgatcagaacaagctgaaacctgagatggacgagaagggcaacctgaccaccgccggctttgcctgctctcagtgtggccagcccctgttcgtgtacaagctggagcaggtgtctgagaagggcaaggcttacaccaactacttcggacggtgcaatgtggccgagcacgaaaagctgatcctgctggcccagctgaagcccgagaaggatagcgacgaagccgtgacatatagcctgggaaagtttgggcagagggccctggatttctacagcattcatgtgaccaaggagtccacccaccccgtgaagcccctggcccagatcgccggaaacagatacgcctccggacctgtgggaaaggccctgagcgacgcatgtatgggcacaatcgcctccttcctgtctaagtaccaggacatcatcatcgaacaccagaaggtggtgaagggcaaccagaagagactggagagcctgcgggagctggccggcaaggaaaacctggaataccctagcgtgaccctgccacctcagcctcacaccaaggagggcgttgatgcctacaacgaagtgatcgcccgggtgcgaatgtgggtgaacctgaacctgtggcagaagctgaagctaagcagagatgatgccaagcctctgctgagactgaagggattcccttcctttcctctggtcgagagacaggccaacgaagtggactggtgggacatggtgtgtaacgtgaagaagctgatcaacgagaaaaaggaggatggcaaggtgttttggcagaatctggctggctacaagagacaggaagccctgagaccatacctgagcagcgaggaagatcggaagaagggaaagaaattcgctcggtaccagctgggcgacctgctgctgcacctggaaaagaagcacggcgaggactggggaaaggtgtacgacgaggcctgggagcggattgacaagaaagtggaaggcctgagcaagcacatcaagctggaagaggaacggagaagcgaggacgcccagagcaaggccgccctgaccgactggctgcgggctaaggccagcttcgtgatcgagggcctgaaggaggccgacaaggacgagttctgcagatgcgagctgaagctgcagaagtggtacggggacctgcggggaaagcccttcgccatcgaagccgagaacagcatcctggacatcagcggcttcagcaagcagtacaactgtgccttcatctggcagaaggacggcgtgaagaagctgaacctgtacctgatcatcaactacttcaagggcggcaagctgcggttcaagaagatcaaacctgaagccttcgaagccaacagattctacaccgtgatcaacaaaaagagcggcgagatcgtgcccatggaggtgaacttcaacttcgacgaccccaacctgatcatcctgcctctggcctttggcaagagacagggcagagaattcatctggaacgacctgctgtccctggaaaccggcagcctgaagctggccaacggaagagtgatcgagaagacactgtacaacagaagaacccggcaggatgagcctgccctgttcgtggccctgaccttcgagcggcgggaggtcctggactcctccaatatcaaaccaatgaacctgatcggcgtggcaagaggcgaaaacatccccgccgtgatcgccctgaccgaccccgagggctgcccactgagccggtttaaggatagcctgggaaacccaacccacatcctgagaatcggcgagagctataaggagaagcagcggaccatccaggccaagaaggaggtggagcagcggagagccggcggctacagccggaagtacgccagcaaagccaagaatctggcagacgatatggtgagaaacaccgctagagatctgctgtactacgccgtgacccaggatgccatgctgatcttcgccaacctgagccggggcttcggccggcagggcaagcggaccttcatggccgagagacagtacacacggatggaggactggctgaccgccaagctggcctacgagggcctgagcaagacctacctgtccaagacactggcccagtacacctccaagacatgcagcaactgtgggtttaccatcaccagcgccgactacgacagggtgctggagaagctgaagaagacagcaacaggctggatgaccacaattaacggcaaggagctgaaggtggagggccagattacctactacaacagatacaagagacagaacgtagtcaaggacctgtccgtcgagctggatagactgagcgaagaatctgtgaacaacgacatctcctcctggacaaagggcagaagcggagaagctctgagcctcctgaagaaaagattctcccatagacccgtgcaggagaagttcgtgtgcctgaactgcggcttcgagacacacgcagccgagcaagccgccctgaacatcgccagatcctggctgttcctgcggagccaggagtacaagaaataccagacaaacaagacaaccggcaacaccgataagagagccttcgtcgagacctggcagtccttttaccggaagaagcttaaggaggtgtggaaacctgccgtgcggtctggcggatctggcggaggctccaccagccccaagaaaaagagaaaagtctaagctgccttctgcggggcttgccttctggccatgcccttcttctctcccttgcacctgtacctcttggtctttgaataaagcctgagtaggaaggctagcaaaaaaaaaaaaaaaaaaaaaaaaaaaaaaaaaaaaaaaaaaaaaaaaaaaaaaaaaaaaaaaaaaaaaaaaaaaaaaaa

SEQ ID NO: 9189 - RNA, 8787 nt, synthetic construct
  source 1..8787: mol_type = other RNA
aggaaataagagagaaaagaagagtaagaagaaatataagagccaccatggcccctaagaagaagcgtaaagtgagccggatgaaccacgaccaggagttcgacccccctaaggtgtaccctcccgtccccgccgagaagagaaagcccatccgggtcctgagcctgttcgatggcatcgccaccggtctgctggtgctgaaggacctgggcatccaggtggataggtacattgcctccgaggtgtgcgaggactccatcaccgtgggaatggtgcgtcatcagggcaagatcatgtacgtgggcgacgtgcggagcgtgacacagaagcatatccaggagtggggccctttcgacctggtgatcggcggcagcccttgcaatgacctgagcatcgtgaacccagcccggaagggcctgtacgagggaaccggcagactgttcttcgagttttacagactgctgcacgacgcccggcctaaggaaggcgacgaccggcccttcttttggctgttcgagaatgtggtggccatgggagtcagcgacaagcgggatattagccggttcctggagagcaaccccgtgatgatcgatgccaaggaagtgagcgccgcccaccgggccagatacttctggggcaatctgcctggcatgaacagacccctggccagcaccgtgaacgacaagctggagctgcaggagtgcctggagcacggccggatcgccaagttcagcaaggtgagaaccatcaccacccgaagcaacagcatcaaacaaggcaaggaccagcactttcctgtgttcatgaacgagaaggaggacatcctgtggtgtaccgagatggagagagtgttcgggttcccagtccactacacagatgtcagcaacatgtctagactggccagacagagactgctgggaagaagctggtccgtccctgtgatcagacacctgttcgcccctctgaaggagtacttcgcctgcgtgagcagcggcaacagcaacgccaacagccggggccccagcttctctagcggcctggtgccactgtccctgagagggagccacatgggccccatggagatctacaaaaccgtgagcgcctggaagcggcagcctgtgcgcgtgctgagcctgtttcggaatatcgataaagtcctgaaaagcctgggattcctggagagcggctctggctccggcggtggcaccctgaagtacgtggaggatgtgacaaacgtggtcagacgggatgtggagaagtggggccccttcgatctggtgtacggcagcacccaacccctgggcagctcttgtgaccggtgccctggctggtacatgtttcagttccaccggatcctgcagtacgccctgccgagacaggagtcccagcggccattcttttggattttcatggacaacttgctgctgaccgaggatgaccaggaaactaccactcggttcctgcagaccgaagccgtgaccctgcaggacgtgagaggccgggactaccagaacgccatgcgggtgtggtccaacatccctggactgaaaagcaagcacgcacctctgacccctaaagaagaggagtacctgcaggcccaggtgcggagcagaagcaagctggacgcccctaaggtggatctgctggtgaagaattgcctcctgcccctgagagagtacttcaagtatttcagccagaatagtctgcccctgggaggcagcggcggcggcatggccttcgaggacgtggccgtgtacttcagcagggaggagtgggagctgctggacaccgcccagagggccctgtacaggcacgtgatgctggagaacttcgccctggtggccagcctgggcttcagccccagcaggccctgcgtggtgatccagctggagagcggcaaggagccctggctgcacagcggcatggacaccaccatgagcaggcacgcccacaagaggcccagcagcggcagcggcggcccaagcagcggcgcccctcctcccagcggcggcaggcggcccaagcagcggcgcccctcctcccagcggcggcagcccagccggctccccaacctctaccgaggagggcacctctgagtccgccacccccgagagcggccctggcacctccaccgagcccagcgagggcagcgcacccggcagccctgccggcagccccacctccacagaggagggaaccagcaccgagcccagcgaaggcagcgccccaggcaccagcaccgagcctagtgagcaggagattaaacggatcaacaagatcagaagaagacttgtgaaagacagcaacaccaagaaggccggcaagacaggccccatgaaaaccctgctggttagagtgatgacacccgatctgagagagcggctggaaaacctgagaaagaagcctgaaaatatcccccagcccatcagcaatacatctagagccaacctgaataagctgctgaccgattacaccgaaatgaagaaggcgatcctgcatgtgtactgggaagagttccagaaggaccctgtgggcctgatgagccgggtggcccagcctgccagcaagaagatcgatcagaacaagctgaaacctgagatggacgagaagggcaacctgaccaccgccggctttgcctgctctcagtgtggccagcccctgttcgtgtacaagctggagcaggtgtctgagaagggcaaggcttacaccaactacttcggacggtgcaatgtggccgagcacgaaaagctgatcctgctggcccagctgaagcccgagaaggatagcgacgaagccgtgacatatagcctgggaaagtttgggcagagggccctggatttctacagcattcatgtgaccaaggagtccacccaccccgtgaagcccctggcccagatcgccggaaacagatacgcctccggacctgtgggaaaggccctgagcgacgcatgtatgggcacaatcgcctccttcctgtctaagtaccaggacatcatcatcgaacaccagaaggtggtgaagggcaaccagaagagactggagagcctgcgggagctggccggcaaggaaaacctggaataccctagcgtgaccctgccacctcagcctcacaccaaggagggcgttgatgcctacaacgaagtgatcgcccgggtgcgaatgtgggtgaacctgaacctgtggcagaagctgaagctaagcagagatgatgccaagcctctgctgagactgaagggattcccttcctttcctctggtcgagagacaggccaacgaagtggactggtgggacatggtgtgtaacgtgaagaagctgatcaacgagaaaaaggaggatggcaaggtgttttggcagaatctggctggctacaagagacaggaagccctgagaccatacctgagcagcgaggaagatcggaagaagggaaagaaattcgctcggtaccagctgggcgacctgctgctgcacctggaaaagaagcacggcgaggactggggaaaggtgtacgacgaggcctgggagcggattgacaagaaagtggaaggcctgagcaagcacatcaagctggaagaggaacggagaagcgaggacgcccagagcaaggccgccctgaccgactggctgcgggctaaggccagcttcgtgatcgagggcctgaaggaggccgacaaggacgagttctgcagatgcgagctgaagctgcagaagtggtacggggacctgcggggaaagcccttcgccatcgaagccgagaacagcatcctggacatcagcggcttcagcaagcagtacaactgtgccttcatctggcagaaggacggcgtgaagaagctgaacctgtacctgatcatcaactacttcaagggcggcaagctgcggttcaagaagatcaaacctgaagccttcgaagccaacagattctacaccgtgatcaacaaaaagagcggcgagatcgtgcccatggaggtgaacttcaacttcgacgaccccaacctgatcatcctgcctctggcctttggcaagagacagggcagagaattcatctggaacgacctgctgtccctggaaaccggcagcctgaagctggccaacggaagagtgatcgagaagacactgtacaacagaagaacccggcaggatgagcctgccctgttcgtggccctgaccttcgagcggcgggaggtcctggactcctccaatatcaaaccaatgaacctgatcggcgtggcaagaggcgaaaacatccccgccgtgatcgccctgaccgaccccgagggctgcccactgagccggtttaaggatagcctgggaaacccaacccacatcctgagaatcggcgagagctataaggagaagcagcggaccatccaggccaagaaggaggtggagcagcggagagccggcggctacagccggaagtacgccagcaaagccaagaatctggcagacgatatggtgagaaacaccgctagagatctgctgtactacgccgtgacccaggatgccatgctgatcttcgccaacctgagccggggcttcggccggcagggcaagcggaccttcatggccgagagacagtacacacggatggaggactggctgaccgccaagctggcctacgagggcctgagcaagacctacctgtccaagacactggcccagtacacctccaagacatgcagcaactgtgggtttaccatcaccagcgccgactacgacagggtgctggagaagctgaagaagacagcaacaggctggatgaccacaattaacggcaaggagctgaaggtggagggccagattacctactacaacagatacaagagacagaacgtagtcaaggacctgtccgtcgagctggatagactgagcgaagaatctgtgaacaacgacatctcctcctggacaaagggcagaagcggagaagctctgagcctcctgaagaaaagattctcccatagacccgtgcaggagaagttcgtgtgcctgaactgcggcttcgagacacacgcagccgagcaagccgccctgaacatcgccagatcctggctgttcctgcggagccaggagtacaagaaataccagacaaacaagacaaccggcaacaccgataagagagccttcgtcgagacctggcagtccttttaccggaagaagcttaaggaggtgtggaaacctgccgtgcggtctggcggatctggcggaggctccaccagccccaagaaaaagagaaaagtctaagctgccttctgcggggcttgccttctggccatgcccttcttctctcccttgcacctgtacctcttggtctttgaataaagcctgagtaggaaggctagcaaaaaaaaaaaaaaaaaaaaaaaaaaaaaaaaaaaaaaaaaaaaaaaaaaaaaaaaaaaaaaaaaaaaaaaaaaaaaaaagcccagccggctccccaacctctaccgaggagggcacctctgagtccgccacccccgagagcggccctggcacctccaccgagcccagcgagggcagcgcacccggcagccctgccggcagccccacctccacagaggagggaaccagcaccgagcccagcgaaggcagcgccccaggcaccagcaccgagcctagtgagcaggagattaaacggatcaacaagatcagaagaagacttgtgaaagacagcaacaccaagaaggccggcaagacaggccccatgaaaaccctgctggttagagtgatgacacccgatctgagagagcggctggaaaacctgagaaagaagcctgaaaatatcccccagcccatcagcaatacatctagagccaacctgaataagctgctgaccgattacaccgaaatgaagaaggcgatcctgcatgtgtactgggaagagttccagaaggaccctgtgggcctgatgagccgggtggcccagcctgccagcaagaagatcgatcagaacaagctgaaacctgagatggacgagaagggcaacctgaccaccgccggctttgcctgctctcagtgtggccagcccctgttcgtgtacaagctggagcaggtgtctgagaagggcaaggcttacaccaactacttcggacggtgcaatgtggccgagcacgaaaagctgatcctgctggcccagctgaagcccgagaaggatagcgacgaagccgtgacatatagcctgggaaagtttgggcagagggccctggatttctacagcattcatgtgaccaaggagtccacccaccccgtgaagcccctggcccagatcgccggaaacagatacgcctccggacctgtgggaaaggccctgagcgacgcatgtatgggcacaatcgcctccttcctgtctaagtaccaggacatcatcatcgaacaccagaaggtggtgaagggcaaccagaagagactggagagcctgcgggagctggccggcaaggaaaacctggaataccctagcgtgaccctgccacctcagcctcacaccaaggagggcgttgatgcctacaacgaagtgatcgcccgggtgcgaatgtgggtgaacctgaacctgtggcagaagctgaagctaagcagagatgatgccaagcctctgctgagactgaagggattcccttcctttcctctggtcgagagacaggccaacgaagtggactggtgggacatggtgtgtaacgtgaagaagctgatcaacgagaaaaaggaggatggcaaggtgttttggcagaatctggctggctacaagagacaggaagccctgagaccatacctgagcagcgaggaagatcggaagaagggaaagaaattcgctcggtaccagctgggcgacctgctgctgcacctggaaaagaagcacggcgaggactggggaaaggtgtacgacgaggcctgggagcggattgacaagaaagtggaaggcctgagcaagcacatcaagctggaagaggaacggagaagcgaggacgcccagagcaaggccgccctgaccgactggctgcgggctaaggccagcttcgtgatcgagggcctgaaggaggccgacaaggacgagttctgcagatgcgagctgaagctgcagaagtggtacggggacctgcggggaaagcccttcgccatcgaagccgagaacagcatcctggacatcagcggcttcagcaagcagtacaactgtgccttcatctggcagaaggacggcgtgaagaagctgaacctgtacctgatcatcaactacttcaagggcggcaagctgcggttcaagaagatcaaacctgaagccttcgaagccaacagattctacaccgtgatcaacaaaaagagcggcgagatcgtgcccatggaggtgaacttcaacttcgacgaccccaacctgatcatcctgcctctggcctttggcaagagacagggcagagaattcatctggaacgacctgctgtccctggaaaccggcagcctgaagctggccaacggaagagtgatcgagaagacactgtacaacagaagaacccggcaggatgagcctgccctgttcgtggccctgaccttcgagcggcgggaggtcctggactcctccaatatcaaaccaatgaacctgatcggcgtggcaagaggcgaaaacatccccgccgtgatcgccctgaccgaccccgagggctgcccactgagccggtttaaggatagcctgggaaacccaacccacatcctgagaatcggcgagagctataaggagaagcagcggaccatccaggccaagaaggaggtggagcagcggagagccggcggctacagccggaagtacgccagcaaagccaagaatctggcagacgatatggtgagaaacaccgctagagatctgctgtactacgccgtgacccaggatgccatgctgatcttcgccaacctgagccggggcttcggccggcagggcaagcggaccttcatggccgagagacagtacacacggatggaggactggctgaccgccaagctggcctacgagggcctgagcaagacctacctgtccaagacactggcccagtacacctccaagacatgcagcaactgtgggtttaccatcaccagcgccgactacgacagggtgctggagaagctgaagaagacagcaacaggctggatgaccacaattaacggcaaggagctgaaggtggagggccagattacctactacaacagatacaagagacagaacgtagtcaaggacctgtccgtcgagctggatagactgagcgaagaatctgtgaacaacgacatctcctcctggacaaagggcagaagcggagaagctctgagcctcctgaagaaaagattctcccatagacccgtgcaggagaagttcgtgtgcctgaactgcggcttcgagacacacgcagccgagcaagccgccctgaacatcgccagatcctggctgttcctgcggagccaggagtacaagaaataccagacaaacaagacaaccggcaacaccgataagagagccttcgtcgagacctggcagtccttttaccggaagaagcttaaggaggtgtggaaacctgccgtgcggtctggcggatctggcggaggctccaccagccccaagaaaaagagaaaagtctaagctgccttctgcggggcttgccttctggccatgcccttcttctctcccttgcacctgtacctcttggtctttgaataaagcctgagtaggaaggctagcaaaaaaaaaaaaaaaaaaaaaaaaaaaaaaaaaaaaaaaaaaaaaaaaaaaaaaaaaaaaaaaaaaaaaaaaaaaaaaaa

SEQ ID NO: 9190 - RNA, 8787 nt, synthetic construct
  source 1..8787: mol_type = other RNA
aggaaataagagagaaaagaagagtaagaagaaatataagagccaccatggcccctaagaagaagcgtaaagtgagccggatgaaccacgaccaggagttcgacccccctaaggtgtaccctcccgtccccgccgagaagagaaagcccatccgggtcctgagcctgttcgatggcatcgccaccggtctgctggtgctgaaggacctgggcatccaggtggataggtacattgcctccgaggtgtgcgaggactccatcaccgtgggaatggtgcgtcatcagggcaagatcatgtacgtgggcgacgtgcggagcgtgacacagaagcatatccaggagtggggccctttcgacctggtgatcggcggcagcccttgcaatgacctgagcatcgtgaacccagcccggaagggcctgtacgagggaaccggcagactgttcttcgagttttacagactgctgcacgacgcccggcctaaggaaggcgacgaccggcccttcttttggctgttcgagaatgtggtggccatgggagtcagcgacaagcgggatattagccggttcctggagagcaaccccgtgatgatcgatgccaaggaagtgagcgccgcccaccgggccagatacttctggggcaatctgcctggcatgaacagacccctggccagcaccgtgaacgacaagctggagctgcaggagtgcctggagcacggccggatcgccaagttcagcaaggtgagaaccatcaccacccgaagcaacagcatcaaacaaggcaaggaccagcactttcctgtgttcatgaacgagaaggaggacatcctgtggtgtaccgagatggagagagtgttcgggttcccagtccactacacagatgtcagcaacatgtctagactggccagacagagactgctgggaagaagctggtccgtccctgtgatcagacacctgttcgcccctctgaaggagtacttcgcctgcgtgagcagcggcaacagcaacgccaacagccggggccccagcttctctagcggcctggtgccactgtccctgagagggagccacatgggccccatggagatctacaaaaccgtgagcgcctggaagcggcagcctgtgcgcgtgctgagcctgtttcggaatatcgataaagtcctgaaaagcctgggattcctggagagcggctctggctccggcggtggcaccctgaagtacgtggaggatgtgacaaacgtggtcagacgggatgtggagaagtggggccccttcgatctggtgtacggcagcacccaacccctgggcagctcttgtgaccggtgccctggctggtacatgtttcagttccaccggatcctgcagtacgccctgccgagacaggagtcccagcggccattcttttggattttcatggacaacttgctgctgaccgaggatgaccaggaaactaccactcggttcctgcagaccgaagccgtgaccctgcaggacgtgagaggccgggactaccagaacgccatgcgggtgtggtccaacatccctggactgaaaagcaagcacgcacctctgacccctaaagaagaggagtacctgcaggcccaggtgcggagcagaagcaagctggacgcccctaaggtggatctgctggtgaagaattgcctcctgcccctgagagagtacttcaagtatttcagccagaatagtctgcccctgggaggcagcggcggcggcatgatcgagtaccagatccccgtgagcttcaaggacgtggtggtgggcttcacccaggaggagtggcaccagctgagccccgcccagagggccctgtacagggacgtgatgctggagacctacagcaacctggtgagcgtgggctacgagggcaccaagcccgacgtgatcctgaggctggagcaggaggaggccccctggatcggcgaggccgcctgccccggctgccactgctggggcatcggcggcccaagcagcggcgcccctcctcccagcggcggcaggcggcccaagcagcggcgcccctcctcccagcggcggcagcccagccggctccccaacctctaccgaggagggcacctctgagtccgccacccccgagagcggccctggcacctccaccgagcccagcgagggcagcgcacccggcagccctgccggcagccccacctccacagaggagggaaccagcaccgagcccagcgaaggcagcgccccaggcaccagcaccgagcctagtgagcaggagattaaacggatcaacaagatcagaagaagacttgtgaaagacagcaacaccaagaaggccggcaagacaggccccatgaaaaccctgctggttagagtgatgacacccgatctgagagagcggctggaaaacctgagaaagaagcctgaaaatatcccccagcccatcagcaatacatctagagccaacctgaataagctgctgaccgattacaccgaaatgaagaaggcgatcctgcatgtgtactgggaagagttccagaaggaccctgtgggcctgatgagccgggtggcccagcctgccagcaagaagatcgatcagaacaagctgaaacctgagatggacgagaagggcaacctgaccaccgccggctttgcctgctctcagtgtggccagcccctgttcgtgtacaagctggagcaggtgtctgagaagggcaaggcttacaccaactacttcggacggtgcaatgtggccgagcacgaaaagctgatcctgctggcccagctgaagcccgagaaggatagcgacgaagccgtgacatatagcctgggaaagtttgggcagagggccctggatttctacagcattcatgtgaccaaggagtccacccaccccgtgaagcccctggcccagatcgccggaaacagatacgcctccggacctgtgggaaaggccctgagcgacgcatgtatgggcacaatcgcctccttcctgtctaagtaccaggacatcatcatcgaacaccagaaggtggtgaagggcaaccagaagagactggagagcctgcgggagctggccggcaaggaaaacctggaataccctagcgtgaccctgccacctcagcctcacaccaaggagggcgttgatgcctacaacgaagtgatcgcccgggtgcgaatgtgggtgaacctgaacctgtggcagaagctgaagctaagcagagatgatgccaagcctctgctgagactgaagggattcccttcctttcctctggtcgagagacaggccaacgaagtggactggtgggacatggtgtgtaacgtgaagaagctgatcaacgagaaaaaggaggatggcaaggtgttttggcagaatctggctggctacaagagacaggaagccctgagaccatacctgagcagcgaggaagatcggaagaagggaaagaaattcgctcggtaccagctgggcgacctgctgctgcacctggaaaagaagcacggcgaggactggggaaaggtgtacgacgaggcctgggagcggattgacaagaaagtggaaggcctgagcaagcacatcaagctggaagaggaacggagaagcgaggacgcccagagcaaggccgccctgaccgactggctgcgggctaaggccagcttcgtgatcgagggcctgaaggaggccgacaaggacgagttctgcagatgcgagctgaagctgcagaagtggtacggggacctgcggggaaagcccttcgccatcgaagccgagaacagcatcctggacatcagcggcttcagcaagcagtacaactgtgccttcatctggcagaaggacggcgtgaagaagctgaacctgtacctgatcatcaactacttcaagggcggcaagctgcggttcaagaagatcaaacctgaagccttcgaagccaacagattctacaccgtgatcaacaaaaagagcggcgagatcgtgcccatggaggtgaacttcaacttcgacgaccccaacctgatcatcctgcctctggcctttggcaagagacagggcagagaattcatctggaacgacctgctgtccctggaaaccggcagcctgaagctggccaacggaagagtgatcgagaagacactgtacaacagaagaacccggcaggatgagcctgccctgttcgtggccctgaccttcgagcggcgggaggtcctggactcctccaatatcaaaccaatgaacctgatcggcgtggcaagaggcgaaaacatccccgccgtgatcgccctgaccgaccccgagggctgcccactgagccggtttaaggatagcctgggaaacccaacccacatcctgagaatcggcgagagctataaggagaagcagcggaccatccaggccaagaaggaggtggagcagcggagagccggcggctacagccggaagtacgccagcaaagccaagaatctggcagacgatatggtgagaaacaccgctagagatctgctgtactacgccgtgacccaggatgccatgctgatcttcgccaacctgagccggggcttcggccggcagggcaagcggaccttcatggccgagagacagtacacacggatggaggactggctgaccgccaagctggcctacgagggcctgagcaagacctacctgtccaagacactggcccagtacacctccaagacatgcagcaactgtgggtttaccatcaccagcgccgactacgacagggtgctggagaagctgaagaagacagcaacaggctggatgaccacaattaacggcaaggagctgaaggtggagggccagattacctactacaacagatacaagagacagaacgtagtcaaggacctgtccgtcgagctggatagactgagcgaagaatctgtgaacaacgacatctcctcctggacaaagggcagaagcggagaagctctgagcctcctgaagaaaagattctcccatagacccgtgcaggagaagttcgtgtgcctgaactgcggcttcgagacacacgcagccgagcaagccgccctgaacatcgccagatcctggctgttcctgcggagccaggagtacaagaaataccagacaaacaagacaaccggcaacaccgataagagagccttcgtcgagacctggcagtccttttaccggaagaagcttaaggaggtgtggaaacctgccgtgcggtctggcggatctggcggaggctccaccagccccaagaaaaagagaaaagtctaagctgccttctgcggggcttgccttctggccatgcccttcttctctcccttgcacctgtacctcttggtctttgaataaagcctgagtaggaaggctagcaaaaaaaaaaaaaaaaaaaaaaaaaaaaaaaaaaaaaaaaaaaaaaaaaaaaaaaaaaaaaaaaaaaaaaaaaaaaaaaagcccagccggctccccaacctctaccgaggagggcacctctgagtccgccacccccgagagcggccctggcacctccaccgagcccagcgagggcagcgcacccggcagccctgccggcagccccacctccacagaggagggaaccagcaccgagcccagcgaaggcagcgccccaggcaccagcaccgagcctagtgagcaggagattaaacggatcaacaagatcagaagaagacttgtgaaagacagcaacaccaagaaggccggcaagacaggccccatgaaaaccctgctggttagagtgatgacacccgatctgagagagcggctggaaaacctgagaaagaagcctgaaaatatcccccagcccatcagcaatacatctagagccaacctgaataagctgctgaccgattacaccgaaatgaagaaggcgatcctgcatgtgtactgggaagagttccagaaggaccctgtgggcctgatgagccgggtggcccagcctgccagcaagaagatcgatcagaacaagctgaaacctgagatggacgagaagggcaacctgaccaccgccggctttgcctgctctcagtgtggccagcccctgttcgtgtacaagctggagcaggtgtctgagaagggcaaggcttacaccaactacttcggacggtgcaatgtggccgagcacgaaaagctgatcctgctggcccagctgaagcccgagaaggatagcgacgaagccgtgacatatagcctgggaaagtttgggcagagggccctggatttctacagcattcatgtgaccaaggagtccacccaccccgtgaagcccctggcccagatcgccggaaacagatacgcctccggacctgtgggaaaggccctgagcgacgcatgtatgggcacaatcgcctccttcctgtctaagtaccaggacatcatcatcgaacaccagaaggtggtgaagggcaaccagaagagactggagagcctgcgggagctggccggcaaggaaaacctggaataccctagcgtgaccctgccacctcagcctcacaccaaggagggcgttgatgcctacaacgaagtgatcgcccgggtgcgaatgtgggtgaacctgaacctgtggcagaagctgaagctaagcagagatgatgccaagcctctgctgagactgaagggattcccttcctttcctctggtcgagagacaggccaacgaagtggactggtgggacatggtgtgtaacgtgaagaagctgatcaacgagaaaaaggaggatggcaaggtgttttggcagaatctggctggctacaagagacaggaagccctgagaccatacctgagcagcgaggaagatcggaagaagggaaagaaattcgctcggtaccagctgggcgacctgctgctgcacctggaaaagaagcacggcgaggactggggaaaggtgtacgacgaggcctgggagcggattgacaagaaagtggaaggcctgagcaagcacatcaagctggaagaggaacggagaagcgaggacgcccagagcaaggccgccctgaccgactggctgcgggctaaggccagcttcgtgatcgagggcctgaaggaggccgacaaggacgagttctgcagatgcgagctgaagctgcagaagtggtacggggacctgcggggaaagcccttcgccatcgaagccgagaacagcatcctggacatcagcggcttcagcaagcagtacaactgtgccttcatctggcagaaggacggcgtgaagaagctgaacctgtacctgatcatcaactacttcaagggcggcaagctgcggttcaagaagatcaaacctgaagccttcgaagccaacagattctacaccgtgatcaacaaaaagagcggcgagatcgtgcccatggaggtgaacttcaacttcgacgaccccaacctgatcatcctgcctctggcctttggcaagagacagggcagagaattcatctggaacgacctgctgtccctggaaaccggcagcctgaagctggccaacggaagagtgatcgagaagacactgtacaacagaagaacccggcaggatgagcctgccctgttcgtggccctgaccttcgagcggcgggaggtcctggactcctccaatatcaaaccaatgaacctgatcggcgtggcaagaggcgaaaacatccccgccgtgatcgccctgaccgaccccgagggctgcccactgagccggtttaaggatagcctgggaaacccaacccacatcctgagaatcggcgagagctataaggagaagcagcggaccatccaggccaagaaggaggtggagcagcggagagccggcggctacagccggaagtacgccagcaaagccaagaatctggcagacgatatggtgagaaacaccgctagagatctgctgtactacgccgtgacccaggatgccatgctgatcttcgccaacctgagccggggcttcggccggcagggcaagcggaccttcatggccgagagacagtacacacggatggaggactggctgaccgccaagctggcctacgagggcctgagcaagacctacctgtccaagacactggcccagtacacctccaagacatgcagcaactgtgggtttaccatcaccagcgccgactacgacagggtgctggagaagctgaagaagacagcaacaggctggatgaccacaattaacggcaaggagctgaaggtggagggccagattacctactacaacagatacaagagacagaacgtagtcaaggacctgtccgtcgagctggatagactgagcgaagaatctgtgaacaacgacatctcctcctggacaaagggcagaagcggagaagctctgagcctcctgaagaaaagattctcccatagacccgtgcaggagaagttcgtgtgcctgaactgcggcttcgagacacacgcagccgagcaagccgccctgaacatcgccagatcctggctgttcctgcggagccaggagtacaagaaataccagacaaacaagacaaccggcaacaccgataagagagccttcgtcgagacctggcagtccttttaccggaagaagcttaaggaggtgtggaaacctgccgtgcggtctggcggatctggcggaggctccaccagccccaagaaaaagagaaaagtctaagctgccttctgcggggcttgccttctggccatgcccttcttctctcccttgcacctgtacctcttggtctttgaataaagcctgagtaggaaggctagcaaaaaaaaaaaaaaaaaaaaaaaaaaaaaaaaaaaaaaaaaaaaaaaaaaaaaaaaaaaaaaaaaaaaaaaaaaaaaaaa

SEQ ID NO: 9191 - RNA, 8787 nt, synthetic construct
  source 1..8787: mol_type = other RNA
aggaaataagagagaaaagaagagtaagaagaaatataagagccaccatggcccctaagaagaagcgtaaagtgagccggatgaaccacgaccaggagttcgacccccctaaggtgtaccctcccgtccccgccgagaagagaaagcccatccgggtcctgagcctgttcgatggcatcgccaccggtctgctggtgctgaaggacctgggcatccaggtggataggtacattgcctccgaggtgtgcgaggactccatcaccgtgggaatggtgcgtcatcagggcaagatcatgtacgtgggcgacgtgcggagcgtgacacagaagcatatccaggagtggggccctttcgacctggtgatcggcggcagcccttgcaatgacctgagcatcgtgaacccagcccggaagggcctgtacgagggaaccggcagactgttcttcgagttttacagactgctgcacgacgcccggcctaaggaaggcgacgaccggcccttcttttggctgttcgagaatgtggtggccatgggagtcagcgacaagcgggatattagccggttcctggagagcaaccccgtgatgatcgatgccaaggaagtgagcgccgcccaccgggccagatacttctggggcaatctgcctggcatgaacagacccctggccagcaccgtgaacgacaagctggagctgcaggagtgcctggagcacggccggatcgccaagttcagcaaggtgagaaccatcaccacccgaagcaacagcatcaaacaaggcaaggaccagcactttcctgtgttcatgaacgagaaggaggacatcctgtggtgtaccgagatggagagagtgttcgggttcccagtccactacacagatgtcagcaacatgtctagactggccagacagagactgctgggaagaagctggtccgtccctgtgatcagacacctgttcgcccctctgaaggagtacttcgcctgcgtgagcagcggcaacagcaacgccaacagccggggccccagcttctctagcggcctggtgccactgtccctgagagggagccacatgggccccatggagatctacaaaaccgtgagcgcctggaagcggcagcctgtgcgcgtgctgagcctgtttcggaatatcgataaagtcctgaaaagcctgggattcctggagagcggctctggctccggcggtggcaccctgaagtacgtggaggatgtgacaaacgtggtcagacgggatgtggagaagtggggccccttcgatctggtgtacggcagcacccaacccctgggcagctcttgtgaccggtgccctggctggtacatgtttcagttccaccggatcctgcagtacgccctgccgagacaggagtcccagcggccattcttttggattttcatggacaacttgctgctgaccgaggatgaccaggaaactaccactcggttcctgcagaccgaagccgtgaccctgcaggacgtgagaggccgggactaccagaacgccatgcgggtgtggtccaacatccctggactgaaaagcaagcacgcacctctgacccctaaagaagaggagtacctgcaggcccaggtgcggagcagaagcaagctggacgcccctaaggtggatctgctggtgaagaattgcctcctgcccctgagagagtacttcaagtatttcagccagaatagtctgcccctgggaggcagcggcggcggcgcccaggtgcccgtgaccttcgaggacgtggccgtgtacttcagcagggaggagtgggccgccctggacggcaggcagaaggagctgtacagggacgtgatgaggggcaactacgagctggtggccagcctgggctgccccgccgccaagcccgacctgatctgccagatcgagagggacgaggagctgggcgtgggcgagccccagggcaggcccgtgaggaggcagccccagaggaggagcggcggcccaagcagcggcgcccctcctcccagcggcggcaggcggcccaagcagcggcgcccctcctcccagcggcggcagcccagccggctccccaacctctaccgaggagggcacctctgagtccgccacccccgagagcggccctggcacctccaccgagcccagcgagggcagcgcacccggcagccctgccggcagccccacctccacagaggagggaaccagcaccgagcccagcgaaggcagcgccccaggcaccagcaccgagcctagtgagcaggagattaaacggatcaacaagatcagaagaagacttgtgaaagacagcaacaccaagaaggccggcaagacaggccccatgaaaaccctgctggttagagtgatgacacccgatctgagagagcggctggaaaacctgagaaagaagcctgaaaatatcccccagcccatcagcaatacatctagagccaacctgaataagctgctgaccgattacaccgaaatgaagaaggcgatcctgcatgtgtactgggaagagttccagaaggaccctgtgggcctgatgagccgggtggcccagcctgccagcaagaagatcgatcagaacaagctgaaacctgagatggacgagaagggcaacctgaccaccgccggctttgcctgctctcagtgtggccagcccctgttcgtgtacaagctggagcaggtgtctgagaagggcaaggcttacaccaactacttcggacggtgcaatgtggccgagcacgaaaagctgatcctgctggcccagctgaagcccgagaaggatagcgacgaagccgtgacatatagcctgggaaagtttgggcagagggccctggatttctacagcattcatgtgaccaaggagtccacccaccccgtgaagcccctggcccagatcgccggaaacagatacgcctccggacctgtgggaaaggccctgagcgacgcatgtatgggcacaatcgcctccttcctgtctaagtaccaggacatcatcatcgaacaccagaaggtggtgaagggcaaccagaagagactggagagcctgcgggagctggccggcaaggaaaacctggaataccctagcgtgaccctgccacctcagcctcacaccaaggagggcgttgatgcctacaacgaagtgatcgcccgggtgcgaatgtgggtgaacctgaacctgtggcagaagctgaagctaagcagagatgatgccaagcctctgctgagactgaagggattcccttcctttcctctggtcgagagacaggccaacgaagtggactggtgggacatggtgtgtaacgtgaagaagctgatcaacgagaaaaaggaggatggcaaggtgttttggcagaatctggctggctacaagagacaggaagccctgagaccatacctgagcagcgaggaagatcggaagaagggaaagaaattcgctcggtaccagctgggcgacctgctgctgcacctggaaaagaagcacggcgaggactggggaaaggtgtacgacgaggcctgggagcggattgacaagaaagtggaaggcctgagcaagcacatcaagctggaagaggaacggagaagcgaggacgcccagagcaaggccgccctgaccgactggctgcgggctaaggccagcttcgtgatcgagggcctgaaggaggccgacaaggacgagttctgcagatgcgagctgaagctgcagaagtggtacggggacctgcggggaaagcccttcgccatcgaagccgagaacagcatcctggacatcagcggcttcagcaagcagtacaactgtgccttcatctggcagaaggacggcgtgaagaagctgaacctgtacctgatcatcaactacttcaagggcggcaagctgcggttcaagaagatcaaacctgaagccttcgaagccaacagattctacaccgtgatcaacaaaaagagcggcgagatcgtgcccatggaggtgaacttcaacttcgacgaccccaacctgatcatcctgcctctggcctttggcaagagacagggcagagaattcatctggaacgacctgctgtccctggaaaccggcagcctgaagctggccaacggaagagtgatcgagaagacactgtacaacagaagaacccggcaggatgagcctgccctgttcgtggccctgaccttcgagcggcgggaggtcctggactcctccaatatcaaaccaatgaacctgatcggcgtggcaagaggcgaaaacatccccgccgtgatcgccctgaccgaccccgagggctgcccactgagccggtttaaggatagcctgggaaacccaacccacatcctgagaatcggcgagagctataaggagaagcagcggaccatccaggccaagaaggaggtggagcagcggagagccggcggctacagccggaagtacgccagcaaagccaagaatctggcagacgatatggtgagaaacaccgctagagatctgctgtactacgccgtgacccaggatgccatgctgatcttcgccaacctgagccggggcttcggccggcagggcaagcggaccttcatggccgagagacagtacacacggatggaggactggctgaccgccaagctggcctacgagggcctgagcaagacctacctgtccaagacactggcccagtacacctccaagacatgcagcaactgtgggtttaccatcaccagcgccgactacgacagggtgctggagaagctgaagaagacagcaacaggctggatgaccacaattaacggcaaggagctgaaggtggagggccagattacctactacaacagatacaagagacagaacgtagtcaaggacctgtccgtcgagctggatagactgagcgaagaatctgtgaacaacgacatctcctcctggacaaagggcagaagcggagaagctctgagcctcctgaagaaaagattctcccatagacccgtgcaggagaagttcgtgtgcctgaactgcggcttcgagacacacgcagccgagcaagccgccctgaacatcgccagatcctggctgttcctgcggagccaggagtacaagaaataccagacaaacaagacaaccggcaacaccgataagagagccttcgtcgagacctggcagtccttttaccggaagaagcttaaggaggtgtggaaacctgccgtgcggtctggcggatctggcggaggctccaccagccccaagaaaaagagaaaagtctaagctgccttctgcggggcttgccttctggccatgcccttcttctctcccttgcacctgtacctcttggtctttgaataaagcctgagtaggaaggctagcaaaaaaaaaaaaaaaaaaaaaaaaaaaaaaaaaaaaaaaaaaaaaaaaaaaaaaaaaaaaaaaaaaaaaaaaaaaaaaaagcccagccggctccccaacctctaccgaggagggcacctctgagtccgccacccccgagagcggccctggcacctccaccgagcccagcgagggcagcgcacccggcagccctgccggcagccccacctccacagaggagggaaccagcaccgagcccagcgaaggcagcgccccaggcaccagcaccgagcctagtgagcaggagattaaacggatcaacaagatcagaagaagacttgtgaaagacagcaacaccaagaaggccggcaagacaggccccatgaaaaccctgctggttagagtgatgacacccgatctgagagagcggctggaaaacctgagaaagaagcctgaaaatatcccccagcccatcagcaatacatctagagccaacctgaataagctgctgaccgattacaccgaaatgaagaaggcgatcctgcatgtgtactgggaagagttccagaaggaccctgtgggcctgatgagccgggtggcccagcctgccagcaagaagatcgatcagaacaagctgaaacctgagatggacgagaagggcaacctgaccaccgccggctttgcctgctctcagtgtggccagcccctgttcgtgtacaagctggagcaggtgtctgagaagggcaaggcttacaccaactacttcggacggtgcaatgtggccgagcacgaaaagctgatcctgctggcccagctgaagcccgagaaggatagcgacgaagccgtgacatatagcctgggaaagtttgggcagagggccctggatttctacagcattcatgtgaccaaggagtccacccaccccgtgaagcccctggcccagatcgccggaaacagatacgcctccggacctgtgggaaaggccctgagcgacgcatgtatgggcacaatcgcctccttcctgtctaagtaccaggacatcatcatcgaacaccagaaggtggtgaagggcaaccagaagagactggagagcctgcgggagctggccggcaaggaaaacctggaataccctagcgtgaccctgccacctcagcctcacaccaaggagggcgttgatgcctacaacgaagtgatcgcccgggtgcgaatgtgggtgaacctgaacctgtggcagaagctgaagctaagcagagatgatgccaagcctctgctgagactgaagggattcccttcctttcctctggtcgagagacaggccaacgaagtggactggtgggacatggtgtgtaacgtgaagaagctgatcaacgagaaaaaggaggatggcaaggtgttttggcagaatctggctggctacaagagacaggaagccctgagaccatacctgagcagcgaggaagatcggaagaagggaaagaaattcgctcggtaccagctgggcgacctgctgctgcacctggaaaagaagcacggcgaggactggggaaaggtgtacgacgaggcctgggagcggattgacaagaaagtggaaggcctgagcaagcacatcaagctggaagaggaacggagaagcgaggacgcccagagcaaggccgccctgaccgactggctgcgggctaaggccagcttcgtgatcgagggcctgaaggaggccgacaaggacgagttctgcagatgcgagctgaagctgcagaagtggtacggggacctgcggggaaagcccttcgccatcgaagccgagaacagcatcctggacatcagcggcttcagcaagcagtacaactgtgccttcatctggcagaaggacggcgtgaagaagctgaacctgtacctgatcatcaactacttcaagggcggcaagctgcggttcaagaagatcaaacctgaagccttcgaagccaacagattctacaccgtgatcaacaaaaagagcggcgagatcgtgcccatggaggtgaacttcaacttcgacgaccccaacctgatcatcctgcctctggcctttggcaagagacagggcagagaattcatctggaacgacctgctgtccctggaaaccggcagcctgaagctggccaacggaagagtgatcgagaagacactgtacaacagaagaacccggcaggatgagcctgccctgttcgtggccctgaccttcgagcggcgggaggtcctggactcctccaatatcaaaccaatgaacctgatcggcgtggcaagaggcgaaaacatccccgccgtgatcgccctgaccgaccccgagggctgcccactgagccggtttaaggatagcctgggaaacccaacccacatcctgagaatcggcgagagctataaggagaagcagcggaccatccaggccaagaaggaggtggagcagcggagagccggcggctacagccggaagtacgccagcaaagccaagaatctggcagacgatatggtgagaaacaccgctagagatctgctgtactacgccgtgacccaggatgccatgctgatcttcgccaacctgagccggggcttcggccggcagggcaagcggaccttcatggccgagagacagtacacacggatggaggactggctgaccgccaagctggcctacgagggcctgagcaagacctacctgtccaagacactggcccagtacacctccaagacatgcagcaactgtgggtttaccatcaccagcgccgactacgacagggtgctggagaagctgaagaagacagcaacaggctggatgaccacaattaacggcaaggagctgaaggtggagggccagattacctactacaacagatacaagagacagaacgtagtcaaggacctgtccgtcgagctggatagactgagcgaagaatctgtgaacaacgacatctcctcctggacaaagggcagaagcggagaagctctgagcctcctgaagaaaagattctcccatagacccgtgcaggagaagttcgtgtgcctgaactgcggcttcgagacacacgcagccgagcaagccgccctgaacatcgccagatcctggctgttcctgcggagccaggagtacaagaaataccagacaaacaagacaaccggcaacaccgataagagagccttcgtcgagacctggcagtccttttaccggaagaagcttaaggaggtgtggaaacctgccgtgcggtctggcggatctggcggaggctccaccagccccaagaaaaagagaaaagtctaagctgccttctgcggggcttgccttctggccatgcccttcttctctcccttgcacctgtacctcttggtctttgaataaagcctgagtaggaaggctagcaaaaaaaaaaaaaaaaaaaaaaaaaaaaaaaaaaaaaaaaaaaaaaaaaaaaaaaaaaaaaaaaaaaaaaaaaaaaaaaa

SEQ ID NO: 9192 - RNA, 8787 nt, synthetic construct
  source 1..8787: mol_type = other RNA
aggaaataagagagaaaagaagagtaagaagaaatataagagccaccatggcccctaagaagaagcgtaaagtgagccggatgaaccacgaccaggagttcgacccccctaaggtgtaccctcccgtccccgccgagaagagaaagcccatccgggtcctgagcctgttcgatggcatcgccaccggtctgctggtgctgaaggacctgggcatccaggtggataggtacattgcctccgaggtgtgcgaggactccatcaccgtgggaatggtgcgtcatcagggcaagatcatgtacgtgggcgacgtgcggagcgtgacacagaagcatatccaggagtggggccctttcgacctggtgatcggcggcagcccttgcaatgacctgagcatcgtgaacccagcccggaagggcctgtacgagggaaccggcagactgttcttcgagttttacagactgctgcacgacgcccggcctaaggaaggcgacgaccggcccttcttttggctgttcgagaatgtggtggccatgggagtcagcgacaagcgggatattagccggttcctggagagcaaccccgtgatgatcgatgccaaggaagtgagcgccgcccaccgggccagatacttctggggcaatctgcctggcatgaacagacccctggccagcaccgtgaacgacaagctggagctgcaggagtgcctggagcacggccggatcgccaagttcagcaaggtgagaaccatcaccacccgaagcaacagcatcaaacaaggcaaggaccagcactttcctgtgttcatgaacgagaaggaggacatcctgtggtgtaccgagatggagagagtgttcgggttcccagtccactacacagatgtcagcaacatgtctagactggccagacagagactgctgggaagaagctggtccgtccctgtgatcagacacctgttcgcccctctgaaggagtacttcgcctgcgtgagcagcggcaacagcaacgccaacagccggggccccagcttctctagcggcctggtgccactgtccctgagagggagccacatgggccccatggagatctacaaaaccgtgagcgcctggaagcggcagcctgtgcgcgtgctgagcctgtttcggaatatcgataaagtcctgaaaagcctgggattcctggagagcggctctggctccggcggtggcaccctgaagtacgtggaggatgtgacaaacgtggtcagacgggatgtggagaagtggggccccttcgatctggtgtacggcagcacccaacccctgggcagctcttgtgaccggtgccctggctggtacatgtttcagttccaccggatcctgcagtacgccctgccgagacaggagtcccagcggccattcttttggattttcatggacaacttgctgctgaccgaggatgaccaggaaactaccactcggttcctgcagaccgaagccgtgaccctgcaggacgtgagaggccgggactaccagaacgccatgcgggtgtggtccaacatccctggactgaaaagcaagcacgcacctctgacccctaaagaagaggagtacctgcaggcccaggtgcggagcagaagcaagctggacgcccctaaggtggatctgctggtgaagaattgcctcctgcccctgagagagtacttcaagtatttcagccagaatagtctgcccctgggaggcagcggcggcggcgcccagggcagcgtgatgttcaacgacgtgagcatcgtgttcagccaggaggagtgggagtacctggacctggagcagaaggacctgtacagggacgtgatgctggagaactacagcaacctggtgagcctgggctgcttcatcagcaagcccgacgtgatcagcctgctggagcagggcaaggagccctggaaggtggtgaggaagggcaggaggaggtacctggacctggagaacaggtacggcggcccaagcagcggcgcccctcctcccagcggcggcaggcggcccaagcagcggcgcccctcctcccagcggcggcagcccagccggctccccaacctctaccgaggagggcacctctgagtccgccacccccgagagcggccctggcacctccaccgagcccagcgagggcagcgcacccggcagccctgccggcagccccacctccacagaggagggaaccagcaccgagcccagcgaaggcagcgccccaggcaccagcaccgagcctagtgagcaggagattaaacggatcaacaagatcagaagaagacttgtgaaagacagcaacaccaagaaggccggcaagacaggccccatgaaaaccctgctggttagagtgatgacacccgatctgagagagcggctggaaaacctgagaaagaagcctgaaaatatcccccagcccatcagcaatacatctagagccaacctgaataagctgctgaccgattacaccgaaatgaagaaggcgatcctgcatgtgtactgggaagagttccagaaggaccctgtgggcctgatgagccgggtggcccagcctgccagcaagaagatcgatcagaacaagctgaaacctgagatggacgagaagggcaacctgaccaccgccggctttgcctgctctcagtgtggccagcccctgttcgtgtacaagctggagcaggtgtctgagaagggcaaggcttacaccaactacttcggacggtgcaatgtggccgagcacgaaaagctgatcctgctggcccagctgaagcccgagaaggatagcgacgaagccgtgacatatagcctgggaaagtttgggcagagggccctggatttctacagcattcatgtgaccaaggagtccacccaccccgtgaagcccctggcccagatcgccggaaacagatacgcctccggacctgtgggaaaggccctgagcgacgcatgtatgggcacaatcgcctccttcctgtctaagtaccaggacatcatcatcgaacaccagaaggtggtgaagggcaaccagaagagactggagagcctgcgggagctggccggcaaggaaaacctggaataccctagcgtgaccctgccacctcagcctcacaccaaggagggcgttgatgcctacaacgaagtgatcgcccgggtgcgaatgtgggtgaacctgaacctgtggcagaagctgaagctaagcagagatgatgccaagcctctgctgagactgaagggattcccttcctttcctctggtcgagagacaggccaacgaagtggactggtgggacatggtgtgtaacgtgaagaagctgatcaacgagaaaaaggaggatggcaaggtgttttggcagaatctggctggctacaagagacaggaagccctgagaccatacctgagcagcgaggaagatcggaagaagggaaagaaattcgctcggtaccagctgggcgacctgctgctgcacctggaaaagaagcacggcgaggactggggaaaggtgtacgacgaggcctgggagcggattgacaagaaagtggaaggcctgagcaagcacatcaagctggaagaggaacggagaagcgaggacgcccagagcaaggccgccctgaccgactggctgcgggctaaggccagcttcgtgatcgagggcctgaaggaggccgacaaggacgagttctgcagatgcgagctgaagctgcagaagtggtacggggacctgcggggaaagcccttcgccatcgaagccgagaacagcatcctggacatcagcggcttcagcaagcagtacaactgtgccttcatctggcagaaggacggcgtgaagaagctgaacctgtacctgatcatcaactacttcaagggcggcaagctgcggttcaagaagatcaaacctgaagccttcgaagccaacagattctacaccgtgatcaacaaaaagagcggcgagatcgtgcccatggaggtgaacttcaacttcgacgaccccaacctgatcatcctgcctctggcctttggcaagagacagggcagagaattcatctggaacgacctgctgtccctggaaaccggcagcctgaagctggccaacggaagagtgatcgagaagacactgtacaacagaagaacccggcaggatgagcctgccctgttcgtggccctgaccttcgagcggcgggaggtcctggactcctccaatatcaaaccaatgaacctgatcggcgtggcaagaggcgaaaacatccccgccgtgatcgccctgaccgaccccgagggctgcccactgagccggtttaaggatagcctgggaaacccaacccacatcctgagaatcggcgagagctataaggagaagcagcggaccatccaggccaagaaggaggtggagcagcggagagccggcggctacagccggaagtacgccagcaaagccaagaatctggcagacgatatggtgagaaacaccgctagagatctgctgtactacgccgtgacccaggatgccatgctgatcttcgccaacctgagccggggcttcggccggcagggcaagcggaccttcatggccgagagacagtacacacggatggaggactggctgaccgccaagctggcctacgagggcctgagcaagacctacctgtccaagacactggcccagtacacctccaagacatgcagcaactgtgggtttaccatcaccagcgccgactacgacagggtgctggagaagctgaagaagacagcaacaggctggatgaccacaattaacggcaaggagctgaaggtggagggccagattacctactacaacagatacaagagacagaacgtagtcaaggacctgtccgtcgagctggatagactgagcgaagaatctgtgaacaacgacatctcctcctggacaaagggcagaagcggagaagctctgagcctcctgaagaaaagattctcccatagacccgtgcaggagaagttcgtgtgcctgaactgcggcttcgagacacacgcagccgagcaagccgccctgaacatcgccagatcctggctgttcctgcggagccaggagtacaagaaataccagacaaacaagacaaccggcaacaccgataagagagccttcgtcgagacctggcagtccttttaccggaagaagcttaaggaggtgtggaaacctgccgtgcggtctggcggatctggcggaggctccaccagccccaagaaaaagagaaaagtctaagctgccttctgcggggcttgccttctggccatgcccttcttctctcccttgcacctgtacctcttggtctttgaataaagcctgagtaggaaggctagcaaaaaaaaaaaaaaaaaaaaaaaaaaaaaaaaaaaaaaaaaaaaaaaaaaaaaaaaaaaaaaaaaaaaaaaaaaaaaaaagcccagccggctccccaacctctaccgaggagggcacctctgagtccgccacccccgagagcggccctggcacctccaccgagcccagcgagggcagcgcacccggcagccctgccggcagccccacctccacagaggagggaaccagcaccgagcccagcgaaggcagcgccccaggcaccagcaccgagcctagtgagcaggagattaaacggatcaacaagatcagaagaagacttgtgaaagacagcaacaccaagaaggccggcaagacaggccccatgaaaaccctgctggttagagtgatgacacccgatctgagagagcggctggaaaacctgagaaagaagcctgaaaatatcccccagcccatcagcaatacatctagagccaacctgaataagctgctgaccgattacaccgaaatgaagaaggcgatcctgcatgtgtactgggaagagttccagaaggaccctgtgggcctgatgagccgggtggcccagcctgccagcaagaagatcgatcagaacaagctgaaacctgagatggacgagaagggcaacctgaccaccgccggctttgcctgctctcagtgtggccagcccctgttcgtgtacaagctggagcaggtgtctgagaagggcaaggcttacaccaactacttcggacggtgcaatgtggccgagcacgaaaagctgatcctgctggcccagctgaagcccgagaaggatagcgacgaagccgtgacatatagcctgggaaagtttgggcagagggccctggatttctacagcattcatgtgaccaaggagtccacccaccccgtgaagcccctggcccagatcgccggaaacagatacgcctccggacctgtgggaaaggccctgagcgacgcatgtatgggcacaatcgcctccttcctgtctaagtaccaggacatcatcatcgaacaccagaaggtggtgaagggcaaccagaagagactggagagcctgcgggagctggccggcaaggaaaacctggaataccctagcgtgaccctgccacctcagcctcacaccaaggagggcgttgatgcctacaacgaagtgatcgcccgggtgcgaatgtgggtgaacctgaacctgtggcagaagctgaagctaagcagagatgatgccaagcctctgctgagactgaagggattcccttcctttcctctggtcgagagacaggccaacgaagtggactggtgggacatggtgtgtaacgtgaagaagctgatcaacgagaaaaaggaggatggcaaggtgttttggcagaatctggctggctacaagagacaggaagccctgagaccatacctgagcagcgaggaagatcggaagaagggaaagaaattcgctcggtaccagctgggcgacctgctgctgcacctggaaaagaagcacggcgaggactggggaaaggtgtacgacgaggcctgggagcggattgacaagaaagtggaaggcctgagcaagcacatcaagctggaagaggaacggagaagcgaggacgcccagagcaaggccgccctgaccgactggctgcgggctaaggccagcttcgtgatcgagggcctgaaggaggccgacaaggacgagttctgcagatgcgagctgaagctgcagaagtggtacggggacctgcggggaaagcccttcgccatcgaagccgagaacagcatcctggacatcagcggcttcagcaagcagtacaactgtgccttcatctggcagaaggacggcgtgaagaagctgaacctgtacctgatcatcaactacttcaagggcggcaagctgcggttcaagaagatcaaacctgaagccttcgaagccaacagattctacaccgtgatcaacaaaaagagcggcgagatcgtgcccatggaggtgaacttcaacttcgacgaccccaacctgatcatcctgcctctggcctttggcaagagacagggcagagaattcatctggaacgacctgctgtccctggaaaccggcagcctgaagctggccaacggaagagtgatcgagaagacactgtacaacagaagaacccggcaggatgagcctgccctgttcgtggccctgaccttcgagcggcgggaggtcctggactcctccaatatcaaaccaatgaacctgatcggcgtggcaagaggcgaaaacatccccgccgtgatcgccctgaccgaccccgagggctgcccactgagccggtttaaggatagcctgggaaacccaacccacatcctgagaatcggcgagagctataaggagaagcagcggaccatccaggccaagaaggaggtggagcagcggagagccggcggctacagccggaagtacgccagcaaagccaagaatctggcagacgatatggtgagaaacaccgctagagatctgctgtactacgccgtgacccaggatgccatgctgatcttcgccaacctgagccggggcttcggccggcagggcaagcggaccttcatggccgagagacagtacacacggatggaggactggctgaccgccaagctggcctacgagggcctgagcaagacctacctgtccaagacactggcccagtacacctccaagacatgcagcaactgtgggtttaccatcaccagcgccgactacgacagggtgctggagaagctgaagaagacagcaacaggctggatgaccacaattaacggcaaggagctgaaggtggagggccagattacctactacaacagatacaagagacagaacgtagtcaaggacctgtccgtcgagctggatagactgagcgaagaatctgtgaacaacgacatctcctcctggacaaagggcagaagcggagaagctctgagcctcctgaagaaaagattctcccatagacccgtgcaggagaagttcgtgtgcctgaactgcggcttcgagacacacgcagccgagcaagccgccctgaacatcgccagatcctggctgttcctgcggagccaggagtacaagaaataccagacaaacaagacaaccggcaacaccgataagagagccttcgtcgagacctggcagtccttttaccggaagaagcttaaggaggtgtggaaacctgccgtgcggtctggcggatctggcggaggctccaccagccccaagaaaaagagaaaagtctaagctgccttctgcggggcttgccttctggccatgcccttcttctctcccttgcacctgtacctcttggtctttgaataaagcctgagtaggaaggctagcaaaaaaaaaaaaaaaaaaaaaaaaaaaaaaaaaaaaaaaaaaaaaaaaaaaaaaaaaaaaaaaaaaaaaaaaaaaaaaaa

SEQ ID NO: 9193 - RNA, 8787 nt, synthetic construct
  source 1..8787: mol_type = other RNA
aggaaataagagagaaaagaagagtaagaagaaatataagagccaccatggcccctaagaagaagcgtaaagtgagccggatgaaccacgaccaggagttcgacccccctaaggtgtaccctcccgtccccgccgagaagagaaagcccatccgggtcctgagcctgttcgatggcatcgccaccggtctgctggtgctgaaggacctgggcatccaggtggataggtacattgcctccgaggtgtgcgaggactccatcaccgtgggaatggtgcgtcatcagggcaagatcatgtacgtgggcgacgtgcggagcgtgacacagaagcatatccaggagtggggccctttcgacctggtgatcggcggcagcccttgcaatgacctgagcatcgtgaacccagcccggaagggcctgtacgagggaaccggcagactgttcttcgagttttacagactgctgcacgacgcccggcctaaggaaggcgacgaccggcccttcttttggctgttcgagaatgtggtggccatgggagtcagcgacaagcgggatattagccggttcctggagagcaaccccgtgatgatcgatgccaaggaagtgagcgccgcccaccgggccagatacttctggggcaatctgcctggcatgaacagacccctggccagcaccgtgaacgacaagctggagctgcaggagtgcctggagcacggccggatcgccaagttcagcaaggtgagaaccatcaccacccgaagcaacagcatcaaacaaggcaaggaccagcactttcctgtgttcatgaacgagaaggaggacatcctgtggtgtaccgagatggagagagtgttcgggttcccagtccactacacagatgtcagcaacatgtctagactggccagacagagactgctgggaagaagctggtccgtccctgtgatcagacacctgttcgcccctctgaaggagtacttcgcctgcgtgagcagcggcaacagcaacgccaacagccggggccccagcttctctagcggcctggtgccactgtccctgagagggagccacatgggccccatggagatctacaaaaccgtgagcgcctggaagcggcagcctgtgcgcgtgctgagcctgtttcggaatatcgataaagtcctgaaaagcctgggattcctggagagcggctctggctccggcggtggcaccctgaagtacgtggaggatgtgacaaacgtggtcagacgggatgtggagaagtggggccccttcgatctggtgtacggcagcacccaacccctgggcagctcttgtgaccggtgccctggctggtacatgtttcagttccaccggatcctgcagtacgccctgccgagacaggagtcccagcggccattcttttggattttcatggacaacttgctgctgaccgaggatgaccaggaaactaccactcggttcctgcagaccgaagccgtgaccctgcaggacgtgagaggccgggactaccagaacgccatgcgggtgtggtccaacatccctggactgaaaagcaagcacgcacctctgacccctaaagaagaggagtacctgcaggcccaggtgcggagcagaagcaagctggacgcccctaaggtggatctgctggtgaagaattgcctcctgcccctgagagagtacttcaagtatttcagccagaatagtctgcccctgggaggcagcggcggcggcccccagaagagcgtgaccttcgaggacgtggccgtgtacttcacccagaccgagtgggacggcctgagccccgcccagagggccctgtacagggacgtgatgctggagaactacggcaacgtggccagcctgggcttccccctgctgaagcccaccgtgatcagccagctggagggcggcggcgagctggagggccccagccccctggccagcggcaccggcaccggcccccagggcctgtggggcggcccaagcagcggcgcccctcctcccagcggcggcaggcggcccaagcagcggcgcccctcctcccagcggcggcagcccagccggctccccaacctctaccgaggagggcacctctgagtccgccacccccgagagcggccctggcacctccaccgagcccagcgagggcagcgcacccggcagccctgccggcagccccacctccacagaggagggaaccagcaccgagcccagcgaaggcagcgccccaggcaccagcaccgagcctagtgagcaggagattaaacggatcaacaagatcagaagaagacttgtgaaagacagcaacaccaagaaggccggcaagacaggccccatgaaaaccctgctggttagagtgatgacacccgatctgagagagcggctggaaaacctgagaaagaagcctgaaaatatcccccagcccatcagcaatacatctagagccaacctgaataagctgctgaccgattacaccgaaatgaagaaggcgatcctgcatgtgtactgggaagagttccagaaggaccctgtgggcctgatgagccgggtggcccagcctgccagcaagaagatcgatcagaacaagctgaaacctgagatggacgagaagggcaacctgaccaccgccggctttgcctgctctcagtgtggccagcccctgttcgtgtacaagctggagcaggtgtctgagaagggcaaggcttacaccaactacttcggacggtgcaatgtggccgagcacgaaaagctgatcctgctggcccagctgaagcccgagaaggatagcgacgaagccgtgacatatagcctgggaaagtttgggcagagggccctggatttctacagcattcatgtgaccaaggagtccacccaccccgtgaagcccctggcccagatcgccggaaacagatacgcctccggacctgtgggaaaggccctgagcgacgcatgtatgggcacaatcgcctccttcctgtctaagtaccaggacatcatcatcgaacaccagaaggtggtgaagggcaaccagaagagactggagagcctgcgggagctggccggcaaggaaaacctggaataccctagcgtgaccctgccacctcagcctcacaccaaggagggcgttgatgcctacaacgaagtgatcgcccgggtgcgaatgtgggtgaacctgaacctgtggcagaagctgaagctaagcagagatgatgccaagcctctgctgagactgaagggattcccttcctttcctctggtcgagagacaggccaacgaagtggactggtgggacatggtgtgtaacgtgaagaagctgatcaacgagaaaaaggaggatggcaaggtgttttggcagaatctggctggctacaagagacaggaagccctgagaccatacctgagcagcgaggaagatcggaagaagggaaagaaattcgctcggtaccagctgggcgacctgctgctgcacctggaaaagaagcacggcgaggactggggaaaggtgtacgacgaggcctgggagcggattgacaagaaagtggaaggcctgagcaagcacatcaagctggaagaggaacggagaagcgaggacgcccagagcaaggccgccctgaccgactggctgcgggctaaggccagcttcgtgatcgagggcctgaaggaggccgacaaggacgagttctgcagatgcgagctgaagctgcagaagtggtacggggacctgcggggaaagcccttcgccatcgaagccgagaacagcatcctggacatcagcggcttcagcaagcagtacaactgtgccttcatctggcagaaggacggcgtgaagaagctgaacctgtacctgatcatcaactacttcaagggcggcaagctgcggttcaagaagatcaaacctgaagccttcgaagccaacagattctacaccgtgatcaacaaaaagagcggcgagatcgtgcccatggaggtgaacttcaacttcgacgaccccaacctgatcatcctgcctctggcctttggcaagagacagggcagagaattcatctggaacgacctgctgtccctggaaaccggcagcctgaagctggccaacggaagagtgatcgagaagacactgtacaacagaagaacccggcaggatgagcctgccctgttcgtggccctgaccttcgagcggcgggaggtcctggactcctccaatatcaaaccaatgaacctgatcggcgtggcaagaggcgaaaacatccccgccgtgatcgccctgaccgaccccgagggctgcccactgagccggtttaaggatagcctgggaaacccaacccacatcctgagaatcggcgagagctataaggagaagcagcggaccatccaggccaagaaggaggtggagcagcggagagccggcggctacagccggaagtacgccagcaaagccaagaatctggcagacgatatggtgagaaacaccgctagagatctgctgtactacgccgtgacccaggatgccatgctgatcttcgccaacctgagccggggcttcggccggcagggcaagcggaccttcatggccgagagacagtacacacggatggaggactggctgaccgccaagctggcctacgagggcctgagcaagacctacctgtccaagacactggcccagtacacctccaagacatgcagcaactgtgggtttaccatcaccagcgccgactacgacagggtgctggagaagctgaagaagacagcaacaggctggatgaccacaattaacggcaaggagctgaaggtggagggccagattacctactacaacagatacaagagacagaacgtagtcaaggacctgtccgtcgagctggatagactgagcgaagaatctgtgaacaacgacatctcctcctggacaaagggcagaagcggagaagctctgagcctcctgaagaaaagattctcccatagacccgtgcaggagaagttcgtgtgcctgaactgcggcttcgagacacacgcagccgagcaagccgccctgaacatcgccagatcctggctgttcctgcggagccaggagtacaagaaataccagacaaacaagacaaccggcaacaccgataagagagccttcgtcgagacctggcagtccttttaccggaagaagcttaaggaggtgtggaaacctgccgtgcggtctggcggatctggcggaggctccaccagccccaagaaaaagagaaaagtctaagctgccttctgcggggcttgccttctggccatgcccttcttctctcccttgcacctgtacctcttggtctttgaataaagcctgagtaggaaggctagcaaaaaaaaaaaaaaaaaaaaaaaaaaaaaaaaaaaaaaaaaaaaaaaaaaaaaaaaaaaaaaaaaaaaaaaaaaaaaaaagcccagccggctccccaacctctaccgaggagggcacctctgagtccgccacccccgagagcggccctggcacctccaccgagcccagcgagggcagcgcacccggcagccctgccggcagccccacctccacagaggagggaaccagcaccgagcccagcgaaggcagcgccccaggcaccagcaccgagcctagtgagcaggagattaaacggatcaacaagatcagaagaagacttgtgaaagacagcaacaccaagaaggccggcaagacaggccccatgaaaaccctgctggttagagtgatgacacccgatctgagagagcggctggaaaacctgagaaagaagcctgaaaatatcccccagcccatcagcaatacatctagagccaacctgaataagctgctgaccgattacaccgaaatgaagaaggcgatcctgcatgtgtactgggaagagttccagaaggaccctgtgggcctgatgagccgggtggcccagcctgccagcaagaagatcgatcagaacaagctgaaacctgagatggacgagaagggcaacctgaccaccgccggctttgcctgctctcagtgtggccagcccctgttcgtgtacaagctggagcaggtgtctgagaagggcaaggcttacaccaactacttcggacggtgcaatgtggccgagcacgaaaagctgatcctgctggcccagctgaagcccgagaaggatagcgacgaagccgtgacatatagcctgggaaagtttgggcagagggccctggatttctacagcattcatgtgaccaaggagtccacccaccccgtgaagcccctggcccagatcgccggaaacagatacgcctccggacctgtgggaaaggccctgagcgacgcatgtatgggcacaatcgcctccttcctgtctaagtaccaggacatcatcatcgaacaccagaaggtggtgaagggcaaccagaagagactggagagcctgcgggagctggccggcaaggaaaacctggaataccctagcgtgaccctgccacctcagcctcacaccaaggagggcgttgatgcctacaacgaagtgatcgcccgggtgcgaatgtgggtgaacctgaacctgtggcagaagctgaagctaagcagagatgatgccaagcctctgctgagactgaagggattcccttcctttcctctggtcgagagacaggccaacgaagtggactggtgggacatggtgtgtaacgtgaagaagctgatcaacgagaaaaaggaggatggcaaggtgttttggcagaatctggctggctacaagagacaggaagccctgagaccatacctgagcagcgaggaagatcggaagaagggaaagaaattcgctcggtaccagctgggcgacctgctgctgcacctggaaaagaagcacggcgaggactggggaaaggtgtacgacgaggcctgggagcggattgacaagaaagtggaaggcctgagcaagcacatcaagctggaagaggaacggagaagcgaggacgcccagagcaaggccgccctgaccgactggctgcgggctaaggccagcttcgtgatcgagggcctgaaggaggccgacaaggacgagttctgcagatgcgagctgaagctgcagaagtggtacggggacctgcggggaaagcccttcgccatcgaagccgagaacagcatcctggacatcagcggcttcagcaagcagtacaactgtgccttcatctggcagaaggacggcgtgaagaagctgaacctgtacctgatcatcaactacttcaagggcggcaagctgcggttcaagaagatcaaacctgaagccttcgaagccaacagattctacaccgtgatcaacaaaaagagcggcgagatcgtgcccatggaggtgaacttcaacttcgacgaccccaacctgatcatcctgcctctggcctttggcaagagacagggcagagaattcatctggaacgacctgctgtccctggaaaccggcagcctgaagctggccaacggaagagtgatcgagaagacactgtacaacagaagaacccggcaggatgagcctgccctgttcgtggccctgaccttcgagcggcgggaggtcctggactcctccaatatcaaaccaatgaacctgatcggcgtggcaagaggcgaaaacatccccgccgtgatcgccctgaccgaccccgagggctgcccactgagccggtttaaggatagcctgggaaacccaacccacatcctgagaatcggcgagagctataaggagaagcagcggaccatccaggccaagaaggaggtggagcagcggagagccggcggctacagccggaagtacgccagcaaagccaagaatctggcagacgatatggtgagaaacaccgctagagatctgctgtactacgccgtgacccaggatgccatgctgatcttcgccaacctgagccggggcttcggccggcagggcaagcggaccttcatggccgagagacagtacacacggatggaggactggctgaccgccaagctggcctacgagggcctgagcaagacctacctgtccaagacactggcccagtacacctccaagacatgcagcaactgtgggtttaccatcaccagcgccgactacgacagggtgctggagaagctgaagaagacagcaacaggctggatgaccacaattaacggcaaggagctgaaggtggagggccagattacctactacaacagatacaagagacagaacgtagtcaaggacctgtccgtcgagctggatagactgagcgaagaatctgtgaacaacgacatctcctcctggacaaagggcagaagcggagaagctctgagcctcctgaagaaaagattctcccatagacccgtgcaggagaagttcgtgtgcctgaactgcggcttcgagacacacgcagccgagcaagccgccctgaacatcgccagatcctggctgttcctgcggagccaggagtacaagaaataccagacaaacaagacaaccggcaacaccgataagagagccttcgtcgagacctggcagtccttttaccggaagaagcttaaggaggtgtggaaacctgccgtgcggtctggcggatctggcggaggctccaccagccccaagaaaaagagaaaagtctaagctgccttctgcggggcttgccttctggccatgcccttcttctctcccttgcacctgtacctcttggtctttgaataaagcctgagtaggaaggctagcaaaaaaaaaaaaaaaaaaaaaaaaaaaaaaaaaaaaaaaaaaaaaaaaaaaaaaaaaaaaaaaaaaaaaaaaaaaaaaaa

SEQ ID NO: 9194 - RNA, 8787 nt, synthetic construct
  source 1..8787: mol_type = other RNA
aggaaataagagagaaaagaagagtaagaagaaatataagagccaccatggcccctaagaagaagcgtaaagtgagccggatgaaccacgaccaggagttcgacccccctaaggtgtaccctcccgtccccgccgagaagagaaagcccatccgggtcctgagcctgttcgatggcatcgccaccggtctgctggtgctgaaggacctgggcatccaggtggataggtacattgcctccgaggtgtgcgaggactccatcaccgtgggaatggtgcgtcatcagggcaagatcatgtacgtgggcgacgtgcggagcgtgacacagaagcatatccaggagtggggccctttcgacctggtgatcggcggcagcccttgcaatgacctgagcatcgtgaacccagcccggaagggcctgtacgagggaaccggcagactgttcttcgagttttacagactgctgcacgacgcccggcctaaggaaggcgacgaccggcccttcttttggctgttcgagaatgtggtggccatgggagtcagcgacaagcgggatattagccggttcctggagagcaaccccgtgatgatcgatgccaaggaagtgagcgccgcccaccgggccagatacttctggggcaatctgcctggcatgaacagacccctggccagcaccgtgaacgacaagctggagctgcaggagtgcctggagcacggccggatcgccaagttcagcaaggtgagaaccatcaccacccgaagcaacagcatcaaacaaggcaaggaccagcactttcctgtgttcatgaacgagaaggaggacatcctgtggtgtaccgagatggagagagtgttcgggttcccagtccactacacagatgtcagcaacatgtctagactggccagacagagactgctgggaagaagctggtccgtccctgtgatcagacacctgttcgcccctctgaaggagtacttcgcctgcgtgagcagcggcaacagcaacgccaacagccggggccccagcttctctagcggcctggtgccactgtccctgagagggagccacatgggccccatggagatctacaaaaccgtgagcgcctggaagcggcagcctgtgcgcgtgctgagcctgtttcggaatatcgataaagtcctgaaaagcctgggattcctggagagcggctctggctccggcggtggcaccctgaagtacgtggaggatgtgacaaacgtggtcagacgggatgtggagaagtggggccccttcgatctggtgtacggcagcacccaacccctgggcagctcttgtgaccggtgccctggctggtacatgtttcagttccaccggatcctgcagtacgccctgccgagacaggagtcccagcggccattcttttggattttcatggacaacttgctgctgaccgaggatgaccaggaaactaccactcggttcctgcagaccgaagccgtgaccctgcaggacgtgagaggccgggactaccagaacgccatgcgggtgtggtccaacatccctggactgaaaagcaagcacgcacctctgacccctaaagaagaggagtacctgcaggcccaggtgcggagcagaagcaagctggacgcccctaaggtggatctgctggtgaagaattgcctcctgcccctgagagagtacttcaagtatttcagccagaatagtctgcccctgggaggcagcggcggcggcgtgcaggagcccgtgaccttcaaggacgtggccgtggacttcacccaggaggagtggggccagctggacctggtgcagaggaccctgtacagggacgtgatgctggagacctacggccacctgctgagcgtgggcaaccagatcgccaagcccgaggtgatcagcctgctggagcagggcgaggagccctggagcgtggagcaggcctgcccccagaggacctgcagcgagtgggtgaggaacggcggcccaagcagcggcgcccctcctcccagcggcggcaggcggcccaagcagcggcgcccctcctcccagcggcggcagcccagccggctccccaacctctaccgaggagggcacctctgagtccgccacccccgagagcggccctggcacctccaccgagcccagcgagggcagcgcacccggcagccctgccggcagccccacctccacagaggagggaaccagcaccgagcccagcgaaggcagcgccccaggcaccagcaccgagcctagtgagcaggagattaaacggatcaacaagatcagaagaagacttgtgaaagacagcaacaccaagaaggccggcaagacaggccccatgaaaaccctgctggttagagtgatgacacccgatctgagagagcggctggaaaacctgagaaagaagcctgaaaatatcccccagcccatcagcaatacatctagagccaacctgaataagctgctgaccgattacaccgaaatgaagaaggcgatcctgcatgtgtactgggaagagttccagaaggaccctgtgggcctgatgagccgggtggcccagcctgccagcaagaagatcgatcagaacaagctgaaacctgagatggacgagaagggcaacctgaccaccgccggctttgcctgctctcagtgtggccagcccctgttcgtgtacaagctggagcaggtgtctgagaagggcaaggcttacaccaactacttcggacggtgcaatgtggccgagcacgaaaagctgatcctgctggcccagctgaagcccgagaaggatagcgacgaagccgtgacatatagcctgggaaagtttgggcagagggccctggatttctacagcattcatgtgaccaaggagtccacccaccccgtgaagcccctggcccagatcgccggaaacagatacgcctccggacctgtgggaaaggccctgagcgacgcatgtatgggcacaatcgcctccttcctgtctaagtaccaggacatcatcatcgaacaccagaaggtggtgaagggcaaccagaagagactggagagcctgcgggagctggccggcaaggaaaacctggaataccctagcgtgaccctgccacctcagcctcacaccaaggagggcgttgatgcctacaacgaagtgatcgcccgggtgcgaatgtgggtgaacctgaacctgtggcagaagctgaagctaagcagagatgatgccaagcctctgctgagactgaagggattcccttcctttcctctggtcgagagacaggccaacgaagtggactggtgggacatggtgtgtaacgtgaagaagctgatcaacgagaaaaaggaggatggcaaggtgttttggcagaatctggctggctacaagagacaggaagccctgagaccatacctgagcagcgaggaagatcggaagaagggaaagaaattcgctcggtaccagctgggcgacctgctgctgcacctggaaaagaagcacggcgaggactggggaaaggtgtacgacgaggcctgggagcggattgacaagaaagtggaaggcctgagcaagcacatcaagctggaagaggaacggagaagcgaggacgcccagagcaaggccgccctgaccgactggctgcgggctaaggccagcttcgtgatcgagggcctgaaggaggccgacaaggacgagttctgcagatgcgagctgaagctgcagaagtggtacggggacctgcggggaaagcccttcgccatcgaagccgagaacagcatcctggacatcagcggcttcagcaagcagtacaactgtgccttcatctggcagaaggacggcgtgaagaagctgaacctgtacctgatcatcaactacttcaagggcggcaagctgcggttcaagaagatcaaacctgaagccttcgaagccaacagattctacaccgtgatcaacaaaaagagcggcgagatcgtgcccatggaggtgaacttcaacttcgacgaccccaacctgatcatcctgcctctggcctttggcaagagacagggcagagaattcatctggaacgacctgctgtccctggaaaccggcagcctgaagctggccaacggaagagtgatcgagaagacactgtacaacagaagaacccggcaggatgagcctgccctgttcgtggccctgaccttcgagcggcgggaggtcctggactcctccaatatcaaaccaatgaacctgatcggcgtggcaagaggcgaaaacatccccgccgtgatcgccctgaccgaccccgagggctgcccactgagccggtttaaggatagcctgggaaacccaacccacatcctgagaatcggcgagagctataaggagaagcagcggaccatccaggccaagaaggaggtggagcagcggagagccggcggctacagccggaagtacgccagcaaagccaagaatctggcagacgatatggtgagaaacaccgctagagatctgctgtactacgccgtgacccaggatgccatgctgatcttcgccaacctgagccggggcttcggccggcagggcaagcggaccttcatggccgagagacagtacacacggatggaggactggctgaccgccaagctggcctacgagggcctgagcaagacctacctgtccaagacactggcccagtacacctccaagacatgcagcaactgtgggtttaccatcaccagcgccgactacgacagggtgctggagaagctgaagaagacagcaacaggctggatgaccacaattaacggcaaggagctgaaggtggagggccagattacctactacaacagatacaagagacagaacgtagtcaaggacctgtccgtcgagctggatagactgagcgaagaatctgtgaacaacgacatctcctcctggacaaagggcagaagcggagaagctctgagcctcctgaagaaaagattctcccatagacccgtgcaggagaagttcgtgtgcctgaactgcggcttcgagacacacgcagccgagcaagccgccctgaacatcgccagatcctggctgttcctgcggagccaggagtacaagaaataccagacaaacaagacaaccggcaacaccgataagagagccttcgtcgagacctggcagtccttttaccggaagaagcttaaggaggtgtggaaacctgccgtgcggtctggcggatctggcggaggctccaccagccccaagaaaaagagaaaagtctaagctgccttctgcggggcttgccttctggccatgcccttcttctctcccttgcacctgtacctcttggtctttgaataaagcctgagtaggaaggctagcaaaaaaaaaaaaaaaaaaaaaaaaaaaaaaaaaaaaaaaaaaaaaaaaaaaaaaaaaaaaaaaaaaaaaaaaaaaaaaaagcccagccggctccccaacctctaccgaggagggcacctctgagtccgccacccccgagagcggccctggcacctccaccgagcccagcgagggcagcgcacccggcagccctgccggcagccccacctccacagaggagggaaccagcaccgagcccagcgaaggcagcgccccaggcaccagcaccgagcctagtgagcaggagattaaacggatcaacaagatcagaagaagacttgtgaaagacagcaacaccaagaaggccggcaagacaggccccatgaaaaccctgctggttagagtgatgacacccgatctgagagagcggctggaaaacctgagaaagaagcctgaaaatatcccccagcccatcagcaatacatctagagccaacctgaataagctgctgaccgattacaccgaaatgaagaaggcgatcctgcatgtgtactgggaagagttccagaaggaccctgtgggcctgatgagccgggtggcccagcctgccagcaagaagatcgatcagaacaagctgaaacctgagatggacgagaagggcaacctgaccaccgccggctttgcctgctctcagtgtggccagcccctgttcgtgtacaagctggagcaggtgtctgagaagggcaaggcttacaccaactacttcggacggtgcaatgtggccgagcacgaaaagctgatcctgctggcccagctgaagcccgagaaggatagcgacgaagccgtgacatatagcctgggaaagtttgggcagagggccctggatttctacagcattcatgtgaccaaggagtccacccaccccgtgaagcccctggcccagatcgccggaaacagatacgcctccggacctgtgggaaaggccctgagcgacgcatgtatgggcacaatcgcctccttcctgtctaagtaccaggacatcatcatcgaacaccagaaggtggtgaagggcaaccagaagagactggagagcctgcgggagctggccggcaaggaaaacctggaataccctagcgtgaccctgccacctcagcctcacaccaaggagggcgttgatgcctacaacgaagtgatcgcccgggtgcgaatgtgggtgaacctgaacctgtggcagaagctgaagctaagcagagatgatgccaagcctctgctgagactgaagggattcccttcctttcctctggtcgagagacaggccaacgaagtggactggtgggacatggtgtgtaacgtgaagaagctgatcaacgagaaaaaggaggatggcaaggtgttttggcagaatctggctggctacaagagacaggaagccctgagaccatacctgagcagcgaggaagatcggaagaagggaaagaaattcgctcggtaccagctgggcgacctgctgctgcacctggaaaagaagcacggcgaggactggggaaaggtgtacgacgaggcctgggagcggattgacaagaaagtggaaggcctgagcaagcacatcaagctggaagaggaacggagaagcgaggacgcccagagcaaggccgccctgaccgactggctgcgggctaaggccagcttcgtgatcgagggcctgaaggaggccgacaaggacgagttctgcagatgcgagctgaagctgcagaagtggtacggggacctgcggggaaagcccttcgccatcgaagccgagaacagcatcctggacatcagcggcttcagcaagcagtacaactgtgccttcatctggcagaaggacggcgtgaagaagctgaacctgtacctgatcatcaactacttcaagggcggcaagctgcggttcaagaagatcaaacctgaagccttcgaagccaacagattctacaccgtgatcaacaaaaagagcggcgagatcgtgcccatggaggtgaacttcaacttcgacgaccccaacctgatcatcctgcctctggcctttggcaagagacagggcagagaattcatctggaacgacctgctgtccctggaaaccggcagcctgaagctggccaacggaagagtgatcgagaagacactgtacaacagaagaacccggcaggatgagcctgccctgttcgtggccctgaccttcgagcggcgggaggtcctggactcctccaatatcaaaccaatgaacctgatcggcgtggcaagaggcgaaaacatccccgccgtgatcgccctgaccgaccccgagggctgcccactgagccggtttaaggatagcctgggaaacccaacccacatcctgagaatcggcgagagctataaggagaagcagcggaccatccaggccaagaaggaggtggagcagcggagagccggcggctacagccggaagtacgccagcaaagccaagaatctggcagacgatatggtgagaaacaccgctagagatctgctgtactacgccgtgacccaggatgccatgctgatcttcgccaacctgagccggggcttcggccggcagggcaagcggaccttcatggccgagagacagtacacacggatggaggactggctgaccgccaagctggcctacgagggcctgagcaagacctacctgtccaagacactggcccagtacacctccaagacatgcagcaactgtgggtttaccatcaccagcgccgactacgacagggtgctggagaagctgaagaagacagcaacaggctggatgaccacaattaacggcaaggagctgaaggtggagggccagattacctactacaacagatacaagagacagaacgtagtcaaggacctgtccgtcgagctggatagactgagcgaagaatctgtgaacaacgacatctcctcctggacaaagggcagaagcggagaagctctgagcctcctgaagaaaagattctcccatagacccgtgcaggagaagttcgtgtgcctgaactgcggcttcgagacacacgcagccgagcaagccgccctgaacatcgccagatcctggctgttcctgcggagccaggagtacaagaaataccagacaaacaagacaaccggcaacaccgataagagagccttcgtcgagacctggcagtccttttaccggaagaagcttaaggaggtgtggaaacctgccgtgcggtctggcggatctggcggaggctccaccagccccaagaaaaagagaaaagtctaagctgccttctgcggggcttgccttctggccatgcccttcttctctcccttgcacctgtacctcttggtctttgaataaagcctgagtaggaaggctagcaaaaaaaaaaaaaaaaaaaaaaaaaaaaaaaaaaaaaaaaaaaaaaaaaaaaaaaaaaaaaaaaaaaaaaaaaaaaaaaa

SEQ ID NO: 9195 - RNA, 8787 nt, synthetic construct
  source 1..8787: mol_type = other RNA
aggaaataagagagaaaagaagagtaagaagaaatataagagccaccatggcccctaagaagaagcgtaaagtgagccggatgaaccacgaccaggagttcgacccccctaaggtgtaccctcccgtccccgccgagaagagaaagcccatccgggtcctgagcctgttcgatggcatcgccaccggtctgctggtgctgaaggacctgggcatccaggtggataggtacattgcctccgaggtgtgcgaggactccatcaccgtgggaatggtgcgtcatcagggcaagatcatgtacgtgggcgacgtgcggagcgtgacacagaagcatatccaggagtggggccctttcgacctggtgatcggcggcagcccttgcaatgacctgagcatcgtgaacccagcccggaagggcctgtacgagggaaccggcagactgttcttcgagttttacagactgctgcacgacgcccggcctaaggaaggcgacgaccggcccttcttttggctgttcgagaatgtggtggccatgggagtcagcgacaagcgggatattagccggttcctggagagcaaccccgtgatgatcgatgccaaggaagtgagcgccgcccaccgggccagatacttctggggcaatctgcctggcatgaacagacccctggccagcaccgtgaacgacaagctggagctgcaggagtgcctggagcacggccggatcgccaagttcagcaaggtgagaaccatcaccacccgaagcaacagcatcaaacaaggcaaggaccagcactttcctgtgttcatgaacgagaaggaggacatcctgtggtgtaccgagatggagagagtgttcgggttcccagtccactacacagatgtcagcaacatgtctagactggccagacagagactgctgggaagaagctggtccgtccctgtgatcagacacctgttcgcccctctgaaggagtacttcgcctgcgtgagcagcggcaacagcaacgccaacagccggggccccagcttctctagcggcctggtgccactgtccctgagagggagccacatgggccccatggagatctacaaaaccgtgagcgcctggaagcggcagcctgtgcgcgtgctgagcctgtttcggaatatcgataaagtcctgaaaagcctgggattcctggagagcggctctggctccggcggtggcaccctgaagtacgtggaggatgtgacaaacgtggtcagacgggatgtggagaagtggggccccttcgatctggtgtacggcagcacccaacccctgggcagctcttgtgaccggtgccctggctggtacatgtttcagttccaccggatcctgcagtacgccctgccgagacaggagtcccagcggccattcttttggattttcatggacaacttgctgctgaccgaggatgaccaggaaactaccactcggttcctgcagaccgaagccgtgaccctgcaggacgtgagaggccgggactaccagaacgccatgcgggtgtggtccaacatccctggactgaaaagcaagcacgcacctctgacccctaaagaagaggagtacctgcaggcccaggtgcggagcagaagcaagctggacgcccctaaggtggatctgctggtgaagaattgcctcctgcccctgagagagtacttcaagtatttcagccagaatagtctgcccctgggaggcagcggcggcggcctggtgaagttcgaggaggtggccgtggtgttcagcgaggacgagtggaacctgctgagcgaccagcagaggggcctgtacatggaggtgatgaaggagaactacgagcacctgatctacctgggctacgaggtgcccgtgatcctgagcctgctgcaggacggcggcggcatcagcagcgacgccggcagccagagcaagagccagcaggtggccgtggccgagggcagcaacgtgaacagcggcggcccaagcagcggcgcccctcctcccagcggcggcaggcggcccaagcagcggcgcccctcctcccagcggcggcagcccagccggctccccaacctctaccgaggagggcacctctgagtccgccacccccgagagcggccctggcacctccaccgagcccagcgagggcagcgcacccggcagccctgccggcagccccacctccacagaggagggaaccagcaccgagcccagcgaaggcagcgccccaggcaccagcaccgagcctagtgagcaggagattaaacggatcaacaagatcagaagaagacttgtgaaagacagcaacaccaagaaggccggcaagacaggccccatgaaaaccctgctggttagagtgatgacacccgatctgagagagcggctggaaaacctgagaaagaagcctgaaaatatcccccagcccatcagcaatacatctagagccaacctgaataagctgctgaccgattacaccgaaatgaagaaggcgatcctgcatgtgtactgggaagagttccagaaggaccctgtgggcctgatgagccgggtggcccagcctgccagcaagaagatcgatcagaacaagctgaaacctgagatggacgagaagggcaacctgaccaccgccggctttgcctgctctcagtgtggccagcccctgttcgtgtacaagctggagcaggtgtctgagaagggcaaggcttacaccaactacttcggacggtgcaatgtggccgagcacgaaaagctgatcctgctggcccagctgaagcccgagaaggatagcgacgaagccgtgacatatagcctgggaaagtttgggcagagggccctggatttctacagcattcatgtgaccaaggagtccacccaccccgtgaagcccctggcccagatcgccggaaacagatacgcctccggacctgtgggaaaggccctgagcgacgcatgtatgggcacaatcgcctccttcctgtctaagtaccaggacatcatcatcgaacaccagaaggtggtgaagggcaaccagaagagactggagagcctgcgggagctggccggcaaggaaaacctggaataccctagcgtgaccctgccacctcagcctcacaccaaggagggcgttgatgcctacaacgaagtgatcgcccgggtgcgaatgtgggtgaacctgaacctgtggcagaagctgaagctaagcagagatgatgccaagcctctgctgagactgaagggattcccttcctttcctctggtcgagagacaggccaacgaagtggactggtgggacatggtgtgtaacgtgaagaagctgatcaacgagaaaaaggaggatggcaaggtgttttggcagaatctggctggctacaagagacaggaagccctgagaccatacctgagcagcgaggaagatcggaagaagggaaagaaattcgctcggtaccagctgggcgacctgctgctgcacctggaaaagaagcacggcgaggactggggaaaggtgtacgacgaggcctgggagcggattgacaagaaagtggaaggcctgagcaagcacatcaagctggaagaggaacggagaagcgaggacgcccagagcaaggccgccctgaccgactggctgcgggctaaggccagcttcgtgatcgagggcctgaaggaggccgacaaggacgagttctgcagatgcgagctgaagctgcagaagtggtacggggacctgcggggaaagcccttcgccatcgaagccgagaacagcatcctggacatcagcggcttcagcaagcagtacaactgtgccttcatctggcagaaggacggcgtgaagaagctgaacctgtacctgatcatcaactacttcaagggcggcaagctgcggttcaagaagatcaaacctgaagccttcgaagccaacagattctacaccgtgatcaacaaaaagagcggcgagatcgtgcccatggaggtgaacttcaacttcgacgaccccaacctgatcatcctgcctctggcctttggcaagagacagggcagagaattcatctggaacgacctgctgtccctggaaaccggcagcctgaagctggccaacggaagagtgatcgagaagacactgtacaacagaagaacccggcaggatgagcctgccctgttcgtggccctgaccttcgagcggcgggaggtcctggactcctccaatatcaaaccaatgaacctgatcggcgtggcaagaggcgaaaacatccccgccgtgatcgccctgaccgaccccgagggctgcccactgagccggtttaaggatagcctgggaaacccaacccacatcctgagaatcggcgagagctataaggagaagcagcggaccatccaggccaagaaggaggtggagcagcggagagccggcggctacagccggaagtacgccagcaaagccaagaatctggcagacgatatggtgagaaacaccgctagagatctgctgtactacgccgtgacccaggatgccatgctgatcttcgccaacctgagccggggcttcggccggcagggcaagcggaccttcatggccgagagacagtacacacggatggaggactggctgaccgccaagctggcctacgagggcctgagcaagacctacctgtccaagacactggcccagtacacctccaagacatgcagcaactgtgggtttaccatcaccagcgccgactacgacagggtgctggagaagctgaagaagacagcaacaggctggatgaccacaattaacggcaaggagctgaaggtggagggccagattacctactacaacagatacaagagacagaacgtagtcaaggacctgtccgtcgagctggatagactgagcgaagaatctgtgaacaacgacatctcctcctggacaaagggcagaagcggagaagctctgagcctcctgaagaaaagattctcccatagacccgtgcaggagaagttcgtgtgcctgaactgcggcttcgagacacacgcagccgagcaagccgccctgaacatcgccagatcctggctgttcctgcggagccaggagtacaagaaataccagacaaacaagacaaccggcaacaccgataagagagccttcgtcgagacctggcagtccttttaccggaagaagcttaaggaggtgtggaaacctgccgtgcggtctggcggatctggcggaggctccaccagccccaagaaaaagagaaaagtctaagctgccttctgcggggcttgccttctggccatgcccttcttctctcccttgcacctgtacctcttggtctttgaataaagcctgagtaggaaggctagcaaaaaaaaaaaaaaaaaaaaaaaaaaaaaaaaaaaaaaaaaaaaaaaaaaaaaaaaaaaaaaaaaaaaaaaaaaaaaaaagcccagccggctccccaacctctaccgaggagggcacctctgagtccgccacccccgagagcggccctggcacctccaccgagcccagcgagggcagcgcacccggcagccctgccggcagccccacctccacagaggagggaaccagcaccgagcccagcgaaggcagcgccccaggcaccagcaccgagcctagtgagcaggagattaaacggatcaacaagatcagaagaagacttgtgaaagacagcaacaccaagaaggccggcaagacaggccccatgaaaaccctgctggttagagtgatgacacccgatctgagagagcggctggaaaacctgagaaagaagcctgaaaatatcccccagcccatcagcaatacatctagagccaacctgaataagctgctgaccgattacaccgaaatgaagaaggcgatcctgcatgtgtactgggaagagttccagaaggaccctgtgggcctgatgagccgggtggcccagcctgccagcaagaagatcgatcagaacaagctgaaacctgagatggacgagaagggcaacctgaccaccgccggctttgcctgctctcagtgtggccagcccctgttcgtgtacaagctggagcaggtgtctgagaagggcaaggcttacaccaactacttcggacggtgcaatgtggccgagcacgaaaagctgatcctgctggcccagctgaagcccgagaaggatagcgacgaagccgtgacatatagcctgggaaagtttgggcagagggccctggatttctacagcattcatgtgaccaaggagtccacccaccccgtgaagcccctggcccagatcgccggaaacagatacgcctccggacctgtgggaaaggccctgagcgacgcatgtatgggcacaatcgcctccttcctgtctaagtaccaggacatcatcatcgaacaccagaaggtggtgaagggcaaccagaagagactggagagcctgcgggagctggccggcaaggaaaacctggaataccctagcgtgaccctgccacctcagcctcacaccaaggagggcgttgatgcctacaacgaagtgatcgcccgggtgcgaatgtgggtgaacctgaacctgtggcagaagctgaagctaagcagagatgatgccaagcctctgctgagactgaagggattcccttcctttcctctggtcgagagacaggccaacgaagtggactggtgggacatggtgtgtaacgtgaagaagctgatcaacgagaaaaaggaggatggcaaggtgttttggcagaatctggctggctacaagagacaggaagccctgagaccatacctgagcagcgaggaagatcggaagaagggaaagaaattcgctcggtaccagctgggcgacctgctgctgcacctggaaaagaagcacggcgaggactggggaaaggtgtacgacgaggcctgggagcggattgacaagaaagtggaaggcctgagcaagcacatcaagctggaagaggaacggagaagcgaggacgcccagagcaaggccgccctgaccgactggctgcgggctaaggccagcttcgtgatcgagggcctgaaggaggccgacaaggacgagttctgcagatgcgagctgaagctgcagaagtggtacggggacctgcggggaaagcccttcgccatcgaagccgagaacagcatcctggacatcagcggcttcagcaagcagtacaactgtgccttcatctggcagaaggacggcgtgaagaagctgaacctgtacctgatcatcaactacttcaagggcggcaagctgcggttcaagaagatcaaacctgaagccttcgaagccaacagattctacaccgtgatcaacaaaaagagcggcgagatcgtgcccatggaggtgaacttcaacttcgacgaccccaacctgatcatcctgcctctggcctttggcaagagacagggcagagaattcatctggaacgacctgctgtccctggaaaccggcagcctgaagctggccaacggaagagtgatcgagaagacactgtacaacagaagaacccggcaggatgagcctgccctgttcgtggccctgaccttcgagcggcgggaggtcctggactcctccaatatcaaaccaatgaacctgatcggcgtggcaagaggcgaaaacatccccgccgtgatcgccctgaccgaccccgagggctgcccactgagccggtttaaggatagcctgggaaacccaacccacatcctgagaatcggcgagagctataaggagaagcagcggaccatccaggccaagaaggaggtggagcagcggagagccggcggctacagccggaagtacgccagcaaagccaagaatctggcagacgatatggtgagaaacaccgctagagatctgctgtactacgccgtgacccaggatgccatgctgatcttcgccaacctgagccggggcttcggccggcagggcaagcggaccttcatggccgagagacagtacacacggatggaggactggctgaccgccaagctggcctacgagggcctgagcaagacctacctgtccaagacactggcccagtacacctccaagacatgcagcaactgtgggtttaccatcaccagcgccgactacgacagggtgctggagaagctgaagaagacagcaacaggctggatgaccacaattaacggcaaggagctgaaggtggagggccagattacctactacaacagatacaagagacagaacgtagtcaaggacctgtccgtcgagctggatagactgagcgaagaatctgtgaacaacgacatctcctcctggacaaagggcagaagcggagaagctctgagcctcctgaagaaaagattctcccatagacccgtgcaggagaagttcgtgtgcctgaactgcggcttcgagacacacgcagccgagcaagccgccctgaacatcgccagatcctggctgttcctgcggagccaggagtacaagaaataccagacaaacaagacaaccggcaacaccgataagagagccttcgtcgagacctggcagtccttttaccggaagaagcttaaggaggtgtggaaacctgccgtgcggtctggcggatctggcggaggctccaccagccccaagaaaaagagaaaagtctaagctgccttctgcggggcttgccttctggccatgcccttcttctctcccttgcacctgtacctcttggtctttgaataaagcctgagtaggaaggctagcaaaaaaaaaaaaaaaaaaaaaaaaaaaaaaaaaaaaaaaaaaaaaaaaaaaaaaaaaaaaaaaaaaaaaaaaaaaaaaaa

SEQ ID NO: 9196 - RNA, 8787 nt, synthetic construct
  source 1..8787: mol_type = other RNA
aggaaataagagagaaaagaagagtaagaagaaatataagagccaccatggcccctaagaagaagcgtaaagtgagccggatgaaccacgaccaggagttcgacccccctaaggtgtaccctcccgtccccgccgagaagagaaagcccatccgggtcctgagcctgttcgatggcatcgccaccggtctgctggtgctgaaggacctgggcatccaggtggataggtacattgcctccgaggtgtgcgaggactccatcaccgtgggaatggtgcgtcatcagggcaagatcatgtacgtgggcgacgtgcggagcgtgacacagaagcatatccaggagtggggccctttcgacctggtgatcggcggcagcccttgcaatgacctgagcatcgtgaacccagcccggaagggcctgtacgagggaaccggcagactgttcttcgagttttacagactgctgcacgacgcccggcctaaggaaggcgacgaccggcccttcttttggctgttcgagaatgtggtggccatgggagtcagcgacaagcgggatattagccggttcctggagagcaaccccgtgatgatcgatgccaaggaagtgagcgccgcccaccgggccagatacttctggggcaatctgcctggcatgaacagacccctggccagcaccgtgaacgacaagctggagctgcaggagtgcctggagcacggccggatcgccaagttcagcaaggtgagaaccatcaccacccgaagcaacagcatcaaacaaggcaaggaccagcactttcctgtgttcatgaacgagaaggaggacatcctgtggtgtaccgagatggagagagtgttcgggttcccagtccactacacagatgtcagcaacatgtctagactggccagacagagactgctgggaagaagctggtccgtccctgtgatcagacacctgttcgcccctctgaaggagtacttcgcctgcgtgagcagcggcaacagcaacgccaacagccggggccccagcttctctagcggcctggtgccactgtccctgagagggagccacatgggccccatggagatctacaaaaccgtgagcgcctggaagcggcagcctgtgcgcgtgctgagcctgtttcggaatatcgataaagtcctgaaaagcctgggattcctggagagcggctctggctccggcggtggcaccctgaagtacgtggaggatgtgacaaacgtggtcagacgggatgtggagaagtggggccccttcgatctggtgtacggcagcacccaacccctgggcagctcttgtgaccggtgccctggctggtacatgtttcagttccaccggatcctgcagtacgccctgccgagacaggagtcccagcggccattcttttggattttcatggacaacttgctgctgaccgaggatgaccaggaaactaccactcggttcctgcagaccgaagccgtgaccctgcaggacgtgagaggccgggactaccagaacgccatgcgggtgtggtccaacatccctggactgaaaagcaagcacgcacctctgacccctaaagaagaggagtacctgcaggcccaggtgcggagcagaagcaagctggacgcccctaaggtggatctgctggtgaagaattgcctcctgcccctgagagagtacttcaagtatttcagccagaatagtctgcccctgggaggcagcggcggcggcctggcccccgaggaccacggcagcagctacgagggcagcgtgagcttcagggacgtggccatcgacttcagcagggaggagtggaggcacctggacctgagccagaggaacctgtacagggacgtgatgctggagacctacagccacctgctgagcgtgggctaccaggtgcccgaggccgaggtggtgatgctggagcagggcaacgagccctggagcctgcagggcgagaggccccaccagggcggcccaagcagcggcgcccctcctcccagcggcggcaggcggcccaagcagcggcgcccctcctcccagcggcggcagcccagccggctccccaacctctaccgaggagggcacctctgagtccgccacccccgagagcggccctggcacctccaccgagcccagcgagggcagcgcacccggcagccctgccggcagccccacctccacagaggagggaaccagcaccgagcccagcgaaggcagcgccccaggcaccagcaccgagcctagtgagcaggagattaaacggatcaacaagatcagaagaagacttgtgaaagacagcaacaccaagaaggccggcaagacaggccccatgaaaaccctgctggttagagtgatgacacccgatctgagagagcggctggaaaacctgagaaagaagcctgaaaatatcccccagcccatcagcaatacatctagagccaacctgaataagctgctgaccgattacaccgaaatgaagaaggcgatcctgcatgtgtactgggaagagttccagaaggaccctgtgggcctgatgagccgggtggcccagcctgccagcaagaagatcgatcagaacaagctgaaacctgagatggacgagaagggcaacctgaccaccgccggctttgcctgctctcagtgtggccagcccctgttcgtgtacaagctggagcaggtgtctgagaagggcaaggcttacaccaactacttcggacggtgcaatgtggccgagcacgaaaagctgatcctgctggcccagctgaagcccgagaaggatagcgacgaagccgtgacatatagcctgggaaagtttgggcagagggccctggatttctacagcattcatgtgaccaaggagtccacccaccccgtgaagcccctggcccagatcgccggaaacagatacgcctccggacctgtgggaaaggccctgagcgacgcatgtatgggcacaatcgcctccttcctgtctaagtaccaggacatcatcatcgaacaccagaaggtggtgaagggcaaccagaagagactggagagcctgcgggagctggccggcaaggaaaacctggaataccctagcgtgaccctgccacctcagcctcacaccaaggagggcgttgatgcctacaacgaagtgatcgcccgggtgcgaatgtgggtgaacctgaacctgtggcagaagctgaagctaagcagagatgatgccaagcctctgctgagactgaagggattcccttcctttcctctggtcgagagacaggccaacgaagtggactggtgggacatggtgtgtaacgtgaagaagctgatcaacgagaaaaaggaggatggcaaggtgttttggcagaatctggctggctacaagagacaggaagccctgagaccatacctgagcagcgaggaagatcggaagaagggaaagaaattcgctcggtaccagctgggcgacctgctgctgcacctggaaaagaagcacggcgaggactggggaaaggtgtacgacgaggcctgggagcggattgacaagaaagtggaaggcctgagcaagcacatcaagctggaagaggaacggagaagcgaggacgcccagagcaaggccgccctgaccgactggctgcgggctaaggccagcttcgtgatcgagggcctgaaggaggccgacaaggacgagttctgcagatgcgagctgaagctgcagaagtggtacggggacctgcggggaaagcccttcgccatcgaagccgagaacagcatcctggacatcagcggcttcagcaagcagtacaactgtgccttcatctggcagaaggacggcgtgaagaagctgaacctgtacctgatcatcaactacttcaagggcggcaagctgcggttcaagaagatcaaacctgaagccttcgaagccaacagattctacaccgtgatcaacaaaaagagcggcgagatcgtgcccatggaggtgaacttcaacttcgacgaccccaacctgatcatcctgcctctggcctttggcaagagacagggcagagaattcatctggaacgacctgctgtccctggaaaccggcagcctgaagctggccaacggaagagtgatcgagaagacactgtacaacagaagaacccggcaggatgagcctgccctgttcgtggccctgaccttcgagcggcgggaggtcctggactcctccaatatcaaaccaatgaacctgatcggcgtggcaagaggcgaaaacatccccgccgtgatcgccctgaccgaccccgagggctgcccactgagccggtttaaggatagcctgggaaacccaacccacatcctgagaatcggcgagagctataaggagaagcagcggaccatccaggccaagaaggaggtggagcagcggagagccggcggctacagccggaagtacgccagcaaagccaagaatctggcagacgatatggtgagaaacaccgctagagatctgctgtactacgccgtgacccaggatgccatgctgatcttcgccaacctgagccggggcttcggccggcagggcaagcggaccttcatggccgagagacagtacacacggatggaggactggctgaccgccaagctggcctacgagggcctgagcaagacctacctgtccaagacactggcccagtacacctccaagacatgcagcaactgtgggtttaccatcaccagcgccgactacgacagggtgctggagaagctgaagaagacagcaacaggctggatgaccacaattaacggcaaggagctgaaggtggagggccagattacctactacaacagatacaagagacagaacgtagtcaaggacctgtccgtcgagctggatagactgagcgaagaatctgtgaacaacgacatctcctcctggacaaagggcagaagcggagaagctctgagcctcctgaagaaaagattctcccatagacccgtgcaggagaagttcgtgtgcctgaactgcggcttcgagacacacgcagccgagcaagccgccctgaacatcgccagatcctggctgttcctgcggagccaggagtacaagaaataccagacaaacaagacaaccggcaacaccgataagagagccttcgtcgagacctggcagtccttttaccggaagaagcttaaggaggtgtggaaacctgccgtgcggtctggcggatctggcggaggctccaccagccccaagaaaaagagaaaagtctaagctgccttctgcggggcttgccttctggccatgcccttcttctctcccttgcacctgtacctcttggtctttgaataaagcctgagtaggaaggctagcaaaaaaaaaaaaaaaaaaaaaaaaaaaaaaaaaaaaaaaaaaaaaaaaaaaaaaaaaaaaaaaaaaaaaaaaaaaaaaaagcccagccggctccccaacctctaccgaggagggcacctctgagtccgccacccccgagagcggccctggcacctccaccgagcccagcgagggcagcgcacccggcagccctgccggcagccccacctccacagaggagggaaccagcaccgagcccagcgaaggcagcgccccaggcaccagcaccgagcctagtgagcaggagattaaacggatcaacaagatcagaagaagacttgtgaaagacagcaacaccaagaaggccggcaagacaggccccatgaaaaccctgctggttagagtgatgacacccgatctgagagagcggctggaaaacctgagaaagaagcctgaaaatatcccccagcccatcagcaatacatctagagccaacctgaataagctgctgaccgattacaccgaaatgaagaaggcgatcctgcatgtgtactgggaagagttccagaaggaccctgtgggcctgatgagccgggtggcccagcctgccagcaagaagatcgatcagaacaagctgaaacctgagatggacgagaagggcaacctgaccaccgccggctttgcctgctctcagtgtggccagcccctgttcgtgtacaagctggagcaggtgtctgagaagggcaaggcttacaccaactacttcggacggtgcaatgtggccgagcacgaaaagctgatcctgctggcccagctgaagcccgagaaggatagcgacgaagccgtgacatatagcctgggaaagtttgggcagagggccctggatttctacagcattcatgtgaccaaggagtccacccaccccgtgaagcccctggcccagatcgccggaaacagatacgcctccggacctgtgggaaaggccctgagcgacgcatgtatgggcacaatcgcctccttcctgtctaagtaccaggacatcatcatcgaacaccagaaggtggtgaagggcaaccagaagagactggagagcctgcgggagctggccggcaaggaaaacctggaataccctagcgtgaccctgccacctcagcctcacaccaaggagggcgttgatgcctacaacgaagtgatcgcccgggtgcgaatgtgggtgaacctgaacctgtggcagaagctgaagctaagcagagatgatgccaagcctctgctgagactgaagggattcccttcctttcctctggtcgagagacaggccaacgaagtggactggtgggacatggtgtgtaacgtgaagaagctgatcaacgagaaaaaggaggatggcaaggtgttttggcagaatctggctggctacaagagacaggaagccctgagaccatacctgagcagcgaggaagatcggaagaagggaaagaaattcgctcggtaccagctgggcgacctgctgctgcacctggaaaagaagcacggcgaggactggggaaaggtgtacgacgaggcctgggagcggattgacaagaaagtggaaggcctgagcaagcacatcaagctggaagaggaacggagaagcgaggacgcccagagcaaggccgccctgaccgactggctgcgggctaaggccagcttcgtgatcgagggcctgaaggaggccgacaaggacgagttctgcagatgcgagctgaagctgcagaagtggtacggggacctgcggggaaagcccttcgccatcgaagccgagaacagcatcctggacatcagcggcttcagcaagcagtacaactgtgccttcatctggcagaaggacggcgtgaagaagctgaacctgtacctgatcatcaactacttcaagggcggcaagctgcggttcaagaagatcaaacctgaagccttcgaagccaacagattctacaccgtgatcaacaaaaagagcggcgagatcgtgcccatggaggtgaacttcaacttcgacgaccccaacctgatcatcctgcctctggcctttggcaagagacagggcagagaattcatctggaacgacctgctgtccctggaaaccggcagcctgaagctggccaacggaagagtgatcgagaagacactgtacaacagaagaacccggcaggatgagcctgccctgttcgtggccctgaccttcgagcggcgggaggtcctggactcctccaatatcaaaccaatgaacctgatcggcgtggcaagaggcgaaaacatccccgccgtgatcgccctgaccgaccccgagggctgcccactgagccggtttaaggatagcctgggaaacccaacccacatcctgagaatcggcgagagctataaggagaagcagcggaccatccaggccaagaaggaggtggagcagcggagagccggcggctacagccggaagtacgccagcaaagccaagaatctggcagacgatatggtgagaaacaccgctagagatctgctgtactacgccgtgacccaggatgccatgctgatcttcgccaacctgagccggggcttcggccggcagggcaagcggaccttcatggccgagagacagtacacacggatggaggactggctgaccgccaagctggcctacgagggcctgagcaagacctacctgtccaagacactggcccagtacacctccaagacatgcagcaactgtgggtttaccatcaccagcgccgactacgacagggtgctggagaagctgaagaagacagcaacaggctggatgaccacaattaacggcaaggagctgaaggtggagggccagattacctactacaacagatacaagagacagaacgtagtcaaggacctgtccgtcgagctggatagactgagcgaagaatctgtgaacaacgacatctcctcctggacaaagggcagaagcggagaagctctgagcctcctgaagaaaagattctcccatagacccgtgcaggagaagttcgtgtgcctgaactgcggcttcgagacacacgcagccgagcaagccgccctgaacatcgccagatcctggctgttcctgcggagccaggagtacaagaaataccagacaaacaagacaaccggcaacaccgataagagagccttcgtcgagacctggcagtccttttaccggaagaagcttaaggaggtgtggaaacctgccgtgcggtctggcggatctggcggaggctccaccagccccaagaaaaagagaaaagtctaagctgccttctgcggggcttgccttctggccatgcccttcttctctcccttgcacctgtacctcttggtctttgaataaagcctgagtaggaaggctagcaaaaaaaaaaaaaaaaaaaaaaaaaaaaaaaaaaaaaaaaaaaaaaaaaaaaaaaaaaaaaaaaaaaaaaaaaaaaaaaa

SEQ ID NO: 9197 - RNA, 8787 nt, synthetic construct
  source 1..8787: mol_type = other RNA
aggaaataagagagaaaagaagagtaagaagaaatataagagccaccatggcccctaagaagaagcgtaaagtgagccggatgaaccacgaccaggagttcgacccccctaaggtgtaccctcccgtccccgccgagaagagaaagcccatccgggtcctgagcctgttcgatggcatcgccaccggtctgctggtgctgaaggacctgggcatccaggtggataggtacattgcctccgaggtgtgcgaggactccatcaccgtgggaatggtgcgtcatcagggcaagatcatgtacgtgggcgacgtgcggagcgtgacacagaagcatatccaggagtggggccctttcgacctggtgatcggcggcagcccttgcaatgacctgagcatcgtgaacccagcccggaagggcctgtacgagggaaccggcagactgttcttcgagttttacagactgctgcacgacgcccggcctaaggaaggcgacgaccggcccttcttttggctgttcgagaatgtggtggccatgggagtcagcgacaagcgggatattagccggttcctggagagcaaccccgtgatgatcgatgccaaggaagtgagcgccgcccaccgggccagatacttctggggcaatctgcctggcatgaacagacccctggccagcaccgtgaacgacaagctggagctgcaggagtgcctggagcacggccggatcgccaagttcagcaaggtgagaaccatcaccacccgaagcaacagcatcaaacaaggcaaggaccagcactttcctgtgttcatgaacgagaaggaggacatcctgtggtgtaccgagatggagagagtgttcgggttcccagtccactacacagatgtcagcaacatgtctagactggccagacagagactgctgggaagaagctggtccgtccctgtgatcagacacctgttcgcccctctgaaggagtacttcgcctgcgtgagcagcggcaacagcaacgccaacagccggggccccagcttctctagcggcctggtgccactgtccctgagagggagccacatgggccccatggagatctacaaaaccgtgagcgcctggaagcggcagcctgtgcgcgtgctgagcctgtttcggaatatcgataaagtcctgaaaagcctgggattcctggagagcggctctggctccggcggtggcaccctgaagtacgtggaggatgtgacaaacgtggtcagacgggatgtggagaagtggggccccttcgatctggtgtacggcagcacccaacccctgggcagctcttgtgaccggtgccctggctggtacatgtttcagttccaccggatcctgcagtacgccctgccgagacaggagtcccagcggccattcttttggattttcatggacaacttgctgctgaccgaggatgaccaggaaactaccactcggttcctgcagaccgaagccgtgaccctgcaggacgtgagaggccgggactaccagaacgccatgcgggtgtggtccaacatccctggactgaaaagcaagcacgcacctctgacccctaaagaagaggagtacctgcaggcccaggtgcggagcagaagcaagctggacgcccctaaggtggatctgctggtgaagaattgcctcctgcccctgagagagtacttcaagtatttcagccagaatagtctgcccctgggaggcagcggcggcggcagcaaggtgcccgtgaccttcggcgacctggccatctacttcagccaggaggagtgggagtggctgagccccatccagaaggacctgtacgaggacgtgatgctggagaactaccagaacctggtgagcgtgggcctgagcttcaggaggcccaacgtgatcaccctgctggagaagggcagggccccctggatggtggagcccgtgaggaagaggaggggcatggacagcggcagcaagtgcggcggcccaagcagcggcgcccctcctcccagcggcggcaggcggcccaagcagcggcgcccctcctcccagcggcggcagcccagccggctccccaacctctaccgaggagggcacctctgagtccgccacccccgagagcggccctggcacctccaccgagcccagcgagggcagcgcacccggcagccctgccggcagccccacctccacagaggagggaaccagcaccgagcccagcgaaggcagcgccccaggcaccagcaccgagcctagtgagcaggagattaaacggatcaacaagatcagaagaagacttgtgaaagacagcaacaccaagaaggccggcaagacaggccccatgaaaaccctgctggttagagtgatgacacccgatctgagagagcggctggaaaacctgagaaagaagcctgaaaatatcccccagcccatcagcaatacatctagagccaacctgaataagctgctgaccgattacaccgaaatgaagaaggcgatcctgcatgtgtactgggaagagttccagaaggaccctgtgggcctgatgagccgggtggcccagcctgccagcaagaagatcgatcagaacaagctgaaacctgagatggacgagaagggcaacctgaccaccgccggctttgcctgctctcagtgtggccagcccctgttcgtgtacaagctggagcaggtgtctgagaagggcaaggcttacaccaactacttcggacggtgcaatgtggccgagcacgaaaagctgatcctgctggcccagctgaagcccgagaaggatagcgacgaagccgtgacatatagcctgggaaagtttgggcagagggccctggatttctacagcattcatgtgaccaaggagtccacccaccccgtgaagcccctggcccagatcgccggaaacagatacgcctccggacctgtgggaaaggccctgagcgacgcatgtatgggcacaatcgcctccttcctgtctaagtaccaggacatcatcatcgaacaccagaaggtggtgaagggcaaccagaagagactggagagcctgcgggagctggccggcaaggaaaacctggaataccctagcgtgaccctgccacctcagcctcacaccaaggagggcgttgatgcctacaacgaagtgatcgcccgggtgcgaatgtgggtgaacctgaacctgtggcagaagctgaagctaagcagagatgatgccaagcctctgctgagactgaagggattcccttcctttcctctggtcgagagacaggccaacgaagtggactggtgggacatggtgtgtaacgtgaagaagctgatcaacgagaaaaaggaggatggcaaggtgttttggcagaatctggctggctacaagagacaggaagccctgagaccatacctgagcagcgaggaagatcggaagaagggaaagaaattcgctcggtaccagctgggcgacctgctgctgcacctggaaaagaagcacggcgaggactggggaaaggtgtacgacgaggcctgggagcggattgacaagaaagtggaaggcctgagcaagcacatcaagctggaagaggaacggagaagcgaggacgcccagagcaaggccgccctgaccgactggctgcgggctaaggccagcttcgtgatcgagggcctgaaggaggccgacaaggacgagttctgcagatgcgagctgaagctgcagaagtggtacggggacctgcggggaaagcccttcgccatcgaagccgagaacagcatcctggacatcagcggcttcagcaagcagtacaactgtgccttcatctggcagaaggacggcgtgaagaagctgaacctgtacctgatcatcaactacttcaagggcggcaagctgcggttcaagaagatcaaacctgaagccttcgaagccaacagattctacaccgtgatcaacaaaaagagcggcgagatcgtgcccatggaggtgaacttcaacttcgacgaccccaacctgatcatcctgcctctggcctttggcaagagacagggcagagaattcatctggaacgacctgctgtccctggaaaccggcagcctgaagctggccaacggaagagtgatcgagaagacactgtacaacagaagaacccggcaggatgagcctgccctgttcgtggccctgaccttcgagcggcgggaggtcctggactcctccaatatcaaaccaatgaacctgatcggcgtggcaagaggcgaaaacatccccgccgtgatcgccctgaccgaccccgagggctgcccactgagccggtttaaggatagcctgggaaacccaacccacatcctgagaatcggcgagagctataaggagaagcagcggaccatccaggccaagaaggaggtggagcagcggagagccggcggctacagccggaagtacgccagcaaagccaagaatctggcagacgatatggtgagaaacaccgctagagatctgctgtactacgccgtgacccaggatgccatgctgatcttcgccaacctgagccggggcttcggccggcagggcaagcggaccttcatggccgagagacagtacacacggatggaggactggctgaccgccaagctggcctacgagggcctgagcaagacctacctgtccaagacactggcccagtacacctccaagacatgcagcaactgtgggtttaccatcaccagcgccgactacgacagggtgctggagaagctgaagaagacagcaacaggctggatgaccacaattaacggcaaggagctgaaggtggagggccagattacctactacaacagatacaagagacagaacgtagtcaaggacctgtccgtcgagctggatagactgagcgaagaatctgtgaacaacgacatctcctcctggacaaagggcagaagcggagaagctctgagcctcctgaagaaaagattctcccatagacccgtgcaggagaagttcgtgtgcctgaactgcggcttcgagacacacgcagccgagcaagccgccctgaacatcgccagatcctggctgttcctgcggagccaggagtacaagaaataccagacaaacaagacaaccggcaacaccgataagagagccttcgtcgagacctggcagtccttttaccggaagaagcttaaggaggtgtggaaacctgccgtgcggtctggcggatctggcggaggctccaccagccccaagaaaaagagaaaagtctaagctgccttctgcggggcttgccttctggccatgcccttcttctctcccttgcacctgtacctcttggtctttgaataaagcctgagtaggaaggctagcaaaaaaaaaaaaaaaaaaaaaaaaaaaaaaaaaaaaaaaaaaaaaaaaaaaaaaaaaaaaaaaaaaaaaaaaaaaaaaaagcccagccggctccccaacctctaccgaggagggcacctctgagtccgccacccccgagagcggccctggcacctccaccgagcccagcgagggcagcgcacccggcagccctgccggcagccccacctccacagaggagggaaccagcaccgagcccagcgaaggcagcgccccaggcaccagcaccgagcctagtgagcaggagattaaacggatcaacaagatcagaagaagacttgtgaaagacagcaacaccaagaaggccggcaagacaggccccatgaaaaccctgctggttagagtgatgacacccgatctgagagagcggctggaaaacctgagaaagaagcctgaaaatatcccccagcccatcagcaatacatctagagccaacctgaataagctgctgaccgattacaccgaaatgaagaaggcgatcctgcatgtgtactgggaagagttccagaaggaccctgtgggcctgatgagccgggtggcccagcctgccagcaagaagatcgatcagaacaagctgaaacctgagatggacgagaagggcaacctgaccaccgccggctttgcctgctctcagtgtggccagcccctgttcgtgtacaagctggagcaggtgtctgagaagggcaaggcttacaccaactacttcggacggtgcaatgtggccgagcacgaaaagctgatcctgctggcccagctgaagcccgagaaggatagcgacgaagccgtgacatatagcctgggaaagtttgggcagagggccctggatttctacagcattcatgtgaccaaggagtccacccaccccgtgaagcccctggcccagatcgccggaaacagatacgcctccggacctgtgggaaaggccctgagcgacgcatgtatgggcacaatcgcctccttcctgtctaagtaccaggacatcatcatcgaacaccagaaggtggtgaagggcaaccagaagagactggagagcctgcgggagctggccggcaaggaaaacctggaataccctagcgtgaccctgccacctcagcctcacaccaaggagggcgttgatgcctacaacgaagtgatcgcccgggtgcgaatgtgggtgaacctgaacctgtggcagaagctgaagctaagcagagatgatgccaagcctctgctgagactgaagggattcccttcctttcctctggtcgagagacaggccaacgaagtggactggtgggacatggtgtgtaacgtgaagaagctgatcaacgagaaaaaggaggatggcaaggtgttttggcagaatctggctggctacaagagacaggaagccctgagaccatacctgagcagcgaggaagatcggaagaagggaaagaaattcgctcggtaccagctgggcgacctgctgctgcacctggaaaagaagcacggcgaggactggggaaaggtgtacgacgaggcctgggagcggattgacaagaaagtggaaggcctgagcaagcacatcaagctggaagaggaacggagaagcgaggacgcccagagcaaggccgccctgaccgactggctgcgggctaaggccagcttcgtgatcgagggcctgaaggaggccgacaaggacgagttctgcagatgcgagctgaagctgcagaagtggtacggggacctgcggggaaagcccttcgccatcgaagccgagaacagcatcctggacatcagcggcttcagcaagcagtacaactgtgccttcatctggcagaaggacggcgtgaagaagctgaacctgtacctgatcatcaactacttcaagggcggcaagctgcggttcaagaagatcaaacctgaagccttcgaagccaacagattctacaccgtgatcaacaaaaagagcggcgagatcgtgcccatggaggtgaacttcaacttcgacgaccccaacctgatcatcctgcctctggcctttggcaagagacagggcagagaattcatctggaacgacctgctgtccctggaaaccggcagcctgaagctggccaacggaagagtgatcgagaagacactgtacaacagaagaacccggcaggatgagcctgccctgttcgtggccctgaccttcgagcggcgggaggtcctggactcctccaatatcaaaccaatgaacctgatcggcgtggcaagaggcgaaaacatccccgccgtgatcgccctgaccgaccccgagggctgcccactgagccggtttaaggatagcctgggaaacccaacccacatcctgagaatcggcgagagctataaggagaagcagcggaccatccaggccaagaaggaggtggagcagcggagagccggcggctacagccggaagtacgccagcaaagccaagaatctggcagacgatatggtgagaaacaccgctagagatctgctgtactacgccgtgacccaggatgccatgctgatcttcgccaacctgagccggggcttcggccggcagggcaagcggaccttcatggccgagagacagtacacacggatggaggactggctgaccgccaagctggcctacgagggcctgagcaagacctacctgtccaagacactggcccagtacacctccaagacatgcagcaactgtgggtttaccatcaccagcgccgactacgacagggtgctggagaagctgaagaagacagcaacaggctggatgaccacaattaacggcaaggagctgaaggtggagggccagattacctactacaacagatacaagagacagaacgtagtcaaggacctgtccgtcgagctggatagactgagcgaagaatctgtgaacaacgacatctcctcctggacaaagggcagaagcggagaagctctgagcctcctgaagaaaagattctcccatagacccgtgcaggagaagttcgtgtgcctgaactgcggcttcgagacacacgcagccgagcaagccgccctgaacatcgccagatcctggctgttcctgcggagccaggagtacaagaaataccagacaaacaagacaaccggcaacaccgataagagagccttcgtcgagacctggcagtccttttaccggaagaagcttaaggaggtgtggaaacctgccgtgcggtctggcggatctggcggaggctccaccagccccaagaaaaagagaaaagtctaagctgccttctgcggggcttgccttctggccatgcccttcttctctcccttgcacctgtacctcttggtctttgaataaagcctgagtaggaaggctagcaaaaaaaaaaaaaaaaaaaaaaaaaaaaaaaaaaaaaaaaaaaaaaaaaaaaaaaaaaaaaaaaaaaaaaaaaaaaaaaa

SEQ ID NO: 9198 - RNA, 8787 nt, synthetic construct
  source 1..8787: mol_type = other RNA
aggaaataagagagaaaagaagagtaagaagaaatataagagccaccatggcccctaagaagaagcgtaaagtgagccggatgaaccacgaccaggagttcgacccccctaaggtgtaccctcccgtccccgccgagaagagaaagcccatccgggtcctgagcctgttcgatggcatcgccaccggtctgctggtgctgaaggacctgggcatccaggtggataggtacattgcctccgaggtgtgcgaggactccatcaccgtgggaatggtgcgtcatcagggcaagatcatgtacgtgggcgacgtgcggagcgtgacacagaagcatatccaggagtggggccctttcgacctggtgatcggcggcagcccttgcaatgacctgagcatcgtgaacccagcccggaagggcctgtacgagggaaccggcagactgttcttcgagttttacagactgctgcacgacgcccggcctaaggaaggcgacgaccggcccttcttttggctgttcgagaatgtggtggccatgggagtcagcgacaagcgggatattagccggttcctggagagcaaccccgtgatgatcgatgccaaggaagtgagcgccgcccaccgggccagatacttctggggcaatctgcctggcatgaacagacccctggccagcaccgtgaacgacaagctggagctgcaggagtgcctggagcacggccggatcgccaagttcagcaaggtgagaaccatcaccacccgaagcaacagcatcaaacaaggcaaggaccagcactttcctgtgttcatgaacgagaaggaggacatcctgtggtgtaccgagatggagagagtgttcgggttcccagtccactacacagatgtcagcaacatgtctagactggccagacagagactgctgggaagaagctggtccgtccctgtgatcagacacctgttcgcccctctgaaggagtacttcgcctgcgtgagcagcggcaacagcaacgccaacagccggggccccagcttctctagcggcctggtgccactgtccctgagagggagccacatgggccccatggagatctacaaaaccgtgagcgcctggaagcggcagcctgtgcgcgtgctgagcctgtttcggaatatcgataaagtcctgaaaagcctgggattcctggagagcggctctggctccggcggtggcaccctgaagtacgtggaggatgtgacaaacgtggtcagacgggatgtggagaagtggggccccttcgatctggtgtacggcagcacccaacccctgggcagctcttgtgaccggtgccctggctggtacatgtttcagttccaccggatcctgcagtacgccctgccgagacaggagtcccagcggccattcttttggattttcatggacaacttgctgctgaccgaggatgaccaggaaactaccactcggttcctgcagaccgaagccgtgaccctgcaggacgtgagaggccgggactaccagaacgccatgcgggtgtggtccaacatccctggactgaaaagcaagcacgcacctctgacccctaaagaagaggagtacctgcaggcccaggtgcggagcagaagcaagctggacgcccctaaggtggatctgctggtgaagaattgcctcctgcccctgagagagtacttcaagtatttcagccagaatagtctgcccctgggaggcagcggcggcggcagcgtggccttcgaggacgtggccgtgaacttcacccaggaggagtgggccctgctgagccccagccagaagaacctgtacagggacgtgatgctggagaccttcaggaacctggccagcgtgggcatccagtggaaggaccagaacatcgagaacctgtaccagaacctgggcatcaagctgaggagcctggtggagaggctgtgcggcccccaggagggcagcgagcacagggagaccttcggcggcccaagcagcggcgcccctcctcccagcggcggcaggcggcccaagcagcggcgcccctcctcccagcggcggcagcccagccggctccccaacctctaccgaggagggcacctctgagtccgccacccccgagagcggccctggcacctccaccgagcccagcgagggcagcgcacccggcagccctgccggcagccccacctccacagaggagggaaccagcaccgagcccagcgaaggcagcgccccaggcaccagcaccgagcctagtgagcaggagattaaacggatcaacaagatcagaagaagacttgtgaaagacagcaacaccaagaaggccggcaagacaggccccatgaaaaccctgctggttagagtgatgacacccgatctgagagagcggctggaaaacctgagaaagaagcctgaaaatatcccccagcccatcagcaatacatctagagccaacctgaataagctgctgaccgattacaccgaaatgaagaaggcgatcctgcatgtgtactgggaagagttccagaaggaccctgtgggcctgatgagccgggtggcccagcctgccagcaagaagatcgatcagaacaagctgaaacctgagatggacgagaagggcaacctgaccaccgccggctttgcctgctctcagtgtggccagcccctgttcgtgtacaagctggagcaggtgtctgagaagggcaaggcttacaccaactacttcggacggtgcaatgtggccgagcacgaaaagctgatcctgctggcccagctgaagcccgagaaggatagcgacgaagccgtgacatatagcctgggaaagtttgggcagagggccctggatttctacagcattcatgtgaccaaggagtccacccaccccgtgaagcccctggcccagatcgccggaaacagatacgcctccggacctgtgggaaaggccctgagcgacgcatgtatgggcacaatcgcctccttcctgtctaagtaccaggacatcatcatcgaacaccagaaggtggtgaagggcaaccagaagagactggagagcctgcgggagctggccggcaaggaaaacctggaataccctagcgtgaccctgccacctcagcctcacaccaaggagggcgttgatgcctacaacgaagtgatcgcccgggtgcgaatgtgggtgaacctgaacctgtggcagaagctgaagctaagcagagatgatgccaagcctctgctgagactgaagggattcccttcctttcctctggtcgagagacaggccaacgaagtggactggtgggacatggtgtgtaacgtgaagaagctgatcaacgagaaaaaggaggatggcaaggtgttttggcagaatctggctggctacaagagacaggaagccctgagaccatacctgagcagcgaggaagatcggaagaagggaaagaaattcgctcggtaccagctgggcgacctgctgctgcacctggaaaagaagcacggcgaggactggggaaaggtgtacgacgaggcctgggagcggattgacaagaaagtggaaggcctgagcaagcacatcaagctggaagaggaacggagaagcgaggacgcccagagcaaggccgccctgaccgactggctgcgggctaaggccagcttcgtgatcgagggcctgaaggaggccgacaaggacgagttctgcagatgcgagctgaagctgcagaagtggtacggggacctgcggggaaagcccttcgccatcgaagccgagaacagcatcctggacatcagcggcttcagcaagcagtacaactgtgccttcatctggcagaaggacggcgtgaagaagctgaacctgtacctgatcatcaactacttcaagggcggcaagctgcggttcaagaagatcaaacctgaagccttcgaagccaacagattctacaccgtgatcaacaaaaagagcggcgagatcgtgcccatggaggtgaacttcaacttcgacgaccccaacctgatcatcctgcctctggcctttggcaagagacagggcagagaattcatctggaacgacctgctgtccctggaaaccggcagcctgaagctggccaacggaagagtgatcgagaagacactgtacaacagaagaacccggcaggatgagcctgccctgttcgtggccctgaccttcgagcggcgggaggtcctggactcctccaatatcaaaccaatgaacctgatcggcgtggcaagaggcgaaaacatccccgccgtgatcgccctgaccgaccccgagggctgcccactgagccggtttaaggatagcctgggaaacccaacccacatcctgagaatcggcgagagctataaggagaagcagcggaccatccaggccaagaaggaggtggagcagcggagagccggcggctacagccggaagtacgccagcaaagccaagaatctggcagacgatatggtgagaaacaccgctagagatctgctgtactacgccgtgacccaggatgccatgctgatcttcgccaacctgagccggggcttcggccggcagggcaagcggaccttcatggccgagagacagtacacacggatggaggactggctgaccgccaagctggcctacgagggcctgagcaagacctacctgtccaagacactggcccagtacacctccaagacatgcagcaactgtgggtttaccatcaccagcgccgactacgacagggtgctggagaagctgaagaagacagcaacaggctggatgaccacaattaacggcaaggagctgaaggtggagggccagattacctactacaacagatacaagagacagaacgtagtcaaggacctgtccgtcgagctggatagactgagcgaagaatctgtgaacaacgacatctcctcctggacaaagggcagaagcggagaagctctgagcctcctgaagaaaagattctcccatagacccgtgcaggagaagttcgtgtgcctgaactgcggcttcgagacacacgcagccgagcaagccgccctgaacatcgccagatcctggctgttcctgcggagccaggagtacaagaaataccagacaaacaagacaaccggcaacaccgataagagagccttcgtcgagacctggcagtccttttaccggaagaagcttaaggaggtgtggaaacctgccgtgcggtctggcggatctggcggaggctccaccagccccaagaaaaagagaaaagtctaagctgccttctgcggggcttgccttctggccatgcccttcttctctcccttgcacctgtacctcttggtctttgaataaagcctgagtaggaaggctagcaaaaaaaaaaaaaaaaaaaaaaaaaaaaaaaaaaaaaaaaaaaaaaaaaaaaaaaaaaaaaaaaaaaaaaaaaaaaaaaagcccagccggctccccaacctctaccgaggagggcacctctgagtccgccacccccgagagcggccctggcacctccaccgagcccagcgagggcagcgcacccggcagccctgccggcagccccacctccacagaggagggaaccagcaccgagcccagcgaaggcagcgccccaggcaccagcaccgagcctagtgagcaggagattaaacggatcaacaagatcagaagaagacttgtgaaagacagcaacaccaagaaggccggcaagacaggccccatgaaaaccctgctggttagagtgatgacacccgatctgagagagcggctggaaaacctgagaaagaagcctgaaaatatcccccagcccatcagcaatacatctagagccaacctgaataagctgctgaccgattacaccgaaatgaagaaggcgatcctgcatgtgtactgggaagagttccagaaggaccctgtgggcctgatgagccgggtggcccagcctgccagcaagaagatcgatcagaacaagctgaaacctgagatggacgagaagggcaacctgaccaccgccggctttgcctgctctcagtgtggccagcccctgttcgtgtacaagctggagcaggtgtctgagaagggcaaggcttacaccaactacttcggacggtgcaatgtggccgagcacgaaaagctgatcctgctggcccagctgaagcccgagaaggatagcgacgaagccgtgacatatagcctgggaaagtttgggcagagggccctggatttctacagcattcatgtgaccaaggagtccacccaccccgtgaagcccctggcccagatcgccggaaacagatacgcctccggacctgtgggaaaggccctgagcgacgcatgtatgggcacaatcgcctccttcctgtctaagtaccaggacatcatcatcgaacaccagaaggtggtgaagggcaaccagaagagactggagagcctgcgggagctggccggcaaggaaaacctggaataccctagcgtgaccctgccacctcagcctcacaccaaggagggcgttgatgcctacaacgaagtgatcgcccgggtgcgaatgtgggtgaacctgaacctgtggcagaagctgaagctaagcagagatgatgccaagcctctgctgagactgaagggattcccttcctttcctctggtcgagagacaggccaacgaagtggactggtgggacatggtgtgtaacgtgaagaagctgatcaacgagaaaaaggaggatggcaaggtgttttggcagaatctggctggctacaagagacaggaagccctgagaccatacctgagcagcgaggaagatcggaagaagggaaagaaattcgctcggtaccagctgggcgacctgctgctgcacctggaaaagaagcacggcgaggactggggaaaggtgtacgacgaggcctgggagcggattgacaagaaagtggaaggcctgagcaagcacatcaagctggaagaggaacggagaagcgaggacgcccagagcaaggccgccctgaccgactggctgcgggctaaggccagcttcgtgatcgagggcctgaaggaggccgacaaggacgagttctgcagatgcgagctgaagctgcagaagtggtacggggacctgcggggaaagcccttcgccatcgaagccgagaacagcatcctggacatcagcggcttcagcaagcagtacaactgtgccttcatctggcagaaggacggcgtgaagaagctgaacctgtacctgatcatcaactacttcaagggcggcaagctgcggttcaagaagatcaaacctgaagccttcgaagccaacagattctacaccgtgatcaacaaaaagagcggcgagatcgtgcccatggaggtgaacttcaacttcgacgaccccaacctgatcatcctgcctctggcctttggcaagagacagggcagagaattcatctggaacgacctgctgtccctggaaaccggcagcctgaagctggccaacggaagagtgatcgagaagacactgtacaacagaagaacccggcaggatgagcctgccctgttcgtggccctgaccttcgagcggcgggaggtcctggactcctccaatatcaaaccaatgaacctgatcggcgtggcaagaggcgaaaacatccccgccgtgatcgccctgaccgaccccgagggctgcccactgagccggtttaaggatagcctgggaaacccaacccacatcctgagaatcggcgagagctataaggagaagcagcggaccatccaggccaagaaggaggtggagcagcggagagccggcggctacagccggaagtacgccagcaaagccaagaatctggcagacgatatggtgagaaacaccgctagagatctgctgtactacgccgtgacccaggatgccatgctgatcttcgccaacctgagccggggcttcggccggcagggcaagcggaccttcatggccgagagacagtacacacggatggaggactggctgaccgccaagctggcctacgagggcctgagcaagacctacctgtccaagacactggcccagtacacctccaagacatgcagcaactgtgggtttaccatcaccagcgccgactacgacagggtgctggagaagctgaagaagacagcaacaggctggatgaccacaattaacggcaaggagctgaaggtggagggccagattacctactacaacagatacaagagacagaacgtagtcaaggacctgtccgtcgagctggatagactgagcgaagaatctgtgaacaacgacatctcctcctggacaaagggcagaagcggagaagctctgagcctcctgaagaaaagattctcccatagacccgtgcaggagaagttcgtgtgcctgaactgcggcttcgagacacacgcagccgagcaagccgccctgaacatcgccagatcctggctgttcctgcggagccaggagtacaagaaataccagacaaacaagacaaccggcaacaccgataagagagccttcgtcgagacctggcagtccttttaccggaagaagcttaaggaggtgtggaaacctgccgtgcggtctggcggatctggcggaggctccaccagccccaagaaaaagagaaaagtctaagctgccttctgcggggcttgccttctggccatgcccttcttctctcccttgcacctgtacctcttggtctttgaataaagcctgagtaggaaggctagcaaaaaaaaaaaaaaaaaaaaaaaaaaaaaaaaaaaaaaaaaaaaaaaaaaaaaaaaaaaaaaaaaaaaaaaaaaaaaaaa

SEQ ID NO: 9199 - RNA, 8787 nt, synthetic construct
  source 1..8787: mol_type = other RNA
aggaaataagagagaaaagaagagtaagaagaaatataagagccaccatggcccctaagaagaagcgtaaagtgagccggatgaaccacgaccaggagttcgacccccctaaggtgtaccctcccgtccccgccgagaagagaaagcccatccgggtcctgagcctgttcgatggcatcgccaccggtctgctggtgctgaaggacctgggcatccaggtggataggtacattgcctccgaggtgtgcgaggactccatcaccgtgggaatggtgcgtcatcagggcaagatcatgtacgtgggcgacgtgcggagcgtgacacagaagcatatccaggagtggggccctttcgacctggtgatcggcggcagcccttgcaatgacctgagcatcgtgaacccagcccggaagggcctgtacgagggaaccggcagactgttcttcgagttttacagactgctgcacgacgcccggcctaaggaaggcgacgaccggcccttcttttggctgttcgagaatgtggtggccatgggagtcagcgacaagcgggatattagccggttcctggagagcaaccccgtgatgatcgatgccaaggaagtgagcgccgcccaccgggccagatacttctggggcaatctgcctggcatgaacagacccctggccagcaccgtgaacgacaagctggagctgcaggagtgcctggagcacggccggatcgccaagttcagcaaggtgagaaccatcaccacccgaagcaacagcatcaaacaaggcaaggaccagcactttcctgtgttcatgaacgagaaggaggacatcctgtggtgtaccgagatggagagagtgttcgggttcccagtccactacacagatgtcagcaacatgtctagactggccagacagagactgctgggaagaagctggtccgtccctgtgatcagacacctgttcgcccctctgaaggagtacttcgcctgcgtgagcagcggcaacagcaacgccaacagccggggccccagcttctctagcggcctggtgccactgtccctgagagggagccacatgggccccatggagatctacaaaaccgtgagcgcctggaagcggcagcctgtgcgcgtgctgagcctgtttcggaatatcgataaagtcctgaaaagcctgggattcctggagagcggctctggctccggcggtggcaccctgaagtacgtggaggatgtgacaaacgtggtcagacgggatgtggagaagtggggccccttcgatctggtgtacggcagcacccaacccctgggcagctcttgtgaccggtgccctggctggtacatgtttcagttccaccggatcctgcagtacgccctgccgagacaggagtcccagcggccattcttttggattttcatggacaacttgctgctgaccgaggatgaccaggaaactaccactcggttcctgcagaccgaagccgtgaccctgcaggacgtgagaggccgggactaccagaacgccatgcgggtgtggtccaacatccctggactgaaaagcaagcacgcacctctgacccctaaagaagaggagtacctgcaggcccaggtgcggagcagaagcaagctggacgcccctaaggtggatctgctggtgaagaattgcctcctgcccctgagagagtacttcaagtatttcagccagaatagtctgcccctgggaggcagcggcggcggcagccagagcctggtgaccttcggcgacgtggccgtggagttcagccccgaggagtgggcctggctggacagcgcccagaggagcctgtacaggagcgtgatgctggagaactacaggagcctggtgagcctgggcctgtgcgtgagcaagcccaagatgatcagcagcctggagcagaggaaggagccctgggccgccaagaggaccctgaccaggggcggctgccccgacagcagggccctgggcggcccaagcagcggcgcccctcctcccagcggcggcaggcggcccaagcagcggcgcccctcctcccagcggcggcagcccagccggctccccaacctctaccgaggagggcacctctgagtccgccacccccgagagcggccctggcacctccaccgagcccagcgagggcagcgcacccggcagccctgccggcagccccacctccacagaggagggaaccagcaccgagcccagcgaaggcagcgccccaggcaccagcaccgagcctagtgagcaggagattaaacggatcaacaagatcagaagaagacttgtgaaagacagcaacaccaagaaggccggcaagacaggccccatgaaaaccctgctggttagagtgatgacacccgatctgagagagcggctggaaaacctgagaaagaagcctgaaaatatcccccagcccatcagcaatacatctagagccaacctgaataagctgctgaccgattacaccgaaatgaagaaggcgatcctgcatgtgtactgggaagagttccagaaggaccctgtgggcctgatgagccgggtggcccagcctgccagcaagaagatcgatcagaacaagctgaaacctgagatggacgagaagggcaacctgaccaccgccggctttgcctgctctcagtgtggccagcccctgttcgtgtacaagctggagcaggtgtctgagaagggcaaggcttacaccaactacttcggacggtgcaatgtggccgagcacgaaaagctgatcctgctggcccagctgaagcccgagaaggatagcgacgaagccgtgacatatagcctgggaaagtttgggcagagggccctggatttctacagcattcatgtgaccaaggagtccacccaccccgtgaagcccctggcccagatcgccggaaacagatacgcctccggacctgtgggaaaggccctgagcgacgcatgtatgggcacaatcgcctccttcctgtctaagtaccaggacatcatcatcgaacaccagaaggtggtgaagggcaaccagaagagactggagagcctgcgggagctggccggcaaggaaaacctggaataccctagcgtgaccctgccacctcagcctcacaccaaggagggcgttgatgcctacaacgaagtgatcgcccgggtgcgaatgtgggtgaacctgaacctgtggcagaagctgaagctaagcagagatgatgccaagcctctgctgagactgaagggattcccttcctttcctctggtcgagagacaggccaacgaagtggactggtgggacatggtgtgtaacgtgaagaagctgatcaacgagaaaaaggaggatggcaaggtgttttggcagaatctggctggctacaagagacaggaagccctgagaccatacctgagcagcgaggaagatcggaagaagggaaagaaattcgctcggtaccagctgggcgacctgctgctgcacctggaaaagaagcacggcgaggactggggaaaggtgtacgacgaggcctgggagcggattgacaagaaagtggaaggcctgagcaagcacatcaagctggaagaggaacggagaagcgaggacgcccagagcaaggccgccctgaccgactggctgcgggctaaggccagcttcgtgatcgagggcctgaaggaggccgacaaggacgagttctgcagatgcgagctgaagctgcagaagtggtacggggacctgcggggaaagcccttcgccatcgaagccgagaacagcatcctggacatcagcggcttcagcaagcagtacaactgtgccttcatctggcagaaggacggcgtgaagaagctgaacctgtacctgatcatcaactacttcaagggcggcaagctgcggttcaagaagatcaaacctgaagccttcgaagccaacagattctacaccgtgatcaacaaaaagagcggcgagatcgtgcccatggaggtgaacttcaacttcgacgaccccaacctgatcatcctgcctctggcctttggcaagagacagggcagagaattcatctggaacgacctgctgtccctggaaaccggcagcctgaagctggccaacggaagagtgatcgagaagacactgtacaacagaagaacccggcaggatgagcctgccctgttcgtggccctgaccttcgagcggcgggaggtcctggactcctccaatatcaaaccaatgaacctgatcggcgtggcaagaggcgaaaacatccccgccgtgatcgccctgaccgaccccgagggctgcccactgagccggtttaaggatagcctgggaaacccaacccacatcctgagaatcggcgagagctataaggagaagcagcggaccatccaggccaagaaggaggtggagcagcggagagccggcggctacagccggaagtacgccagcaaagccaagaatctggcagacgatatggtgagaaacaccgctagagatctgctgtactacgccgtgacccaggatgccatgctgatcttcgccaacctgagccggggcttcggccggcagggcaagcggaccttcatggccgagagacagtacacacggatggaggactggctgaccgccaagctggcctacgagggcctgagcaagacctacctgtccaagacactggcccagtacacctccaagacatgcagcaactgtgggtttaccatcaccagcgccgactacgacagggtgctggagaagctgaagaagacagcaacaggctggatgaccacaattaacggcaaggagctgaaggtggagggccagattacctactacaacagatacaagagacagaacgtagtcaaggacctgtccgtcgagctggatagactgagcgaagaatctgtgaacaacgacatctcctcctggacaaagggcagaagcggagaagctctgagcctcctgaagaaaagattctcccatagacccgtgcaggagaagttcgtgtgcctgaactgcggcttcgagacacacgcagccgagcaagccgccctgaacatcgccagatcctggctgttcctgcggagccaggagtacaagaaataccagacaaacaagacaaccggcaacaccgataagagagccttcgtcgagacctggcagtccttttaccggaagaagcttaaggaggtgtggaaacctgccgtgcggtctggcggatctggcggaggctccaccagccccaagaaaaagagaaaagtctaagctgccttctgcggggcttgccttctggccatgcccttcttctctcccttgcacctgtacctcttggtctttgaataaagcctgagtaggaaggctagcaaaaaaaaaaaaaaaaaaaaaaaaaaaaaaaaaaaaaaaaaaaaaaaaaaaaaaaaaaaaaaaaaaaaaaaaaaaaaaaagcccagccggctccccaacctctaccgaggagggcacctctgagtccgccacccccgagagcggccctggcacctccaccgagcccagcgagggcagcgcacccggcagccctgccggcagccccacctccacagaggagggaaccagcaccgagcccagcgaaggcagcgccccaggcaccagcaccgagcctagtgagcaggagattaaacggatcaacaagatcagaagaagacttgtgaaagacagcaacaccaagaaggccggcaagacaggccccatgaaaaccctgctggttagagtgatgacacccgatctgagagagcggctggaaaacctgagaaagaagcctgaaaatatcccccagcccatcagcaatacatctagagccaacctgaataagctgctgaccgattacaccgaaatgaagaaggcgatcctgcatgtgtactgggaagagttccagaaggaccctgtgggcctgatgagccgggtggcccagcctgccagcaagaagatcgatcagaacaagctgaaacctgagatggacgagaagggcaacctgaccaccgccggctttgcctgctctcagtgtggccagcccctgttcgtgtacaagctggagcaggtgtctgagaagggcaaggcttacaccaactacttcggacggtgcaatgtggccgagcacgaaaagctgatcctgctggcccagctgaagcccgagaaggatagcgacgaagccgtgacatatagcctgggaaagtttgggcagagggccctggatttctacagcattcatgtgaccaaggagtccacccaccccgtgaagcccctggcccagatcgccggaaacagatacgcctccggacctgtgggaaaggccctgagcgacgcatgtatgggcacaatcgcctccttcctgtctaagtaccaggacatcatcatcgaacaccagaaggtggtgaagggcaaccagaagagactggagagcctgcgggagctggccggcaaggaaaacctggaataccctagcgtgaccctgccacctcagcctcacaccaaggagggcgttgatgcctacaacgaagtgatcgcccgggtgcgaatgtgggtgaacctgaacctgtggcagaagctgaagctaagcagagatgatgccaagcctctgctgagactgaagggattcccttcctttcctctggtcgagagacaggccaacgaagtggactggtgggacatggtgtgtaacgtgaagaagctgatcaacgagaaaaaggaggatggcaaggtgttttggcagaatctggctggctacaagagacaggaagccctgagaccatacctgagcagcgaggaagatcggaagaagggaaagaaattcgctcggtaccagctgggcgacctgctgctgcacctggaaaagaagcacggcgaggactggggaaaggtgtacgacgaggcctgggagcggattgacaagaaagtggaaggcctgagcaagcacatcaagctggaagaggaacggagaagcgaggacgcccagagcaaggccgccctgaccgactggctgcgggctaaggccagcttcgtgatcgagggcctgaaggaggccgacaaggacgagttctgcagatgcgagctgaagctgcagaagtggtacggggacctgcggggaaagcccttcgccatcgaagccgagaacagcatcctggacatcagcggcttcagcaagcagtacaactgtgccttcatctggcagaaggacggcgtgaagaagctgaacctgtacctgatcatcaactacttcaagggcggcaagctgcggttcaagaagatcaaacctgaagccttcgaagccaacagattctacaccgtgatcaacaaaaagagcggcgagatcgtgcccatggaggtgaacttcaacttcgacgaccccaacctgatcatcctgcctctggcctttggcaagagacagggcagagaattcatctggaacgacctgctgtccctggaaaccggcagcctgaagctggccaacggaagagtgatcgagaagacactgtacaacagaagaacccggcaggatgagcctgccctgttcgtggccctgaccttcgagcggcgggaggtcctggactcctccaatatcaaaccaatgaacctgatcggcgtggcaagaggcgaaaacatccccgccgtgatcgccctgaccgaccccgagggctgcccactgagccggtttaaggatagcctgggaaacccaacccacatcctgagaatcggcgagagctataaggagaagcagcggaccatccaggccaagaaggaggtggagcagcggagagccggcggctacagccggaagtacgccagcaaagccaagaatctggcagacgatatggtgagaaacaccgctagagatctgctgtactacgccgtgacccaggatgccatgctgatcttcgccaacctgagccggggcttcggccggcagggcaagcggaccttcatggccgagagacagtacacacggatggaggactggctgaccgccaagctggcctacgagggcctgagcaagacctacctgtccaagacactggcccagtacacctccaagacatgcagcaactgtgggtttaccatcaccagcgccgactacgacagggtgctggagaagctgaagaagacagcaacaggctggatgaccacaattaacggcaaggagctgaaggtggagggccagattacctactacaacagatacaagagacagaacgtagtcaaggacctgtccgtcgagctggatagactgagcgaagaatctgtgaacaacgacatctcctcctggacaaagggcagaagcggagaagctctgagcctcctgaagaaaagattctcccatagacccgtgcaggagaagttcgtgtgcctgaactgcggcttcgagacacacgcagccgagcaagccgccctgaacatcgccagatcctggctgttcctgcggagccaggagtacaagaaataccagacaaacaagacaaccggcaacaccgataagagagccttcgtcgagacctggcagtccttttaccggaagaagcttaaggaggtgtggaaacctgccgtgcggtctggcggatctggcggaggctccaccagccccaagaaaaagagaaaagtctaagctgccttctgcggggcttgccttctggccatgcccttcttctctcccttgcacctgtacctcttggtctttgaataaagcctgagtaggaaggctagcaaaaaaaaaaaaaaaaaaaaaaaaaaaaaaaaaaaaaaaaaaaaaaaaaaaaaaaaaaaaaaaaaaaaaaaaaaaaaaaa

SEQ ID NO: 9200 - RNA, 8787 nt, synthetic construct
  source 1..8787: mol_type = other RNA
aggaaataagagagaaaagaagagtaagaagaaatataagagccaccatggcccctaagaagaagcgtaaagtgagccggatgaaccacgaccaggagttcgacccccctaaggtgtaccctcccgtccccgccgagaagagaaagcccatccgggtcctgagcctgttcgatggcatcgccaccggtctgctggtgctgaaggacctgggcatccaggtggataggtacattgcctccgaggtgtgcgaggactccatcaccgtgggaatggtgcgtcatcagggcaagatcatgtacgtgggcgacgtgcggagcgtgacacagaagcatatccaggagtggggccctttcgacctggtgatcggcggcagcccttgcaatgacctgagcatcgtgaacccagcccggaagggcctgtacgagggaaccggcagactgttcttcgagttttacagactgctgcacgacgcccggcctaaggaaggcgacgaccggcccttcttttggctgttcgagaatgtggtggccatgggagtcagcgacaagcgggatattagccggttcctggagagcaaccccgtgatgatcgatgccaaggaagtgagcgccgcccaccgggccagatacttctggggcaatctgcctggcatgaacagacccctggccagcaccgtgaacgacaagctggagctgcaggagtgcctggagcacggccggatcgccaagttcagcaaggtgagaaccatcaccacccgaagcaacagcatcaaacaaggcaaggaccagcactttcctgtgttcatgaacgagaaggaggacatcctgtggtgtaccgagatggagagagtgttcgggttcccagtccactacacagatgtcagcaacatgtctagactggccagacagagactgctgggaagaagctggtccgtccctgtgatcagacacctgttcgcccctctgaaggagtacttcgcctgcgtgagcagcggcaacagcaacgccaacagccggggccccagcttctctagcggcctggtgccactgtccctgagagggagccacatgggccccatggagatctacaaaaccgtgagcgcctggaagcggcagcctgtgcgcgtgctgagcctgtttcggaatatcgataaagtcctgaaaagcctgggattcctggagagcggctctggctccggcggtggcaccctgaagtacgtggaggatgtgacaaacgtggtcagacgggatgtggagaagtggggccccttcgatctggtgtacggcagcacccaacccctgggcagctcttgtgaccggtgccctggctggtacatgtttcagttccaccggatcctgcagtacgccctgccgagacaggagtcccagcggccattcttttggattttcatggacaacttgctgctgaccgaggatgaccaggaaactaccactcggttcctgcagaccgaagccgtgaccctgcaggacgtgagaggccgggactaccagaacgccatgcgggtgtggtccaacatccctggactgaaaagcaagcacgcacctctgacccctaaagaagaggagtacctgcaggcccaggtgcggagcagaagcaagctggacgcccctaaggtggatctgctggtgaagaattgcctcctgcccctgagagagtacttcaagtatttcagccagaatagtctgcccctgggaggcagcggcggcggcgagcaggtgaccttcaaggacgtggccatcgagttcagcaagaccgagtggaagaggctggaccccgcccagagggccctgtacagggaggtgatgctggagaactacaggaacctggtgagcgtgggcaccagcccccccgacgtgaccgtgatcagcatgctggagcagggcgaggagccctggaccgccgagagcagggtgcagaggcccgaggtgcccggcggcagggagtggacccagggcggcccaagcagcggcgcccctcctcccagcggcggcaggcggcccaagcagcggcgcccctcctcccagcggcggcagcccagccggctccccaacctctaccgaggagggcacctctgagtccgccacccccgagagcggccctggcacctccaccgagcccagcgagggcagcgcacccggcagccctgccggcagccccacctccacagaggagggaaccagcaccgagcccagcgaaggcagcgccccaggcaccagcaccgagcctagtgagcaggagattaaacggatcaacaagatcagaagaagacttgtgaaagacagcaacaccaagaaggccggcaagacaggccccatgaaaaccctgctggttagagtgatgacacccgatctgagagagcggctggaaaacctgagaaagaagcctgaaaatatcccccagcccatcagcaatacatctagagccaacctgaataagctgctgaccgattacaccgaaatgaagaaggcgatcctgcatgtgtactgggaagagttccagaaggaccctgtgggcctgatgagccgggtggcccagcctgccagcaagaagatcgatcagaacaagctgaaacctgagatggacgagaagggcaacctgaccaccgccggctttgcctgctctcagtgtggccagcccctgttcgtgtacaagctggagcaggtgtctgagaagggcaaggcttacaccaactacttcggacggtgcaatgtggccgagcacgaaaagctgatcctgctggcccagctgaagcccgagaaggatagcgacgaagccgtgacatatagcctgggaaagtttgggcagagggccctggatttctacagcattcatgtgaccaaggagtccacccaccccgtgaagcccctggcccagatcgccggaaacagatacgcctccggacctgtgggaaaggccctgagcgacgcatgtatgggcacaatcgcctccttcctgtctaagtaccaggacatcatcatcgaacaccagaaggtggtgaagggcaaccagaagagactggagagcctgcgggagctggccggcaaggaaaacctggaataccctagcgtgaccctgccacctcagcctcacaccaaggagggcgttgatgcctacaacgaagtgatcgcccgggtgcgaatgtgggtgaacctgaacctgtggcagaagctgaagctaagcagagatgatgccaagcctctgctgagactgaagggattcccttcctttcctctggtcgagagacaggccaacgaagtggactggtgggacatggtgtgtaacgtgaagaagctgatcaacgagaaaaaggaggatggcaaggtgttttggcagaatctggctggctacaagagacaggaagccctgagaccatacctgagcagcgaggaagatcggaagaagggaaagaaattcgctcggtaccagctgggcgacctgctgctgcacctggaaaagaagcacggcgaggactggggaaaggtgtacgacgaggcctgggagcggattgacaagaaagtggaaggcctgagcaagcacatcaagctggaagaggaacggagaagcgaggacgcccagagcaaggccgccctgaccgactggctgcgggctaaggccagcttcgtgatcgagggcctgaaggaggccgacaaggacgagttctgcagatgcgagctgaagctgcagaagtggtacggggacctgcggggaaagcccttcgccatcgaagccgagaacagcatcctggacatcagcggcttcagcaagcagtacaactgtgccttcatctggcagaaggacggcgtgaagaagctgaacctgtacctgatcatcaactacttcaagggcggcaagctgcggttcaagaagatcaaacctgaagccttcgaagccaacagattctacaccgtgatcaacaaaaagagcggcgagatcgtgcccatggaggtgaacttcaacttcgacgaccccaacctgatcatcctgcctctggcctttggcaagagacagggcagagaattcatctggaacgacctgctgtccctggaaaccggcagcctgaagctggccaacggaagagtgatcgagaagacactgtacaacagaagaacccggcaggatgagcctgccctgttcgtggccctgaccttcgagcggcgggaggtcctggactcctccaatatcaaaccaatgaacctgatcggcgtggcaagaggcgaaaacatccccgccgtgatcgccctgaccgaccccgagggctgcccactgagccggtttaaggatagcctgggaaacccaacccacatcctgagaatcggcgagagctataaggagaagcagcggaccatccaggccaagaaggaggtggagcagcggagagccggcggctacagccggaagtacgccagcaaagccaagaatctggcagacgatatggtgagaaacaccgctagagatctgctgtactacgccgtgacccaggatgccatgctgatcttcgccaacctgagccggggcttcggccggcagggcaagcggaccttcatggccgagagacagtacacacggatggaggactggctgaccgccaagctggcctacgagggcctgagcaagacctacctgtccaagacactggcccagtacacctccaagacatgcagcaactgtgggtttaccatcaccagcgccgactacgacagggtgctggagaagctgaagaagacagcaacaggctggatgaccacaattaacggcaaggagctgaaggtggagggccagattacctactacaacagatacaagagacagaacgtagtcaaggacctgtccgtcgagctggatagactgagcgaagaatctgtgaacaacgacatctcctcctggacaaagggcagaagcggagaagctctgagcctcctgaagaaaagattctcccatagacccgtgcaggagaagttcgtgtgcctgaactgcggcttcgagacacacgcagccgagcaagccgccctgaacatcgccagatcctggctgttcctgcggagccaggagtacaagaaataccagacaaacaagacaaccggcaacaccgataagagagccttcgtcgagacctggcagtccttttaccggaagaagcttaaggaggtgtggaaacctgccgtgcggtctggcggatctggcggaggctccaccagccccaagaaaaagagaaaagtctaagctgccttctgcggggcttgccttctggccatgcccttcttctctcccttgcacctgtacctcttggtctttgaataaagcctgagtaggaaggctagcaaaaaaaaaaaaaaaaaaaaaaaaaaaaaaaaaaaaaaaaaaaaaaaaaaaaaaaaaaaaaaaaaaaaaaaaaaaaaaaagcccagccggctccccaacctctaccgaggagggcacctctgagtccgccacccccgagagcggccctggcacctccaccgagcccagcgagggcagcgcacccggcagccctgccggcagccccacctccacagaggagggaaccagcaccgagcccagcgaaggcagcgccccaggcaccagcaccgagcctagtgagcaggagattaaacggatcaacaagatcagaagaagacttgtgaaagacagcaacaccaagaaggccggcaagacaggccccatgaaaaccctgctggttagagtgatgacacccgatctgagagagcggctggaaaacctgagaaagaagcctgaaaatatcccccagcccatcagcaatacatctagagccaacctgaataagctgctgaccgattacaccgaaatgaagaaggcgatcctgcatgtgtactgggaagagttccagaaggaccctgtgggcctgatgagccgggtggcccagcctgccagcaagaagatcgatcagaacaagctgaaacctgagatggacgagaagggcaacctgaccaccgccggctttgcctgctctcagtgtggccagcccctgttcgtgtacaagctggagcaggtgtctgagaagggcaaggcttacaccaactacttcggacggtgcaatgtggccgagcacgaaaagctgatcctgctggcccagctgaagcccgagaaggatagcgacgaagccgtgacatatagcctgggaaagtttgggcagagggccctggatttctacagcattcatgtgaccaaggagtccacccaccccgtgaagcccctggcccagatcgccggaaacagatacgcctccggacctgtgggaaaggccctgagcgacgcatgtatgggcacaatcgcctccttcctgtctaagtaccaggacatcatcatcgaacaccagaaggtggtgaagggcaaccagaagagactggagagcctgcgggagctggccggcaaggaaaacctggaataccctagcgtgaccctgccacctcagcctcacaccaaggagggcgttgatgcctacaacgaagtgatcgcccgggtgcgaatgtgggtgaacctgaacctgtggcagaagctgaagctaagcagagatgatgccaagcctctgctgagactgaagggattcccttcctttcctctggtcgagagacaggccaacgaagtggactggtgggacatggtgtgtaacgtgaagaagctgatcaacgagaaaaaggaggatggcaaggtgttttggcagaatctggctggctacaagagacaggaagccctgagaccatacctgagcagcgaggaagatcggaagaagggaaagaaattcgctcggtaccagctgggcgacctgctgctgcacctggaaaagaagcacggcgaggactggggaaaggtgtacgacgaggcctgggagcggattgacaagaaagtggaaggcctgagcaagcacatcaagctggaagaggaacggagaagcgaggacgcccagagcaaggccgccctgaccgactggctgcgggctaaggccagcttcgtgatcgagggcctgaaggaggccgacaaggacgagttctgcagatgcgagctgaagctgcagaagtggtacggggacctgcggggaaagcccttcgccatcgaagccgagaacagcatcctggacatcagcggcttcagcaagcagtacaactgtgccttcatctggcagaaggacggcgtgaagaagctgaacctgtacctgatcatcaactacttcaagggcggcaagctgcggttcaagaagatcaaacctgaagccttcgaagccaacagattctacaccgtgatcaacaaaaagagcggcgagatcgtgcccatggaggtgaacttcaacttcgacgaccccaacctgatcatcctgcctctggcctttggcaagagacagggcagagaattcatctggaacgacctgctgtccctggaaaccggcagcctgaagctggccaacggaagagtgatcgagaagacactgtacaacagaagaacccggcaggatgagcctgccctgttcgtggccctgaccttcgagcggcgggaggtcctggactcctccaatatcaaaccaatgaacctgatcggcgtggcaagaggcgaaaacatccccgccgtgatcgccctgaccgaccccgagggctgcccactgagccggtttaaggatagcctgggaaacccaacccacatcctgagaatcggcgagagctataaggagaagcagcggaccatccaggccaagaaggaggtggagcagcggagagccggcggctacagccggaagtacgccagcaaagccaagaatctggcagacgatatggtgagaaacaccgctagagatctgctgtactacgccgtgacccaggatgccatgctgatcttcgccaacctgagccggggcttcggccggcagggcaagcggaccttcatggccgagagacagtacacacggatggaggactggctgaccgccaagctggcctacgagggcctgagcaagacctacctgtccaagacactggcccagtacacctccaagacatgcagcaactgtgggtttaccatcaccagcgccgactacgacagggtgctggagaagctgaagaagacagcaacaggctggatgaccacaattaacggcaaggagctgaaggtggagggccagattacctactacaacagatacaagagacagaacgtagtcaaggacctgtccgtcgagctggatagactgagcgaagaatctgtgaacaacgacatctcctcctggacaaagggcagaagcggagaagctctgagcctcctgaagaaaagattctcccatagacccgtgcaggagaagttcgtgtgcctgaactgcggcttcgagacacacgcagccgagcaagccgccctgaacatcgccagatcctggctgttcctgcggagccaggagtacaagaaataccagacaaacaagacaaccggcaacaccgataagagagccttcgtcgagacctggcagtccttttaccggaagaagcttaaggaggtgtggaaacctgccgtgcggtctggcggatctggcggaggctccaccagccccaagaaaaagagaaaagtctaagctgccttctgcggggcttgccttctggccatgcccttcttctctcccttgcacctgtacctcttggtctttgaataaagcctgagtaggaaggctagcaaaaaaaaaaaaaaaaaaaaaaaaaaaaaaaaaaaaaaaaaaaaaaaaaaaaaaaaaaaaaaaaaaaaaaaaaaaaaaaa

SEQ ID NO: 9201 - RNA, 8787 nt, synthetic construct
  source 1..8787: mol_type = other RNA
aggaaataagagagaaaagaagagtaagaagaaatataagagccaccatggcccctaagaagaagcgtaaagtgagccggatgaaccacgaccaggagttcgacccccctaaggtgtaccctcccgtccccgccgagaagagaaagcccatccgggtcctgagcctgttcgatggcatcgccaccggtctgctggtgctgaaggacctgggcatccaggtggataggtacattgcctccgaggtgtgcgaggactccatcaccgtgggaatggtgcgtcatcagggcaagatcatgtacgtgggcgacgtgcggagcgtgacacagaagcatatccaggagtggggccctttcgacctggtgatcggcggcagcccttgcaatgacctgagcatcgtgaacccagcccggaagggcctgtacgagggaaccggcagactgttcttcgagttttacagactgctgcacgacgcccggcctaaggaaggcgacgaccggcccttcttttggctgttcgagaatgtggtggccatgggagtcagcgacaagcgggatattagccggttcctggagagcaaccccgtgatgatcgatgccaaggaagtgagcgccgcccaccgggccagatacttctggggcaatctgcctggcatgaacagacccctggccagcaccgtgaacgacaagctggagctgcaggagtgcctggagcacggccggatcgccaagttcagcaaggtgagaaccatcaccacccgaagcaacagcatcaaacaaggcaaggaccagcactttcctgtgttcatgaacgagaaggaggacatcctgtggtgtaccgagatggagagagtgttcgggttcccagtccactacacagatgtcagcaacatgtctagactggccagacagagactgctgggaagaagctggtccgtccctgtgatcagacacctgttcgcccctctgaaggagtacttcgcctgcgtgagcagcggcaacagcaacgccaacagccggggccccagcttctctagcggcctggtgccactgtccctgagagggagccacatgggccccatggagatctacaaaaccgtgagcgcctggaagcggcagcctgtgcgcgtgctgagcctgtttcggaatatcgataaagtcctgaaaagcctgggattcctggagagcggctctggctccggcggtggcaccctgaagtacgtggaggatgtgacaaacgtggtcagacgggatgtggagaagtggggccccttcgatctggtgtacggcagcacccaacccctgggcagctcttgtgaccggtgccctggctggtacatgtttcagttccaccggatcctgcagtacgccctgccgagacaggagtcccagcggccattcttttggattttcatggacaacttgctgctgaccgaggatgaccaggaaactaccactcggttcctgcagaccgaagccgtgaccctgcaggacgtgagaggccgggactaccagaacgccatgcgggtgtggtccaacatccctggactgaaaagcaagcacgcacctctgacccctaaagaagaggagtacctgcaggcccaggtgcggagcagaagcaagctggacgcccctaaggtggatctgctggtgaagaattgcctcctgcccctgagagagtacttcaagtatttcagccagaatagtctgcccctgggaggcagcggcggcggcgccagggccagcctgagcttcgaggacgtggccgtgggcttcagctgggaggagtggcagctgctggcccccagccagaaggacctgtacagggaggtgatgctggagaactacaggaacctggtgagcgtgggctaccaggccagcaagcccgacagcctgttccacctggagcagggcgagcccccctggaccgtggtgggcgccgcccagagccagacctgccaggagatctgggagatcggcggcccaagcagcggcgcccctcctcccagcggcggcaggcggcccaagcagcggcgcccctcctcccagcggcggcagcccagccggctccccaacctctaccgaggagggcacctctgagtccgccacccccgagagcggccctggcacctccaccgagcccagcgagggcagcgcacccggcagccctgccggcagccccacctccacagaggagggaaccagcaccgagcccagcgaaggcagcgccccaggcaccagcaccgagcctagtgagcaggagattaaacggatcaacaagatcagaagaagacttgtgaaagacagcaacaccaagaaggccggcaagacaggccccatgaaaaccctgctggttagagtgatgacacccgatctgagagagcggctggaaaacctgagaaagaagcctgaaaatatcccccagcccatcagcaatacatctagagccaacctgaataagctgctgaccgattacaccgaaatgaagaaggcgatcctgcatgtgtactgggaagagttccagaaggaccctgtgggcctgatgagccgggtggcccagcctgccagcaagaagatcgatcagaacaagctgaaacctgagatggacgagaagggcaacctgaccaccgccggctttgcctgctctcagtgtggccagcccctgttcgtgtacaagctggagcaggtgtctgagaagggcaaggcttacaccaactacttcggacggtgcaatgtggccgagcacgaaaagctgatcctgctggcccagctgaagcccgagaaggatagcgacgaagccgtgacatatagcctgggaaagtttgggcagagggccctggatttctacagcattcatgtgaccaaggagtccacccaccccgtgaagcccctggcccagatcgccggaaacagatacgcctccggacctgtgggaaaggccctgagcgacgcatgtatgggcacaatcgcctccttcctgtctaagtaccaggacatcatcatcgaacaccagaaggtggtgaagggcaaccagaagagactggagagcctgcgggagctggccggcaaggaaaacctggaataccctagcgtgaccctgccacctcagcctcacaccaaggagggcgttgatgcctacaacgaagtgatcgcccgggtgcgaatgtgggtgaacctgaacctgtggcagaagctgaagctaagcagagatgatgccaagcctctgctgagactgaagggattcccttcctttcctctggtcgagagacaggccaacgaagtggactggtgggacatggtgtgtaacgtgaagaagctgatcaacgagaaaaaggaggatggcaaggtgttttggcagaatctggctggctacaagagacaggaagccctgagaccatacctgagcagcgaggaagatcggaagaagggaaagaaattcgctcggtaccagctgggcgacctgctgctgcacctggaaaagaagcacggcgaggactggggaaaggtgtacgacgaggcctgggagcggattgacaagaaagtggaaggcctgagcaagcacatcaagctggaagaggaacggagaagcgaggacgcccagagcaaggccgccctgaccgactggctgcgggctaaggccagcttcgtgatcgagggcctgaaggaggccgacaaggacgagttctgcagatgcgagctgaagctgcagaagtggtacggggacctgcggggaaagcccttcgccatcgaagccgagaacagcatcctggacatcagcggcttcagcaagcagtacaactgtgccttcatctggcagaaggacggcgtgaagaagctgaacctgtacctgatcatcaactacttcaagggcggcaagctgcggttcaagaagatcaaacctgaagccttcgaagccaacagattctacaccgtgatcaacaaaaagagcggcgagatcgtgcccatggaggtgaacttcaacttcgacgaccccaacctgatcatcctgcctctggcctttggcaagagacagggcagagaattcatctggaacgacctgctgtccctggaaaccggcagcctgaagctggccaacggaagagtgatcgagaagacactgtacaacagaagaacccggcaggatgagcctgccctgttcgtggccctgaccttcgagcggcgggaggtcctggactcctccaatatcaaaccaatgaacctgatcggcgtggcaagaggcgaaaacatccccgccgtgatcgccctgaccgaccccgagggctgcccactgagccggtttaaggatagcctgggaaacccaacccacatcctgagaatcggcgagagctataaggagaagcagcggaccatccaggccaagaaggaggtggagcagcggagagccggcggctacagccggaagtacgccagcaaagccaagaatctggcagacgatatggtgagaaacaccgctagagatctgctgtactacgccgtgacccaggatgccatgctgatcttcgccaacctgagccggggcttcggccggcagggcaagcggaccttcatggccgagagacagtacacacggatggaggactggctgaccgccaagctggcctacgagggcctgagcaagacctacctgtccaagacactggcccagtacacctccaagacatgcagcaactgtgggtttaccatcaccagcgccgactacgacagggtgctggagaagctgaagaagacagcaacaggctggatgaccacaattaacggcaaggagctgaaggtggagggccagattacctactacaacagatacaagagacagaacgtagtcaaggacctgtccgtcgagctggatagactgagcgaagaatctgtgaacaacgacatctcctcctggacaaagggcagaagcggagaagctctgagcctcctgaagaaaagattctcccatagacccgtgcaggagaagttcgtgtgcctgaactgcggcttcgagacacacgcagccgagcaagccgccctgaacatcgccagatcctggctgttcctgcggagccaggagtacaagaaataccagacaaacaagacaaccggcaacaccgataagagagccttcgtcgagacctggcagtccttttaccggaagaagcttaaggaggtgtggaaacctgccgtgcggtctggcggatctggcggaggctccaccagccccaagaaaaagagaaaagtctaagctgccttctgcggggcttgccttctggccatgcccttcttctctcccttgcacctgtacctcttggtctttgaataaagcctgagtaggaaggctagcaaaaaaaaaaaaaaaaaaaaaaaaaaaaaaaaaaaaaaaaaaaaaaaaaaaaaaaaaaaaaaaaaaaaaaaaaaaaaaaagcccagccggctccccaacctctaccgaggagggcacctctgagtccgccacccccgagagcggccctggcacctccaccgagcccagcgagggcagcgcacccggcagccctgccggcagccccacctccacagaggagggaaccagcaccgagcccagcgaaggcagcgccccaggcaccagcaccgagcctagtgagcaggagattaaacggatcaacaagatcagaagaagacttgtgaaagacagcaacaccaagaaggccggcaagacaggccccatgaaaaccctgctggttagagtgatgacacccgatctgagagagcggctggaaaacctgagaaagaagcctgaaaatatcccccagcccatcagcaatacatctagagccaacctgaataagctgctgaccgattacaccgaaatgaagaaggcgatcctgcatgtgtactgggaagagttccagaaggaccctgtgggcctgatgagccgggtggcccagcctgccagcaagaagatcgatcagaacaagctgaaacctgagatggacgagaagggcaacctgaccaccgccggctttgcctgctctcagtgtggccagcccctgttcgtgtacaagctggagcaggtgtctgagaagggcaaggcttacaccaactacttcggacggtgcaatgtggccgagcacgaaaagctgatcctgctggcccagctgaagcccgagaaggatagcgacgaagccgtgacatatagcctgggaaagtttgggcagagggccctggatttctacagcattcatgtgaccaaggagtccacccaccccgtgaagcccctggcccagatcgccggaaacagatacgcctccggacctgtgggaaaggccctgagcgacgcatgtatgggcacaatcgcctccttcctgtctaagtaccaggacatcatcatcgaacaccagaaggtggtgaagggcaaccagaagagactggagagcctgcgggagctggccggcaaggaaaacctggaataccctagcgtgaccctgccacctcagcctcacaccaaggagggcgttgatgcctacaacgaagtgatcgcccgggtgcgaatgtgggtgaacctgaacctgtggcagaagctgaagctaagcagagatgatgccaagcctctgctgagactgaagggattcccttcctttcctctggtcgagagacaggccaacgaagtggactggtgggacatggtgtgtaacgtgaagaagctgatcaacgagaaaaaggaggatggcaaggtgttttggcagaatctggctggctacaagagacaggaagccctgagaccatacctgagcagcgaggaagatcggaagaagggaaagaaattcgctcggtaccagctgggcgacctgctgctgcacctggaaaagaagcacggcgaggactggggaaaggtgtacgacgaggcctgggagcggattgacaagaaagtggaaggcctgagcaagcacatcaagctggaagaggaacggagaagcgaggacgcccagagcaaggccgccctgaccgactggctgcgggctaaggccagcttcgtgatcgagggcctgaaggaggccgacaaggacgagttctgcagatgcgagctgaagctgcagaagtggtacggggacctgcggggaaagcccttcgccatcgaagccgagaacagcatcctggacatcagcggcttcagcaagcagtacaactgtgccttcatctggcagaaggacggcgtgaagaagctgaacctgtacctgatcatcaactacttcaagggcggcaagctgcggttcaagaagatcaaacctgaagccttcgaagccaacagattctacaccgtgatcaacaaaaagagcggcgagatcgtgcccatggaggtgaacttcaacttcgacgaccccaacctgatcatcctgcctctggcctttggcaagagacagggcagagaattcatctggaacgacctgctgtccctggaaaccggcagcctgaagctggccaacggaagagtgatcgagaagacactgtacaacagaagaacccggcaggatgagcctgccctgttcgtggccctgaccttcgagcggcgggaggtcctggactcctccaatatcaaaccaatgaacctgatcggcgtggcaagaggcgaaaacatccccgccgtgatcgccctgaccgaccccgagggctgcccactgagccggtttaaggatagcctgggaaacccaacccacatcctgagaatcggcgagagctataaggagaagcagcggaccatccaggccaagaaggaggtggagcagcggagagccggcggctacagccggaagtacgccagcaaagccaagaatctggcagacgatatggtgagaaacaccgctagagatctgctgtactacgccgtgacccaggatgccatgctgatcttcgccaacctgagccggggcttcggccggcagggcaagcggaccttcatggccgagagacagtacacacggatggaggactggctgaccgccaagctggcctacgagggcctgagcaagacctacctgtccaagacactggcccagtacacctccaagacatgcagcaactgtgggtttaccatcaccagcgccgactacgacagggtgctggagaagctgaagaagacagcaacaggctggatgaccacaattaacggcaaggagctgaaggtggagggccagattacctactacaacagatacaagagacagaacgtagtcaaggacctgtccgtcgagctggatagactgagcgaagaatctgtgaacaacgacatctcctcctggacaaagggcagaagcggagaagctctgagcctcctgaagaaaagattctcccatagacccgtgcaggagaagttcgtgtgcctgaactgcggcttcgagacacacgcagccgagcaagccgccctgaacatcgccagatcctggctgttcctgcggagccaggagtacaagaaataccagacaaacaagacaaccggcaacaccgataagagagccttcgtcgagacctggcagtccttttaccggaagaagcttaaggaggtgtggaaacctgccgtgcggtctggcggatctggcggaggctccaccagccccaagaaaaagagaaaagtctaagctgccttctgcggggcttgccttctggccatgcccttcttctctcccttgcacctgtacctcttggtctttgaataaagcctgagtaggaaggctagcaaaaaaaaaaaaaaaaaaaaaaaaaaaaaaaaaaaaaaaaaaaaaaaaaaaaaaaaaaaaaaaaaaaaaaaaaaaaaaaa

SEQ ID NO: 9202 - RNA, 8787 nt, synthetic construct
  source 1..8787: mol_type = other RNA
aggaaataagagagaaaagaagagtaagaagaaatataagagccaccatggcccctaagaagaagcgtaaagtgagccggatgaaccacgaccaggagttcgacccccctaaggtgtaccctcccgtccccgccgagaagagaaagcccatccgggtcctgagcctgttcgatggcatcgccaccggtctgctggtgctgaaggacctgggcatccaggtggataggtacattgcctccgaggtgtgcgaggactccatcaccgtgggaatggtgcgtcatcagggcaagatcatgtacgtgggcgacgtgcggagcgtgacacagaagcatatccaggagtggggccctttcgacctggtgatcggcggcagcccttgcaatgacctgagcatcgtgaacccagcccggaagggcctgtacgagggaaccggcagactgttcttcgagttttacagactgctgcacgacgcccggcctaaggaaggcgacgaccggcccttcttttggctgttcgagaatgtggtggccatgggagtcagcgacaagcgggatattagccggttcctggagagcaaccccgtgatgatcgatgccaaggaagtgagcgccgcccaccgggccagatacttctggggcaatctgcctggcatgaacagacccctggccagcaccgtgaacgacaagctggagctgcaggagtgcctggagcacggccggatcgccaagttcagcaaggtgagaaccatcaccacccgaagcaacagcatcaaacaaggcaaggaccagcactttcctgtgttcatgaacgagaaggaggacatcctgtggtgtaccgagatggagagagtgttcgggttcccagtccactacacagatgtcagcaacatgtctagactggccagacagagactgctgggaagaagctggtccgtccctgtgatcagacacctgttcgcccctctgaaggagtacttcgcctgcgtgagcagcggcaacagcaacgccaacagccggggccccagcttctctagcggcctggtgccactgtccctgagagggagccacatgggccccatggagatctacaaaaccgtgagcgcctggaagcggcagcctgtgcgcgtgctgagcctgtttcggaatatcgataaagtcctgaaaagcctgggattcctggagagcggctctggctccggcggtggcaccctgaagtacgtggaggatgtgacaaacgtggtcagacgggatgtggagaagtggggccccttcgatctggtgtacggcagcacccaacccctgggcagctcttgtgaccggtgccctggctggtacatgtttcagttccaccggatcctgcagtacgccctgccgagacaggagtcccagcggccattcttttggattttcatggacaacttgctgctgaccgaggatgaccaggaaactaccactcggttcctgcagaccgaagccgtgaccctgcaggacgtgagaggccgggactaccagaacgccatgcgggtgtggtccaacatccctggactgaaaagcaagcacgcacctctgacccctaaagaagaggagtacctgcaggcccaggtgcggagcagaagcaagctggacgcccctaaggtggatctgctggtgaagaattgcctcctgcccctgagagagtacttcaagtatttcagccagaatagtctgcccctgggaggcagcggcggcggcatggccttcgaggacgtggccgtgtacttcagccaggaggagtggatgttcctggacgccgcccagagggccctgtacaggcacgtgatgctggagaacttcgccctggtggacagcatcggcctgagcgtgagcaggcccagggtgatcatccagctgcagaggggcgaggagccctgggtgcccaacaggaccaaccccggccccggcaggagcacctgcaggaggcccagcctgggcagcggcggcccaagcagcggcgcccctcctcccagcggcggcaggcggcccaagcagcggcgcccctcctcccagcggcggcagcccagccggctccccaacctctaccgaggagggcacctctgagtccgccacccccgagagcggccctggcacctccaccgagcccagcgagggcagcgcacccggcagccctgccggcagccccacctccacagaggagggaaccagcaccgagcccagcgaaggcagcgccccaggcaccagcaccgagcctagtgagcaggagattaaacggatcaacaagatcagaagaagacttgtgaaagacagcaacaccaagaaggccggcaagacaggccccatgaaaaccctgctggttagagtgatgacacccgatctgagagagcggctggaaaacctgagaaagaagcctgaaaatatcccccagcccatcagcaatacatctagagccaacctgaataagctgctgaccgattacaccgaaatgaagaaggcgatcctgcatgtgtactgggaagagttccagaaggaccctgtgggcctgatgagccgggtggcccagcctgccagcaagaagatcgatcagaacaagctgaaacctgagatggacgagaagggcaacctgaccaccgccggctttgcctgctctcagtgtggccagcccctgttcgtgtacaagctggagcaggtgtctgagaagggcaaggcttacaccaactacttcggacggtgcaatgtggccgagcacgaaaagctgatcctgctggcccagctgaagcccgagaaggatagcgacgaagccgtgacatatagcctgggaaagtttgggcagagggccctggatttctacagcattcatgtgaccaaggagtccacccaccccgtgaagcccctggcccagatcgccggaaacagatacgcctccggacctgtgggaaaggccctgagcgacgcatgtatgggcacaatcgcctccttcctgtctaagtaccaggacatcatcatcgaacaccagaaggtggtgaagggcaaccagaagagactggagagcctgcgggagctggccggcaaggaaaacctggaataccctagcgtgaccctgccacctcagcctcacaccaaggagggcgttgatgcctacaacgaagtgatcgcccgggtgcgaatgtgggtgaacctgaacctgtggcagaagctgaagctaagcagagatgatgccaagcctctgctgagactgaagggattcccttcctttcctctggtcgagagacaggccaacgaagtggactggtgggacatggtgtgtaacgtgaagaagctgatcaacgagaaaaaggaggatggcaaggtgttttggcagaatctggctggctacaagagacaggaagccctgagaccatacctgagcagcgaggaagatcggaagaagggaaagaaattcgctcggtaccagctgggcgacctgctgctgcacctggaaaagaagcacggcgaggactggggaaaggtgtacgacgaggcctgggagcggattgacaagaaagtggaaggcctgagcaagcacatcaagctggaagaggaacggagaagcgaggacgcccagagcaaggccgccctgaccgactggctgcgggctaaggccagcttcgtgatcgagggcctgaaggaggccgacaaggacgagttctgcagatgcgagctgaagctgcagaagtggtacggggacctgcggggaaagcccttcgccatcgaagccgagaacagcatcctggacatcagcggcttcagcaagcagtacaactgtgccttcatctggcagaaggacggcgtgaagaagctgaacctgtacctgatcatcaactacttcaagggcggcaagctgcggttcaagaagatcaaacctgaagccttcgaagccaacagattctacaccgtgatcaacaaaaagagcggcgagatcgtgcccatggaggtgaacttcaacttcgacgaccccaacctgatcatcctgcctctggcctttggcaagagacagggcagagaattcatctggaacgacctgctgtccctggaaaccggcagcctgaagctggccaacggaagagtgatcgagaagacactgtacaacagaagaacccggcaggatgagcctgccctgttcgtggccctgaccttcgagcggcgggaggtcctggactcctccaatatcaaaccaatgaacctgatcggcgtggcaagaggcgaaaacatccccgccgtgatcgccctgaccgaccccgagggctgcccactgagccggtttaaggatagcctgggaaacccaacccacatcctgagaatcggcgagagctataaggagaagcagcggaccatccaggccaagaaggaggtggagcagcggagagccggcggctacagccggaagtacgccagcaaagccaagaatctggcagacgatatggtgagaaacaccgctagagatctgctgtactacgccgtgacccaggatgccatgctgatcttcgccaacctgagccggggcttcggccggcagggcaagcggaccttcatggccgagagacagtacacacggatggaggactggctgaccgccaagctggcctacgagggcctgagcaagacctacctgtccaagacactggcccagtacacctccaagacatgcagcaactgtgggtttaccatcaccagcgccgactacgacagggtgctggagaagctgaagaagacagcaacaggctggatgaccacaattaacggcaaggagctgaaggtggagggccagattacctactacaacagatacaagagacagaacgtagtcaaggacctgtccgtcgagctggatagactgagcgaagaatctgtgaacaacgacatctcctcctggacaaagggcagaagcggagaagctctgagcctcctgaagaaaagattctcccatagacccgtgcaggagaagttcgtgtgcctgaactgcggcttcgagacacacgcagccgagcaagccgccctgaacatcgccagatcctggctgttcctgcggagccaggagtacaagaaataccagacaaacaagacaaccggcaacaccgataagagagccttcgtcgagacctggcagtccttttaccggaagaagcttaaggaggtgtggaaacctgccgtgcggtctggcggatctggcggaggctccaccagccccaagaaaaagagaaaagtctaagctgccttctgcggggcttgccttctggccatgcccttcttctctcccttgcacctgtacctcttggtctttgaataaagcctgagtaggaaggctagcaaaaaaaaaaaaaaaaaaaaaaaaaaaaaaaaaaaaaaaaaaaaaaaaaaaaaaaaaaaaaaaaaaaaaaaaaaaaaaaagcccagccggctccccaacctctaccgaggagggcacctctgagtccgccacccccgagagcggccctggcacctccaccgagcccagcgagggcagcgcacccggcagccctgccggcagccccacctccacagaggagggaaccagcaccgagcccagcgaaggcagcgccccaggcaccagcaccgagcctagtgagcaggagattaaacggatcaacaagatcagaagaagacttgtgaaagacagcaacaccaagaaggccggcaagacaggccccatgaaaaccctgctggttagagtgatgacacccgatctgagagagcggctggaaaacctgagaaagaagcctgaaaatatcccccagcccatcagcaatacatctagagccaacctgaataagctgctgaccgattacaccgaaatgaagaaggcgatcctgcatgtgtactgggaagagttccagaaggaccctgtgggcctgatgagccgggtggcccagcctgccagcaagaagatcgatcagaacaagctgaaacctgagatggacgagaagggcaacctgaccaccgccggctttgcctgctctcagtgtggccagcccctgttcgtgtacaagctggagcaggtgtctgagaagggcaaggcttacaccaactacttcggacggtgcaatgtggccgagcacgaaaagctgatcctgctggcccagctgaagcccgagaaggatagcgacgaagccgtgacatatagcctgggaaagtttgggcagagggccctggatttctacagcattcatgtgaccaaggagtccacccaccccgtgaagcccctggcccagatcgccggaaacagatacgcctccggacctgtgggaaaggccctgagcgacgcatgtatgggcacaatcgcctccttcctgtctaagtaccaggacatcatcatcgaacaccagaaggtggtgaagggcaaccagaagagactggagagcctgcgggagctggccggcaaggaaaacctggaataccctagcgtgaccctgccacctcagcctcacaccaaggagggcgttgatgcctacaacgaagtgatcgcccgggtgcgaatgtgggtgaacctgaacctgtggcagaagctgaagctaagcagagatgatgccaagcctctgctgagactgaagggattcccttcctttcctctggtcgagagacaggccaacgaagtggactggtgggacatggtgtgtaacgtgaagaagctgatcaacgagaaaaaggaggatggcaaggtgttttggcagaatctggctggctacaagagacaggaagccctgagaccatacctgagcagcgaggaagatcggaagaagggaaagaaattcgctcggtaccagctgggcgacctgctgctgcacctggaaaagaagcacggcgaggactggggaaaggtgtacgacgaggcctgggagcggattgacaagaaagtggaaggcctgagcaagcacatcaagctggaagaggaacggagaagcgaggacgcccagagcaaggccgccctgaccgactggctgcgggctaaggccagcttcgtgatcgagggcctgaaggaggccgacaaggacgagttctgcagatgcgagctgaagctgcagaagtggtacggggacctgcggggaaagcccttcgccatcgaagccgagaacagcatcctggacatcagcggcttcagcaagcagtacaactgtgccttcatctggcagaaggacggcgtgaagaagctgaacctgtacctgatcatcaactacttcaagggcggcaagctgcggttcaagaagatcaaacctgaagccttcgaagccaacagattctacaccgtgatcaacaaaaagagcggcgagatcgtgcccatggaggtgaacttcaacttcgacgaccccaacctgatcatcctgcctctggcctttggcaagagacagggcagagaattcatctggaacgacctgctgtccctggaaaccggcagcctgaagctggccaacggaagagtgatcgagaagacactgtacaacagaagaacccggcaggatgagcctgccctgttcgtggccctgaccttcgagcggcgggaggtcctggactcctccaatatcaaaccaatgaacctgatcggcgtggcaagaggcgaaaacatccccgccgtgatcgccctgaccgaccccgagggctgcccactgagccggtttaaggatagcctgggaaacccaacccacatcctgagaatcggcgagagctataaggagaagcagcggaccatccaggccaagaaggaggtggagcagcggagagccggcggctacagccggaagtacgccagcaaagccaagaatctggcagacgatatggtgagaaacaccgctagagatctgctgtactacgccgtgacccaggatgccatgctgatcttcgccaacctgagccggggcttcggccggcagggcaagcggaccttcatggccgagagacagtacacacggatggaggactggctgaccgccaagctggcctacgagggcctgagcaagacctacctgtccaagacactggcccagtacacctccaagacatgcagcaactgtgggtttaccatcaccagcgccgactacgacagggtgctggagaagctgaagaagacagcaacaggctggatgaccacaattaacggcaaggagctgaaggtggagggccagattacctactacaacagatacaagagacagaacgtagtcaaggacctgtccgtcgagctggatagactgagcgaagaatctgtgaacaacgacatctcctcctggacaaagggcagaagcggagaagctctgagcctcctgaagaaaagattctcccatagacccgtgcaggagaagttcgtgtgcctgaactgcggcttcgagacacacgcagccgagcaagccgccctgaacatcgccagatcctggctgttcctgcggagccaggagtacaagaaataccagacaaacaagacaaccggcaacaccgataagagagccttcgtcgagacctggcagtccttttaccggaagaagcttaaggaggtgtggaaacctgccgtgcggtctggcggatctggcggaggctccaccagccccaagaaaaagagaaaagtctaagctgccttctgcggggcttgccttctggccatgcccttcttctctcccttgcacctgtacctcttggtctttgaataaagcctgagtaggaaggctagcaaaaaaaaaaaaaaaaaaaaaaaaaaaaaaaaaaaaaaaaaaaaaaaaaaaaaaaaaaaaaaaaaaaaaaaaaaaaaaaa

SEQ ID NO: 9203 - RNA, 8787 nt, synthetic construct
  source 1..8787: mol_type = other RNA
aggaaataagagagaaaagaagagtaagaagaaatataagagccaccatggcccctaagaagaagcgtaaagtgagccggatgaaccacgaccaggagttcgacccccctaaggtgtaccctcccgtccccgccgagaagagaaagcccatccgggtcctgagcctgttcgatggcatcgccaccggtctgctggtgctgaaggacctgggcatccaggtggataggtacattgcctccgaggtgtgcgaggactccatcaccgtgggaatggtgcgtcatcagggcaagatcatgtacgtgggcgacgtgcggagcgtgacacagaagcatatccaggagtggggccctttcgacctggtgatcggcggcagcccttgcaatgacctgagcatcgtgaacccagcccggaagggcctgtacgagggaaccggcagactgttcttcgagttttacagactgctgcacgacgcccggcctaaggaaggcgacgaccggcccttcttttggctgttcgagaatgtggtggccatgggagtcagcgacaagcgggatattagccggttcctggagagcaaccccgtgatgatcgatgccaaggaagtgagcgccgcccaccgggccagatacttctggggcaatctgcctggcatgaacagacccctggccagcaccgtgaacgacaagctggagctgcaggagtgcctggagcacggccggatcgccaagttcagcaaggtgagaaccatcaccacccgaagcaacagcatcaaacaaggcaaggaccagcactttcctgtgttcatgaacgagaaggaggacatcctgtggtgtaccgagatggagagagtgttcgggttcccagtccactacacagatgtcagcaacatgtctagactggccagacagagactgctgggaagaagctggtccgtccctgtgatcagacacctgttcgcccctctgaaggagtacttcgcctgcgtgagcagcggcaacagcaacgccaacagccggggccccagcttctctagcggcctggtgccactgtccctgagagggagccacatgggccccatggagatctacaaaaccgtgagcgcctggaagcggcagcctgtgcgcgtgctgagcctgtttcggaatatcgataaagtcctgaaaagcctgggattcctggagagcggctctggctccggcggtggcaccctgaagtacgtggaggatgtgacaaacgtggtcagacgggatgtggagaagtggggccccttcgatctggtgtacggcagcacccaacccctgggcagctcttgtgaccggtgccctggctggtacatgtttcagttccaccggatcctgcagtacgccctgccgagacaggagtcccagcggccattcttttggattttcatggacaacttgctgctgaccgaggatgaccaggaaactaccactcggttcctgcagaccgaagccgtgaccctgcaggacgtgagaggccgggactaccagaacgccatgcgggtgtggtccaacatccctggactgaaaagcaagcacgcacctctgacccctaaagaagaggagtacctgcaggcccaggtgcggagcagaagcaagctggacgcccctaaggtggatctgctggtgaagaattgcctcctgcccctgagagagtacttcaagtatttcagccagaatagtctgcccctgggaggcagcggcggcggcatgagccagggcagcgtgaccttcagggacgtggccatcgacttcagccaggaggagtggaagtggctgcagcccgcccagagggacctgtacaggtgcgtgatgctggagaactacggccacctggtgagcctgggcctgagcatcagcaagcccgacgtggtgagcctgctggagcagggcaaggagccctggctgggcaagagggaggtgaagagggacctgttcagcggctggagcgccggcggcccaagcagcggcgcccctcctcccagcggcggcaggcggcccaagcagcggcgcccctcctcccagcggcggcagcccagccggctccccaacctctaccgaggagggcacctctgagtccgccacccccgagagcggccctggcacctccaccgagcccagcgagggcagcgcacccggcagccctgccggcagccccacctccacagaggagggaaccagcaccgagcccagcgaaggcagcgccccaggcaccagcaccgagcctagtgagcaggagattaaacggatcaacaagatcagaagaagacttgtgaaagacagcaacaccaagaaggccggcaagacaggccccatgaaaaccctgctggttagagtgatgacacccgatctgagagagcggctggaaaacctgagaaagaagcctgaaaatatcccccagcccatcagcaatacatctagagccaacctgaataagctgctgaccgattacaccgaaatgaagaaggcgatcctgcatgtgtactgggaagagttccagaaggaccctgtgggcctgatgagccgggtggcccagcctgccagcaagaagatcgatcagaacaagctgaaacctgagatggacgagaagggcaacctgaccaccgccggctttgcctgctctcagtgtggccagcccctgttcgtgtacaagctggagcaggtgtctgagaagggcaaggcttacaccaactacttcggacggtgcaatgtggccgagcacgaaaagctgatcctgctggcccagctgaagcccgagaaggatagcgacgaagccgtgacatatagcctgggaaagtttgggcagagggccctggatttctacagcattcatgtgaccaaggagtccacccaccccgtgaagcccctggcccagatcgccggaaacagatacgcctccggacctgtgggaaaggccctgagcgacgcatgtatgggcacaatcgcctccttcctgtctaagtaccaggacatcatcatcgaacaccagaaggtggtgaagggcaaccagaagagactggagagcctgcgggagctggccggcaaggaaaacctggaataccctagcgtgaccctgccacctcagcctcacaccaaggagggcgttgatgcctacaacgaagtgatcgcccgggtgcgaatgtgggtgaacctgaacctgtggcagaagctgaagctaagcagagatgatgccaagcctctgctgagactgaagggattcccttcctttcctctggtcgagagacaggccaacgaagtggactggtgggacatggtgtgtaacgtgaagaagctgatcaacgagaaaaaggaggatggcaaggtgttttggcagaatctggctggctacaagagacaggaagccctgagaccatacctgagcagcgaggaagatcggaagaagggaaagaaattcgctcggtaccagctgggcgacctgctgctgcacctggaaaagaagcacggcgaggactggggaaaggtgtacgacgaggcctgggagcggattgacaagaaagtggaaggcctgagcaagcacatcaagctggaagaggaacggagaagcgaggacgcccagagcaaggccgccctgaccgactggctgcgggctaaggccagcttcgtgatcgagggcctgaaggaggccgacaaggacgagttctgcagatgcgagctgaagctgcagaagtggtacggggacctgcggggaaagcccttcgccatcgaagccgagaacagcatcctggacatcagcggcttcagcaagcagtacaactgtgccttcatctggcagaaggacggcgtgaagaagctgaacctgtacctgatcatcaactacttcaagggcggcaagctgcggttcaagaagatcaaacctgaagccttcgaagccaacagattctacaccgtgatcaacaaaaagagcggcgagatcgtgcccatggaggtgaacttcaacttcgacgaccccaacctgatcatcctgcctctggcctttggcaagagacagggcagagaattcatctggaacgacctgctgtccctggaaaccggcagcctgaagctggccaacggaagagtgatcgagaagacactgtacaacagaagaacccggcaggatgagcctgccctgttcgtggccctgaccttcgagcggcgggaggtcctggactcctccaatatcaaaccaatgaacctgatcggcgtggcaagaggcgaaaacatccccgccgtgatcgccctgaccgaccccgagggctgcccactgagccggtttaaggatagcctgggaaacccaacccacatcctgagaatcggcgagagctataaggagaagcagcggaccatccaggccaagaaggaggtggagcagcggagagccggcggctacagccggaagtacgccagcaaagccaagaatctggcagacgatatggtgagaaacaccgctagagatctgctgtactacgccgtgacccaggatgccatgctgatcttcgccaacctgagccggggcttcggccggcagggcaagcggaccttcatggccgagagacagtacacacggatggaggactggctgaccgccaagctggcctacgagggcctgagcaagacctacctgtccaagacactggcccagtacacctccaagacatgcagcaactgtgggtttaccatcaccagcgccgactacgacagggtgctggagaagctgaagaagacagcaacaggctggatgaccacaattaacggcaaggagctgaaggtggagggccagattacctactacaacagatacaagagacagaacgtagtcaaggacctgtccgtcgagctggatagactgagcgaagaatctgtgaacaacgacatctcctcctggacaaagggcagaagcggagaagctctgagcctcctgaagaaaagattctcccatagacccgtgcaggagaagttcgtgtgcctgaactgcggcttcgagacacacgcagccgagcaagccgccctgaacatcgccagatcctggctgttcctgcggagccaggagtacaagaaataccagacaaacaagacaaccggcaacaccgataagagagccttcgtcgagacctggcagtccttttaccggaagaagcttaaggaggtgtggaaacctgccgtgcggtctggcggatctggcggaggctccaccagccccaagaaaaagagaaaagtctaagctgccttctgcggggcttgccttctggccatgcccttcttctctcccttgcacctgtacctcttggtctttgaataaagcctgagtaggaaggctagcaaaaaaaaaaaaaaaaaaaaaaaaaaaaaaaaaaaaaaaaaaaaaaaaaaaaaaaaaaaaaaaaaaaaaaaaaaaaaaaagcccagccggctccccaacctctaccgaggagggcacctctgagtccgccacccccgagagcggccctggcacctccaccgagcccagcgagggcagcgcacccggcagccctgccggcagccccacctccacagaggagggaaccagcaccgagcccagcgaaggcagcgccccaggcaccagcaccgagcctagtgagcaggagattaaacggatcaacaagatcagaagaagacttgtgaaagacagcaacaccaagaaggccggcaagacaggccccatgaaaaccctgctggttagagtgatgacacccgatctgagagagcggctggaaaacctgagaaagaagcctgaaaatatcccccagcccatcagcaatacatctagagccaacctgaataagctgctgaccgattacaccgaaatgaagaaggcgatcctgcatgtgtactgggaagagttccagaaggaccctgtgggcctgatgagccgggtggcccagcctgccagcaagaagatcgatcagaacaagctgaaacctgagatggacgagaagggcaacctgaccaccgccggctttgcctgctctcagtgtggccagcccctgttcgtgtacaagctggagcaggtgtctgagaagggcaaggcttacaccaactacttcggacggtgcaatgtggccgagcacgaaaagctgatcctgctggcccagctgaagcccgagaaggatagcgacgaagccgtgacatatagcctgggaaagtttgggcagagggccctggatttctacagcattcatgtgaccaaggagtccacccaccccgtgaagcccctggcccagatcgccggaaacagatacgcctccggacctgtgggaaaggccctgagcgacgcatgtatgggcacaatcgcctccttcctgtctaagtaccaggacatcatcatcgaacaccagaaggtggtgaagggcaaccagaagagactggagagcctgcgggagctggccggcaaggaaaacctggaataccctagcgtgaccctgccacctcagcctcacaccaaggagggcgttgatgcctacaacgaagtgatcgcccgggtgcgaatgtgggtgaacctgaacctgtggcagaagctgaagctaagcagagatgatgccaagcctctgctgagactgaagggattcccttcctttcctctggtcgagagacaggccaacgaagtggactggtgggacatggtgtgtaacgtgaagaagctgatcaacgagaaaaaggaggatggcaaggtgttttggcagaatctggctggctacaagagacaggaagccctgagaccatacctgagcagcgaggaagatcggaagaagggaaagaaattcgctcggtaccagctgggcgacctgctgctgcacctggaaaagaagcacggcgaggactggggaaaggtgtacgacgaggcctgggagcggattgacaagaaagtggaaggcctgagcaagcacatcaagctggaagaggaacggagaagcgaggacgcccagagcaaggccgccctgaccgactggctgcgggctaaggccagcttcgtgatcgagggcctgaaggaggccgacaaggacgagttctgcagatgcgagctgaagctgcagaagtggtacggggacctgcggggaaagcccttcgccatcgaagccgagaacagcatcctggacatcagcggcttcagcaagcagtacaactgtgccttcatctggcagaaggacggcgtgaagaagctgaacctgtacctgatcatcaactacttcaagggcggcaagctgcggttcaagaagatcaaacctgaagccttcgaagccaacagattctacaccgtgatcaacaaaaagagcggcgagatcgtgcccatggaggtgaacttcaacttcgacgaccccaacctgatcatcctgcctctggcctttggcaagagacagggcagagaattcatctggaacgacctgctgtccctggaaaccggcagcctgaagctggccaacggaagagtgatcgagaagacactgtacaacagaagaacccggcaggatgagcctgccctgttcgtggccctgaccttcgagcggcgggaggtcctggactcctccaatatcaaaccaatgaacctgatcggcgtggcaagaggcgaaaacatccccgccgtgatcgccctgaccgaccccgagggctgcccactgagccggtttaaggatagcctgggaaacccaacccacatcctgagaatcggcgagagctataaggagaagcagcggaccatccaggccaagaaggaggtggagcagcggagagccggcggctacagccggaagtacgccagcaaagccaagaatctggcagacgatatggtgagaaacaccgctagagatctgctgtactacgccgtgacccaggatgccatgctgatcttcgccaacctgagccggggcttcggccggcagggcaagcggaccttcatggccgagagacagtacacacggatggaggactggctgaccgccaagctggcctacgagggcctgagcaagacctacctgtccaagacactggcccagtacacctccaagacatgcagcaactgtgggtttaccatcaccagcgccgactacgacagggtgctggagaagctgaagaagacagcaacaggctggatgaccacaattaacggcaaggagctgaaggtggagggccagattacctactacaacagatacaagagacagaacgtagtcaaggacctgtccgtcgagctggatagactgagcgaagaatctgtgaacaacgacatctcctcctggacaaagggcagaagcggagaagctctgagcctcctgaagaaaagattctcccatagacccgtgcaggagaagttcgtgtgcctgaactgcggcttcgagacacacgcagccgagcaagccgccctgaacatcgccagatcctggctgttcctgcggagccaggagtacaagaaataccagacaaacaagacaaccggcaacaccgataagagagccttcgtcgagacctggcagtccttttaccggaagaagcttaaggaggtgtggaaacctgccgtgcggtctggcggatctggcggaggctccaccagccccaagaaaaagagaaaagtctaagctgccttctgcggggcttgccttctggccatgcccttcttctctcccttgcacctgtacctcttggtctttgaataaagcctgagtaggaaggctagcaaaaaaaaaaaaaaaaaaaaaaaaaaaaaaaaaaaaaaaaaaaaaaaaaaaaaaaaaaaaaaaaaaaaaaaaaaaaaaaa

SEQ ID NO: 9204 - RNA, 8787 nt, synthetic construct
  source 1..8787: mol_type = other RNA
aggaaataagagagaaaagaagagtaagaagaaatataagagccaccatggcccctaagaagaagcgtaaagtgagccggatgaaccacgaccaggagttcgacccccctaaggtgtaccctcccgtccccgccgagaagagaaagcccatccgggtcctgagcctgttcgatggcatcgccaccggtctgctggtgctgaaggacctgggcatccaggtggataggtacattgcctccgaggtgtgcgaggactccatcaccgtgggaatggtgcgtcatcagggcaagatcatgtacgtgggcgacgtgcggagcgtgacacagaagcatatccaggagtggggccctttcgacctggtgatcggcggcagcccttgcaatgacctgagcatcgtgaacccagcccggaagggcctgtacgagggaaccggcagactgttcttcgagttttacagactgctgcacgacgcccggcctaaggaaggcgacgaccggcccttcttttggctgttcgagaatgtggtggccatgggagtcagcgacaagcgggatattagccggttcctggagagcaaccccgtgatgatcgatgccaaggaagtgagcgccgcccaccgggccagatacttctggggcaatctgcctggcatgaacagacccctggccagcaccgtgaacgacaagctggagctgcaggagtgcctggagcacggccggatcgccaagttcagcaaggtgagaaccatcaccacccgaagcaacagcatcaaacaaggcaaggaccagcactttcctgtgttcatgaacgagaaggaggacatcctgtggtgtaccgagatggagagagtgttcgggttcccagtccactacacagatgtcagcaacatgtctagactggccagacagagactgctgggaagaagctggtccgtccctgtgatcagacacctgttcgcccctctgaaggagtacttcgcctgcgtgagcagcggcaacagcaacgccaacagccggggccccagcttctctagcggcctggtgccactgtccctgagagggagccacatgggccccatggagatctacaaaaccgtgagcgcctggaagcggcagcctgtgcgcgtgctgagcctgtttcggaatatcgataaagtcctgaaaagcctgggattcctggagagcggctctggctccggcggtggcaccctgaagtacgtggaggatgtgacaaacgtggtcagacgggatgtggagaagtggggccccttcgatctggtgtacggcagcacccaacccctgggcagctcttgtgaccggtgccctggctggtacatgtttcagttccaccggatcctgcagtacgccctgccgagacaggagtcccagcggccattcttttggattttcatggacaacttgctgctgaccgaggatgaccaggaaactaccactcggttcctgcagaccgaagccgtgaccctgcaggacgtgagaggccgggactaccagaacgccatgcgggtgtggtccaacatccctggactgaaaagcaagcacgcacctctgacccctaaagaagaggagtacctgcaggcccaggtgcggagcagaagcaagctggacgcccctaaggtggatctgctggtgaagaattgcctcctgcccctgagagagtacttcaagtatttcagccagaatagtctgcccctgggaggcagcggcggcggcgcccaccacctggtgatgttcagggacgtggccgtggacttcagccaggaggagtgggagtgcctgaacccctaccagaggaacctgtacagggacgtgatcctggagaactacagcaacctggtgagcgtgggctgcagcatcagcaagcccgacgtgatcaccctgctggagcagggcaaggagccctggatggtggtgagggacgagaggaggaggagcctggacctggagagcaggtacggcggcccaagcagcggcgcccctcctcccagcggcggcaggcggcccaagcagcggcgcccctcctcccagcggcggcagcccagccggctccccaacctctaccgaggagggcacctctgagtccgccacccccgagagcggccctggcacctccaccgagcccagcgagggcagcgcacccggcagccctgccggcagccccacctccacagaggagggaaccagcaccgagcccagcgaaggcagcgccccaggcaccagcaccgagcctagtgagcaggagattaaacggatcaacaagatcagaagaagacttgtgaaagacagcaacaccaagaaggccggcaagacaggccccatgaaaaccctgctggttagagtgatgacacccgatctgagagagcggctggaaaacctgagaaagaagcctgaaaatatcccccagcccatcagcaatacatctagagccaacctgaataagctgctgaccgattacaccgaaatgaagaaggcgatcctgcatgtgtactgggaagagttccagaaggaccctgtgggcctgatgagccgggtggcccagcctgccagcaagaagatcgatcagaacaagctgaaacctgagatggacgagaagggcaacctgaccaccgccggctttgcctgctctcagtgtggccagcccctgttcgtgtacaagctggagcaggtgtctgagaagggcaaggcttacaccaactacttcggacggtgcaatgtggccgagcacgaaaagctgatcctgctggcccagctgaagcccgagaaggatagcgacgaagccgtgacatatagcctgggaaagtttgggcagagggccctggatttctacagcattcatgtgaccaaggagtccacccaccccgtgaagcccctggcccagatcgccggaaacagatacgcctccggacctgtgggaaaggccctgagcgacgcatgtatgggcacaatcgcctccttcctgtctaagtaccaggacatcatcatcgaacaccagaaggtggtgaagggcaaccagaagagactggagagcctgcgggagctggccggcaaggaaaacctggaataccctagcgtgaccctgccacctcagcctcacaccaaggagggcgttgatgcctacaacgaagtgatcgcccgggtgcgaatgtgggtgaacctgaacctgtggcagaagctgaagctaagcagagatgatgccaagcctctgctgagactgaagggattcccttcctttcctctggtcgagagacaggccaacgaagtggactggtgggacatggtgtgtaacgtgaagaagctgatcaacgagaaaaaggaggatggcaaggtgttttggcagaatctggctggctacaagagacaggaagccctgagaccatacctgagcagcgaggaagatcggaagaagggaaagaaattcgctcggtaccagctgggcgacctgctgctgcacctggaaaagaagcacggcgaggactggggaaaggtgtacgacgaggcctgggagcggattgacaagaaagtggaaggcctgagcaagcacatcaagctggaagaggaacggagaagcgaggacgcccagagcaaggccgccctgaccgactggctgcgggctaaggccagcttcgtgatcgagggcctgaaggaggccgacaaggacgagttctgcagatgcgagctgaagctgcagaagtggtacggggacctgcggggaaagcccttcgccatcgaagccgagaacagcatcctggacatcagcggcttcagcaagcagtacaactgtgccttcatctggcagaaggacggcgtgaagaagctgaacctgtacctgatcatcaactacttcaagggcggcaagctgcggttcaagaagatcaaacctgaagccttcgaagccaacagattctacaccgtgatcaacaaaaagagcggcgagatcgtgcccatggaggtgaacttcaacttcgacgaccccaacctgatcatcctgcctctggcctttggcaagagacagggcagagaattcatctggaacgacctgctgtccctggaaaccggcagcctgaagctggccaacggaagagtgatcgagaagacactgtacaacagaagaacccggcaggatgagcctgccctgttcgtggccctgaccttcgagcggcgggaggtcctggactcctccaatatcaaaccaatgaacctgatcggcgtggcaagaggcgaaaacatccccgccgtgatcgccctgaccgaccccgagggctgcccactgagccggtttaaggatagcctgggaaacccaacccacatcctgagaatcggcgagagctataaggagaagcagcggaccatccaggccaagaaggaggtggagcagcggagagccggcggctacagccggaagtacgccagcaaagccaagaatctggcagacgatatggtgagaaacaccgctagagatctgctgtactacgccgtgacccaggatgccatgctgatcttcgccaacctgagccggggcttcggccggcagggcaagcggaccttcatggccgagagacagtacacacggatggaggactggctgaccgccaagctggcctacgagggcctgagcaagacctacctgtccaagacactggcccagtacacctccaagacatgcagcaactgtgggtttaccatcaccagcgccgactacgacagggtgctggagaagctgaagaagacagcaacaggctggatgaccacaattaacggcaaggagctgaaggtggagggccagattacctactacaacagatacaagagacagaacgtagtcaaggacctgtccgtcgagctggatagactgagcgaagaatctgtgaacaacgacatctcctcctggacaaagggcagaagcggagaagctctgagcctcctgaagaaaagattctcccatagacccgtgcaggagaagttcgtgtgcctgaactgcggcttcgagacacacgcagccgagcaagccgccctgaacatcgccagatcctggctgttcctgcggagccaggagtacaagaaataccagacaaacaagacaaccggcaacaccgataagagagccttcgtcgagacctggcagtccttttaccggaagaagcttaaggaggtgtggaaacctgccgtgcggtctggcggatctggcggaggctccaccagccccaagaaaaagagaaaagtctaagctgccttctgcggggcttgccttctggccatgcccttcttctctcccttgcacctgtacctcttggtctttgaataaagcctgagtaggaaggctagcaaaaaaaaaaaaaaaaaaaaaaaaaaaaaaaaaaaaaaaaaaaaaaaaaaaaaaaaaaaaaaaaaaaaaaaaaaaaaaaagcccagccggctccccaacctctaccgaggagggcacctctgagtccgccacccccgagagcggccctggcacctccaccgagcccagcgagggcagcgcacccggcagccctgccggcagccccacctccacagaggagggaaccagcaccgagcccagcgaaggcagcgccccaggcaccagcaccgagcctagtgagcaggagattaaacggatcaacaagatcagaagaagacttgtgaaagacagcaacaccaagaaggccggcaagacaggccccatgaaaaccctgctggttagagtgatgacacccgatctgagagagcggctggaaaacctgagaaagaagcctgaaaatatcccccagcccatcagcaatacatctagagccaacctgaataagctgctgaccgattacaccgaaatgaagaaggcgatcctgcatgtgtactgggaagagttccagaaggaccctgtgggcctgatgagccgggtggcccagcctgccagcaagaagatcgatcagaacaagctgaaacctgagatggacgagaagggcaacctgaccaccgccggctttgcctgctctcagtgtggccagcccctgttcgtgtacaagctggagcaggtgtctgagaagggcaaggcttacaccaactacttcggacggtgcaatgtggccgagcacgaaaagctgatcctgctggcccagctgaagcccgagaaggatagcgacgaagccgtgacatatagcctgggaaagtttgggcagagggccctggatttctacagcattcatgtgaccaaggagtccacccaccccgtgaagcccctggcccagatcgccggaaacagatacgcctccggacctgtgggaaaggccctgagcgacgcatgtatgggcacaatcgcctccttcctgtctaagtaccaggacatcatcatcgaacaccagaaggtggtgaagggcaaccagaagagactggagagcctgcgggagctggccggcaaggaaaacctggaataccctagcgtgaccctgccacctcagcctcacaccaaggagggcgttgatgcctacaacgaagtgatcgcccgggtgcgaatgtgggtgaacctgaacctgtggcagaagctgaagctaagcagagatgatgccaagcctctgctgagactgaagggattcccttcctttcctctggtcgagagacaggccaacgaagtggactggtgggacatggtgtgtaacgtgaagaagctgatcaacgagaaaaaggaggatggcaaggtgttttggcagaatctggctggctacaagagacaggaagccctgagaccatacctgagcagcgaggaagatcggaagaagggaaagaaattcgctcggtaccagctgggcgacctgctgctgcacctggaaaagaagcacggcgaggactggggaaaggtgtacgacgaggcctgggagcggattgacaagaaagtggaaggcctgagcaagcacatcaagctggaagaggaacggagaagcgaggacgcccagagcaaggccgccctgaccgactggctgcgggctaaggccagcttcgtgatcgagggcctgaaggaggccgacaaggacgagttctgcagatgcgagctgaagctgcagaagtggtacggggacctgcggggaaagcccttcgccatcgaagccgagaacagcatcctggacatcagcggcttcagcaagcagtacaactgtgccttcatctggcagaaggacggcgtgaagaagctgaacctgtacctgatcatcaactacttcaagggcggcaagctgcggttcaagaagatcaaacctgaagccttcgaagccaacagattctacaccgtgatcaacaaaaagagcggcgagatcgtgcccatggaggtgaacttcaacttcgacgaccccaacctgatcatcctgcctctggcctttggcaagagacagggcagagaattcatctggaacgacctgctgtccctggaaaccggcagcctgaagctggccaacggaagagtgatcgagaagacactgtacaacagaagaacccggcaggatgagcctgccctgttcgtggccctgaccttcgagcggcgggaggtcctggactcctccaatatcaaaccaatgaacctgatcggcgtggcaagaggcgaaaacatccccgccgtgatcgccctgaccgaccccgagggctgcccactgagccggtttaaggatagcctgggaaacccaacccacatcctgagaatcggcgagagctataaggagaagcagcggaccatccaggccaagaaggaggtggagcagcggagagccggcggctacagccggaagtacgccagcaaagccaagaatctggcagacgatatggtgagaaacaccgctagagatctgctgtactacgccgtgacccaggatgccatgctgatcttcgccaacctgagccggggcttcggccggcagggcaagcggaccttcatggccgagagacagtacacacggatggaggactggctgaccgccaagctggcctacgagggcctgagcaagacctacctgtccaagacactggcccagtacacctccaagacatgcagcaactgtgggtttaccatcaccagcgccgactacgacagggtgctggagaagctgaagaagacagcaacaggctggatgaccacaattaacggcaaggagctgaaggtggagggccagattacctactacaacagatacaagagacagaacgtagtcaaggacctgtccgtcgagctggatagactgagcgaagaatctgtgaacaacgacatctcctcctggacaaagggcagaagcggagaagctctgagcctcctgaagaaaagattctcccatagacccgtgcaggagaagttcgtgtgcctgaactgcggcttcgagacacacgcagccgagcaagccgccctgaacatcgccagatcctggctgttcctgcggagccaggagtacaagaaataccagacaaacaagacaaccggcaacaccgataagagagccttcgtcgagacctggcagtccttttaccggaagaagcttaaggaggtgtggaaacctgccgtgcggtctggcggatctggcggaggctccaccagccccaagaaaaagagaaaagtctaagctgccttctgcggggcttgccttctggccatgcccttcttctctcccttgcacctgtacctcttggtctttgaataaagcctgagtaggaaggctagcaaaaaaaaaaaaaaaaaaaaaaaaaaaaaaaaaaaaaaaaaaaaaaaaaaaaaaaaaaaaaaaaaaaaaaaaaaaaaaaa

SEQ ID NO: 9205 - RNA, 8787 nt, synthetic construct
  source 1..8787: mol_type = other RNA
aggaaataagagagaaaagaagagtaagaagaaatataagagccaccatggcccctaagaagaagcgtaaagtgagccggatgaaccacgaccaggagttcgacccccctaaggtgtaccctcccgtccccgccgagaagagaaagcccatccgggtcctgagcctgttcgatggcatcgccaccggtctgctggtgctgaaggacctgggcatccaggtggataggtacattgcctccgaggtgtgcgaggactccatcaccgtgggaatggtgcgtcatcagggcaagatcatgtacgtgggcgacgtgcggagcgtgacacagaagcatatccaggagtggggccctttcgacctggtgatcggcggcagcccttgcaatgacctgagcatcgtgaacccagcccggaagggcctgtacgagggaaccggcagactgttcttcgagttttacagactgctgcacgacgcccggcctaaggaaggcgacgaccggcccttcttttggctgttcgagaatgtggtggccatgggagtcagcgacaagcgggatattagccggttcctggagagcaaccccgtgatgatcgatgccaaggaagtgagcgccgcccaccgggccagatacttctggggcaatctgcctggcatgaacagacccctggccagcaccgtgaacgacaagctggagctgcaggagtgcctggagcacggccggatcgccaagttcagcaaggtgagaaccatcaccacccgaagcaacagcatcaaacaaggcaaggaccagcactttcctgtgttcatgaacgagaaggaggacatcctgtggtgtaccgagatggagagagtgttcgggttcccagtccactacacagatgtcagcaacatgtctagactggccagacagagactgctgggaagaagctggtccgtccctgtgatcagacacctgttcgcccctctgaaggagtacttcgcctgcgtgagcagcggcaacagcaacgccaacagccggggccccagcttctctagcggcctggtgccactgtccctgagagggagccacatgggccccatggagatctacaaaaccgtgagcgcctggaagcggcagcctgtgcgcgtgctgagcctgtttcggaatatcgataaagtcctgaaaagcctgggattcctggagagcggctctggctccggcggtggcaccctgaagtacgtggaggatgtgacaaacgtggtcagacgggatgtggagaagtggggccccttcgatctggtgtacggcagcacccaacccctgggcagctcttgtgaccggtgccctggctggtacatgtttcagttccaccggatcctgcagtacgccctgccgagacaggagtcccagcggccattcttttggattttcatggacaacttgctgctgaccgaggatgaccaggaaactaccactcggttcctgcagaccgaagccgtgaccctgcaggacgtgagaggccgggactaccagaacgccatgcgggtgtggtccaacatccctggactgaaaagcaagcacgcacctctgacccctaaagaagaggagtacctgcaggcccaggtgcggagcagaagcaagctggacgcccctaaggtggatctgctggtgaagaattgcctcctgcccctgagagagtacttcaagtatttcagccagaatagtctgcccctgggaggcagcggcggcggcccccaggagcccgtgaccttcgaggacgtggccgtgtacttcacccagaaccagtgggccagcctggaccccacccagagggccctgtacagggaggtgatgctggagaactacgccagcgtggccagcctggtgttccccttccccaagcccgacctggtgagccagctggagaggggcgaggccccctggggccccgacccctgggaggccgaggtgctgaggggcatctgccccggcggcggcggcccaagcagcggcgcccctcctcccagcggcggcaggcggcccaagcagcggcgcccctcctcccagcggcggcagcccagccggctccccaacctctaccgaggagggcacctctgagtccgccacccccgagagcggccctggcacctccaccgagcccagcgagggcagcgcacccggcagccctgccggcagccccacctccacagaggagggaaccagcaccgagcccagcgaaggcagcgccccaggcaccagcaccgagcctagtgagcaggagattaaacggatcaacaagatcagaagaagacttgtgaaagacagcaacaccaagaaggccggcaagacaggccccatgaaaaccctgctggttagagtgatgacacccgatctgagagagcggctggaaaacctgagaaagaagcctgaaaatatcccccagcccatcagcaatacatctagagccaacctgaataagctgctgaccgattacaccgaaatgaagaaggcgatcctgcatgtgtactgggaagagttccagaaggaccctgtgggcctgatgagccgggtggcccagcctgccagcaagaagatcgatcagaacaagctgaaacctgagatggacgagaagggcaacctgaccaccgccggctttgcctgctctcagtgtggccagcccctgttcgtgtacaagctggagcaggtgtctgagaagggcaaggcttacaccaactacttcggacggtgcaatgtggccgagcacgaaaagctgatcctgctggcccagctgaagcccgagaaggatagcgacgaagccgtgacatatagcctgggaaagtttgggcagagggccctggatttctacagcattcatgtgaccaaggagtccacccaccccgtgaagcccctggcccagatcgccggaaacagatacgcctccggacctgtgggaaaggccctgagcgacgcatgtatgggcacaatcgcctccttcctgtctaagtaccaggacatcatcatcgaacaccagaaggtggtgaagggcaaccagaagagactggagagcctgcgggagctggccggcaaggaaaacctggaataccctagcgtgaccctgccacctcagcctcacaccaaggagggcgttgatgcctacaacgaagtgatcgcccgggtgcgaatgtgggtgaacctgaacctgtggcagaagctgaagctaagcagagatgatgccaagcctctgctgagactgaagggattcccttcctttcctctggtcgagagacaggccaacgaagtggactggtgggacatggtgtgtaacgtgaagaagctgatcaacgagaaaaaggaggatggcaaggtgttttggcagaatctggctggctacaagagacaggaagccctgagaccatacctgagcagcgaggaagatcggaagaagggaaagaaattcgctcggtaccagctgggcgacctgctgctgcacctggaaaagaagcacggcgaggactggggaaaggtgtacgacgaggcctgggagcggattgacaagaaagtggaaggcctgagcaagcacatcaagctggaagaggaacggagaagcgaggacgcccagagcaaggccgccctgaccgactggctgcgggctaaggccagcttcgtgatcgagggcctgaaggaggccgacaaggacgagttctgcagatgcgagctgaagctgcagaagtggtacggggacctgcggggaaagcccttcgccatcgaagccgagaacagcatcctggacatcagcggcttcagcaagcagtacaactgtgccttcatctggcagaaggacggcgtgaagaagctgaacctgtacctgatcatcaactacttcaagggcggcaagctgcggttcaagaagatcaaacctgaagccttcgaagccaacagattctacaccgtgatcaacaaaaagagcggcgagatcgtgcccatggaggtgaacttcaacttcgacgaccccaacctgatcatcctgcctctggcctttggcaagagacagggcagagaattcatctggaacgacctgctgtccctggaaaccggcagcctgaagctggccaacggaagagtgatcgagaagacactgtacaacagaagaacccggcaggatgagcctgccctgttcgtggccctgaccttcgagcggcgggaggtcctggactcctccaatatcaaaccaatgaacctgatcggcgtggcaagaggcgaaaacatccccgccgtgatcgccctgaccgaccccgagggctgcccactgagccggtttaaggatagcctgggaaacccaacccacatcctgagaatcggcgagagctataaggagaagcagcggaccatccaggccaagaaggaggtggagcagcggagagccggcggctacagccggaagtacgccagcaaagccaagaatctggcagacgatatggtgagaaacaccgctagagatctgctgtactacgccgtgacccaggatgccatgctgatcttcgccaacctgagccggggcttcggccggcagggcaagcggaccttcatggccgagagacagtacacacggatggaggactggctgaccgccaagctggcctacgagggcctgagcaagacctacctgtccaagacactggcccagtacacctccaagacatgcagcaactgtgggtttaccatcaccagcgccgactacgacagggtgctggagaagctgaagaagacagcaacaggctggatgaccacaattaacggcaaggagctgaaggtggagggccagattacctactacaacagatacaagagacagaacgtagtcaaggacctgtccgtcgagctggatagactgagcgaagaatctgtgaacaacgacatctcctcctggacaaagggcagaagcggagaagctctgagcctcctgaagaaaagattctcccatagacccgtgcaggagaagttcgtgtgcctgaactgcggcttcgagacacacgcagccgagcaagccgccctgaacatcgccagatcctggctgttcctgcggagccaggagtacaagaaataccagacaaacaagacaaccggcaacaccgataagagagccttcgtcgagacctggcagtccttttaccggaagaagcttaaggaggtgtggaaacctgccgtgcggtctggcggatctggcggaggctccaccagccccaagaaaaagagaaaagtctaagctgccttctgcggggcttgccttctggccatgcccttcttctctcccttgcacctgtacctcttggtctttgaataaagcctgagtaggaaggctagcaaaaaaaaaaaaaaaaaaaaaaaaaaaaaaaaaaaaaaaaaaaaaaaaaaaaaaaaaaaaaaaaaaaaaaaaaaaaaaaagcccagccggctccccaacctctaccgaggagggcacctctgagtccgccacccccgagagcggccctggcacctccaccgagcccagcgagggcagcgcacccggcagccctgccggcagccccacctccacagaggagggaaccagcaccgagcccagcgaaggcagcgccccaggcaccagcaccgagcctagtgagcaggagattaaacggatcaacaagatcagaagaagacttgtgaaagacagcaacaccaagaaggccggcaagacaggccccatgaaaaccctgctggttagagtgatgacacccgatctgagagagcggctggaaaacctgagaaagaagcctgaaaatatcccccagcccatcagcaatacatctagagccaacctgaataagctgctgaccgattacaccgaaatgaagaaggcgatcctgcatgtgtactgggaagagttccagaaggaccctgtgggcctgatgagccgggtggcccagcctgccagcaagaagatcgatcagaacaagctgaaacctgagatggacgagaagggcaacctgaccaccgccggctttgcctgctctcagtgtggccagcccctgttcgtgtacaagctggagcaggtgtctgagaagggcaaggcttacaccaactacttcggacggtgcaatgtggccgagcacgaaaagctgatcctgctggcccagctgaagcccgagaaggatagcgacgaagccgtgacatatagcctgggaaagtttgggcagagggccctggatttctacagcattcatgtgaccaaggagtccacccaccccgtgaagcccctggcccagatcgccggaaacagatacgcctccggacctgtgggaaaggccctgagcgacgcatgtatgggcacaatcgcctccttcctgtctaagtaccaggacatcatcatcgaacaccagaaggtggtgaagggcaaccagaagagactggagagcctgcgggagctggccggcaaggaaaacctggaataccctagcgtgaccctgccacctcagcctcacaccaaggagggcgttgatgcctacaacgaagtgatcgcccgggtgcgaatgtgggtgaacctgaacctgtggcagaagctgaagctaagcagagatgatgccaagcctctgctgagactgaagggattcccttcctttcctctggtcgagagacaggccaacgaagtggactggtgggacatggtgtgtaacgtgaagaagctgatcaacgagaaaaaggaggatggcaaggtgttttggcagaatctggctggctacaagagacaggaagccctgagaccatacctgagcagcgaggaagatcggaagaagggaaagaaattcgctcggtaccagctgggcgacctgctgctgcacctggaaaagaagcacggcgaggactggggaaaggtgtacgacgaggcctgggagcggattgacaagaaagtggaaggcctgagcaagcacatcaagctggaagaggaacggagaagcgaggacgcccagagcaaggccgccctgaccgactggctgcgggctaaggccagcttcgtgatcgagggcctgaaggaggccgacaaggacgagttctgcagatgcgagctgaagctgcagaagtggtacggggacctgcggggaaagcccttcgccatcgaagccgagaacagcatcctggacatcagcggcttcagcaagcagtacaactgtgccttcatctggcagaaggacggcgtgaagaagctgaacctgtacctgatcatcaactacttcaagggcggcaagctgcggttcaagaagatcaaacctgaagccttcgaagccaacagattctacaccgtgatcaacaaaaagagcggcgagatcgtgcccatggaggtgaacttcaacttcgacgaccccaacctgatcatcctgcctctggcctttggcaagagacagggcagagaattcatctggaacgacctgctgtccctggaaaccggcagcctgaagctggccaacggaagagtgatcgagaagacactgtacaacagaagaacccggcaggatgagcctgccctgttcgtggccctgaccttcgagcggcgggaggtcctggactcctccaatatcaaaccaatgaacctgatcggcgtggcaagaggcgaaaacatccccgccgtgatcgccctgaccgaccccgagggctgcccactgagccggtttaaggatagcctgggaaacccaacccacatcctgagaatcggcgagagctataaggagaagcagcggaccatccaggccaagaaggaggtggagcagcggagagccggcggctacagccggaagtacgccagcaaagccaagaatctggcagacgatatggtgagaaacaccgctagagatctgctgtactacgccgtgacccaggatgccatgctgatcttcgccaacctgagccggggcttcggccggcagggcaagcggaccttcatggccgagagacagtacacacggatggaggactggctgaccgccaagctggcctacgagggcctgagcaagacctacctgtccaagacactggcccagtacacctccaagacatgcagcaactgtgggtttaccatcaccagcgccgactacgacagggtgctggagaagctgaagaagacagcaacaggctggatgaccacaattaacggcaaggagctgaaggtggagggccagattacctactacaacagatacaagagacagaacgtagtcaaggacctgtccgtcgagctggatagactgagcgaagaatctgtgaacaacgacatctcctcctggacaaagggcagaagcggagaagctctgagcctcctgaagaaaagattctcccatagacccgtgcaggagaagttcgtgtgcctgaactgcggcttcgagacacacgcagccgagcaagccgccctgaacatcgccagatcctggctgttcctgcggagccaggagtacaagaaataccagacaaacaagacaaccggcaacaccgataagagagccttcgtcgagacctggcagtccttttaccggaagaagcttaaggaggtgtggaaacctgccgtgcggtctggcggatctggcggaggctccaccagccccaagaaaaagagaaaagtctaagctgccttctgcggggcttgccttctggccatgcccttcttctctcccttgcacctgtacctcttggtctttgaataaagcctgagtaggaaggctagcaaaaaaaaaaaaaaaaaaaaaaaaaaaaaaaaaaaaaaaaaaaaaaaaaaaaaaaaaaaaaaaaaaaaaaaaaaaaaaaa

SEQ ID NO: 9206 - RNA, 8787 nt, synthetic construct
  source 1..8787: mol_type = other RNA
aggaaataagagagaaaagaagagtaagaagaaatataagagccaccatggcccctaagaagaagcgtaaagtgagccggatgaaccacgaccaggagttcgacccccctaaggtgtaccctcccgtccccgccgagaagagaaagcccatccgggtcctgagcctgttcgatggcatcgccaccggtctgctggtgctgaaggacctgggcatccaggtggataggtacattgcctccgaggtgtgcgaggactccatcaccgtgggaatggtgcgtcatcagggcaagatcatgtacgtgggcgacgtgcggagcgtgacacagaagcatatccaggagtggggccctttcgacctggtgatcggcggcagcccttgcaatgacctgagcatcgtgaacccagcccggaagggcctgtacgagggaaccggcagactgttcttcgagttttacagactgctgcacgacgcccggcctaaggaaggcgacgaccggcccttcttttggctgttcgagaatgtggtggccatgggagtcagcgacaagcgggatattagccggttcctggagagcaaccccgtgatgatcgatgccaaggaagtgagcgccgcccaccgggccagatacttctggggcaatctgcctggcatgaacagacccctggccagcaccgtgaacgacaagctggagctgcaggagtgcctggagcacggccggatcgccaagttcagcaaggtgagaaccatcaccacccgaagcaacagcatcaaacaaggcaaggaccagcactttcctgtgttcatgaacgagaaggaggacatcctgtggtgtaccgagatggagagagtgttcgggttcccagtccactacacagatgtcagcaacatgtctagactggccagacagagactgctgggaagaagctggtccgtccctgtgatcagacacctgttcgcccctctgaaggagtacttcgcctgcgtgagcagcggcaacagcaacgccaacagccggggccccagcttctctagcggcctggtgccactgtccctgagagggagccacatgggccccatggagatctacaaaaccgtgagcgcctggaagcggcagcctgtgcgcgtgctgagcctgtttcggaatatcgataaagtcctgaaaagcctgggattcctggagagcggctctggctccggcggtggcaccctgaagtacgtggaggatgtgacaaacgtggtcagacgggatgtggagaagtggggccccttcgatctggtgtacggcagcacccaacccctgggcagctcttgtgaccggtgccctggctggtacatgtttcagttccaccggatcctgcagtacgccctgccgagacaggagtcccagcggccattcttttggattttcatggacaacttgctgctgaccgaggatgaccaggaaactaccactcggttcctgcagaccgaagccgtgaccctgcaggacgtgagaggccgggactaccagaacgccatgcgggtgtggtccaacatccctggactgaaaagcaagcacgcacctctgacccctaaagaagaggagtacctgcaggcccaggtgcggagcagaagcaagctggacgcccctaaggtggatctgctggtgaagaattgcctcctgcccctgagagagtacttcaagtatttcagccagaatagtctgcccctgggaggcagcggcggcggcatggccttcgaggacgtggccgtgtacttcagccaggaggagtgggtgttcctggacgccgcccagagggccctgtacaggcacgtgatgctggagaacttcgccctggtggacagcatcggcctgagcatcagcaggcccagggtgatcatccagctgcagaggggcgaggagccctgggtgcccaacaggaccaacaccggccccggcaggggcaccaggaggaggcccagcctgggcagcggcggcccaagcagcggcgcccctcctcccagcggcggcaggcggcccaagcagcggcgcccctcctcccagcggcggcagcccagccggctccccaacctctaccgaggagggcacctctgagtccgccacccccgagagcggccctggcacctccaccgagcccagcgagggcagcgcacccggcagccctgccggcagccccacctccacagaggagggaaccagcaccgagcccagcgaaggcagcgccccaggcaccagcaccgagcctagtgagcaggagattaaacggatcaacaagatcagaagaagacttgtgaaagacagcaacaccaagaaggccggcaagacaggccccatgaaaaccctgctggttagagtgatgacacccgatctgagagagcggctggaaaacctgagaaagaagcctgaaaatatcccccagcccatcagcaatacatctagagccaacctgaataagctgctgaccgattacaccgaaatgaagaaggcgatcctgcatgtgtactgggaagagttccagaaggaccctgtgggcctgatgagccgggtggcccagcctgccagcaagaagatcgatcagaacaagctgaaacctgagatggacgagaagggcaacctgaccaccgccggctttgcctgctctcagtgtggccagcccctgttcgtgtacaagctggagcaggtgtctgagaagggcaaggcttacaccaactacttcggacggtgcaatgtggccgagcacgaaaagctgatcctgctggcccagctgaagcccgagaaggatagcgacgaagccgtgacatatagcctgggaaagtttgggcagagggccctggatttctacagcattcatgtgaccaaggagtccacccaccccgtgaagcccctggcccagatcgccggaaacagatacgcctccggacctgtgggaaaggccctgagcgacgcatgtatgggcacaatcgcctccttcctgtctaagtaccaggacatcatcatcgaacaccagaaggtggtgaagggcaaccagaagagactggagagcctgcgggagctggccggcaaggaaaacctggaataccctagcgtgaccctgccacctcagcctcacaccaaggagggcgttgatgcctacaacgaagtgatcgcccgggtgcgaatgtgggtgaacctgaacctgtggcagaagctgaagctaagcagagatgatgccaagcctctgctgagactgaagggattcccttcctttcctctggtcgagagacaggccaacgaagtggactggtgggacatggtgtgtaacgtgaagaagctgatcaacgagaaaaaggaggatggcaaggtgttttggcagaatctggctggctacaagagacaggaagccctgagaccatacctgagcagcgaggaagatcggaagaagggaaagaaattcgctcggtaccagctgggcgacctgctgctgcacctggaaaagaagcacggcgaggactggggaaaggtgtacgacgaggcctgggagcggattgacaagaaagtggaaggcctgagcaagcacatcaagctggaagaggaacggagaagcgaggacgcccagagcaaggccgccctgaccgactggctgcgggctaaggccagcttcgtgatcgagggcctgaaggaggccgacaaggacgagttctgcagatgcgagctgaagctgcagaagtggtacggggacctgcggggaaagcccttcgccatcgaagccgagaacagcatcctggacatcagcggcttcagcaagcagtacaactgtgccttcatctggcagaaggacggcgtgaagaagctgaacctgtacctgatcatcaactacttcaagggcggcaagctgcggttcaagaagatcaaacctgaagccttcgaagccaacagattctacaccgtgatcaacaaaaagagcggcgagatcgtgcccatggaggtgaacttcaacttcgacgaccccaacctgatcatcctgcctctggcctttggcaagagacagggcagagaattcatctggaacgacctgctgtccctggaaaccggcagcctgaagctggccaacggaagagtgatcgagaagacactgtacaacagaagaacccggcaggatgagcctgccctgttcgtggccctgaccttcgagcggcgggaggtcctggactcctccaatatcaaaccaatgaacctgatcggcgtggcaagaggcgaaaacatccccgccgtgatcgccctgaccgaccccgagggctgcccactgagccggtttaaggatagcctgggaaacccaacccacatcctgagaatcggcgagagctataaggagaagcagcggaccatccaggccaagaaggaggtggagcagcggagagccggcggctacagccggaagtacgccagcaaagccaagaatctggcagacgatatggtgagaaacaccgctagagatctgctgtactacgccgtgacccaggatgccatgctgatcttcgccaacctgagccggggcttcggccggcagggcaagcggaccttcatggccgagagacagtacacacggatggaggactggctgaccgccaagctggcctacgagggcctgagcaagacctacctgtccaagacactggcccagtacacctccaagacatgcagcaactgtgggtttaccatcaccagcgccgactacgacagggtgctggagaagctgaagaagacagcaacaggctggatgaccacaattaacggcaaggagctgaaggtggagggccagattacctactacaacagatacaagagacagaacgtagtcaaggacctgtccgtcgagctggatagactgagcgaagaatctgtgaacaacgacatctcctcctggacaaagggcagaagcggagaagctctgagcctcctgaagaaaagattctcccatagacccgtgcaggagaagttcgtgtgcctgaactgcggcttcgagacacacgcagccgagcaagccgccctgaacatcgccagatcctggctgttcctgcggagccaggagtacaagaaataccagacaaacaagacaaccggcaacaccgataagagagccttcgtcgagacctggcagtccttttaccggaagaagcttaaggaggtgtggaaacctgccgtgcggtctggcggatctggcggaggctccaccagccccaagaaaaagagaaaagtctaagctgccttctgcggggcttgccttctggccatgcccttcttctctcccttgcacctgtacctcttggtctttgaataaagcctgagtaggaaggctagcaaaaaaaaaaaaaaaaaaaaaaaaaaaaaaaaaaaaaaaaaaaaaaaaaaaaaaaaaaaaaaaaaaaaaaaaaaaaaaaagcccagccggctccccaacctctaccgaggagggcacctctgagtccgccacccccgagagcggccctggcacctccaccgagcccagcgagggcagcgcacccggcagccctgccggcagccccacctccacagaggagggaaccagcaccgagcccagcgaaggcagcgccccaggcaccagcaccgagcctagtgagcaggagattaaacggatcaacaagatcagaagaagacttgtgaaagacagcaacaccaagaaggccggcaagacaggccccatgaaaaccctgctggttagagtgatgacacccgatctgagagagcggctggaaaacctgagaaagaagcctgaaaatatcccccagcccatcagcaatacatctagagccaacctgaataagctgctgaccgattacaccgaaatgaagaaggcgatcctgcatgtgtactgggaagagttccagaaggaccctgtgggcctgatgagccgggtggcccagcctgccagcaagaagatcgatcagaacaagctgaaacctgagatggacgagaagggcaacctgaccaccgccggctttgcctgctctcagtgtggccagcccctgttcgtgtacaagctggagcaggtgtctgagaagggcaaggcttacaccaactacttcggacggtgcaatgtggccgagcacgaaaagctgatcctgctggcccagctgaagcccgagaaggatagcgacgaagccgtgacatatagcctgggaaagtttgggcagagggccctggatttctacagcattcatgtgaccaaggagtccacccaccccgtgaagcccctggcccagatcgccggaaacagatacgcctccggacctgtgggaaaggccctgagcgacgcatgtatgggcacaatcgcctccttcctgtctaagtaccaggacatcatcatcgaacaccagaaggtggtgaagggcaaccagaagagactggagagcctgcgggagctggccggcaaggaaaacctggaataccctagcgtgaccctgccacctcagcctcacaccaaggagggcgttgatgcctacaacgaagtgatcgcccgggtgcgaatgtgggtgaacctgaacctgtggcagaagctgaagctaagcagagatgatgccaagcctctgctgagactgaagggattcccttcctttcctctggtcgagagacaggccaacgaagtggactggtgggacatggtgtgtaacgtgaagaagctgatcaacgagaaaaaggaggatggcaaggtgttttggcagaatctggctggctacaagagacaggaagccctgagaccatacctgagcagcgaggaagatcggaagaagggaaagaaattcgctcggtaccagctgggcgacctgctgctgcacctggaaaagaagcacggcgaggactggggaaaggtgtacgacgaggcctgggagcggattgacaagaaagtggaaggcctgagcaagcacatcaagctggaagaggaacggagaagcgaggacgcccagagcaaggccgccctgaccgactggctgcgggctaaggccagcttcgtgatcgagggcctgaaggaggccgacaaggacgagttctgcagatgcgagctgaagctgcagaagtggtacggggacctgcggggaaagcccttcgccatcgaagccgagaacagcatcctggacatcagcggcttcagcaagcagtacaactgtgccttcatctggcagaaggacggcgtgaagaagctgaacctgtacctgatcatcaactacttcaagggcggcaagctgcggttcaagaagatcaaacctgaagccttcgaagccaacagattctacaccgtgatcaacaaaaagagcggcgagatcgtgcccatggaggtgaacttcaacttcgacgaccccaacctgatcatcctgcctctggcctttggcaagagacagggcagagaattcatctggaacgacctgctgtccctggaaaccggcagcctgaagctggccaacggaagagtgatcgagaagacactgtacaacagaagaacccggcaggatgagcctgccctgttcgtggccctgaccttcgagcggcgggaggtcctggactcctccaatatcaaaccaatgaacctgatcggcgtggcaagaggcgaaaacatccccgccgtgatcgccctgaccgaccccgagggctgcccactgagccggtttaaggatagcctgggaaacccaacccacatcctgagaatcggcgagagctataaggagaagcagcggaccatccaggccaagaaggaggtggagcagcggagagccggcggctacagccggaagtacgccagcaaagccaagaatctggcagacgatatggtgagaaacaccgctagagatctgctgtactacgccgtgacccaggatgccatgctgatcttcgccaacctgagccggggcttcggccggcagggcaagcggaccttcatggccgagagacagtacacacggatggaggactggctgaccgccaagctggcctacgagggcctgagcaagacctacctgtccaagacactggcccagtacacctccaagacatgcagcaactgtgggtttaccatcaccagcgccgactacgacagggtgctggagaagctgaagaagacagcaacaggctggatgaccacaattaacggcaaggagctgaaggtggagggccagattacctactacaacagatacaagagacagaacgtagtcaaggacctgtccgtcgagctggatagactgagcgaagaatctgtgaacaacgacatctcctcctggacaaagggcagaagcggagaagctctgagcctcctgaagaaaagattctcccatagacccgtgcaggagaagttcgtgtgcctgaactgcggcttcgagacacacgcagccgagcaagccgccctgaacatcgccagatcctggctgttcctgcggagccaggagtacaagaaataccagacaaacaagacaaccggcaacaccgataagagagccttcgtcgagacctggcagtccttttaccggaagaagcttaaggaggtgtggaaacctgccgtgcggtctggcggatctggcggaggctccaccagccccaagaaaaagagaaaagtctaagctgccttctgcggggcttgccttctggccatgcccttcttctctcccttgcacctgtacctcttggtctttgaataaagcctgagtaggaaggctagcaaaaaaaaaaaaaaaaaaaaaaaaaaaaaaaaaaaaaaaaaaaaaaaaaaaaaaaaaaaaaaaaaaaaaaaaaaaaaaaa

SEQ ID NO: 9207 - RNA, 8787 nt, synthetic construct
  source 1..8787: mol_type = other RNA
aggaaataagagagaaaagaagagtaagaagaaatataagagccaccatggcccctaagaagaagcgtaaagtgagccggatgaaccacgaccaggagttcgacccccctaaggtgtaccctcccgtccccgccgagaagagaaagcccatccgggtcctgagcctgttcgatggcatcgccaccggtctgctggtgctgaaggacctgggcatccaggtggataggtacattgcctccgaggtgtgcgaggactccatcaccgtgggaatggtgcgtcatcagggcaagatcatgtacgtgggcgacgtgcggagcgtgacacagaagcatatccaggagtggggccctttcgacctggtgatcggcggcagcccttgcaatgacctgagcatcgtgaacccagcccggaagggcctgtacgagggaaccggcagactgttcttcgagttttacagactgctgcacgacgcccggcctaaggaaggcgacgaccggcccttcttttggctgttcgagaatgtggtggccatgggagtcagcgacaagcgggatattagccggttcctggagagcaaccccgtgatgatcgatgccaaggaagtgagcgccgcccaccgggccagatacttctggggcaatctgcctggcatgaacagacccctggccagcaccgtgaacgacaagctggagctgcaggagtgcctggagcacggccggatcgccaagttcagcaaggtgagaaccatcaccacccgaagcaacagcatcaaacaaggcaaggaccagcactttcctgtgttcatgaacgagaaggaggacatcctgtggtgtaccgagatggagagagtgttcgggttcccagtccactacacagatgtcagcaacatgtctagactggccagacagagactgctgggaagaagctggtccgtccctgtgatcagacacctgttcgcccctctgaaggagtacttcgcctgcgtgagcagcggcaacagcaacgccaacagccggggccccagcttctctagcggcctggtgccactgtccctgagagggagccacatgggccccatggagatctacaaaaccgtgagcgcctggaagcggcagcctgtgcgcgtgctgagcctgtttcggaatatcgataaagtcctgaaaagcctgggattcctggagagcggctctggctccggcggtggcaccctgaagtacgtggaggatgtgacaaacgtggtcagacgggatgtggagaagtggggccccttcgatctggtgtacggcagcacccaacccctgggcagctcttgtgaccggtgccctggctggtacatgtttcagttccaccggatcctgcagtacgccctgccgagacaggagtcccagcggccattcttttggattttcatggacaacttgctgctgaccgaggatgaccaggaaactaccactcggttcctgcagaccgaagccgtgaccctgcaggacgtgagaggccgggactaccagaacgccatgcgggtgtggtccaacatccctggactgaaaagcaagcacgcacctctgacccctaaagaagaggagtacctgcaggcccaggtgcggagcagaagcaagctggacgcccctaaggtggatctgctggtgaagaattgcctcctgcccctgagagagtacttcaagtatttcagccagaatagtctgcccctgggaggcagcggcggcggcgaggagctgcccgtggtgttcgaggacgtggccgtgtacttcaccagggaggagtggggcatgctggtgaagaggcagaaggagctgtacagggacgtgatgaggatgaactacgagctgctggccagcctgggccccgccgccgccaagcccgacctgatcagcaagctggagaggagggccgccccctggatcaaggaccccaacggccccaagtggggcaagggcaggccccccggcaagggcggcccaagcagcggcgcccctcctcccagcggcggcaggcggcccaagcagcggcgcccctcctcccagcggcggcagcccagccggctccccaacctctaccgaggagggcacctctgagtccgccacccccgagagcggccctggcacctccaccgagcccagcgagggcagcgcacccggcagccctgccggcagccccacctccacagaggagggaaccagcaccgagcccagcgaaggcagcgccccaggcaccagcaccgagcctagtgagcaggagattaaacggatcaacaagatcagaagaagacttgtgaaagacagcaacaccaagaaggccggcaagacaggccccatgaaaaccctgctggttagagtgatgacacccgatctgagagagcggctggaaaacctgagaaagaagcctgaaaatatcccccagcccatcagcaatacatctagagccaacctgaataagctgctgaccgattacaccgaaatgaagaaggcgatcctgcatgtgtactgggaagagttccagaaggaccctgtgggcctgatgagccgggtggcccagcctgccagcaagaagatcgatcagaacaagctgaaacctgagatggacgagaagggcaacctgaccaccgccggctttgcctgctctcagtgtggccagcccctgttcgtgtacaagctggagcaggtgtctgagaagggcaaggcttacaccaactacttcggacggtgcaatgtggccgagcacgaaaagctgatcctgctggcccagctgaagcccgagaaggatagcgacgaagccgtgacatatagcctgggaaagtttgggcagagggccctggatttctacagcattcatgtgaccaaggagtccacccaccccgtgaagcccctggcccagatcgccggaaacagatacgcctccggacctgtgggaaaggccctgagcgacgcatgtatgggcacaatcgcctccttcctgtctaagtaccaggacatcatcatcgaacaccagaaggtggtgaagggcaaccagaagagactggagagcctgcgggagctggccggcaaggaaaacctggaataccctagcgtgaccctgccacctcagcctcacaccaaggagggcgttgatgcctacaacgaagtgatcgcccgggtgcgaatgtgggtgaacctgaacctgtggcagaagctgaagctaagcagagatgatgccaagcctctgctgagactgaagggattcccttcctttcctctggtcgagagacaggccaacgaagtggactggtgggacatggtgtgtaacgtgaagaagctgatcaacgagaaaaaggaggatggcaaggtgttttggcagaatctggctggctacaagagacaggaagccctgagaccatacctgagcagcgaggaagatcggaagaagggaaagaaattcgctcggtaccagctgggcgacctgctgctgcacctggaaaagaagcacggcgaggactggggaaaggtgtacgacgaggcctgggagcggattgacaagaaagtggaaggcctgagcaagcacatcaagctggaagaggaacggagaagcgaggacgcccagagcaaggccgccctgaccgactggctgcgggctaaggccagcttcgtgatcgagggcctgaaggaggccgacaaggacgagttctgcagatgcgagctgaagctgcagaagtggtacggggacctgcggggaaagcccttcgccatcgaagccgagaacagcatcctggacatcagcggcttcagcaagcagtacaactgtgccttcatctggcagaaggacggcgtgaagaagctgaacctgtacctgatcatcaactacttcaagggcggcaagctgcggttcaagaagatcaaacctgaagccttcgaagccaacagattctacaccgtgatcaacaaaaagagcggcgagatcgtgcccatggaggtgaacttcaacttcgacgaccccaacctgatcatcctgcctctggcctttggcaagagacagggcagagaattcatctggaacgacctgctgtccctggaaaccggcagcctgaagctggccaacggaagagtgatcgagaagacactgtacaacagaagaacccggcaggatgagcctgccctgttcgtggccctgaccttcgagcggcgggaggtcctggactcctccaatatcaaaccaatgaacctgatcggcgtggcaagaggcgaaaacatccccgccgtgatcgccctgaccgaccccgagggctgcccactgagccggtttaaggatagcctgggaaacccaacccacatcctgagaatcggcgagagctataaggagaagcagcggaccatccaggccaagaaggaggtggagcagcggagagccggcggctacagccggaagtacgccagcaaagccaagaatctggcagacgatatggtgagaaacaccgctagagatctgctgtactacgccgtgacccaggatgccatgctgatcttcgccaacctgagccggggcttcggccggcagggcaagcggaccttcatggccgagagacagtacacacggatggaggactggctgaccgccaagctggcctacgagggcctgagcaagacctacctgtccaagacactggcccagtacacctccaagacatgcagcaactgtgggtttaccatcaccagcgccgactacgacagggtgctggagaagctgaagaagacagcaacaggctggatgaccacaattaacggcaaggagctgaaggtggagggccagattacctactacaacagatacaagagacagaacgtagtcaaggacctgtccgtcgagctggatagactgagcgaagaatctgtgaacaacgacatctcctcctggacaaagggcagaagcggagaagctctgagcctcctgaagaaaagattctcccatagacccgtgcaggagaagttcgtgtgcctgaactgcggcttcgagacacacgcagccgagcaagccgccctgaacatcgccagatcctggctgttcctgcggagccaggagtacaagaaataccagacaaacaagacaaccggcaacaccgataagagagccttcgtcgagacctggcagtccttttaccggaagaagcttaaggaggtgtggaaacctgccgtgcggtctggcggatctggcggaggctccaccagccccaagaaaaagagaaaagtctaagctgccttctgcggggcttgccttctggccatgcccttcttctctcccttgcacctgtacctcttggtctttgaataaagcctgagtaggaaggctagcaaaaaaaaaaaaaaaaaaaaaaaaaaaaaaaaaaaaaaaaaaaaaaaaaaaaaaaaaaaaaaaaaaaaaaaaaaaaaaaagcccagccggctccccaacctctaccgaggagggcacctctgagtccgccacccccgagagcggccctggcacctccaccgagcccagcgagggcagcgcacccggcagccctgccggcagccccacctccacagaggagggaaccagcaccgagcccagcgaaggcagcgccccaggcaccagcaccgagcctagtgagcaggagattaaacggatcaacaagatcagaagaagacttgtgaaagacagcaacaccaagaaggccggcaagacaggccccatgaaaaccctgctggttagagtgatgacacccgatctgagagagcggctggaaaacctgagaaagaagcctgaaaatatcccccagcccatcagcaatacatctagagccaacctgaataagctgctgaccgattacaccgaaatgaagaaggcgatcctgcatgtgtactgggaagagttccagaaggaccctgtgggcctgatgagccgggtggcccagcctgccagcaagaagatcgatcagaacaagctgaaacctgagatggacgagaagggcaacctgaccaccgccggctttgcctgctctcagtgtggccagcccctgttcgtgtacaagctggagcaggtgtctgagaagggcaaggcttacaccaactacttcggacggtgcaatgtggccgagcacgaaaagctgatcctgctggcccagctgaagcccgagaaggatagcgacgaagccgtgacatatagcctgggaaagtttgggcagagggccctggatttctacagcattcatgtgaccaaggagtccacccaccccgtgaagcccctggcccagatcgccggaaacagatacgcctccggacctgtgggaaaggccctgagcgacgcatgtatgggcacaatcgcctccttcctgtctaagtaccaggacatcatcatcgaacaccagaaggtggtgaagggcaaccagaagagactggagagcctgcgggagctggccggcaaggaaaacctggaataccctagcgtgaccctgccacctcagcctcacaccaaggagggcgttgatgcctacaacgaagtgatcgcccgggtgcgaatgtgggtgaacctgaacctgtggcagaagctgaagctaagcagagatgatgccaagcctctgctgagactgaagggattcccttcctttcctctggtcgagagacaggccaacgaagtggactggtgggacatggtgtgtaacgtgaagaagctgatcaacgagaaaaaggaggatggcaaggtgttttggcagaatctggctggctacaagagacaggaagccctgagaccatacctgagcagcgaggaagatcggaagaagggaaagaaattcgctcggtaccagctgggcgacctgctgctgcacctggaaaagaagcacggcgaggactggggaaaggtgtacgacgaggcctgggagcggattgacaagaaagtggaaggcctgagcaagcacatcaagctggaagaggaacggagaagcgaggacgcccagagcaaggccgccctgaccgactggctgcgggctaaggccagcttcgtgatcgagggcctgaaggaggccgacaaggacgagttctgcagatgcgagctgaagctgcagaagtggtacggggacctgcggggaaagcccttcgccatcgaagccgagaacagcatcctggacatcagcggcttcagcaagcagtacaactgtgccttcatctggcagaaggacggcgtgaagaagctgaacctgtacctgatcatcaactacttcaagggcggcaagctgcggttcaagaagatcaaacctgaagccttcgaagccaacagattctacaccgtgatcaacaaaaagagcggcgagatcgtgcccatggaggtgaacttcaacttcgacgaccccaacctgatcatcctgcctctggcctttggcaagagacagggcagagaattcatctggaacgacctgctgtccctggaaaccggcagcctgaagctggccaacggaagagtgatcgagaagacactgtacaacagaagaacccggcaggatgagcctgccctgttcgtggccctgaccttcgagcggcgggaggtcctggactcctccaatatcaaaccaatgaacctgatcggcgtggcaagaggcgaaaacatccccgccgtgatcgccctgaccgaccccgagggctgcccactgagccggtttaaggatagcctgggaaacccaacccacatcctgagaatcggcgagagctataaggagaagcagcggaccatccaggccaagaaggaggtggagcagcggagagccggcggctacagccggaagtacgccagcaaagccaagaatctggcagacgatatggtgagaaacaccgctagagatctgctgtactacgccgtgacccaggatgccatgctgatcttcgccaacctgagccggggcttcggccggcagggcaagcggaccttcatggccgagagacagtacacacggatggaggactggctgaccgccaagctggcctacgagggcctgagcaagacctacctgtccaagacactggcccagtacacctccaagacatgcagcaactgtgggtttaccatcaccagcgccgactacgacagggtgctggagaagctgaagaagacagcaacaggctggatgaccacaattaacggcaaggagctgaaggtggagggccagattacctactacaacagatacaagagacagaacgtagtcaaggacctgtccgtcgagctggatagactgagcgaagaatctgtgaacaacgacatctcctcctggacaaagggcagaagcggagaagctctgagcctcctgaagaaaagattctcccatagacccgtgcaggagaagttcgtgtgcctgaactgcggcttcgagacacacgcagccgagcaagccgccctgaacatcgccagatcctggctgttcctgcggagccaggagtacaagaaataccagacaaacaagacaaccggcaacaccgataagagagccttcgtcgagacctggcagtccttttaccggaagaagcttaaggaggtgtggaaacctgccgtgcggtctggcggatctggcggaggctccaccagccccaagaaaaagagaaaagtctaagctgccttctgcggggcttgccttctggccatgcccttcttctctcccttgcacctgtacctcttggtctttgaataaagcctgagtaggaaggctagcaaaaaaaaaaaaaaaaaaaaaaaaaaaaaaaaaaaaaaaaaaaaaaaaaaaaaaaaaaaaaaaaaaaaaaaaaaaaaaaa

SEQ ID NO: 9208 - RNA, 8787 nt, synthetic construct
  source 1..8787: mol_type = other RNA
aggaaataagagagaaaagaagagtaagaagaaatataagagccaccatggcccctaagaagaagcgtaaagtgagccggatgaaccacgaccaggagttcgacccccctaaggtgtaccctcccgtccccgccgagaagagaaagcccatccgggtcctgagcctgttcgatggcatcgccaccggtctgctggtgctgaaggacctgggcatccaggtggataggtacattgcctccgaggtgtgcgaggactccatcaccgtgggaatggtgcgtcatcagggcaagatcatgtacgtgggcgacgtgcggagcgtgacacagaagcatatccaggagtggggccctttcgacctggtgatcggcggcagcccttgcaatgacctgagcatcgtgaacccagcccggaagggcctgtacgagggaaccggcagactgttcttcgagttttacagactgctgcacgacgcccggcctaaggaaggcgacgaccggcccttcttttggctgttcgagaatgtggtggccatgggagtcagcgacaagcgggatattagccggttcctggagagcaaccccgtgatgatcgatgccaaggaagtgagcgccgcccaccgggccagatacttctggggcaatctgcctggcatgaacagacccctggccagcaccgtgaacgacaagctggagctgcaggagtgcctggagcacggccggatcgccaagttcagcaaggtgagaaccatcaccacccgaagcaacagcatcaaacaaggcaaggaccagcactttcctgtgttcatgaacgagaaggaggacatcctgtggtgtaccgagatggagagagtgttcgggttcccagtccactacacagatgtcagcaacatgtctagactggccagacagagactgctgggaagaagctggtccgtccctgtgatcagacacctgttcgcccctctgaaggagtacttcgcctgcgtgagcagcggcaacagcaacgccaacagccggggccccagcttctctagcggcctggtgccactgtccctgagagggagccacatgggccccatggagatctacaaaaccgtgagcgcctggaagcggcagcctgtgcgcgtgctgagcctgtttcggaatatcgataaagtcctgaaaagcctgggattcctggagagcggctctggctccggcggtggcaccctgaagtacgtggaggatgtgacaaacgtggtcagacgggatgtggagaagtggggccccttcgatctggtgtacggcagcacccaacccctgggcagctcttgtgaccggtgccctggctggtacatgtttcagttccaccggatcctgcagtacgccctgccgagacaggagtcccagcggccattcttttggattttcatggacaacttgctgctgaccgaggatgaccaggaaactaccactcggttcctgcagaccgaagccgtgaccctgcaggacgtgagaggccgggactaccagaacgccatgcgggtgtggtccaacatccctggactgaaaagcaagcacgcacctctgacccctaaagaagaggagtacctgcaggcccaggtgcggagcagaagcaagctggacgcccctaaggtggatctgctggtgaagaattgcctcctgcccctgagagagtacttcaagtatttcagccagaatagtctgcccctgggaggcagcggcggcggcgcccaggagagcgtgatgttcagcgacgtgagcatcgacttcagccaggaggagtgggagtgcctgaacgacgaccagagggacctgtacagggacgtgatgctggagaactacagccacctggtgagcatgggccacagcgtgagcaagcccgacgtgatcagcttcctggagcagggcaaggagccctggctggtggacagggagctgaccagggaccactggcccgtgctggagagcaggggcggcccaagcagcggcgcccctcctcccagcggcggcaggcggcccaagcagcggcgcccctcctcccagcggcggcagcccagccggctccccaacctctaccgaggagggcacctctgagtccgccacccccgagagcggccctggcacctccaccgagcccagcgagggcagcgcacccggcagccctgccggcagccccacctccacagaggagggaaccagcaccgagcccagcgaaggcagcgccccaggcaccagcaccgagcctagtgagcaggagattaaacggatcaacaagatcagaagaagacttgtgaaagacagcaacaccaagaaggccggcaagacaggccccatgaaaaccctgctggttagagtgatgacacccgatctgagagagcggctggaaaacctgagaaagaagcctgaaaatatcccccagcccatcagcaatacatctagagccaacctgaataagctgctgaccgattacaccgaaatgaagaaggcgatcctgcatgtgtactgggaagagttccagaaggaccctgtgggcctgatgagccgggtggcccagcctgccagcaagaagatcgatcagaacaagctgaaacctgagatggacgagaagggcaacctgaccaccgccggctttgcctgctctcagtgtggccagcccctgttcgtgtacaagctggagcaggtgtctgagaagggcaaggcttacaccaactacttcggacggtgcaatgtggccgagcacgaaaagctgatcctgctggcccagctgaagcccgagaaggatagcgacgaagccgtgacatatagcctgggaaagtttgggcagagggccctggatttctacagcattcatgtgaccaaggagtccacccaccccgtgaagcccctggcccagatcgccggaaacagatacgcctccggacctgtgggaaaggccctgagcgacgcatgtatgggcacaatcgcctccttcctgtctaagtaccaggacatcatcatcgaacaccagaaggtggtgaagggcaaccagaagagactggagagcctgcgggagctggccggcaaggaaaacctggaataccctagcgtgaccctgccacctcagcctcacaccaaggagggcgttgatgcctacaacgaagtgatcgcccgggtgcgaatgtgggtgaacctgaacctgtggcagaagctgaagctaagcagagatgatgccaagcctctgctgagactgaagggattcccttcctttcctctggtcgagagacaggccaacgaagtggactggtgggacatggtgtgtaacgtgaagaagctgatcaacgagaaaaaggaggatggcaaggtgttttggcagaatctggctggctacaagagacaggaagccctgagaccatacctgagcagcgaggaagatcggaagaagggaaagaaattcgctcggtaccagctgggcgacctgctgctgcacctggaaaagaagcacggcgaggactggggaaaggtgtacgacgaggcctgggagcggattgacaagaaagtggaaggcctgagcaagcacatcaagctggaagaggaacggagaagcgaggacgcccagagcaaggccgccctgaccgactggctgcgggctaaggccagcttcgtgatcgagggcctgaaggaggccgacaaggacgagttctgcagatgcgagctgaagctgcagaagtggtacggggacctgcggggaaagcccttcgccatcgaagccgagaacagcatcctggacatcagcggcttcagcaagcagtacaactgtgccttcatctggcagaaggacggcgtgaagaagctgaacctgtacctgatcatcaactacttcaagggcggcaagctgcggttcaagaagatcaaacctgaagccttcgaagccaacagattctacaccgtgatcaacaaaaagagcggcgagatcgtgcccatggaggtgaacttcaacttcgacgaccccaacctgatcatcctgcctctggcctttggcaagagacagggcagagaattcatctggaacgacctgctgtccctggaaaccggcagcctgaagctggccaacggaagagtgatcgagaagacactgtacaacagaagaacccggcaggatgagcctgccctgttcgtggccctgaccttcgagcggcgggaggtcctggactcctccaatatcaaaccaatgaacctgatcggcgtggcaagaggcgaaaacatccccgccgtgatcgccctgaccgaccccgagggctgcccactgagccggtttaaggatagcctgggaaacccaacccacatcctgagaatcggcgagagctataaggagaagcagcggaccatccaggccaagaaggaggtggagcagcggagagccggcggctacagccggaagtacgccagcaaagccaagaatctggcagacgatatggtgagaaacaccgctagagatctgctgtactacgccgtgacccaggatgccatgctgatcttcgccaacctgagccggggcttcggccggcagggcaagcggaccttcatggccgagagacagtacacacggatggaggactggctgaccgccaagctggcctacgagggcctgagcaagacctacctgtccaagacactggcccagtacacctccaagacatgcagcaactgtgggtttaccatcaccagcgccgactacgacagggtgctggagaagctgaagaagacagcaacaggctggatgaccacaattaacggcaaggagctgaaggtggagggccagattacctactacaacagatacaagagacagaacgtagtcaaggacctgtccgtcgagctggatagactgagcgaagaatctgtgaacaacgacatctcctcctggacaaagggcagaagcggagaagctctgagcctcctgaagaaaagattctcccatagacccgtgcaggagaagttcgtgtgcctgaactgcggcttcgagacacacgcagccgagcaagccgccctgaacatcgccagatcctggctgttcctgcggagccaggagtacaagaaataccagacaaacaagacaaccggcaacaccgataagagagccttcgtcgagacctggcagtccttttaccggaagaagcttaaggaggtgtggaaacctgccgtgcggtctggcggatctggcggaggctccaccagccccaagaaaaagagaaaagtctaagctgccttctgcggggcttgccttctggccatgcccttcttctctcccttgcacctgtacctcttggtctttgaataaagcctgagtaggaaggctagcaaaaaaaaaaaaaaaaaaaaaaaaaaaaaaaaaaaaaaaaaaaaaaaaaaaaaaaaaaaaaaaaaaaaaaaaaaaaaaaagcccagccggctccccaacctctaccgaggagggcacctctgagtccgccacccccgagagcggccctggcacctccaccgagcccagcgagggcagcgcacccggcagccctgccggcagccccacctccacagaggagggaaccagcaccgagcccagcgaaggcagcgccccaggcaccagcaccgagcctagtgagcaggagattaaacggatcaacaagatcagaagaagacttgtgaaagacagcaacaccaagaaggccggcaagacaggccccatgaaaaccctgctggttagagtgatgacacccgatctgagagagcggctggaaaacctgagaaagaagcctgaaaatatcccccagcccatcagcaatacatctagagccaacctgaataagctgctgaccgattacaccgaaatgaagaaggcgatcctgcatgtgtactgggaagagttccagaaggaccctgtgggcctgatgagccgggtggcccagcctgccagcaagaagatcgatcagaacaagctgaaacctgagatggacgagaagggcaacctgaccaccgccggctttgcctgctctcagtgtggccagcccctgttcgtgtacaagctggagcaggtgtctgagaagggcaaggcttacaccaactacttcggacggtgcaatgtggccgagcacgaaaagctgatcctgctggcccagctgaagcccgagaaggatagcgacgaagccgtgacatatagcctgggaaagtttgggcagagggccctggatttctacagcattcatgtgaccaaggagtccacccaccccgtgaagcccctggcccagatcgccggaaacagatacgcctccggacctgtgggaaaggccctgagcgacgcatgtatgggcacaatcgcctccttcctgtctaagtaccaggacatcatcatcgaacaccagaaggtggtgaagggcaaccagaagagactggagagcctgcgggagctggccggcaaggaaaacctggaataccctagcgtgaccctgccacctcagcctcacaccaaggagggcgttgatgcctacaacgaagtgatcgcccgggtgcgaatgtgggtgaacctgaacctgtggcagaagctgaagctaagcagagatgatgccaagcctctgctgagactgaagggattcccttcctttcctctggtcgagagacaggccaacgaagtggactggtgggacatggtgtgtaacgtgaagaagctgatcaacgagaaaaaggaggatggcaaggtgttttggcagaatctggctggctacaagagacaggaagccctgagaccatacctgagcagcgaggaagatcggaagaagggaaagaaattcgctcggtaccagctgggcgacctgctgctgcacctggaaaagaagcacggcgaggactggggaaaggtgtacgacgaggcctgggagcggattgacaagaaagtggaaggcctgagcaagcacatcaagctggaagaggaacggagaagcgaggacgcccagagcaaggccgccctgaccgactggctgcgggctaaggccagcttcgtgatcgagggcctgaaggaggccgacaaggacgagttctgcagatgcgagctgaagctgcagaagtggtacggggacctgcggggaaagcccttcgccatcgaagccgagaacagcatcctggacatcagcggcttcagcaagcagtacaactgtgccttcatctggcagaaggacggcgtgaagaagctgaacctgtacctgatcatcaactacttcaagggcggcaagctgcggttcaagaagatcaaacctgaagccttcgaagccaacagattctacaccgtgatcaacaaaaagagcggcgagatcgtgcccatggaggtgaacttcaacttcgacgaccccaacctgatcatcctgcctctggcctttggcaagagacagggcagagaattcatctggaacgacctgctgtccctggaaaccggcagcctgaagctggccaacggaagagtgatcgagaagacactgtacaacagaagaacccggcaggatgagcctgccctgttcgtggccctgaccttcgagcggcgggaggtcctggactcctccaatatcaaaccaatgaacctgatcggcgtggcaagaggcgaaaacatccccgccgtgatcgccctgaccgaccccgagggctgcccactgagccggtttaaggatagcctgggaaacccaacccacatcctgagaatcggcgagagctataaggagaagcagcggaccatccaggccaagaaggaggtggagcagcggagagccggcggctacagccggaagtacgccagcaaagccaagaatctggcagacgatatggtgagaaacaccgctagagatctgctgtactacgccgtgacccaggatgccatgctgatcttcgccaacctgagccggggcttcggccggcagggcaagcggaccttcatggccgagagacagtacacacggatggaggactggctgaccgccaagctggcctacgagggcctgagcaagacctacctgtccaagacactggcccagtacacctccaagacatgcagcaactgtgggtttaccatcaccagcgccgactacgacagggtgctggagaagctgaagaagacagcaacaggctggatgaccacaattaacggcaaggagctgaaggtggagggccagattacctactacaacagatacaagagacagaacgtagtcaaggacctgtccgtcgagctggatagactgagcgaagaatctgtgaacaacgacatctcctcctggacaaagggcagaagcggagaagctctgagcctcctgaagaaaagattctcccatagacccgtgcaggagaagttcgtgtgcctgaactgcggcttcgagacacacgcagccgagcaagccgccctgaacatcgccagatcctggctgttcctgcggagccaggagtacaagaaataccagacaaacaagacaaccggcaacaccgataagagagccttcgtcgagacctggcagtccttttaccggaagaagcttaaggaggtgtggaaacctgccgtgcggtctggcggatctggcggaggctccaccagccccaagaaaaagagaaaagtctaagctgccttctgcggggcttgccttctggccatgcccttcttctctcccttgcacctgtacctcttggtctttgaataaagcctgagtaggaaggctagcaaaaaaaaaaaaaaaaaaaaaaaaaaaaaaaaaaaaaaaaaaaaaaaaaaaaaaaaaaaaaaaaaaaaaaaaaaaaaaaa

SEQ ID NO: 9209 - RNA, 8787 nt, synthetic construct
  source 1..8787: mol_type = other RNA
aggaaataagagagaaaagaagagtaagaagaaatataagagccaccatggcccctaagaagaagcgtaaagtgagccggatgaaccacgaccaggagttcgacccccctaaggtgtaccctcccgtccccgccgagaagagaaagcccatccgggtcctgagcctgttcgatggcatcgccaccggtctgctggtgctgaaggacctgggcatccaggtggataggtacattgcctccgaggtgtgcgaggactccatcaccgtgggaatggtgcgtcatcagggcaagatcatgtacgtgggcgacgtgcggagcgtgacacagaagcatatccaggagtggggccctttcgacctggtgatcggcggcagcccttgcaatgacctgagcatcgtgaacccagcccggaagggcctgtacgagggaaccggcagactgttcttcgagttttacagactgctgcacgacgcccggcctaaggaaggcgacgaccggcccttcttttggctgttcgagaatgtggtggccatgggagtcagcgacaagcgggatattagccggttcctggagagcaaccccgtgatgatcgatgccaaggaagtgagcgccgcccaccgggccagatacttctggggcaatctgcctggcatgaacagacccctggccagcaccgtgaacgacaagctggagctgcaggagtgcctggagcacggccggatcgccaagttcagcaaggtgagaaccatcaccacccgaagcaacagcatcaaacaaggcaaggaccagcactttcctgtgttcatgaacgagaaggaggacatcctgtggtgtaccgagatggagagagtgttcgggttcccagtccactacacagatgtcagcaacatgtctagactggccagacagagactgctgggaagaagctggtccgtccctgtgatcagacacctgttcgcccctctgaaggagtacttcgcctgcgtgagcagcggcaacagcaacgccaacagccggggccccagcttctctagcggcctggtgccactgtccctgagagggagccacatgggccccatggagatctacaaaaccgtgagcgcctggaagcggcagcctgtgcgcgtgctgagcctgtttcggaatatcgataaagtcctgaaaagcctgggattcctggagagcggctctggctccggcggtggcaccctgaagtacgtggaggatgtgacaaacgtggtcagacgggatgtggagaagtggggccccttcgatctggtgtacggcagcacccaacccctgggcagctcttgtgaccggtgccctggctggtacatgtttcagttccaccggatcctgcagtacgccctgccgagacaggagtcccagcggccattcttttggattttcatggacaacttgctgctgaccgaggatgaccaggaaactaccactcggttcctgcagaccgaagccgtgaccctgcaggacgtgagaggccgggactaccagaacgccatgcgggtgtggtccaacatccctggactgaaaagcaagcacgcacctctgacccctaaagaagaggagtacctgcaggcccaggtgcggagcagaagcaagctggacgcccctaaggtggatctgctggtgaagaattgcctcctgcccctgagagagtacttcaagtatttcagccagaatagtctgcccctgggaggcagcggcggcggcagccaggagagcgtgagcttcgaggacgtggccgtgtacttcacccagaaccagtgggccagcctggccagcgcccagaggaccctgtacagggaggtgatgctggagaactacgccaacgtgaccagcctggccgccttccccttccccaagcccgacctgatcttccagctggagaggggcgaggcccccggcggcctggacccctggaccagcatcaggagggaggtgaggggcgtgtgcggcggcccaagcagcggcgcccctcctcccagcggcggcaggcggcccaagcagcggcgcccctcctcccagcggcggcagcccagccggctccccaacctctaccgaggagggcacctctgagtccgccacccccgagagcggccctggcacctccaccgagcccagcgagggcagcgcacccggcagccctgccggcagccccacctccacagaggagggaaccagcaccgagcccagcgaaggcagcgccccaggcaccagcaccgagcctagtgagcaggagattaaacggatcaacaagatcagaagaagacttgtgaaagacagcaacaccaagaaggccggcaagacaggccccatgaaaaccctgctggttagagtgatgacacccgatctgagagagcggctggaaaacctgagaaagaagcctgaaaatatcccccagcccatcagcaatacatctagagccaacctgaataagctgctgaccgattacaccgaaatgaagaaggcgatcctgcatgtgtactgggaagagttccagaaggaccctgtgggcctgatgagccgggtggcccagcctgccagcaagaagatcgatcagaacaagctgaaacctgagatggacgagaagggcaacctgaccaccgccggctttgcctgctctcagtgtggccagcccctgttcgtgtacaagctggagcaggtgtctgagaagggcaaggcttacaccaactacttcggacggtgcaatgtggccgagcacgaaaagctgatcctgctggcccagctgaagcccgagaaggatagcgacgaagccgtgacatatagcctgggaaagtttgggcagagggccctggatttctacagcattcatgtgaccaaggagtccacccaccccgtgaagcccctggcccagatcgccggaaacagatacgcctccggacctgtgggaaaggccctgagcgacgcatgtatgggcacaatcgcctccttcctgtctaagtaccaggacatcatcatcgaacaccagaaggtggtgaagggcaaccagaagagactggagagcctgcgggagctggccggcaaggaaaacctggaataccctagcgtgaccctgccacctcagcctcacaccaaggagggcgttgatgcctacaacgaagtgatcgcccgggtgcgaatgtgggtgaacctgaacctgtggcagaagctgaagctaagcagagatgatgccaagcctctgctgagactgaagggattcccttcctttcctctggtcgagagacaggccaacgaagtggactggtgggacatggtgtgtaacgtgaagaagctgatcaacgagaaaaaggaggatggcaaggtgttttggcagaatctggctggctacaagagacaggaagccctgagaccatacctgagcagcgaggaagatcggaagaagggaaagaaattcgctcggtaccagctgggcgacctgctgctgcacctggaaaagaagcacggcgaggactggggaaaggtgtacgacgaggcctgggagcggattgacaagaaagtggaaggcctgagcaagcacatcaagctggaagaggaacggagaagcgaggacgcccagagcaaggccgccctgaccgactggctgcgggctaaggccagcttcgtgatcgagggcctgaaggaggccgacaaggacgagttctgcagatgcgagctgaagctgcagaagtggtacggggacctgcggggaaagcccttcgccatcgaagccgagaacagcatcctggacatcagcggcttcagcaagcagtacaactgtgccttcatctggcagaaggacggcgtgaagaagctgaacctgtacctgatcatcaactacttcaagggcggcaagctgcggttcaagaagatcaaacctgaagccttcgaagccaacagattctacaccgtgatcaacaaaaagagcggcgagatcgtgcccatggaggtgaacttcaacttcgacgaccccaacctgatcatcctgcctctggcctttggcaagagacagggcagagaattcatctggaacgacctgctgtccctggaaaccggcagcctgaagctggccaacggaagagtgatcgagaagacactgtacaacagaagaacccggcaggatgagcctgccctgttcgtggccctgaccttcgagcggcgggaggtcctggactcctccaatatcaaaccaatgaacctgatcggcgtggcaagaggcgaaaacatccccgccgtgatcgccctgaccgaccccgagggctgcccactgagccggtttaaggatagcctgggaaacccaacccacatcctgagaatcggcgagagctataaggagaagcagcggaccatccaggccaagaaggaggtggagcagcggagagccggcggctacagccggaagtacgccagcaaagccaagaatctggcagacgatatggtgagaaacaccgctagagatctgctgtactacgccgtgacccaggatgccatgctgatcttcgccaacctgagccggggcttcggccggcagggcaagcggaccttcatggccgagagacagtacacacggatggaggactggctgaccgccaagctggcctacgagggcctgagcaagacctacctgtccaagacactggcccagtacacctccaagacatgcagcaactgtgggtttaccatcaccagcgccgactacgacagggtgctggagaagctgaagaagacagcaacaggctggatgaccacaattaacggcaaggagctgaaggtggagggccagattacctactacaacagatacaagagacagaacgtagtcaaggacctgtccgtcgagctggatagactgagcgaagaatctgtgaacaacgacatctcctcctggacaaagggcagaagcggagaagctctgagcctcctgaagaaaagattctcccatagacccgtgcaggagaagttcgtgtgcctgaactgcggcttcgagacacacgcagccgagcaagccgccctgaacatcgccagatcctggctgttcctgcggagccaggagtacaagaaataccagacaaacaagacaaccggcaacaccgataagagagccttcgtcgagacctggcagtccttttaccggaagaagcttaaggaggtgtggaaacctgccgtgcggtctggcggatctggcggaggctccaccagccccaagaaaaagagaaaagtctaagctgccttctgcggggcttgccttctggccatgcccttcttctctcccttgcacctgtacctcttggtctttgaataaagcctgagtaggaaggctagcaaaaaaaaaaaaaaaaaaaaaaaaaaaaaaaaaaaaaaaaaaaaaaaaaaaaaaaaaaaaaaaaaaaaaaaaaaaaaaaagcccagccggctccccaacctctaccgaggagggcacctctgagtccgccacccccgagagcggccctggcacctccaccgagcccagcgagggcagcgcacccggcagccctgccggcagccccacctccacagaggagggaaccagcaccgagcccagcgaaggcagcgccccaggcaccagcaccgagcctagtgagcaggagattaaacggatcaacaagatcagaagaagacttgtgaaagacagcaacaccaagaaggccggcaagacaggccccatgaaaaccctgctggttagagtgatgacacccgatctgagagagcggctggaaaacctgagaaagaagcctgaaaatatcccccagcccatcagcaatacatctagagccaacctgaataagctgctgaccgattacaccgaaatgaagaaggcgatcctgcatgtgtactgggaagagttccagaaggaccctgtgggcctgatgagccgggtggcccagcctgccagcaagaagatcgatcagaacaagctgaaacctgagatggacgagaagggcaacctgaccaccgccggctttgcctgctctcagtgtggccagcccctgttcgtgtacaagctggagcaggtgtctgagaagggcaaggcttacaccaactacttcggacggtgcaatgtggccgagcacgaaaagctgatcctgctggcccagctgaagcccgagaaggatagcgacgaagccgtgacatatagcctgggaaagtttgggcagagggccctggatttctacagcattcatgtgaccaaggagtccacccaccccgtgaagcccctggcccagatcgccggaaacagatacgcctccggacctgtgggaaaggccctgagcgacgcatgtatgggcacaatcgcctccttcctgtctaagtaccaggacatcatcatcgaacaccagaaggtggtgaagggcaaccagaagagactggagagcctgcgggagctggccggcaaggaaaacctggaataccctagcgtgaccctgccacctcagcctcacaccaaggagggcgttgatgcctacaacgaagtgatcgcccgggtgcgaatgtgggtgaacctgaacctgtggcagaagctgaagctaagcagagatgatgccaagcctctgctgagactgaagggattcccttcctttcctctggtcgagagacaggccaacgaagtggactggtgggacatggtgtgtaacgtgaagaagctgatcaacgagaaaaaggaggatggcaaggtgttttggcagaatctggctggctacaagagacaggaagccctgagaccatacctgagcagcgaggaagatcggaagaagggaaagaaattcgctcggtaccagctgggcgacctgctgctgcacctggaaaagaagcacggcgaggactggggaaaggtgtacgacgaggcctgggagcggattgacaagaaagtggaaggcctgagcaagcacatcaagctggaagaggaacggagaagcgaggacgcccagagcaaggccgccctgaccgactggctgcgggctaaggccagcttcgtgatcgagggcctgaaggaggccgacaaggacgagttctgcagatgcgagctgaagctgcagaagtggtacggggacctgcggggaaagcccttcgccatcgaagccgagaacagcatcctggacatcagcggcttcagcaagcagtacaactgtgccttcatctggcagaaggacggcgtgaagaagctgaacctgtacctgatcatcaactacttcaagggcggcaagctgcggttcaagaagatcaaacctgaagccttcgaagccaacagattctacaccgtgatcaacaaaaagagcggcgagatcgtgcccatggaggtgaacttcaacttcgacgaccccaacctgatcatcctgcctctggcctttggcaagagacagggcagagaattcatctggaacgacctgctgtccctggaaaccggcagcctgaagctggccaacggaagagtgatcgagaagacactgtacaacagaagaacccggcaggatgagcctgccctgttcgtggccctgaccttcgagcggcgggaggtcctggactcctccaatatcaaaccaatgaacctgatcggcgtggcaagaggcgaaaacatccccgccgtgatcgccctgaccgaccccgagggctgcccactgagccggtttaaggatagcctgggaaacccaacccacatcctgagaatcggcgagagctataaggagaagcagcggaccatccaggccaagaaggaggtggagcagcggagagccggcggctacagccggaagtacgccagcaaagccaagaatctggcagacgatatggtgagaaacaccgctagagatctgctgtactacgccgtgacccaggatgccatgctgatcttcgccaacctgagccggggcttcggccggcagggcaagcggaccttcatggccgagagacagtacacacggatggaggactggctgaccgccaagctggcctacgagggcctgagcaagacctacctgtccaagacactggcccagtacacctccaagacatgcagcaactgtgggtttaccatcaccagcgccgactacgacagggtgctggagaagctgaagaagacagcaacaggctggatgaccacaattaacggcaaggagctgaaggtggagggccagattacctactacaacagatacaagagacagaacgtagtcaaggacctgtccgtcgagctggatagactgagcgaagaatctgtgaacaacgacatctcctcctggacaaagggcagaagcggagaagctctgagcctcctgaagaaaagattctcccatagacccgtgcaggagaagttcgtgtgcctgaactgcggcttcgagacacacgcagccgagcaagccgccctgaacatcgccagatcctggctgttcctgcggagccaggagtacaagaaataccagacaaacaagacaaccggcaacaccgataagagagccttcgtcgagacctggcagtccttttaccggaagaagcttaaggaggtgtggaaacctgccgtgcggtctggcggatctggcggaggctccaccagccccaagaaaaagagaaaagtctaagctgccttctgcggggcttgccttctggccatgcccttcttctctcccttgcacctgtacctcttggtctttgaataaagcctgagtaggaaggctagcaaaaaaaaaaaaaaaaaaaaaaaaaaaaaaaaaaaaaaaaaaaaaaaaaaaaaaaaaaaaaaaaaaaaaaaaaaaaaaaa

SEQ ID NO: 9210 - RNA, 8805 nt, synthetic construct
  source 1..8805: mol_type = other RNA
aggaaataagagagaaaagaagagtaagaagaaatataagagccaccatggcccctaagaagaagcgtaaagtgagccggatgaaccacgaccaggagttcgacccccctaaggtgtaccctcccgtccccgccgagaagagaaagcccatccgggtcctgagcctgttcgatggcatcgccaccggtctgctggtgctgaaggacctgggcatccaggtggataggtacattgcctccgaggtgtgcgaggactccatcaccgtgggaatggtgcgtcatcagggcaagatcatgtacgtgggcgacgtgcggagcgtgacacagaagcatatccaggagtggggccctttcgacctggtgatcggcggcagcccttgcaatgacctgagcatcgtgaacccagcccggaagggcctgtacgagggaaccggcagactgttcttcgagttttacagactgctgcacgacgcccggcctaaggaaggcgacgaccggcccttcttttggctgttcgagaatgtggtggccatgggagtcagcgacaagcgggatattagccggttcctggagagcaaccccgtgatgatcgatgccaaggaagtgagcgccgcccaccgggccagatacttctggggcaatctgcctggcatgaacagacccctggccagcaccgtgaacgacaagctggagctgcaggagtgcctggagcacggccggatcgccaagttcagcaaggtgagaaccatcaccacccgaagcaacagcatcaaacaaggcaaggaccagcactttcctgtgttcatgaacgagaaggaggacatcctgtggtgtaccgagatggagagagtgttcgggttcccagtccactacacagatgtcagcaacatgtctagactggccagacagagactgctgggaagaagctggtccgtccctgtgatcagacacctgttcgcccctctgaaggagtacttcgcctgcgtgagcagcggcaacagcaacgccaacagccggggccccagcttctctagcggcctggtgccactgtccctgagagggagccacatgggccccatggagatctacaaaaccgtgagcgcctggaagcggcagcctgtgcgcgtgctgagcctgtttcggaatatcgataaagtcctgaaaagcctgggattcctggagagcggctctggctccggcggtggcaccctgaagtacgtggaggatgtgacaaacgtggtcagacgggatgtggagaagtggggccccttcgatctggtgtacggcagcacccaacccctgggcagctcttgtgaccggtgccctggctggtacatgtttcagttccaccggatcctgcagtacgccctgccgagacaggagtcccagcggccattcttttggattttcatggacaacttgctgctgaccgaggatgaccaggaaactaccactcggttcctgcagaccgaagccgtgaccctgcaggacgtgagaggccgggactaccagaacgccatgcgggtgtggtccaacatccctggactgaaaagcaagcacgcacctctgacccctaaagaagaggagtacctgcaggcccaggtgcggagcagaagcaagctggacgcccctaaggtggatctgctggtgaagaattgcctcctgcccctgagagagtacttcaagtatttcagccagaatagtctgcccctgggaggcagcggcggcggcgtggccttcgaggacgtggccgtgaacttcacccaggaggagtgggccctgctggaccccagccagaagaacctgtacagggaggtgatgcaggagaccctgaggaacctggccagcatcggcaagaagtggaacaaccagtacatcgaggacgagcaccagaaccccaggaggaacctgaggaggctgatcaaggagaggctgagcgagagcaaggagagccaccagcacggcgagttcctgacccaggtgcccgacgacggcggcccaagcagcggcgcccctcctcccagcggcggcaggcggcccaagcagcggcgcccctcctcccagcggcggcagcccagccggctccccaacctctaccgaggagggcacctctgagtccgccacccccgagagcggccctggcacctccaccgagcccagcgagggcagcgcacccggcagccctgccggcagccccacctccacagaggagggaaccagcaccgagcccagcgaaggcagcgccccaggcaccagcaccgagcctagtgagcaggagattaaacggatcaacaagatcagaagaagacttgtgaaagacagcaacaccaagaaggccggcaagacaggccccatgaaaaccctgctggttagagtgatgacacccgatctgagagagcggctggaaaacctgagaaagaagcctgaaaatatcccccagcccatcagcaatacatctagagccaacctgaataagctgctgaccgattacaccgaaatgaagaaggcgatcctgcatgtgtactgggaagagttccagaaggaccctgtgggcctgatgagccgggtggcccagcctgccagcaagaagatcgatcagaacaagctgaaacctgagatggacgagaagggcaacctgaccaccgccggctttgcctgctctcagtgtggccagcccctgttcgtgtacaagctggagcaggtgtctgagaagggcaaggcttacaccaactacttcggacggtgcaatgtggccgagcacgaaaagctgatcctgctggcccagctgaagcccgagaaggatagcgacgaagccgtgacatatagcctgggaaagtttgggcagagggccctggatttctacagcattcatgtgaccaaggagtccacccaccccgtgaagcccctggcccagatcgccggaaacagatacgcctccggacctgtgggaaaggccctgagcgacgcatgtatgggcacaatcgcctccttcctgtctaagtaccaggacatcatcatcgaacaccagaaggtggtgaagggcaaccagaagagactggagagcctgcgggagctggccggcaaggaaaacctggaataccctagcgtgaccctgccacctcagcctcacaccaaggagggcgttgatgcctacaacgaagtgatcgcccgggtgcgaatgtgggtgaacctgaacctgtggcagaagctgaagctaagcagagatgatgccaagcctctgctgagactgaagggattcccttcctttcctctggtcgagagacaggccaacgaagtggactggtgggacatggtgtgtaacgtgaagaagctgatcaacgagaaaaaggaggatggcaaggtgttttggcagaatctggctggctacaagagacaggaagccctgagaccatacctgagcagcgaggaagatcggaagaagggaaagaaattcgctcggtaccagctgggcgacctgctgctgcacctggaaaagaagcacggcgaggactggggaaaggtgtacgacgaggcctgggagcggattgacaagaaagtggaaggcctgagcaagcacatcaagctggaagaggaacggagaagcgaggacgcccagagcaaggccgccctgaccgactggctgcgggctaaggccagcttcgtgatcgagggcctgaaggaggccgacaaggacgagttctgcagatgcgagctgaagctgcagaagtggtacggggacctgcggggaaagcccttcgccatcgaagccgagaacagcatcctggacatcagcggcttcagcaagcagtacaactgtgccttcatctggcagaaggacggcgtgaagaagctgaacctgtacctgatcatcaactacttcaagggcggcaagctgcggttcaagaagatcaaacctgaagccttcgaagccaacagattctacaccgtgatcaacaaaaagagcggcgagatcgtgcccatggaggtgaacttcaacttcgacgaccccaacctgatcatcctgcctctggcctttggcaagagacagggcagagaattcatctggaacgacctgctgtccctggaaaccggcagcctgaagctggccaacggaagagtgatcgagaagacactgtacaacagaagaacccggcaggatgagcctgccctgttcgtggccctgaccttcgagcggcgggaggtcctggactcctccaatatcaaaccaatgaacctgatcggcgtggcaagaggcgaaaacatccccgccgtgatcgccctgaccgaccccgagggctgcccactgagccggtttaaggatagcctgggaaacccaacccacatcctgagaatcggcgagagctataaggagaagcagcggaccatccaggccaagaaggaggtggagcagcggagagccggcggctacagccggaagtacgccagcaaagccaagaatctggcagacgatatggtgagaaacaccgctagagatctgctgtactacgccgtgacccaggatgccatgctgatcttcgccaacctgagccggggcttcggccggcagggcaagcggaccttcatggccgagagacagtacacacggatggaggactggctgaccgccaagctggcctacgagggcctgagcaagacctacctgtccaagacactggcccagtacacctccaagacatgcagcaactgtgggtttaccatcaccagcgccgactacgacagggtgctggagaagctgaagaagacagcaacaggctggatgaccacaattaacggcaaggagctgaaggtggagggccagattacctactacaacagatacaagagacagaacgtagtcaaggacctgtccgtcgagctggatagactgagcgaagaatctgtgaacaacgacatctcctcctggacaaagggcagaagcggagaagctctgagcctcctgaagaaaagattctcccatagacccgtgcaggagaagttcgtgtgcctgaactgcggcttcgagacacacgcagccgagcaagccgccctgaacatcgccagatcctggctgttcctgcggagccaggagtacaagaaataccagacaaacaagacaaccggcaacaccgataagagagccttcgtcgagacctggcagtccttttaccggaagaagcttaaggaggtgtggaaacctgccgtgcggtctggcggatctggcggaggctccaccagccccaagaaaaagagaaaagtctaagctgccttctgcggggcttgccttctggccatgcccttcttctctcccttgcacctgtacctcttggtctttgaataaagcctgagtaggaaggctagcaaaaaaaaaaaaaaaaaaaaaaaaaaaaaaaaaaaaaaaaaaaaaaaaaaaaaaaaaaaaaaaaaaaaaaaaaaaaaaaagcccagccggctccccaacctctaccgaggagggcacctctgagtccgccacccccgagagcggccctggcacctccaccgagcccagcgagggcagcgcacccggcagccctgccggcagccccacctccacagaggagggaaccagcaccgagcccagcgaaggcagcgccccaggcaccagcaccgagcctagtgagcaggagattaaacggatcaacaagatcagaagaagacttgtgaaagacagcaacaccaagaaggccggcaagacaggccccatgaaaaccctgctggttagagtgatgacacccgatctgagagagcggctggaaaacctgagaaagaagcctgaaaatatcccccagcccatcagcaatacatctagagccaacctgaataagctgctgaccgattacaccgaaatgaagaaggcgatcctgcatgtgtactgggaagagttccagaaggaccctgtgggcctgatgagccgggtggcccagcctgccagcaagaagatcgatcagaacaagctgaaacctgagatggacgagaagggcaacctgaccaccgccggctttgcctgctctcagtgtggccagcccctgttcgtgtacaagctggagcaggtgtctgagaagggcaaggcttacaccaactacttcggacggtgcaatgtggccgagcacgaaaagctgatcctgctggcccagctgaagcccgagaaggatagcgacgaagccgtgacatatagcctgggaaagtttgggcagagggccctggatttctacagcattcatgtgaccaaggagtccacccaccccgtgaagcccctggcccagatcgccggaaacagatacgcctccggacctgtgggaaaggccctgagcgacgcatgtatgggcacaatcgcctccttcctgtctaagtaccaggacatcatcatcgaacaccagaaggtggtgaagggcaaccagaagagactggagagcctgcgggagctggccggcaaggaaaacctggaataccctagcgtgaccctgccacctcagcctcacaccaaggagggcgttgatgcctacaacgaagtgatcgcccgggtgcgaatgtgggtgaacctgaacctgtggcagaagctgaagctaagcagagatgatgccaagcctctgctgagactgaagggattcccttcctttcctctggtcgagagacaggccaacgaagtggactggtgggacatggtgtgtaacgtgaagaagctgatcaacgagaaaaaggaggatggcaaggtgttttggcagaatctggctggctacaagagacaggaagccctgagaccatacctgagcagcgaggaagatcggaagaagggaaagaaattcgctcggtaccagctgggcgacctgctgctgcacctggaaaagaagcacggcgaggactggggaaaggtgtacgacgaggcctgggagcggattgacaagaaagtggaaggcctgagcaagcacatcaagctggaagaggaacggagaagcgaggacgcccagagcaaggccgccctgaccgactggctgcgggctaaggccagcttcgtgatcgagggcctgaaggaggccgacaaggacgagttctgcagatgcgagctgaagctgcagaagtggtacggggacctgcggggaaagcccttcgccatcgaagccgagaacagcatcctggacatcagcggcttcagcaagcagtacaactgtgccttcatctggcagaaggacggcgtgaagaagctgaacctgtacctgatcatcaactacttcaagggcggcaagctgcggttcaagaagatcaaacctgaagccttcgaagccaacagattctacaccgtgatcaacaaaaagagcggcgagatcgtgcccatggaggtgaacttcaacttcgacgaccccaacctgatcatcctgcctctggcctttggcaagagacagggcagagaattcatctggaacgacctgctgtccctggaaaccggcagcctgaagctggccaacggaagagtgatcgagaagacactgtacaacagaagaacccggcaggatgagcctgccctgttcgtggccctgaccttcgagcggcgggaggtcctggactcctccaatatcaaaccaatgaacctgatcggcgtggcaagaggcgaaaacatccccgccgtgatcgccctgaccgaccccgagggctgcccactgagccggtttaaggatagcctgggaaacccaacccacatcctgagaatcggcgagagctataaggagaagcagcggaccatccaggccaagaaggaggtggagcagcggagagccggcggctacagccggaagtacgccagcaaagccaagaatctggcagacgatatggtgagaaacaccgctagagatctgctgtactacgccgtgacccaggatgccatgctgatcttcgccaacctgagccggggcttcggccggcagggcaagcggaccttcatggccgagagacagtacacacggatggaggactggctgaccgccaagctggcctacgagggcctgagcaagacctacctgtccaagacactggcccagtacacctccaagacatgcagcaactgtgggtttaccatcaccagcgccgactacgacagggtgctggagaagctgaagaagacagcaacaggctggatgaccacaattaacggcaaggagctgaaggtggagggccagattacctactacaacagatacaagagacagaacgtagtcaaggacctgtccgtcgagctggatagactgagcgaagaatctgtgaacaacgacatctcctcctggacaaagggcagaagcggagaagctctgagcctcctgaagaaaagattctcccatagacccgtgcaggagaagttcgtgtgcctgaactgcggcttcgagacacacgcagccgagcaagccgccctgaacatcgccagatcctggctgttcctgcggagccaggagtacaagaaataccagacaaacaagacaaccggcaacaccgataagagagccttcgtcgagacctggcagtccttttaccggaagaagcttaaggaggtgtggaaacctgccgtgcggtctggcggatctggcggaggctccaccagccccaagaaaaagagaaaagtctaagctgccttctgcggggcttgccttctggccatgcccttcttctctcccttgcacctgtacctcttggtctttgaataaagcctgagtaggaaggctagcaaaaaaaaaaaaaaaaaaaaaaaaaaaaaaaaaaaaaaaaaaaaaaaaaaaaaaaaaaaaaaaaaaaaaaaaaaaaaaaa

SEQ ID NO: 9211 - RNA, 8787 nt, synthetic construct
  source 1..8787: mol_type = other RNA
aggaaataagagagaaaagaagagtaagaagaaatataagagccaccatggcccctaagaagaagcgtaaagtgagccggatgaaccacgaccaggagttcgacccccctaaggtgtaccctcccgtccccgccgagaagagaaagcccatccgggtcctgagcctgttcgatggcatcgccaccggtctgctggtgctgaaggacctgggcatccaggtggataggtacattgcctccgaggtgtgcgaggactccatcaccgtgggaatggtgcgtcatcagggcaagatcatgtacgtgggcgacgtgcggagcgtgacacagaagcatatccaggagtggggccctttcgacctggtgatcggcggcagcccttgcaatgacctgagcatcgtgaacccagcccggaagggcctgtacgagggaaccggcagactgttcttcgagttttacagactgctgcacgacgcccggcctaaggaaggcgacgaccggcccttcttttggctgttcgagaatgtggtggccatgggagtcagcgacaagcgggatattagccggttcctggagagcaaccccgtgatgatcgatgccaaggaagtgagcgccgcccaccgggccagatacttctggggcaatctgcctggcatgaacagacccctggccagcaccgtgaacgacaagctggagctgcaggagtgcctggagcacggccggatcgccaagttcagcaaggtgagaaccatcaccacccgaagcaacagcatcaaacaaggcaaggaccagcactttcctgtgttcatgaacgagaaggaggacatcctgtggtgtaccgagatggagagagtgttcgggttcccagtccactacacagatgtcagcaacatgtctagactggccagacagagactgctgggaagaagctggtccgtccctgtgatcagacacctgttcgcccctctgaaggagtacttcgcctgcgtgagcagcggcaacagcaacgccaacagccggggccccagcttctctagcggcctggtgccactgtccctgagagggagccacatgggccccatggagatctacaaaaccgtgagcgcctggaagcggcagcctgtgcgcgtgctgagcctgtttcggaatatcgataaagtcctgaaaagcctgggattcctggagagcggctctggctccggcggtggcaccctgaagtacgtggaggatgtgacaaacgtggtcagacgggatgtggagaagtggggccccttcgatctggtgtacggcagcacccaacccctgggcagctcttgtgaccggtgccctggctggtacatgtttcagttccaccggatcctgcagtacgccctgccgagacaggagtcccagcggccattcttttggattttcatggacaacttgctgctgaccgaggatgaccaggaaactaccactcggttcctgcagaccgaagccgtgaccctgcaggacgtgagaggccgggactaccagaacgccatgcgggtgtggtccaacatccctggactgaaaagcaagcacgcacctctgacccctaaagaagaggagtacctgcaggcccaggtgcggagcagaagcaagctggacgcccctaaggtggatctgctggtgaagaattgcctcctgcccctgagagagtacttcaagtatttcagccagaatagtctgcccctgggaggcagcggcggcggcctgctgaccttcgaggacgtggccgtgagcttcagcgaggaggagtgggagctgctggaccccccccagaagaccctgtacaacgacgtgatgcaggagaactacgagaccgtgatcagcctgggcctgaagctgaagaacgacaccggcaacgaccagcccatcagcatcagcgccctggagatgcaggccagcggcagcaaggtgctgaggaaggccaggatgaaggtggcccagaagaccggcggcccaagcagcggcgcccctcctcccagcggcggcaggcggcccaagcagcggcgcccctcctcccagcggcggcagcccagccggctccccaacctctaccgaggagggcacctctgagtccgccacccccgagagcggccctggcacctccaccgagcccagcgagggcagcgcacccggcagccctgccggcagccccacctccacagaggagggaaccagcaccgagcccagcgaaggcagcgccccaggcaccagcaccgagcctagtgagcaggagattaaacggatcaacaagatcagaagaagacttgtgaaagacagcaacaccaagaaggccggcaagacaggccccatgaaaaccctgctggttagagtgatgacacccgatctgagagagcggctggaaaacctgagaaagaagcctgaaaatatcccccagcccatcagcaatacatctagagccaacctgaataagctgctgaccgattacaccgaaatgaagaaggcgatcctgcatgtgtactgggaagagttccagaaggaccctgtgggcctgatgagccgggtggcccagcctgccagcaagaagatcgatcagaacaagctgaaacctgagatggacgagaagggcaacctgaccaccgccggctttgcctgctctcagtgtggccagcccctgttcgtgtacaagctggagcaggtgtctgagaagggcaaggcttacaccaactacttcggacggtgcaatgtggccgagcacgaaaagctgatcctgctggcccagctgaagcccgagaaggatagcgacgaagccgtgacatatagcctgggaaagtttgggcagagggccctggatttctacagcattcatgtgaccaaggagtccacccaccccgtgaagcccctggcccagatcgccggaaacagatacgcctccggacctgtgggaaaggccctgagcgacgcatgtatgggcacaatcgcctccttcctgtctaagtaccaggacatcatcatcgaacaccagaaggtggtgaagggcaaccagaagagactggagagcctgcgggagctggccggcaaggaaaacctggaataccctagcgtgaccctgccacctcagcctcacaccaaggagggcgttgatgcctacaacgaagtgatcgcccgggtgcgaatgtgggtgaacctgaacctgtggcagaagctgaagctaagcagagatgatgccaagcctctgctgagactgaagggattcccttcctttcctctggtcgagagacaggccaacgaagtggactggtgggacatggtgtgtaacgtgaagaagctgatcaacgagaaaaaggaggatggcaaggtgttttggcagaatctggctggctacaagagacaggaagccctgagaccatacctgagcagcgaggaagatcggaagaagggaaagaaattcgctcggtaccagctgggcgacctgctgctgcacctggaaaagaagcacggcgaggactggggaaaggtgtacgacgaggcctgggagcggattgacaagaaagtggaaggcctgagcaagcacatcaagctggaagaggaacggagaagcgaggacgcccagagcaaggccgccctgaccgactggctgcgggctaaggccagcttcgtgatcgagggcctgaaggaggccgacaaggacgagttctgcagatgcgagctgaagctgcagaagtggtacggggacctgcggggaaagcccttcgccatcgaagccgagaacagcatcctggacatcagcggcttcagcaagcagtacaactgtgccttcatctggcagaaggacggcgtgaagaagctgaacctgtacctgatcatcaactacttcaagggcggcaagctgcggttcaagaagatcaaacctgaagccttcgaagccaacagattctacaccgtgatcaacaaaaagagcggcgagatcgtgcccatggaggtgaacttcaacttcgacgaccccaacctgatcatcctgcctctggcctttggcaagagacagggcagagaattcatctggaacgacctgctgtccctggaaaccggcagcctgaagctggccaacggaagagtgatcgagaagacactgtacaacagaagaacccggcaggatgagcctgccctgttcgtggccctgaccttcgagcggcgggaggtcctggactcctccaatatcaaaccaatgaacctgatcggcgtggcaagaggcgaaaacatccccgccgtgatcgccctgaccgaccccgagggctgcccactgagccggtttaaggatagcctgggaaacccaacccacatcctgagaatcggcgagagctataaggagaagcagcggaccatccaggccaagaaggaggtggagcagcggagagccggcggctacagccggaagtacgccagcaaagccaagaatctggcagacgatatggtgagaaacaccgctagagatctgctgtactacgccgtgacccaggatgccatgctgatcttcgccaacctgagccggggcttcggccggcagggcaagcggaccttcatggccgagagacagtacacacggatggaggactggctgaccgccaagctggcctacgagggcctgagcaagacctacctgtccaagacactggcccagtacacctccaagacatgcagcaactgtgggtttaccatcaccagcgccgactacgacagggtgctggagaagctgaagaagacagcaacaggctggatgaccacaattaacggcaaggagctgaaggtggagggccagattacctactacaacagatacaagagacagaacgtagtcaaggacctgtccgtcgagctggatagactgagcgaagaatctgtgaacaacgacatctcctcctggacaaagggcagaagcggagaagctctgagcctcctgaagaaaagattctcccatagacccgtgcaggagaagttcgtgtgcctgaactgcggcttcgagacacacgcagccgagcaagccgccctgaacatcgccagatcctggctgttcctgcggagccaggagtacaagaaataccagacaaacaagacaaccggcaacaccgataagagagccttcgtcgagacctggcagtccttttaccggaagaagcttaaggaggtgtggaaacctgccgtgcggtctggcggatctggcggaggctccaccagccccaagaaaaagagaaaagtctaagctgccttctgcggggcttgccttctggccatgcccttcttctctcccttgcacctgtacctcttggtctttgaataaagcctgagtaggaaggctagcaaaaaaaaaaaaaaaaaaaaaaaaaaaaaaaaaaaaaaaaaaaaaaaaaaaaaaaaaaaaaaaaaaaaaaaaaaaaaaaagcccagccggctccccaacctctaccgaggagggcacctctgagtccgccacccccgagagcggccctggcacctccaccgagcccagcgagggcagcgcacccggcagccctgccggcagccccacctccacagaggagggaaccagcaccgagcccagcgaaggcagcgccccaggcaccagcaccgagcctagtgagcaggagattaaacggatcaacaagatcagaagaagacttgtgaaagacagcaacaccaagaaggccggcaagacaggccccatgaaaaccctgctggttagagtgatgacacccgatctgagagagcggctggaaaacctgagaaagaagcctgaaaatatcccccagcccatcagcaatacatctagagccaacctgaataagctgctgaccgattacaccgaaatgaagaaggcgatcctgcatgtgtactgggaagagttccagaaggaccctgtgggcctgatgagccgggtggcccagcctgccagcaagaagatcgatcagaacaagctgaaacctgagatggacgagaagggcaacctgaccaccgccggctttgcctgctctcagtgtggccagcccctgttcgtgtacaagctggagcaggtgtctgagaagggcaaggcttacaccaactacttcggacggtgcaatgtggccgagcacgaaaagctgatcctgctggcccagctgaagcccgagaaggatagcgacgaagccgtgacatatagcctgggaaagtttgggcagagggccctggatttctacagcattcatgtgaccaaggagtccacccaccccgtgaagcccctggcccagatcgccggaaacagatacgcctccggacctgtgggaaaggccctgagcgacgcatgtatgggcacaatcgcctccttcctgtctaagtaccaggacatcatcatcgaacaccagaaggtggtgaagggcaaccagaagagactggagagcctgcgggagctggccggcaaggaaaacctggaataccctagcgtgaccctgccacctcagcctcacaccaaggagggcgttgatgcctacaacgaagtgatcgcccgggtgcgaatgtgggtgaacctgaacctgtggcagaagctgaagctaagcagagatgatgccaagcctctgctgagactgaagggattcccttcctttcctctggtcgagagacaggccaacgaagtggactggtgggacatggtgtgtaacgtgaagaagctgatcaacgagaaaaaggaggatggcaaggtgttttggcagaatctggctggctacaagagacaggaagccctgagaccatacctgagcagcgaggaagatcggaagaagggaaagaaattcgctcggtaccagctgggcgacctgctgctgcacctggaaaagaagcacggcgaggactggggaaaggtgtacgacgaggcctgggagcggattgacaagaaagtggaaggcctgagcaagcacatcaagctggaagaggaacggagaagcgaggacgcccagagcaaggccgccctgaccgactggctgcgggctaaggccagcttcgtgatcgagggcctgaaggaggccgacaaggacgagttctgcagatgcgagctgaagctgcagaagtggtacggggacctgcggggaaagcccttcgccatcgaagccgagaacagcatcctggacatcagcggcttcagcaagcagtacaactgtgccttcatctggcagaaggacggcgtgaagaagctgaacctgtacctgatcatcaactacttcaagggcggcaagctgcggttcaagaagatcaaacctgaagccttcgaagccaacagattctacaccgtgatcaacaaaaagagcggcgagatcgtgcccatggaggtgaacttcaacttcgacgaccccaacctgatcatcctgcctctggcctttggcaagagacagggcagagaattcatctggaacgacctgctgtccctggaaaccggcagcctgaagctggccaacggaagagtgatcgagaagacactgtacaacagaagaacccggcaggatgagcctgccctgttcgtggccctgaccttcgagcggcgggaggtcctggactcctccaatatcaaaccaatgaacctgatcggcgtggcaagaggcgaaaacatccccgccgtgatcgccctgaccgaccccgagggctgcccactgagccggtttaaggatagcctgggaaacccaacccacatcctgagaatcggcgagagctataaggagaagcagcggaccatccaggccaagaaggaggtggagcagcggagagccggcggctacagccggaagtacgccagcaaagccaagaatctggcagacgatatggtgagaaacaccgctagagatctgctgtactacgccgtgacccaggatgccatgctgatcttcgccaacctgagccggggcttcggccggcagggcaagcggaccttcatggccgagagacagtacacacggatggaggactggctgaccgccaagctggcctacgagggcctgagcaagacctacctgtccaagacactggcccagtacacctccaagacatgcagcaactgtgggtttaccatcaccagcgccgactacgacagggtgctggagaagctgaagaagacagcaacaggctggatgaccacaattaacggcaaggagctgaaggtggagggccagattacctactacaacagatacaagagacagaacgtagtcaaggacctgtccgtcgagctggatagactgagcgaagaatctgtgaacaacgacatctcctcctggacaaagggcagaagcggagaagctctgagcctcctgaagaaaagattctcccatagacccgtgcaggagaagttcgtgtgcctgaactgcggcttcgagacacacgcagccgagcaagccgccctgaacatcgccagatcctggctgttcctgcggagccaggagtacaagaaataccagacaaacaagacaaccggcaacaccgataagagagccttcgtcgagacctggcagtccttttaccggaagaagcttaaggaggtgtggaaacctgccgtgcggtctggcggatctggcggaggctccaccagccccaagaaaaagagaaaagtctaagctgccttctgcggggcttgccttctggccatgcccttcttctctcccttgcacctgtacctcttggtctttgaataaagcctgagtaggaaggctagcaaaaaaaaaaaaaaaaaaaaaaaaaaaaaaaaaaaaaaaaaaaaaaaaaaaaaaaaaaaaaaaaaaaaaaaaaaaaaaaa

SEQ ID NO: 9212 - RNA, 8787 nt, synthetic construct
  source 1..8787: mol_type = other RNA
aggaaataagagagaaaagaagagtaagaagaaatataagagccaccatggcccctaagaagaagcgtaaagtgagccggatgaaccacgaccaggagttcgacccccctaaggtgtaccctcccgtccccgccgagaagagaaagcccatccgggtcctgagcctgttcgatggcatcgccaccggtctgctggtgctgaaggacctgggcatccaggtggataggtacattgcctccgaggtgtgcgaggactccatcaccgtgggaatggtgcgtcatcagggcaagatcatgtacgtgggcgacgtgcggagcgtgacacagaagcatatccaggagtggggccctttcgacctggtgatcggcggcagcccttgcaatgacctgagcatcgtgaacccagcccggaagggcctgtacgagggaaccggcagactgttcttcgagttttacagactgctgcacgacgcccggcctaaggaaggcgacgaccggcccttcttttggctgttcgagaatgtggtggccatgggagtcagcgacaagcgggatattagccggttcctggagagcaaccccgtgatgatcgatgccaaggaagtgagcgccgcccaccgggccagatacttctggggcaatctgcctggcatgaacagacccctggccagcaccgtgaacgacaagctggagctgcaggagtgcctggagcacggccggatcgccaagttcagcaaggtgagaaccatcaccacccgaagcaacagcatcaaacaaggcaaggaccagcactttcctgtgttcatgaacgagaaggaggacatcctgtggtgtaccgagatggagagagtgttcgggttcccagtccactacacagatgtcagcaacatgtctagactggccagacagagactgctgggaagaagctggtccgtccctgtgatcagacacctgttcgcccctctgaaggagtacttcgcctgcgtgagcagcggcaacagcaacgccaacagccggggccccagcttctctagcggcctggtgccactgtccctgagagggagccacatgggccccatggagatctacaaaaccgtgagcgcctggaagcggcagcctgtgcgcgtgctgagcctgtttcggaatatcgataaagtcctgaaaagcctgggattcctggagagcggctctggctccggcggtggcaccctgaagtacgtggaggatgtgacaaacgtggtcagacgggatgtggagaagtggggccccttcgatctggtgtacggcagcacccaacccctgggcagctcttgtgaccggtgccctggctggtacatgtttcagttccaccggatcctgcagtacgccctgccgagacaggagtcccagcggccattcttttggattttcatggacaacttgctgctgaccgaggatgaccaggaaactaccactcggttcctgcagaccgaagccgtgaccctgcaggacgtgagaggccgggactaccagaacgccatgcgggtgtggtccaacatccctggactgaaaagcaagcacgcacctctgacccctaaagaagaggagtacctgcaggcccaggtgcggagcagaagcaagctggacgcccctaaggtggatctgctggtgaagaattgcctcctgcccctgagagagtacttcaagtatttcagccagaatagtctgcccctgggaggcagcggcggcggcgagcccgtgagcttcgaggaggtggccgtgtacttcagcagggaggagtgggccctgctggaccccgcccagagggccctgtacaggcacgtgatgctggagacctacgagtgcgtggccagcctggcccccctgcccgcccccaagcccatggtgatcagcctgctggaggagggcgaggagccctggatccccgacgagggcagcaggcaggccgtggccggcgacgtgagccccggcgagggcggcccaagcagcggcgcccctcctcccagcggcggcaggcggcccaagcagcggcgcccctcctcccagcggcggcagcccagccggctccccaacctctaccgaggagggcacctctgagtccgccacccccgagagcggccctggcacctccaccgagcccagcgagggcagcgcacccggcagccctgccggcagccccacctccacagaggagggaaccagcaccgagcccagcgaaggcagcgccccaggcaccagcaccgagcctagtgagcaggagattaaacggatcaacaagatcagaagaagacttgtgaaagacagcaacaccaagaaggccggcaagacaggccccatgaaaaccctgctggttagagtgatgacacccgatctgagagagcggctggaaaacctgagaaagaagcctgaaaatatcccccagcccatcagcaatacatctagagccaacctgaataagctgctgaccgattacaccgaaatgaagaaggcgatcctgcatgtgtactgggaagagttccagaaggaccctgtgggcctgatgagccgggtggcccagcctgccagcaagaagatcgatcagaacaagctgaaacctgagatggacgagaagggcaacctgaccaccgccggctttgcctgctctcagtgtggccagcccctgttcgtgtacaagctggagcaggtgtctgagaagggcaaggcttacaccaactacttcggacggtgcaatgtggccgagcacgaaaagctgatcctgctggcccagctgaagcccgagaaggatagcgacgaagccgtgacatatagcctgggaaagtttgggcagagggccctggatttctacagcattcatgtgaccaaggagtccacccaccccgtgaagcccctggcccagatcgccggaaacagatacgcctccggacctgtgggaaaggccctgagcgacgcatgtatgggcacaatcgcctccttcctgtctaagtaccaggacatcatcatcgaacaccagaaggtggtgaagggcaaccagaagagactggagagcctgcgggagctggccggcaaggaaaacctggaataccctagcgtgaccctgccacctcagcctcacaccaaggagggcgttgatgcctacaacgaagtgatcgcccgggtgcgaatgtgggtgaacctgaacctgtggcagaagctgaagctaagcagagatgatgccaagcctctgctgagactgaagggattcccttcctttcctctggtcgagagacaggccaacgaagtggactggtgggacatggtgtgtaacgtgaagaagctgatcaacgagaaaaaggaggatggcaaggtgttttggcagaatctggctggctacaagagacaggaagccctgagaccatacctgagcagcgaggaagatcggaagaagggaaagaaattcgctcggtaccagctgggcgacctgctgctgcacctggaaaagaagcacggcgaggactggggaaaggtgtacgacgaggcctgggagcggattgacaagaaagtggaaggcctgagcaagcacatcaagctggaagaggaacggagaagcgaggacgcccagagcaaggccgccctgaccgactggctgcgggctaaggccagcttcgtgatcgagggcctgaaggaggccgacaaggacgagttctgcagatgcgagctgaagctgcagaagtggtacggggacctgcggggaaagcccttcgccatcgaagccgagaacagcatcctggacatcagcggcttcagcaagcagtacaactgtgccttcatctggcagaaggacggcgtgaagaagctgaacctgtacctgatcatcaactacttcaagggcggcaagctgcggttcaagaagatcaaacctgaagccttcgaagccaacagattctacaccgtgatcaacaaaaagagcggcgagatcgtgcccatggaggtgaacttcaacttcgacgaccccaacctgatcatcctgcctctggcctttggcaagagacagggcagagaattcatctggaacgacctgctgtccctggaaaccggcagcctgaagctggccaacggaagagtgatcgagaagacactgtacaacagaagaacccggcaggatgagcctgccctgttcgtggccctgaccttcgagcggcgggaggtcctggactcctccaatatcaaaccaatgaacctgatcggcgtggcaagaggcgaaaacatccccgccgtgatcgccctgaccgaccccgagggctgcccactgagccggtttaaggatagcctgggaaacccaacccacatcctgagaatcggcgagagctataaggagaagcagcggaccatccaggccaagaaggaggtggagcagcggagagccggcggctacagccggaagtacgccagcaaagccaagaatctggcagacgatatggtgagaaacaccgctagagatctgctgtactacgccgtgacccaggatgccatgctgatcttcgccaacctgagccggggcttcggccggcagggcaagcggaccttcatggccgagagacagtacacacggatggaggactggctgaccgccaagctggcctacgagggcctgagcaagacctacctgtccaagacactggcccagtacacctccaagacatgcagcaactgtgggtttaccatcaccagcgccgactacgacagggtgctggagaagctgaagaagacagcaacaggctggatgaccacaattaacggcaaggagctgaaggtggagggccagattacctactacaacagatacaagagacagaacgtagtcaaggacctgtccgtcgagctggatagactgagcgaagaatctgtgaacaacgacatctcctcctggacaaagggcagaagcggagaagctctgagcctcctgaagaaaagattctcccatagacccgtgcaggagaagttcgtgtgcctgaactgcggcttcgagacacacgcagccgagcaagccgccctgaacatcgccagatcctggctgttcctgcggagccaggagtacaagaaataccagacaaacaagacaaccggcaacaccgataagagagccttcgtcgagacctggcagtccttttaccggaagaagcttaaggaggtgtggaaacctgccgtgcggtctggcggatctggcggaggctccaccagccccaagaaaaagagaaaagtctaagctgccttctgcggggcttgccttctggccatgcccttcttctctcccttgcacctgtacctcttggtctttgaataaagcctgagtaggaaggctagcaaaaaaaaaaaaaaaaaaaaaaaaaaaaaaaaaaaaaaaaaaaaaaaaaaaaaaaaaaaaaaaaaaaaaaaaaaaaaaaagcccagccggctccccaacctctaccgaggagggcacctctgagtccgccacccccgagagcggccctggcacctccaccgagcccagcgagggcagcgcacccggcagccctgccggcagccccacctccacagaggagggaaccagcaccgagcccagcgaaggcagcgccccaggcaccagcaccgagcctagtgagcaggagattaaacggatcaacaagatcagaagaagacttgtgaaagacagcaacaccaagaaggccggcaagacaggccccatgaaaaccctgctggttagagtgatgacacccgatctgagagagcggctggaaaacctgagaaagaagcctgaaaatatcccccagcccatcagcaatacatctagagccaacctgaataagctgctgaccgattacaccgaaatgaagaaggcgatcctgcatgtgtactgggaagagttccagaaggaccctgtgggcctgatgagccgggtggcccagcctgccagcaagaagatcgatcagaacaagctgaaacctgagatggacgagaagggcaacctgaccaccgccggctttgcctgctctcagtgtggccagcccctgttcgtgtacaagctggagcaggtgtctgagaagggcaaggcttacaccaactacttcggacggtgcaatgtggccgagcacgaaaagctgatcctgctggcccagctgaagcccgagaaggatagcgacgaagccgtgacatatagcctgggaaagtttgggcagagggccctggatttctacagcattcatgtgaccaaggagtccacccaccccgtgaagcccctggcccagatcgccggaaacagatacgcctccggacctgtgggaaaggccctgagcgacgcatgtatgggcacaatcgcctccttcctgtctaagtaccaggacatcatcatcgaacaccagaaggtggtgaagggcaaccagaagagactggagagcctgcgggagctggccggcaaggaaaacctggaataccctagcgtgaccctgccacctcagcctcacaccaaggagggcgttgatgcctacaacgaagtgatcgcccgggtgcgaatgtgggtgaacctgaacctgtggcagaagctgaagctaagcagagatgatgccaagcctctgctgagactgaagggattcccttcctttcctctggtcgagagacaggccaacgaagtggactggtgggacatggtgtgtaacgtgaagaagctgatcaacgagaaaaaggaggatggcaaggtgttttggcagaatctggctggctacaagagacaggaagccctgagaccatacctgagcagcgaggaagatcggaagaagggaaagaaattcgctcggtaccagctgggcgacctgctgctgcacctggaaaagaagcacggcgaggactggggaaaggtgtacgacgaggcctgggagcggattgacaagaaagtggaaggcctgagcaagcacatcaagctggaagaggaacggagaagcgaggacgcccagagcaaggccgccctgaccgactggctgcgggctaaggccagcttcgtgatcgagggcctgaaggaggccgacaaggacgagttctgcagatgcgagctgaagctgcagaagtggtacggggacctgcggggaaagcccttcgccatcgaagccgagaacagcatcctggacatcagcggcttcagcaagcagtacaactgtgccttcatctggcagaaggacggcgtgaagaagctgaacctgtacctgatcatcaactacttcaagggcggcaagctgcggttcaagaagatcaaacctgaagccttcgaagccaacagattctacaccgtgatcaacaaaaagagcggcgagatcgtgcccatggaggtgaacttcaacttcgacgaccccaacctgatcatcctgcctctggcctttggcaagagacagggcagagaattcatctggaacgacctgctgtccctggaaaccggcagcctgaagctggccaacggaagagtgatcgagaagacactgtacaacagaagaacccggcaggatgagcctgccctgttcgtggccctgaccttcgagcggcgggaggtcctggactcctccaatatcaaaccaatgaacctgatcggcgtggcaagaggcgaaaacatccccgccgtgatcgccctgaccgaccccgagggctgcccactgagccggtttaaggatagcctgggaaacccaacccacatcctgagaatcggcgagagctataaggagaagcagcggaccatccaggccaagaaggaggtggagcagcggagagccggcggctacagccggaagtacgccagcaaagccaagaatctggcagacgatatggtgagaaacaccgctagagatctgctgtactacgccgtgacccaggatgccatgctgatcttcgccaacctgagccggggcttcggccggcagggcaagcggaccttcatggccgagagacagtacacacggatggaggactggctgaccgccaagctggcctacgagggcctgagcaagacctacctgtccaagacactggcccagtacacctccaagacatgcagcaactgtgggtttaccatcaccagcgccgactacgacagggtgctggagaagctgaagaagacagcaacaggctggatgaccacaattaacggcaaggagctgaaggtggagggccagattacctactacaacagatacaagagacagaacgtagtcaaggacctgtccgtcgagctggatagactgagcgaagaatctgtgaacaacgacatctcctcctggacaaagggcagaagcggagaagctctgagcctcctgaagaaaagattctcccatagacccgtgcaggagaagttcgtgtgcctgaactgcggcttcgagacacacgcagccgagcaagccgccctgaacatcgccagatcctggctgttcctgcggagccaggagtacaagaaataccagacaaacaagacaaccggcaacaccgataagagagccttcgtcgagacctggcagtccttttaccggaagaagcttaaggaggtgtggaaacctgccgtgcggtctggcggatctggcggaggctccaccagccccaagaaaaagagaaaagtctaagctgccttctgcggggcttgccttctggccatgcccttcttctctcccttgcacctgtacctcttggtctttgaataaagcctgagtaggaaggctagcaaaaaaaaaaaaaaaaaaaaaaaaaaaaaaaaaaaaaaaaaaaaaaaaaaaaaaaaaaaaaaaaaaaaaaaaaaaaaaaa

SEQ ID NO: 9213 - RNA, 8787 nt, synthetic construct
  source 1..8787: mol_type = other RNA
aggaaataagagagaaaagaagagtaagaagaaatataagagccaccatggcccctaagaagaagcgtaaagtgagccggatgaaccacgaccaggagttcgacccccctaaggtgtaccctcccgtccccgccgagaagagaaagcccatccgggtcctgagcctgttcgatggcatcgccaccggtctgctggtgctgaaggacctgggcatccaggtggataggtacattgcctccgaggtgtgcgaggactccatcaccgtgggaatggtgcgtcatcagggcaagatcatgtacgtgggcgacgtgcggagcgtgacacagaagcatatccaggagtggggccctttcgacctggtgatcggcggcagcccttgcaatgacctgagcatcgtgaacccagcccggaagggcctgtacgagggaaccggcagactgttcttcgagttttacagactgctgcacgacgcccggcctaaggaaggcgacgaccggcccttcttttggctgttcgagaatgtggtggccatgggagtcagcgacaagcgggatattagccggttcctggagagcaaccccgtgatgatcgatgccaaggaagtgagcgccgcccaccgggccagatacttctggggcaatctgcctggcatgaacagacccctggccagcaccgtgaacgacaagctggagctgcaggagtgcctggagcacggccggatcgccaagttcagcaaggtgagaaccatcaccacccgaagcaacagcatcaaacaaggcaaggaccagcactttcctgtgttcatgaacgagaaggaggacatcctgtggtgtaccgagatggagagagtgttcgggttcccagtccactacacagatgtcagcaacatgtctagactggccagacagagactgctgggaagaagctggtccgtccctgtgatcagacacctgttcgcccctctgaaggagtacttcgcctgcgtgagcagcggcaacagcaacgccaacagccggggccccagcttctctagcggcctggtgccactgtccctgagagggagccacatgggccccatggagatctacaaaaccgtgagcgcctggaagcggcagcctgtgcgcgtgctgagcctgtttcggaatatcgataaagtcctgaaaagcctgggattcctggagagcggctctggctccggcggtggcaccctgaagtacgtggaggatgtgacaaacgtggtcagacgggatgtggagaagtggggccccttcgatctggtgtacggcagcacccaacccctgggcagctcttgtgaccggtgccctggctggtacatgtttcagttccaccggatcctgcagtacgccctgccgagacaggagtcccagcggccattcttttggattttcatggacaacttgctgctgaccgaggatgaccaggaaactaccactcggttcctgcagaccgaagccgtgaccctgcaggacgtgagaggccgggactaccagaacgccatgcgggtgtggtccaacatccctggactgaaaagcaagcacgcacctctgacccctaaagaagaggagtacctgcaggcccaggtgcggagcagaagcaagctggacgcccctaaggtggatctgctggtgaagaattgcctcctgcccctgagagagtacttcaagtatttcagccagaatagtctgcccctgggaggcagcggcggcggccaggccgaggtgaccttcgaggacgtggccgtgctgttcagcagggaggagtggggcaggctgggccccgcccagaggggcctgtacagggacgtgatgctggagacctacaggaacctggtgagcctgggcgccggccccgccggccccaagcccggcgtgatcacccagctggagaggggcgacgagccctgggtgctggacgcccagggcaccgagggcaaggagaggctgagggtgagcggcggcccaagcagcggcgcccctcctcccagcggcggcaggcggcccaagcagcggcgcccctcctcccagcggcggcagcccagccggctccccaacctctaccgaggagggcacctctgagtccgccacccccgagagcggccctggcacctccaccgagcccagcgagggcagcgcacccggcagccctgccggcagccccacctccacagaggagggaaccagcaccgagcccagcgaaggcagcgccccaggcaccagcaccgagcctagtgagcaggagattaaacggatcaacaagatcagaagaagacttgtgaaagacagcaacaccaagaaggccggcaagacaggccccatgaaaaccctgctggttagagtgatgacacccgatctgagagagcggctggaaaacctgagaaagaagcctgaaaatatcccccagcccatcagcaatacatctagagccaacctgaataagctgctgaccgattacaccgaaatgaagaaggcgatcctgcatgtgtactgggaagagttccagaaggaccctgtgggcctgatgagccgggtggcccagcctgccagcaagaagatcgatcagaacaagctgaaacctgagatggacgagaagggcaacctgaccaccgccggctttgcctgctctcagtgtggccagcccctgttcgtgtacaagctggagcaggtgtctgagaagggcaaggcttacaccaactacttcggacggtgcaatgtggccgagcacgaaaagctgatcctgctggcccagctgaagcccgagaaggatagcgacgaagccgtgacatatagcctgggaaagtttgggcagagggccctggatttctacagcattcatgtgaccaaggagtccacccaccccgtgaagcccctggcccagatcgccggaaacagatacgcctccggacctgtgggaaaggccctgagcgacgcatgtatgggcacaatcgcctccttcctgtctaagtaccaggacatcatcatcgaacaccagaaggtggtgaagggcaaccagaagagactggagagcctgcgggagctggccggcaaggaaaacctggaataccctagcgtgaccctgccacctcagcctcacaccaaggagggcgttgatgcctacaacgaagtgatcgcccgggtgcgaatgtgggtgaacctgaacctgtggcagaagctgaagctaagcagagatgatgccaagcctctgctgagactgaagggattcccttcctttcctctggtcgagagacaggccaacgaagtggactggtgggacatggtgtgtaacgtgaagaagctgatcaacgagaaaaaggaggatggcaaggtgttttggcagaatctggctggctacaagagacaggaagccctgagaccatacctgagcagcgaggaagatcggaagaagggaaagaaattcgctcggtaccagctgggcgacctgctgctgcacctggaaaagaagcacggcgaggactggggaaaggtgtacgacgaggcctgggagcggattgacaagaaagtggaaggcctgagcaagcacatcaagctggaagaggaacggagaagcgaggacgcccagagcaaggccgccctgaccgactggctgcgggctaaggccagcttcgtgatcgagggcctgaaggaggccgacaaggacgagttctgcagatgcgagctgaagctgcagaagtggtacggggacctgcggggaaagcccttcgccatcgaagccgagaacagcatcctggacatcagcggcttcagcaagcagtacaactgtgccttcatctggcagaaggacggcgtgaagaagctgaacctgtacctgatcatcaactacttcaagggcggcaagctgcggttcaagaagatcaaacctgaagccttcgaagccaacagattctacaccgtgatcaacaaaaagagcggcgagatcgtgcccatggaggtgaacttcaacttcgacgaccccaacctgatcatcctgcctctggcctttggcaagagacagggcagagaattcatctggaacgacctgctgtccctggaaaccggcagcctgaagctggccaacggaagagtgatcgagaagacactgtacaacagaagaacccggcaggatgagcctgccctgttcgtggccctgaccttcgagcggcgggaggtcctggactcctccaatatcaaaccaatgaacctgatcggcgtggcaagaggcgaaaacatccccgccgtgatcgccctgaccgaccccgagggctgcccactgagccggtttaaggatagcctgggaaacccaacccacatcctgagaatcggcgagagctataaggagaagcagcggaccatccaggccaagaaggaggtggagcagcggagagccggcggctacagccggaagtacgccagcaaagccaagaatctggcagacgatatggtgagaaacaccgctagagatctgctgtactacgccgtgacccaggatgccatgctgatcttcgccaacctgagccggggcttcggccggcagggcaagcggaccttcatggccgagagacagtacacacggatggaggactggctgaccgccaagctggcctacgagggcctgagcaagacctacctgtccaagacactggcccagtacacctccaagacatgcagcaactgtgggtttaccatcaccagcgccgactacgacagggtgctggagaagctgaagaagacagcaacaggctggatgaccacaattaacggcaaggagctgaaggtggagggccagattacctactacaacagatacaagagacagaacgtagtcaaggacctgtccgtcgagctggatagactgagcgaagaatctgtgaacaacgacatctcctcctggacaaagggcagaagcggagaagctctgagcctcctgaagaaaagattctcccatagacccgtgcaggagaagttcgtgtgcctgaactgcggcttcgagacacacgcagccgagcaagccgccctgaacatcgccagatcctggctgttcctgcggagccaggagtacaagaaataccagacaaacaagacaaccggcaacaccgataagagagccttcgtcgagacctggcagtccttttaccggaagaagcttaaggaggtgtggaaacctgccgtgcggtctggcggatctggcggaggctccaccagccccaagaaaaagagaaaagtctaagctgccttctgcggggcttgccttctggccatgcccttcttctctcccttgcacctgtacctcttggtctttgaataaagcctgagtaggaaggctagcaaaaaaaaaaaaaaaaaaaaaaaaaaaaaaaaaaaaaaaaaaaaaaaaaaaaaaaaaaaaaaaaaaaaaaaaaaaaaaaagcccagccggctccccaacctctaccgaggagggcacctctgagtccgccacccccgagagcggccctggcacctccaccgagcccagcgagggcagcgcacccggcagccctgccggcagccccacctccacagaggagggaaccagcaccgagcccagcgaaggcagcgccccaggcaccagcaccgagcctagtgagcaggagattaaacggatcaacaagatcagaagaagacttgtgaaagacagcaacaccaagaaggccggcaagacaggccccatgaaaaccctgctggttagagtgatgacacccgatctgagagagcggctggaaaacctgagaaagaagcctgaaaatatcccccagcccatcagcaatacatctagagccaacctgaataagctgctgaccgattacaccgaaatgaagaaggcgatcctgcatgtgtactgggaagagttccagaaggaccctgtgggcctgatgagccgggtggcccagcctgccagcaagaagatcgatcagaacaagctgaaacctgagatggacgagaagggcaacctgaccaccgccggctttgcctgctctcagtgtggccagcccctgttcgtgtacaagctggagcaggtgtctgagaagggcaaggcttacaccaactacttcggacggtgcaatgtggccgagcacgaaaagctgatcctgctggcccagctgaagcccgagaaggatagcgacgaagccgtgacatatagcctgggaaagtttgggcagagggccctggatttctacagcattcatgtgaccaaggagtccacccaccccgtgaagcccctggcccagatcgccggaaacagatacgcctccggacctgtgggaaaggccctgagcgacgcatgtatgggcacaatcgcctccttcctgtctaagtaccaggacatcatcatcgaacaccagaaggtggtgaagggcaaccagaagagactggagagcctgcgggagctggccggcaaggaaaacctggaataccctagcgtgaccctgccacctcagcctcacaccaaggagggcgttgatgcctacaacgaagtgatcgcccgggtgcgaatgtgggtgaacctgaacctgtggcagaagctgaagctaagcagagatgatgccaagcctctgctgagactgaagggattcccttcctttcctctggtcgagagacaggccaacgaagtggactggtgggacatggtgtgtaacgtgaagaagctgatcaacgagaaaaaggaggatggcaaggtgttttggcagaatctggctggctacaagagacaggaagccctgagaccatacctgagcagcgaggaagatcggaagaagggaaagaaattcgctcggtaccagctgggcgacctgctgctgcacctggaaaagaagcacggcgaggactggggaaaggtgtacgacgaggcctgggagcggattgacaagaaagtggaaggcctgagcaagcacatcaagctggaagaggaacggagaagcgaggacgcccagagcaaggccgccctgaccgactggctgcgggctaaggccagcttcgtgatcgagggcctgaaggaggccgacaaggacgagttctgcagatgcgagctgaagctgcagaagtggtacggggacctgcggggaaagcccttcgccatcgaagccgagaacagcatcctggacatcagcggcttcagcaagcagtacaactgtgccttcatctggcagaaggacggcgtgaagaagctgaacctgtacctgatcatcaactacttcaagggcggcaagctgcggttcaagaagatcaaacctgaagccttcgaagccaacagattctacaccgtgatcaacaaaaagagcggcgagatcgtgcccatggaggtgaacttcaacttcgacgaccccaacctgatcatcctgcctctggcctttggcaagagacagggcagagaattcatctggaacgacctgctgtccctggaaaccggcagcctgaagctggccaacggaagagtgatcgagaagacactgtacaacagaagaacccggcaggatgagcctgccctgttcgtggccctgaccttcgagcggcgggaggtcctggactcctccaatatcaaaccaatgaacctgatcggcgtggcaagaggcgaaaacatccccgccgtgatcgccctgaccgaccccgagggctgcccactgagccggtttaaggatagcctgggaaacccaacccacatcctgagaatcggcgagagctataaggagaagcagcggaccatccaggccaagaaggaggtggagcagcggagagccggcggctacagccggaagtacgccagcaaagccaagaatctggcagacgatatggtgagaaacaccgctagagatctgctgtactacgccgtgacccaggatgccatgctgatcttcgccaacctgagccggggcttcggccggcagggcaagcggaccttcatggccgagagacagtacacacggatggaggactggctgaccgccaagctggcctacgagggcctgagcaagacctacctgtccaagacactggcccagtacacctccaagacatgcagcaactgtgggtttaccatcaccagcgccgactacgacagggtgctggagaagctgaagaagacagcaacaggctggatgaccacaattaacggcaaggagctgaaggtggagggccagattacctactacaacagatacaagagacagaacgtagtcaaggacctgtccgtcgagctggatagactgagcgaagaatctgtgaacaacgacatctcctcctggacaaagggcagaagcggagaagctctgagcctcctgaagaaaagattctcccatagacccgtgcaggagaagttcgtgtgcctgaactgcggcttcgagacacacgcagccgagcaagccgccctgaacatcgccagatcctggctgttcctgcggagccaggagtacaagaaataccagacaaacaagacaaccggcaacaccgataagagagccttcgtcgagacctggcagtccttttaccggaagaagcttaaggaggtgtggaaacctgccgtgcggtctggcggatctggcggaggctccaccagccccaagaaaaagagaaaagtctaagctgccttctgcggggcttgccttctggccatgcccttcttctctcccttgcacctgtacctcttggtctttgaataaagcctgagtaggaaggctagcaaaaaaaaaaaaaaaaaaaaaaaaaaaaaaaaaaaaaaaaaaaaaaaaaaaaaaaaaaaaaaaaaaaaaaaaaaaaaaaa

SEQ ID NO: 9214 - RNA, 8787 nt, synthetic construct
  source 1..8787: mol_type = other RNA
aggaaataagagagaaaagaagagtaagaagaaatataagagccaccatggcccctaagaagaagcgtaaagtgagccggatgaaccacgaccaggagttcgacccccctaaggtgtaccctcccgtccccgccgagaagagaaagcccatccgggtcctgagcctgttcgatggcatcgccaccggtctgctggtgctgaaggacctgggcatccaggtggataggtacattgcctccgaggtgtgcgaggactccatcaccgtgggaatggtgcgtcatcagggcaagatcatgtacgtgggcgacgtgcggagcgtgacacagaagcatatccaggagtggggccctttcgacctggtgatcggcggcagcccttgcaatgacctgagcatcgtgaacccagcccggaagggcctgtacgagggaaccggcagactgttcttcgagttttacagactgctgcacgacgcccggcctaaggaaggcgacgaccggcccttcttttggctgttcgagaatgtggtggccatgggagtcagcgacaagcgggatattagccggttcctggagagcaaccccgtgatgatcgatgccaaggaagtgagcgccgcccaccgggccagatacttctggggcaatctgcctggcatgaacagacccctggccagcaccgtgaacgacaagctggagctgcaggagtgcctggagcacggccggatcgccaagttcagcaaggtgagaaccatcaccacccgaagcaacagcatcaaacaaggcaaggaccagcactttcctgtgttcatgaacgagaaggaggacatcctgtggtgtaccgagatggagagagtgttcgggttcccagtccactacacagatgtcagcaacatgtctagactggccagacagagactgctgggaagaagctggtccgtccctgtgatcagacacctgttcgcccctctgaaggagtacttcgcctgcgtgagcagcggcaacagcaacgccaacagccggggccccagcttctctagcggcctggtgccactgtccctgagagggagccacatgggccccatggagatctacaaaaccgtgagcgcctggaagcggcagcctgtgcgcgtgctgagcctgtttcggaatatcgataaagtcctgaaaagcctgggattcctggagagcggctctggctccggcggtggcaccctgaagtacgtggaggatgtgacaaacgtggtcagacgggatgtggagaagtggggccccttcgatctggtgtacggcagcacccaacccctgggcagctcttgtgaccggtgccctggctggtacatgtttcagttccaccggatcctgcagtacgccctgccgagacaggagtcccagcggccattcttttggattttcatggacaacttgctgctgaccgaggatgaccaggaaactaccactcggttcctgcagaccgaagccgtgaccctgcaggacgtgagaggccgggactaccagaacgccatgcgggtgtggtccaacatccctggactgaaaagcaagcacgcacctctgacccctaaagaagaggagtacctgcaggcccaggtgcggagcagaagcaagctggacgcccctaaggtggatctgctggtgaagaattgcctcctgcccctgagagagtacttcaagtatttcagccagaatagtctgcccctgggaggcagcggcggcggccagccccagggcaccgtgaccttcaaggacgtggaggtgaccttcagccaggacgagtggggcctgctggacgccagccagaggaacctgtacagggacgtgatgctggagaactacggcaacatggccagcgtggtgggccccttcaccaagcccgccctgatcagctggctggaggccagggagccctggggcctgaacgtgcagggcgtgcagctgaagggcaaccccggcgccgcccccggcggcccaagcagcggcgcccctcctcccagcggcggcaggcggcccaagcagcggcgcccctcctcccagcggcggcagcccagccggctccccaacctctaccgaggagggcacctctgagtccgccacccccgagagcggccctggcacctccaccgagcccagcgagggcagcgcacccggcagccctgccggcagccccacctccacagaggagggaaccagcaccgagcccagcgaaggcagcgccccaggcaccagcaccgagcctagtgagcaggagattaaacggatcaacaagatcagaagaagacttgtgaaagacagcaacaccaagaaggccggcaagacaggccccatgaaaaccctgctggttagagtgatgacacccgatctgagagagcggctggaaaacctgagaaagaagcctgaaaatatcccccagcccatcagcaatacatctagagccaacctgaataagctgctgaccgattacaccgaaatgaagaaggcgatcctgcatgtgtactgggaagagttccagaaggaccctgtgggcctgatgagccgggtggcccagcctgccagcaagaagatcgatcagaacaagctgaaacctgagatggacgagaagggcaacctgaccaccgccggctttgcctgctctcagtgtggccagcccctgttcgtgtacaagctggagcaggtgtctgagaagggcaaggcttacaccaactacttcggacggtgcaatgtggccgagcacgaaaagctgatcctgctggcccagctgaagcccgagaaggatagcgacgaagccgtgacatatagcctgggaaagtttgggcagagggccctggatttctacagcattcatgtgaccaaggagtccacccaccccgtgaagcccctggcccagatcgccggaaacagatacgcctccggacctgtgggaaaggccctgagcgacgcatgtatgggcacaatcgcctccttcctgtctaagtaccaggacatcatcatcgaacaccagaaggtggtgaagggcaaccagaagagactggagagcctgcgggagctggccggcaaggaaaacctggaataccctagcgtgaccctgccacctcagcctcacaccaaggagggcgttgatgcctacaacgaagtgatcgcccgggtgcgaatgtgggtgaacctgaacctgtggcagaagctgaagctaagcagagatgatgccaagcctctgctgagactgaagggattcccttcctttcctctggtcgagagacaggccaacgaagtggactggtgggacatggtgtgtaacgtgaagaagctgatcaacgagaaaaaggaggatggcaaggtgttttggcagaatctggctggctacaagagacaggaagccctgagaccatacctgagcagcgaggaagatcggaagaagggaaagaaattcgctcggtaccagctgggcgacctgctgctgcacctggaaaagaagcacggcgaggactggggaaaggtgtacgacgaggcctgggagcggattgacaagaaagtggaaggcctgagcaagcacatcaagctggaagaggaacggagaagcgaggacgcccagagcaaggccgccctgaccgactggctgcgggctaaggccagcttcgtgatcgagggcctgaaggaggccgacaaggacgagttctgcagatgcgagctgaagctgcagaagtggtacggggacctgcggggaaagcccttcgccatcgaagccgagaacagcatcctggacatcagcggcttcagcaagcagtacaactgtgccttcatctggcagaaggacggcgtgaagaagctgaacctgtacctgatcatcaactacttcaagggcggcaagctgcggttcaagaagatcaaacctgaagccttcgaagccaacagattctacaccgtgatcaacaaaaagagcggcgagatcgtgcccatggaggtgaacttcaacttcgacgaccccaacctgatcatcctgcctctggcctttggcaagagacagggcagagaattcatctggaacgacctgctgtccctggaaaccggcagcctgaagctggccaacggaagagtgatcgagaagacactgtacaacagaagaacccggcaggatgagcctgccctgttcgtggccctgaccttcgagcggcgggaggtcctggactcctccaatatcaaaccaatgaacctgatcggcgtggcaagaggcgaaaacatccccgccgtgatcgccctgaccgaccccgagggctgcccactgagccggtttaaggatagcctgggaaacccaacccacatcctgagaatcggcgagagctataaggagaagcagcggaccatccaggccaagaaggaggtggagcagcggagagccggcggctacagccggaagtacgccagcaaagccaagaatctggcagacgatatggtgagaaacaccgctagagatctgctgtactacgccgtgacccaggatgccatgctgatcttcgccaacctgagccggggcttcggccggcagggcaagcggaccttcatggccgagagacagtacacacggatggaggactggctgaccgccaagctggcctacgagggcctgagcaagacctacctgtccaagacactggcccagtacacctccaagacatgcagcaactgtgggtttaccatcaccagcgccgactacgacagggtgctggagaagctgaagaagacagcaacaggctggatgaccacaattaacggcaaggagctgaaggtggagggccagattacctactacaacagatacaagagacagaacgtagtcaaggacctgtccgtcgagctggatagactgagcgaagaatctgtgaacaacgacatctcctcctggacaaagggcagaagcggagaagctctgagcctcctgaagaaaagattctcccatagacccgtgcaggagaagttcgtgtgcctgaactgcggcttcgagacacacgcagccgagcaagccgccctgaacatcgccagatcctggctgttcctgcggagccaggagtacaagaaataccagacaaacaagacaaccggcaacaccgataagagagccttcgtcgagacctggcagtccttttaccggaagaagcttaaggaggtgtggaaacctgccgtgcggtctggcggatctggcggaggctccaccagccccaagaaaaagagaaaagtctaagctgccttctgcggggcttgccttctggccatgcccttcttctctcccttgcacctgtacctcttggtctttgaataaagcctgagtaggaaggctagcaaaaaaaaaaaaaaaaaaaaaaaaaaaaaaaaaaaaaaaaaaaaaaaaaaaaaaaaaaaaaaaaaaaaaaaaaaaaaaaagcccagccggctccccaacctctaccgaggagggcacctctgagtccgccacccccgagagcggccctggcacctccaccgagcccagcgagggcagcgcacccggcagccctgccggcagccccacctccacagaggagggaaccagcaccgagcccagcgaaggcagcgccccaggcaccagcaccgagcctagtgagcaggagattaaacggatcaacaagatcagaagaagacttgtgaaagacagcaacaccaagaaggccggcaagacaggccccatgaaaaccctgctggttagagtgatgacacccgatctgagagagcggctggaaaacctgagaaagaagcctgaaaatatcccccagcccatcagcaatacatctagagccaacctgaataagctgctgaccgattacaccgaaatgaagaaggcgatcctgcatgtgtactgggaagagttccagaaggaccctgtgggcctgatgagccgggtggcccagcctgccagcaagaagatcgatcagaacaagctgaaacctgagatggacgagaagggcaacctgaccaccgccggctttgcctgctctcagtgtggccagcccctgttcgtgtacaagctggagcaggtgtctgagaagggcaaggcttacaccaactacttcggacggtgcaatgtggccgagcacgaaaagctgatcctgctggcccagctgaagcccgagaaggatagcgacgaagccgtgacatatagcctgggaaagtttgggcagagggccctggatttctacagcattcatgtgaccaaggagtccacccaccccgtgaagcccctggcccagatcgccggaaacagatacgcctccggacctgtgggaaaggccctgagcgacgcatgtatgggcacaatcgcctccttcctgtctaagtaccaggacatcatcatcgaacaccagaaggtggtgaagggcaaccagaagagactggagagcctgcgggagctggccggcaaggaaaacctggaataccctagcgtgaccctgccacctcagcctcacaccaaggagggcgttgatgcctacaacgaagtgatcgcccgggtgcgaatgtgggtgaacctgaacctgtggcagaagctgaagctaagcagagatgatgccaagcctctgctgagactgaagggattcccttcctttcctctggtcgagagacaggccaacgaagtggactggtgggacatggtgtgtaacgtgaagaagctgatcaacgagaaaaaggaggatggcaaggtgttttggcagaatctggctggctacaagagacaggaagccctgagaccatacctgagcagcgaggaagatcggaagaagggaaagaaattcgctcggtaccagctgggcgacctgctgctgcacctggaaaagaagcacggcgaggactggggaaaggtgtacgacgaggcctgggagcggattgacaagaaagtggaaggcctgagcaagcacatcaagctggaagaggaacggagaagcgaggacgcccagagcaaggccgccctgaccgactggctgcgggctaaggccagcttcgtgatcgagggcctgaaggaggccgacaaggacgagttctgcagatgcgagctgaagctgcagaagtggtacggggacctgcggggaaagcccttcgccatcgaagccgagaacagcatcctggacatcagcggcttcagcaagcagtacaactgtgccttcatctggcagaaggacggcgtgaagaagctgaacctgtacctgatcatcaactacttcaagggcggcaagctgcggttcaagaagatcaaacctgaagccttcgaagccaacagattctacaccgtgatcaacaaaaagagcggcgagatcgtgcccatggaggtgaacttcaacttcgacgaccccaacctgatcatcctgcctctggcctttggcaagagacagggcagagaattcatctggaacgacctgctgtccctggaaaccggcagcctgaagctggccaacggaagagtgatcgagaagacactgtacaacagaagaacccggcaggatgagcctgccctgttcgtggccctgaccttcgagcggcgggaggtcctggactcctccaatatcaaaccaatgaacctgatcggcgtggcaagaggcgaaaacatccccgccgtgatcgccctgaccgaccccgagggctgcccactgagccggtttaaggatagcctgggaaacccaacccacatcctgagaatcggcgagagctataaggagaagcagcggaccatccaggccaagaaggaggtggagcagcggagagccggcggctacagccggaagtacgccagcaaagccaagaatctggcagacgatatggtgagaaacaccgctagagatctgctgtactacgccgtgacccaggatgccatgctgatcttcgccaacctgagccggggcttcggccggcagggcaagcggaccttcatggccgagagacagtacacacggatggaggactggctgaccgccaagctggcctacgagggcctgagcaagacctacctgtccaagacactggcccagtacacctccaagacatgcagcaactgtgggtttaccatcaccagcgccgactacgacagggtgctggagaagctgaagaagacagcaacaggctggatgaccacaattaacggcaaggagctgaaggtggagggccagattacctactacaacagatacaagagacagaacgtagtcaaggacctgtccgtcgagctggatagactgagcgaagaatctgtgaacaacgacatctcctcctggacaaagggcagaagcggagaagctctgagcctcctgaagaaaagattctcccatagacccgtgcaggagaagttcgtgtgcctgaactgcggcttcgagacacacgcagccgagcaagccgccctgaacatcgccagatcctggctgttcctgcggagccaggagtacaagaaataccagacaaacaagacaaccggcaacaccgataagagagccttcgtcgagacctggcagtccttttaccggaagaagcttaaggaggtgtggaaacctgccgtgcggtctggcggatctggcggaggctccaccagccccaagaaaaagagaaaagtctaagctgccttctgcggggcttgccttctggccatgcccttcttctctcccttgcacctgtacctcttggtctttgaataaagcctgagtaggaaggctagcaaaaaaaaaaaaaaaaaaaaaaaaaaaaaaaaaaaaaaaaaaaaaaaaaaaaaaaaaaaaaaaaaaaaaaaaaaaaaaaa

SEQ ID NO: 9215 - RNA, 8787 nt, synthetic construct
  source 1..8787: mol_type = other RNA
aggaaataagagagaaaagaagagtaagaagaaatataagagccaccatggcccctaagaagaagcgtaaagtgagccggatgaaccacgaccaggagttcgacccccctaaggtgtaccctcccgtccccgccgagaagagaaagcccatccgggtcctgagcctgttcgatggcatcgccaccggtctgctggtgctgaaggacctgggcatccaggtggataggtacattgcctccgaggtgtgcgaggactccatcaccgtgggaatggtgcgtcatcagggcaagatcatgtacgtgggcgacgtgcggagcgtgacacagaagcatatccaggagtggggccctttcgacctggtgatcggcggcagcccttgcaatgacctgagcatcgtgaacccagcccggaagggcctgtacgagggaaccggcagactgttcttcgagttttacagactgctgcacgacgcccggcctaaggaaggcgacgaccggcccttcttttggctgttcgagaatgtggtggccatgggagtcagcgacaagcgggatattagccggttcctggagagcaaccccgtgatgatcgatgccaaggaagtgagcgccgcccaccgggccagatacttctggggcaatctgcctggcatgaacagacccctggccagcaccgtgaacgacaagctggagctgcaggagtgcctggagcacggccggatcgccaagttcagcaaggtgagaaccatcaccacccgaagcaacagcatcaaacaaggcaaggaccagcactttcctgtgttcatgaacgagaaggaggacatcctgtggtgtaccgagatggagagagtgttcgggttcccagtccactacacagatgtcagcaacatgtctagactggccagacagagactgctgggaagaagctggtccgtccctgtgatcagacacctgttcgcccctctgaaggagtacttcgcctgcgtgagcagcggcaacagcaacgccaacagccggggccccagcttctctagcggcctggtgccactgtccctgagagggagccacatgggccccatggagatctacaaaaccgtgagcgcctggaagcggcagcctgtgcgcgtgctgagcctgtttcggaatatcgataaagtcctgaaaagcctgggattcctggagagcggctctggctccggcggtggcaccctgaagtacgtggaggatgtgacaaacgtggtcagacgggatgtggagaagtggggccccttcgatctggtgtacggcagcacccaacccctgggcagctcttgtgaccggtgccctggctggtacatgtttcagttccaccggatcctgcagtacgccctgccgagacaggagtcccagcggccattcttttggattttcatggacaacttgctgctgaccgaggatgaccaggaaactaccactcggttcctgcagaccgaagccgtgaccctgcaggacgtgagaggccgggactaccagaacgccatgcgggtgtggtccaacatccctggactgaaaagcaagcacgcacctctgacccctaaagaagaggagtacctgcaggcccaggtgcggagcagaagcaagctggacgcccctaaggtggatctgctggtgaagaattgcctcctgcccctgagagagtacttcaagtatttcagccagaatagtctgcccctgggaggcagcggcggcggccagccccagggcaccgtgaccttcaaggacgtggaggtgaccttcagccaggacgagtggggcctgctggacgccagccagaggaacctgtacagggacgtgatgctggagaactacggcaacatggccagcgtggtgggccccttcaccaagcccgccctgatcagctggctggaggccagggagccctggggcctgaacgtgcagggcgtgcagttcaagggcaaccccggcgccgcccccggcggcccaagcagcggcgcccctcctcccagcggcggcaggcggcccaagcagcggcgcccctcctcccagcggcggcagcccagccggctccccaacctctaccgaggagggcacctctgagtccgccacccccgagagcggccctggcacctccaccgagcccagcgagggcagcgcacccggcagccctgccggcagccccacctccacagaggagggaaccagcaccgagcccagcgaaggcagcgccccaggcaccagcaccgagcctagtgagcaggagattaaacggatcaacaagatcagaagaagacttgtgaaagacagcaacaccaagaaggccggcaagacaggccccatgaaaaccctgctggttagagtgatgacacccgatctgagagagcggctggaaaacctgagaaagaagcctgaaaatatcccccagcccatcagcaatacatctagagccaacctgaataagctgctgaccgattacaccgaaatgaagaaggcgatcctgcatgtgtactgggaagagttccagaaggaccctgtgggcctgatgagccgggtggcccagcctgccagcaagaagatcgatcagaacaagctgaaacctgagatggacgagaagggcaacctgaccaccgccggctttgcctgctctcagtgtggccagcccctgttcgtgtacaagctggagcaggtgtctgagaagggcaaggcttacaccaactacttcggacggtgcaatgtggccgagcacgaaaagctgatcctgctggcccagctgaagcccgagaaggatagcgacgaagccgtgacatatagcctgggaaagtttgggcagagggccctggatttctacagcattcatgtgaccaaggagtccacccaccccgtgaagcccctggcccagatcgccggaaacagatacgcctccggacctgtgggaaaggccctgagcgacgcatgtatgggcacaatcgcctccttcctgtctaagtaccaggacatcatcatcgaacaccagaaggtggtgaagggcaaccagaagagactggagagcctgcgggagctggccggcaaggaaaacctggaataccctagcgtgaccctgccacctcagcctcacaccaaggagggcgttgatgcctacaacgaagtgatcgcccgggtgcgaatgtgggtgaacctgaacctgtggcagaagctgaagctaagcagagatgatgccaagcctctgctgagactgaagggattcccttcctttcctctggtcgagagacaggccaacgaagtggactggtgggacatggtgtgtaacgtgaagaagctgatcaacgagaaaaaggaggatggcaaggtgttttggcagaatctggctggctacaagagacaggaagccctgagaccatacctgagcagcgaggaagatcggaagaagggaaagaaattcgctcggtaccagctgggcgacctgctgctgcacctggaaaagaagcacggcgaggactggggaaaggtgtacgacgaggcctgggagcggattgacaagaaagtggaaggcctgagcaagcacatcaagctggaagaggaacggagaagcgaggacgcccagagcaaggccgccctgaccgactggctgcgggctaaggccagcttcgtgatcgagggcctgaaggaggccgacaaggacgagttctgcagatgcgagctgaagctgcagaagtggtacggggacctgcggggaaagcccttcgccatcgaagccgagaacagcatcctggacatcagcggcttcagcaagcagtacaactgtgccttcatctggcagaaggacggcgtgaagaagctgaacctgtacctgatcatcaactacttcaagggcggcaagctgcggttcaagaagatcaaacctgaagccttcgaagccaacagattctacaccgtgatcaacaaaaagagcggcgagatcgtgcccatggaggtgaacttcaacttcgacgaccccaacctgatcatcctgcctctggcctttggcaagagacagggcagagaattcatctggaacgacctgctgtccctggaaaccggcagcctgaagctggccaacggaagagtgatcgagaagacactgtacaacagaagaacccggcaggatgagcctgccctgttcgtggccctgaccttcgagcggcgggaggtcctggactcctccaatatcaaaccaatgaacctgatcggcgtggcaagaggcgaaaacatccccgccgtgatcgccctgaccgaccccgagggctgcccactgagccggtttaaggatagcctgggaaacccaacccacatcctgagaatcggcgagagctataaggagaagcagcggaccatccaggccaagaaggaggtggagcagcggagagccggcggctacagccggaagtacgccagcaaagccaagaatctggcagacgatatggtgagaaacaccgctagagatctgctgtactacgccgtgacccaggatgccatgctgatcttcgccaacctgagccggggcttcggccggcagggcaagcggaccttcatggccgagagacagtacacacggatggaggactggctgaccgccaagctggcctacgagggcctgagcaagacctacctgtccaagacactggcccagtacacctccaagacatgcagcaactgtgggtttaccatcaccagcgccgactacgacagggtgctggagaagctgaagaagacagcaacaggctggatgaccacaattaacggcaaggagctgaaggtggagggccagattacctactacaacagatacaagagacagaacgtagtcaaggacctgtccgtcgagctggatagactgagcgaagaatctgtgaacaacgacatctcctcctggacaaagggcagaagcggagaagctctgagcctcctgaagaaaagattctcccatagacccgtgcaggagaagttcgtgtgcctgaactgcggcttcgagacacacgcagccgagcaagccgccctgaacatcgccagatcctggctgttcctgcggagccaggagtacaagaaataccagacaaacaagacaaccggcaacaccgataagagagccttcgtcgagacctggcagtccttttaccggaagaagcttaaggaggtgtggaaacctgccgtgcggtctggcggatctggcggaggctccaccagccccaagaaaaagagaaaagtctaagctgccttctgcggggcttgccttctggccatgcccttcttctctcccttgcacctgtacctcttggtctttgaataaagcctgagtaggaaggctagcaaaaaaaaaaaaaaaaaaaaaaaaaaaaaaaaaaaaaaaaaaaaaaaaaaaaaaaaaaaaaaaaaaaaaaaaaaaaaaaagcccagccggctccccaacctctaccgaggagggcacctctgagtccgccacccccgagagcggccctggcacctccaccgagcccagcgagggcagcgcacccggcagccctgccggcagccccacctccacagaggagggaaccagcaccgagcccagcgaaggcagcgccccaggcaccagcaccgagcctagtgagcaggagattaaacggatcaacaagatcagaagaagacttgtgaaagacagcaacaccaagaaggccggcaagacaggccccatgaaaaccctgctggttagagtgatgacacccgatctgagagagcggctggaaaacctgagaaagaagcctgaaaatatcccccagcccatcagcaatacatctagagccaacctgaataagctgctgaccgattacaccgaaatgaagaaggcgatcctgcatgtgtactgggaagagttccagaaggaccctgtgggcctgatgagccgggtggcccagcctgccagcaagaagatcgatcagaacaagctgaaacctgagatggacgagaagggcaacctgaccaccgccggctttgcctgctctcagtgtggccagcccctgttcgtgtacaagctggagcaggtgtctgagaagggcaaggcttacaccaactacttcggacggtgcaatgtggccgagcacgaaaagctgatcctgctggcccagctgaagcccgagaaggatagcgacgaagccgtgacatatagcctgggaaagtttgggcagagggccctggatttctacagcattcatgtgaccaaggagtccacccaccccgtgaagcccctggcccagatcgccggaaacagatacgcctccggacctgtgggaaaggccctgagcgacgcatgtatgggcacaatcgcctccttcctgtctaagtaccaggacatcatcatcgaacaccagaaggtggtgaagggcaaccagaagagactggagagcctgcgggagctggccggcaaggaaaacctggaataccctagcgtgaccctgccacctcagcctcacaccaaggagggcgttgatgcctacaacgaagtgatcgcccgggtgcgaatgtgggtgaacctgaacctgtggcagaagctgaagctaagcagagatgatgccaagcctctgctgagactgaagggattcccttcctttcctctggtcgagagacaggccaacgaagtggactggtgggacatggtgtgtaacgtgaagaagctgatcaacgagaaaaaggaggatggcaaggtgttttggcagaatctggctggctacaagagacaggaagccctgagaccatacctgagcagcgaggaagatcggaagaagggaaagaaattcgctcggtaccagctgggcgacctgctgctgcacctggaaaagaagcacggcgaggactggggaaaggtgtacgacgaggcctgggagcggattgacaagaaagtggaaggcctgagcaagcacatcaagctggaagaggaacggagaagcgaggacgcccagagcaaggccgccctgaccgactggctgcgggctaaggccagcttcgtgatcgagggcctgaaggaggccgacaaggacgagttctgcagatgcgagctgaagctgcagaagtggtacggggacctgcggggaaagcccttcgccatcgaagccgagaacagcatcctggacatcagcggcttcagcaagcagtacaactgtgccttcatctggcagaaggacggcgtgaagaagctgaacctgtacctgatcatcaactacttcaagggcggcaagctgcggttcaagaagatcaaacctgaagccttcgaagccaacagattctacaccgtgatcaacaaaaagagcggcgagatcgtgcccatggaggtgaacttcaacttcgacgaccccaacctgatcatcctgcctctggcctttggcaagagacagggcagagaattcatctggaacgacctgctgtccctggaaaccggcagcctgaagctggccaacggaagagtgatcgagaagacactgtacaacagaagaacccggcaggatgagcctgccctgttcgtggccctgaccttcgagcggcgggaggtcctggactcctccaatatcaaaccaatgaacctgatcggcgtggcaagaggcgaaaacatccccgccgtgatcgccctgaccgaccccgagggctgcccactgagccggtttaaggatagcctgggaaacccaacccacatcctgagaatcggcgagagctataaggagaagcagcggaccatccaggccaagaaggaggtggagcagcggagagccggcggctacagccggaagtacgccagcaaagccaagaatctggcagacgatatggtgagaaacaccgctagagatctgctgtactacgccgtgacccaggatgccatgctgatcttcgccaacctgagccggggcttcggccggcagggcaagcggaccttcatggccgagagacagtacacacggatggaggactggctgaccgccaagctggcctacgagggcctgagcaagacctacctgtccaagacactggcccagtacacctccaagacatgcagcaactgtgggtttaccatcaccagcgccgactacgacagggtgctggagaagctgaagaagacagcaacaggctggatgaccacaattaacggcaaggagctgaaggtggagggccagattacctactacaacagatacaagagacagaacgtagtcaaggacctgtccgtcgagctggatagactgagcgaagaatctgtgaacaacgacatctcctcctggacaaagggcagaagcggagaagctctgagcctcctgaagaaaagattctcccatagacccgtgcaggagaagttcgtgtgcctgaactgcggcttcgagacacacgcagccgagcaagccgccctgaacatcgccagatcctggctgttcctgcggagccaggagtacaagaaataccagacaaacaagacaaccggcaacaccgataagagagccttcgtcgagacctggcagtccttttaccggaagaagcttaaggaggtgtggaaacctgccgtgcggtctggcggatctggcggaggctccaccagccccaagaaaaagagaaaagtctaagctgccttctgcggggcttgccttctggccatgcccttcttctctcccttgcacctgtacctcttggtctttgaataaagcctgagtaggaaggctagcaaaaaaaaaaaaaaaaaaaaaaaaaaaaaaaaaaaaaaaaaaaaaaaaaaaaaaaaaaaaaaaaaaaaaaaaaaaaaaaa

SEQ ID NO: 9216 - RNA, 8787 nt, synthetic construct
  source 1..8787: mol_type = other RNA
aggaaataagagagaaaagaagagtaagaagaaatataagagccaccatggcccctaagaagaagcgtaaagtgagccggatgaaccacgaccaggagttcgacccccctaaggtgtaccctcccgtccccgccgagaagagaaagcccatccgggtcctgagcctgttcgatggcatcgccaccggtctgctggtgctgaaggacctgggcatccaggtggataggtacattgcctccgaggtgtgcgaggactccatcaccgtgggaatggtgcgtcatcagggcaagatcatgtacgtgggcgacgtgcggagcgtgacacagaagcatatccaggagtggggccctttcgacctggtgatcggcggcagcccttgcaatgacctgagcatcgtgaacccagcccggaagggcctgtacgagggaaccggcagactgttcttcgagttttacagactgctgcacgacgcccggcctaaggaaggcgacgaccggcccttcttttggctgttcgagaatgtggtggccatgggagtcagcgacaagcgggatattagccggttcctggagagcaaccccgtgatgatcgatgccaaggaagtgagcgccgcccaccgggccagatacttctggggcaatctgcctggcatgaacagacccctggccagcaccgtgaacgacaagctggagctgcaggagtgcctggagcacggccggatcgccaagttcagcaaggtgagaaccatcaccacccgaagcaacagcatcaaacaaggcaaggaccagcactttcctgtgttcatgaacgagaaggaggacatcctgtggtgtaccgagatggagagagtgttcgggttcccagtccactacacagatgtcagcaacatgtctagactggccagacagagactgctgggaagaagctggtccgtccctgtgatcagacacctgttcgcccctctgaaggagtacttcgcctgcgtgagcagcggcaacagcaacgccaacagccggggccccagcttctctagcggcctggtgccactgtccctgagagggagccacatgggccccatggagatctacaaaaccgtgagcgcctggaagcggcagcctgtgcgcgtgctgagcctgtttcggaatatcgataaagtcctgaaaagcctgggattcctggagagcggctctggctccggcggtggcaccctgaagtacgtggaggatgtgacaaacgtggtcagacgggatgtggagaagtggggccccttcgatctggtgtacggcagcacccaacccctgggcagctcttgtgaccggtgccctggctggtacatgtttcagttccaccggatcctgcagtacgccctgccgagacaggagtcccagcggccattcttttggattttcatggacaacttgctgctgaccgaggatgaccaggaaactaccactcggttcctgcagaccgaagccgtgaccctgcaggacgtgagaggccgggactaccagaacgccatgcgggtgtggtccaacatccctggactgaaaagcaagcacgcacctctgacccctaaagaagaggagtacctgcaggcccaggtgcggagcagaagcaagctggacgcccctaaggtggatctgctggtgaagaattgcctcctgcccctgagagagtacttcaagtatttcagccagaatagtctgcccctgggaggcagcggcggcggcgtgcaggagcccgtgaccttcaaggacgtggccgtggacttcacccaggaggagtggggccagctggacctggtgcagaggaccctgtacagggacgtgatgctggagacctacggccacctgctgagcgtgggcaaccagatcgccaagcccgaggtgatcagcctgctggagcagggcgaggagccctggagcgtggagcaggcctgcccccagagggcctgccccgagtggatgaggaacggcggcccaagcagcggcgcccctcctcccagcggcggcaggcggcccaagcagcggcgcccctcctcccagcggcggcagcccagccggctccccaacctctaccgaggagggcacctctgagtccgccacccccgagagcggccctggcacctccaccgagcccagcgagggcagcgcacccggcagccctgccggcagccccacctccacagaggagggaaccagcaccgagcccagcgaaggcagcgccccaggcaccagcaccgagcctagtgagcaggagattaaacggatcaacaagatcagaagaagacttgtgaaagacagcaacaccaagaaggccggcaagacaggccccatgaaaaccctgctggttagagtgatgacacccgatctgagagagcggctggaaaacctgagaaagaagcctgaaaatatcccccagcccatcagcaatacatctagagccaacctgaataagctgctgaccgattacaccgaaatgaagaaggcgatcctgcatgtgtactgggaagagttccagaaggaccctgtgggcctgatgagccgggtggcccagcctgccagcaagaagatcgatcagaacaagctgaaacctgagatggacgagaagggcaacctgaccaccgccggctttgcctgctctcagtgtggccagcccctgttcgtgtacaagctggagcaggtgtctgagaagggcaaggcttacaccaactacttcggacggtgcaatgtggccgagcacgaaaagctgatcctgctggcccagctgaagcccgagaaggatagcgacgaagccgtgacatatagcctgggaaagtttgggcagagggccctggatttctacagcattcatgtgaccaaggagtccacccaccccgtgaagcccctggcccagatcgccggaaacagatacgcctccggacctgtgggaaaggccctgagcgacgcatgtatgggcacaatcgcctccttcctgtctaagtaccaggacatcatcatcgaacaccagaaggtggtgaagggcaaccagaagagactggagagcctgcgggagctggccggcaaggaaaacctggaataccctagcgtgaccctgccacctcagcctcacaccaaggagggcgttgatgcctacaacgaagtgatcgcccgggtgcgaatgtgggtgaacctgaacctgtggcagaagctgaagctaagcagagatgatgccaagcctctgctgagactgaagggattcccttcctttcctctggtcgagagacaggccaacgaagtggactggtgggacatggtgtgtaacgtgaagaagctgatcaacgagaaaaaggaggatggcaaggtgttttggcagaatctggctggctacaagagacaggaagccctgagaccatacctgagcagcgaggaagatcggaagaagggaaagaaattcgctcggtaccagctgggcgacctgctgctgcacctggaaaagaagcacggcgaggactggggaaaggtgtacgacgaggcctgggagcggattgacaagaaagtggaaggcctgagcaagcacatcaagctggaagaggaacggagaagcgaggacgcccagagcaaggccgccctgaccgactggctgcgggctaaggccagcttcgtgatcgagggcctgaaggaggccgacaaggacgagttctgcagatgcgagctgaagctgcagaagtggtacggggacctgcggggaaagcccttcgccatcgaagccgagaacagcatcctggacatcagcggcttcagcaagcagtacaactgtgccttcatctggcagaaggacggcgtgaagaagctgaacctgtacctgatcatcaactacttcaagggcggcaagctgcggttcaagaagatcaaacctgaagccttcgaagccaacagattctacaccgtgatcaacaaaaagagcggcgagatcgtgcccatggaggtgaacttcaacttcgacgaccccaacctgatcatcctgcctctggcctttggcaagagacagggcagagaattcatctggaacgacctgctgtccctggaaaccggcagcctgaagctggccaacggaagagtgatcgagaagacactgtacaacagaagaacccggcaggatgagcctgccctgttcgtggccctgaccttcgagcggcgggaggtcctggactcctccaatatcaaaccaatgaacctgatcggcgtggcaagaggcgaaaacatccccgccgtgatcgccctgaccgaccccgagggctgcccactgagccggtttaaggatagcctgggaaacccaacccacatcctgagaatcggcgagagctataaggagaagcagcggaccatccaggccaagaaggaggtggagcagcggagagccggcggctacagccggaagtacgccagcaaagccaagaatctggcagacgatatggtgagaaacaccgctagagatctgctgtactacgccgtgacccaggatgccatgctgatcttcgccaacctgagccggggcttcggccggcagggcaagcggaccttcatggccgagagacagtacacacggatggaggactggctgaccgccaagctggcctacgagggcctgagcaagacctacctgtccaagacactggcccagtacacctccaagacatgcagcaactgtgggtttaccatcaccagcgccgactacgacagggtgctggagaagctgaagaagacagcaacaggctggatgaccacaattaacggcaaggagctgaaggtggagggccagattacctactacaacagatacaagagacagaacgtagtcaaggacctgtccgtcgagctggatagactgagcgaagaatctgtgaacaacgacatctcctcctggacaaagggcagaagcggagaagctctgagcctcctgaagaaaagattctcccatagacccgtgcaggagaagttcgtgtgcctgaactgcggcttcgagacacacgcagccgagcaagccgccctgaacatcgccagatcctggctgttcctgcggagccaggagtacaagaaataccagacaaacaagacaaccggcaacaccgataagagagccttcgtcgagacctggcagtccttttaccggaagaagcttaaggaggtgtggaaacctgccgtgcggtctggcggatctggcggaggctccaccagccccaagaaaaagagaaaagtctaagctgccttctgcggggcttgccttctggccatgcccttcttctctcccttgcacctgtacctcttggtctttgaataaagcctgagtaggaaggctagcaaaaaaaaaaaaaaaaaaaaaaaaaaaaaaaaaaaaaaaaaaaaaaaaaaaaaaaaaaaaaaaaaaaaaaaaaaaaaaaagcccagccggctccccaacctctaccgaggagggcacctctgagtccgccacccccgagagcggccctggcacctccaccgagcccagcgagggcagcgcacccggcagccctgccggcagccccacctccacagaggagggaaccagcaccgagcccagcgaaggcagcgccccaggcaccagcaccgagcctagtgagcaggagattaaacggatcaacaagatcagaagaagacttgtgaaagacagcaacaccaagaaggccggcaagacaggccccatgaaaaccctgctggttagagtgatgacacccgatctgagagagcggctggaaaacctgagaaagaagcctgaaaatatcccccagcccatcagcaatacatctagagccaacctgaataagctgctgaccgattacaccgaaatgaagaaggcgatcctgcatgtgtactgggaagagttccagaaggaccctgtgggcctgatgagccgggtggcccagcctgccagcaagaagatcgatcagaacaagctgaaacctgagatggacgagaagggcaacctgaccaccgccggctttgcctgctctcagtgtggccagcccctgttcgtgtacaagctggagcaggtgtctgagaagggcaaggcttacaccaactacttcggacggtgcaatgtggccgagcacgaaaagctgatcctgctggcccagctgaagcccgagaaggatagcgacgaagccgtgacatatagcctgggaaagtttgggcagagggccctggatttctacagcattcatgtgaccaaggagtccacccaccccgtgaagcccctggcccagatcgccggaaacagatacgcctccggacctgtgggaaaggccctgagcgacgcatgtatgggcacaatcgcctccttcctgtctaagtaccaggacatcatcatcgaacaccagaaggtggtgaagggcaaccagaagagactggagagcctgcgggagctggccggcaaggaaaacctggaataccctagcgtgaccctgccacctcagcctcacaccaaggagggcgttgatgcctacaacgaagtgatcgcccgggtgcgaatgtgggtgaacctgaacctgtggcagaagctgaagctaagcagagatgatgccaagcctctgctgagactgaagggattcccttcctttcctctggtcgagagacaggccaacgaagtggactggtgggacatggtgtgtaacgtgaagaagctgatcaacgagaaaaaggaggatggcaaggtgttttggcagaatctggctggctacaagagacaggaagccctgagaccatacctgagcagcgaggaagatcggaagaagggaaagaaattcgctcggtaccagctgggcgacctgctgctgcacctggaaaagaagcacggcgaggactggggaaaggtgtacgacgaggcctgggagcggattgacaagaaagtggaaggcctgagcaagcacatcaagctggaagaggaacggagaagcgaggacgcccagagcaaggccgccctgaccgactggctgcgggctaaggccagcttcgtgatcgagggcctgaaggaggccgacaaggacgagttctgcagatgcgagctgaagctgcagaagtggtacggggacctgcggggaaagcccttcgccatcgaagccgagaacagcatcctggacatcagcggcttcagcaagcagtacaactgtgccttcatctggcagaaggacggcgtgaagaagctgaacctgtacctgatcatcaactacttcaagggcggcaagctgcggttcaagaagatcaaacctgaagccttcgaagccaacagattctacaccgtgatcaacaaaaagagcggcgagatcgtgcccatggaggtgaacttcaacttcgacgaccccaacctgatcatcctgcctctggcctttggcaagagacagggcagagaattcatctggaacgacctgctgtccctggaaaccggcagcctgaagctggccaacggaagagtgatcgagaagacactgtacaacagaagaacccggcaggatgagcctgccctgttcgtggccctgaccttcgagcggcgggaggtcctggactcctccaatatcaaaccaatgaacctgatcggcgtggcaagaggcgaaaacatccccgccgtgatcgccctgaccgaccccgagggctgcccactgagccggtttaaggatagcctgggaaacccaacccacatcctgagaatcggcgagagctataaggagaagcagcggaccatccaggccaagaaggaggtggagcagcggagagccggcggctacagccggaagtacgccagcaaagccaagaatctggcagacgatatggtgagaaacaccgctagagatctgctgtactacgccgtgacccaggatgccatgctgatcttcgccaacctgagccggggcttcggccggcagggcaagcggaccttcatggccgagagacagtacacacggatggaggactggctgaccgccaagctggcctacgagggcctgagcaagacctacctgtccaagacactggcccagtacacctccaagacatgcagcaactgtgggtttaccatcaccagcgccgactacgacagggtgctggagaagctgaagaagacagcaacaggctggatgaccacaattaacggcaaggagctgaaggtggagggccagattacctactacaacagatacaagagacagaacgtagtcaaggacctgtccgtcgagctggatagactgagcgaagaatctgtgaacaacgacatctcctcctggacaaagggcagaagcggagaagctctgagcctcctgaagaaaagattctcccatagacccgtgcaggagaagttcgtgtgcctgaactgcggcttcgagacacacgcagccgagcaagccgccctgaacatcgccagatcctggctgttcctgcggagccaggagtacaagaaataccagacaaacaagacaaccggcaacaccgataagagagccttcgtcgagacctggcagtccttttaccggaagaagcttaaggaggtgtggaaacctgccgtgcggtctggcggatctggcggaggctccaccagccccaagaaaaagagaaaagtctaagctgccttctgcggggcttgccttctggccatgcccttcttctctcccttgcacctgtacctcttggtctttgaataaagcctgagtaggaaggctagcaaaaaaaaaaaaaaaaaaaaaaaaaaaaaaaaaaaaaaaaaaaaaaaaaaaaaaaaaaaaaaaaaaaaaaaaaaaaaaaa

SEQ ID NO: 9217 - RNA, 8787 nt, synthetic construct
  source 1..8787: mol_type = other RNA
aggaaataagagagaaaagaagagtaagaagaaatataagagccaccatggcccctaagaagaagcgtaaagtgagccggatgaaccacgaccaggagttcgacccccctaaggtgtaccctcccgtccccgccgagaagagaaagcccatccgggtcctgagcctgttcgatggcatcgccaccggtctgctggtgctgaaggacctgggcatccaggtggataggtacattgcctccgaggtgtgcgaggactccatcaccgtgggaatggtgcgtcatcagggcaagatcatgtacgtgggcgacgtgcggagcgtgacacagaagcatatccaggagtggggccctttcgacctggtgatcggcggcagcccttgcaatgacctgagcatcgtgaacccagcccggaagggcctgtacgagggaaccggcagactgttcttcgagttttacagactgctgcacgacgcccggcctaaggaaggcgacgaccggcccttcttttggctgttcgagaatgtggtggccatgggagtcagcgacaagcgggatattagccggttcctggagagcaaccccgtgatgatcgatgccaaggaagtgagcgccgcccaccgggccagatacttctggggcaatctgcctggcatgaacagacccctggccagcaccgtgaacgacaagctggagctgcaggagtgcctggagcacggccggatcgccaagttcagcaaggtgagaaccatcaccacccgaagcaacagcatcaaacaaggcaaggaccagcactttcctgtgttcatgaacgagaaggaggacatcctgtggtgtaccgagatggagagagtgttcgggttcccagtccactacacagatgtcagcaacatgtctagactggccagacagagactgctgggaagaagctggtccgtccctgtgatcagacacctgttcgcccctctgaaggagtacttcgcctgcgtgagcagcggcaacagcaacgccaacagccggggccccagcttctctagcggcctggtgccactgtccctgagagggagccacatgggccccatggagatctacaaaaccgtgagcgcctggaagcggcagcctgtgcgcgtgctgagcctgtttcggaatatcgataaagtcctgaaaagcctgggattcctggagagcggctctggctccggcggtggcaccctgaagtacgtggaggatgtgacaaacgtggtcagacgggatgtggagaagtggggccccttcgatctggtgtacggcagcacccaacccctgggcagctcttgtgaccggtgccctggctggtacatgtttcagttccaccggatcctgcagtacgccctgccgagacaggagtcccagcggccattcttttggattttcatggacaacttgctgctgaccgaggatgaccaggaaactaccactcggttcctgcagaccgaagccgtgaccctgcaggacgtgagaggccgggactaccagaacgccatgcgggtgtggtccaacatccctggactgaaaagcaagcacgcacctctgacccctaaagaagaggagtacctgcaggcccaggtgcggagcagaagcaagctggacgcccctaaggtggatctgctggtgaagaattgcctcctgcccctgagagagtacttcaagtatttcagccagaatagtctgcccctgggaggcagcggcggcggcatgaacgccgtgacctacgacgacgtgcacgtggacttcacctgggacgagtgggccctgctggaccccagccagaagaacctgtacaagaacgtgatgctggagacctacaggaacctgaccgccatcggctacaagtgggaggagcacaacatcaacgagaagttccagaggagcaggaggaacaggaggcacgagaggagccacaccggcgagaagagctacgagtgcaaccagtgcggcggcggcccaagcagcggcgcccctcctcccagcggcggcaggcggcccaagcagcggcgcccctcctcccagcggcggcagcccagccggctccccaacctctaccgaggagggcacctctgagtccgccacccccgagagcggccctggcacctccaccgagcccagcgagggcagcgcacccggcagccctgccggcagccccacctccacagaggagggaaccagcaccgagcccagcgaaggcagcgccccaggcaccagcaccgagcctagtgagcaggagattaaacggatcaacaagatcagaagaagacttgtgaaagacagcaacaccaagaaggccggcaagacaggccccatgaaaaccctgctggttagagtgatgacacccgatctgagagagcggctggaaaacctgagaaagaagcctgaaaatatcccccagcccatcagcaatacatctagagccaacctgaataagctgctgaccgattacaccgaaatgaagaaggcgatcctgcatgtgtactgggaagagttccagaaggaccctgtgggcctgatgagccgggtggcccagcctgccagcaagaagatcgatcagaacaagctgaaacctgagatggacgagaagggcaacctgaccaccgccggctttgcctgctctcagtgtggccagcccctgttcgtgtacaagctggagcaggtgtctgagaagggcaaggcttacaccaactacttcggacggtgcaatgtggccgagcacgaaaagctgatcctgctggcccagctgaagcccgagaaggatagcgacgaagccgtgacatatagcctgggaaagtttgggcagagggccctggatttctacagcattcatgtgaccaaggagtccacccaccccgtgaagcccctggcccagatcgccggaaacagatacgcctccggacctgtgggaaaggccctgagcgacgcatgtatgggcacaatcgcctccttcctgtctaagtaccaggacatcatcatcgaacaccagaaggtggtgaagggcaaccagaagagactggagagcctgcgggagctggccggcaaggaaaacctggaataccctagcgtgaccctgccacctcagcctcacaccaaggagggcgttgatgcctacaacgaagtgatcgcccgggtgcgaatgtgggtgaacctgaacctgtggcagaagctgaagctaagcagagatgatgccaagcctctgctgagactgaagggattcccttcctttcctctggtcgagagacaggccaacgaagtggactggtgggacatggtgtgtaacgtgaagaagctgatcaacgagaaaaaggaggatggcaaggtgttttggcagaatctggctggctacaagagacaggaagccctgagaccatacctgagcagcgaggaagatcggaagaagggaaagaaattcgctcggtaccagctgggcgacctgctgctgcacctggaaaagaagcacggcgaggactggggaaaggtgtacgacgaggcctgggagcggattgacaagaaagtggaaggcctgagcaagcacatcaagctggaagaggaacggagaagcgaggacgcccagagcaaggccgccctgaccgactggctgcgggctaaggccagcttcgtgatcgagggcctgaaggaggccgacaaggacgagttctgcagatgcgagctgaagctgcagaagtggtacggggacctgcggggaaagcccttcgccatcgaagccgagaacagcatcctggacatcagcggcttcagcaagcagtacaactgtgccttcatctggcagaaggacggcgtgaagaagctgaacctgtacctgatcatcaactacttcaagggcggcaagctgcggttcaagaagatcaaacctgaagccttcgaagccaacagattctacaccgtgatcaacaaaaagagcggcgagatcgtgcccatggaggtgaacttcaacttcgacgaccccaacctgatcatcctgcctctggcctttggcaagagacagggcagagaattcatctggaacgacctgctgtccctggaaaccggcagcctgaagctggccaacggaagagtgatcgagaagacactgtacaacagaagaacccggcaggatgagcctgccctgttcgtggccctgaccttcgagcggcgggaggtcctggactcctccaatatcaaaccaatgaacctgatcggcgtggcaagaggcgaaaacatccccgccgtgatcgccctgaccgaccccgagggctgcccactgagccggtttaaggatagcctgggaaacccaacccacatcctgagaatcggcgagagctataaggagaagcagcggaccatccaggccaagaaggaggtggagcagcggagagccggcggctacagccggaagtacgccagcaaagccaagaatctggcagacgatatggtgagaaacaccgctagagatctgctgtactacgccgtgacccaggatgccatgctgatcttcgccaacctgagccggggcttcggccggcagggcaagcggaccttcatggccgagagacagtacacacggatggaggactggctgaccgccaagctggcctacgagggcctgagcaagacctacctgtccaagacactggcccagtacacctccaagacatgcagcaactgtgggtttaccatcaccagcgccgactacgacagggtgctggagaagctgaagaagacagcaacaggctggatgaccacaattaacggcaaggagctgaaggtggagggccagattacctactacaacagatacaagagacagaacgtagtcaaggacctgtccgtcgagctggatagactgagcgaagaatctgtgaacaacgacatctcctcctggacaaagggcagaagcggagaagctctgagcctcctgaagaaaagattctcccatagacccgtgcaggagaagttcgtgtgcctgaactgcggcttcgagacacacgcagccgagcaagccgccctgaacatcgccagatcctggctgttcctgcggagccaggagtacaagaaataccagacaaacaagacaaccggcaacaccgataagagagccttcgtcgagacctggcagtccttttaccggaagaagcttaaggaggtgtggaaacctgccgtgcggtctggcggatctggcggaggctccaccagccccaagaaaaagagaaaagtctaagctgccttctgcggggcttgccttctggccatgcccttcttctctcccttgcacctgtacctcttggtctttgaataaagcctgagtaggaaggctagcaaaaaaaaaaaaaaaaaaaaaaaaaaaaaaaaaaaaaaaaaaaaaaaaaaaaaaaaaaaaaaaaaaaaaaaaaaaaaaaagcccagccggctccccaacctctaccgaggagggcacctctgagtccgccacccccgagagcggccctggcacctccaccgagcccagcgagggcagcgcacccggcagccctgccggcagccccacctccacagaggagggaaccagcaccgagcccagcgaaggcagcgccccaggcaccagcaccgagcctagtgagcaggagattaaacggatcaacaagatcagaagaagacttgtgaaagacagcaacaccaagaaggccggcaagacaggccccatgaaaaccctgctggttagagtgatgacacccgatctgagagagcggctggaaaacctgagaaagaagcctgaaaatatcccccagcccatcagcaatacatctagagccaacctgaataagctgctgaccgattacaccgaaatgaagaaggcgatcctgcatgtgtactgggaagagttccagaaggaccctgtgggcctgatgagccgggtggcccagcctgccagcaagaagatcgatcagaacaagctgaaacctgagatggacgagaagggcaacctgaccaccgccggctttgcctgctctcagtgtggccagcccctgttcgtgtacaagctggagcaggtgtctgagaagggcaaggcttacaccaactacttcggacggtgcaatgtggccgagcacgaaaagctgatcctgctggcccagctgaagcccgagaaggatagcgacgaagccgtgacatatagcctgggaaagtttgggcagagggccctggatttctacagcattcatgtgaccaaggagtccacccaccccgtgaagcccctggcccagatcgccggaaacagatacgcctccggacctgtgggaaaggccctgagcgacgcatgtatgggcacaatcgcctccttcctgtctaagtaccaggacatcatcatcgaacaccagaaggtggtgaagggcaaccagaagagactggagagcctgcgggagctggccggcaaggaaaacctggaataccctagcgtgaccctgccacctcagcctcacaccaaggagggcgttgatgcctacaacgaagtgatcgcccgggtgcgaatgtgggtgaacctgaacctgtggcagaagctgaagctaagcagagatgatgccaagcctctgctgagactgaagggattcccttcctttcctctggtcgagagacaggccaacgaagtggactggtgggacatggtgtgtaacgtgaagaagctgatcaacgagaaaaaggaggatggcaaggtgttttggcagaatctggctggctacaagagacaggaagccctgagaccatacctgagcagcgaggaagatcggaagaagggaaagaaattcgctcggtaccagctgggcgacctgctgctgcacctggaaaagaagcacggcgaggactggggaaaggtgtacgacgaggcctgggagcggattgacaagaaagtggaaggcctgagcaagcacatcaagctggaagaggaacggagaagcgaggacgcccagagcaaggccgccctgaccgactggctgcgggctaaggccagcttcgtgatcgagggcctgaaggaggccgacaaggacgagttctgcagatgcgagctgaagctgcagaagtggtacggggacctgcggggaaagcccttcgccatcgaagccgagaacagcatcctggacatcagcggcttcagcaagcagtacaactgtgccttcatctggcagaaggacggcgtgaagaagctgaacctgtacctgatcatcaactacttcaagggcggcaagctgcggttcaagaagatcaaacctgaagccttcgaagccaacagattctacaccgtgatcaacaaaaagagcggcgagatcgtgcccatggaggtgaacttcaacttcgacgaccccaacctgatcatcctgcctctggcctttggcaagagacagggcagagaattcatctggaacgacctgctgtccctggaaaccggcagcctgaagctggccaacggaagagtgatcgagaagacactgtacaacagaagaacccggcaggatgagcctgccctgttcgtggccctgaccttcgagcggcgggaggtcctggactcctccaatatcaaaccaatgaacctgatcggcgtggcaagaggcgaaaacatccccgccgtgatcgccctgaccgaccccgagggctgcccactgagccggtttaaggatagcctgggaaacccaacccacatcctgagaatcggcgagagctataaggagaagcagcggaccatccaggccaagaaggaggtggagcagcggagagccggcggctacagccggaagtacgccagcaaagccaagaatctggcagacgatatggtgagaaacaccgctagagatctgctgtactacgccgtgacccaggatgccatgctgatcttcgccaacctgagccggggcttcggccggcagggcaagcggaccttcatggccgagagacagtacacacggatggaggactggctgaccgccaagctggcctacgagggcctgagcaagacctacctgtccaagacactggcccagtacacctccaagacatgcagcaactgtgggtttaccatcaccagcgccgactacgacagggtgctggagaagctgaagaagacagcaacaggctggatgaccacaattaacggcaaggagctgaaggtggagggccagattacctactacaacagatacaagagacagaacgtagtcaaggacctgtccgtcgagctggatagactgagcgaagaatctgtgaacaacgacatctcctcctggacaaagggcagaagcggagaagctctgagcctcctgaagaaaagattctcccatagacccgtgcaggagaagttcgtgtgcctgaactgcggcttcgagacacacgcagccgagcaagccgccctgaacatcgccagatcctggctgttcctgcggagccaggagtacaagaaataccagacaaacaagacaaccggcaacaccgataagagagccttcgtcgagacctggcagtccttttaccggaagaagcttaaggaggtgtggaaacctgccgtgcggtctggcggatctggcggaggctccaccagccccaagaaaaagagaaaagtctaagctgccttctgcggggcttgccttctggccatgcccttcttctctcccttgcacctgtacctcttggtctttgaataaagcctgagtaggaaggctagcaaaaaaaaaaaaaaaaaaaaaaaaaaaaaaaaaaaaaaaaaaaaaaaaaaaaaaaaaaaaaaaaaaaaaaaaaaaaaaaa

SEQ ID NO: 9218 - RNA, 8787 nt, synthetic construct
  source 1..8787: mol_type = other RNA
aggaaataagagagaaaagaagagtaagaagaaatataagagccaccatggcccctaagaagaagcgtaaagtgagccggatgaaccacgaccaggagttcgacccccctaaggtgtaccctcccgtccccgccgagaagagaaagcccatccgggtcctgagcctgttcgatggcatcgccaccggtctgctggtgctgaaggacctgggcatccaggtggataggtacattgcctccgaggtgtgcgaggactccatcaccgtgggaatggtgcgtcatcagggcaagatcatgtacgtgggcgacgtgcggagcgtgacacagaagcatatccaggagtggggccctttcgacctggtgatcggcggcagcccttgcaatgacctgagcatcgtgaacccagcccggaagggcctgtacgagggaaccggcagactgttcttcgagttttacagactgctgcacgacgcccggcctaaggaaggcgacgaccggcccttcttttggctgttcgagaatgtggtggccatgggagtcagcgacaagcgggatattagccggttcctggagagcaaccccgtgatgatcgatgccaaggaagtgagcgccgcccaccgggccagatacttctggggcaatctgcctggcatgaacagacccctggccagcaccgtgaacgacaagctggagctgcaggagtgcctggagcacggccggatcgccaagttcagcaaggtgagaaccatcaccacccgaagcaacagcatcaaacaaggcaaggaccagcactttcctgtgttcatgaacgagaaggaggacatcctgtggtgtaccgagatggagagagtgttcgggttcccagtccactacacagatgtcagcaacatgtctagactggccagacagagactgctgggaagaagctggtccgtccctgtgatcagacacctgttcgcccctctgaaggagtacttcgcctgcgtgagcagcggcaacagcaacgccaacagccggggccccagcttctctagcggcctggtgccactgtccctgagagggagccacatgggccccatggagatctacaaaaccgtgagcgcctggaagcggcagcctgtgcgcgtgctgagcctgtttcggaatatcgataaagtcctgaaaagcctgggattcctggagagcggctctggctccggcggtggcaccctgaagtacgtggaggatgtgacaaacgtggtcagacgggatgtggagaagtggggccccttcgatctggtgtacggcagcacccaacccctgggcagctcttgtgaccggtgccctggctggtacatgtttcagttccaccggatcctgcagtacgccctgccgagacaggagtcccagcggccattcttttggattttcatggacaacttgctgctgaccgaggatgaccaggaaactaccactcggttcctgcagaccgaagccgtgaccctgcaggacgtgagaggccgggactaccagaacgccatgcgggtgtggtccaacatccctggactgaaaagcaagcacgcacctctgacccctaaagaagaggagtacctgcaggcccaggtgcggagcagaagcaagctggacgcccctaaggtggatctgctggtgaagaattgcctcctgcccctgagagagtacttcaagtatttcagccagaatagtctgcccctgggaggcagcggcggcggcgtgaacgacctggtgaccttcaaggacgtggccatcgacttcagccaggaggagtggcagtggatgaaccccgcccagaagaggctgtacaggagcatgatgctggagaactaccagagcctggtgagcctgggcctgtgcgtgagcaagccctacgtgatcagcctgctggagcagggcagggagccctgggagatgaccagcgagatgaggaggagccccttcagcgactgggagagcatcggcggcccaagcagcggcgcccctcctcccagcggcggcaggcggcccaagcagcggcgcccctcctcccagcggcggcagcccagccggctccccaacctctaccgaggagggcacctctgagtccgccacccccgagagcggccctggcacctccaccgagcccagcgagggcagcgcacccggcagccctgccggcagccccacctccacagaggagggaaccagcaccgagcccagcgaaggcagcgccccaggcaccagcaccgagcctagtgagcaggagattaaacggatcaacaagatcagaagaagacttgtgaaagacagcaacaccaagaaggccggcaagacaggccccatgaaaaccctgctggttagagtgatgacacccgatctgagagagcggctggaaaacctgagaaagaagcctgaaaatatcccccagcccatcagcaatacatctagagccaacctgaataagctgctgaccgattacaccgaaatgaagaaggcgatcctgcatgtgtactgggaagagttccagaaggaccctgtgggcctgatgagccgggtggcccagcctgccagcaagaagatcgatcagaacaagctgaaacctgagatggacgagaagggcaacctgaccaccgccggctttgcctgctctcagtgtggccagcccctgttcgtgtacaagctggagcaggtgtctgagaagggcaaggcttacaccaactacttcggacggtgcaatgtggccgagcacgaaaagctgatcctgctggcccagctgaagcccgagaaggatagcgacgaagccgtgacatatagcctgggaaagtttgggcagagggccctggatttctacagcattcatgtgaccaaggagtccacccaccccgtgaagcccctggcccagatcgccggaaacagatacgcctccggacctgtgggaaaggccctgagcgacgcatgtatgggcacaatcgcctccttcctgtctaagtaccaggacatcatcatcgaacaccagaaggtggtgaagggcaaccagaagagactggagagcctgcgggagctggccggcaaggaaaacctggaataccctagcgtgaccctgccacctcagcctcacaccaaggagggcgttgatgcctacaacgaagtgatcgcccgggtgcgaatgtgggtgaacctgaacctgtggcagaagctgaagctaagcagagatgatgccaagcctctgctgagactgaagggattcccttcctttcctctggtcgagagacaggccaacgaagtggactggtgggacatggtgtgtaacgtgaagaagctgatcaacgagaaaaaggaggatggcaaggtgttttggcagaatctggctggctacaagagacaggaagccctgagaccatacctgagcagcgaggaagatcggaagaagggaaagaaattcgctcggtaccagctgggcgacctgctgctgcacctggaaaagaagcacggcgaggactggggaaaggtgtacgacgaggcctgggagcggattgacaagaaagtggaaggcctgagcaagcacatcaagctggaagaggaacggagaagcgaggacgcccagagcaaggccgccctgaccgactggctgcgggctaaggccagcttcgtgatcgagggcctgaaggaggccgacaaggacgagttctgcagatgcgagctgaagctgcagaagtggtacggggacctgcggggaaagcccttcgccatcgaagccgagaacagcatcctggacatcagcggcttcagcaagcagtacaactgtgccttcatctggcagaaggacggcgtgaagaagctgaacctgtacctgatcatcaactacttcaagggcggcaagctgcggttcaagaagatcaaacctgaagccttcgaagccaacagattctacaccgtgatcaacaaaaagagcggcgagatcgtgcccatggaggtgaacttcaacttcgacgaccccaacctgatcatcctgcctctggcctttggcaagagacagggcagagaattcatctggaacgacctgctgtccctggaaaccggcagcctgaagctggccaacggaagagtgatcgagaagacactgtacaacagaagaacccggcaggatgagcctgccctgttcgtggccctgaccttcgagcggcgggaggtcctggactcctccaatatcaaaccaatgaacctgatcggcgtggcaagaggcgaaaacatccccgccgtgatcgccctgaccgaccccgagggctgcccactgagccggtttaaggatagcctgggaaacccaacccacatcctgagaatcggcgagagctataaggagaagcagcggaccatccaggccaagaaggaggtggagcagcggagagccggcggctacagccggaagtacgccagcaaagccaagaatctggcagacgatatggtgagaaacaccgctagagatctgctgtactacgccgtgacccaggatgccatgctgatcttcgccaacctgagccggggcttcggccggcagggcaagcggaccttcatggccgagagacagtacacacggatggaggactggctgaccgccaagctggcctacgagggcctgagcaagacctacctgtccaagacactggcccagtacacctccaagacatgcagcaactgtgggtttaccatcaccagcgccgactacgacagggtgctggagaagctgaagaagacagcaacaggctggatgaccacaattaacggcaaggagctgaaggtggagggccagattacctactacaacagatacaagagacagaacgtagtcaaggacctgtccgtcgagctggatagactgagcgaagaatctgtgaacaacgacatctcctcctggacaaagggcagaagcggagaagctctgagcctcctgaagaaaagattctcccatagacccgtgcaggagaagttcgtgtgcctgaactgcggcttcgagacacacgcagccgagcaagccgccctgaacatcgccagatcctggctgttcctgcggagccaggagtacaagaaataccagacaaacaagacaaccggcaacaccgataagagagccttcgtcgagacctggcagtccttttaccggaagaagcttaaggaggtgtggaaacctgccgtgcggtctggcggatctggcggaggctccaccagccccaagaaaaagagaaaagtctaagctgccttctgcggggcttgccttctggccatgcccttcttctctcccttgcacctgtacctcttggtctttgaataaagcctgagtaggaaggctagcaaaaaaaaaaaaaaaaaaaaaaaaaaaaaaaaaaaaaaaaaaaaaaaaaaaaaaaaaaaaaaaaaaaaaaaaaaaaaaaagcccagccggctccccaacctctaccgaggagggcacctctgagtccgccacccccgagagcggccctggcacctccaccgagcccagcgagggcagcgcacccggcagccctgccggcagccccacctccacagaggagggaaccagcaccgagcccagcgaaggcagcgccccaggcaccagcaccgagcctagtgagcaggagattaaacggatcaacaagatcagaagaagacttgtgaaagacagcaacaccaagaaggccggcaagacaggccccatgaaaaccctgctggttagagtgatgacacccgatctgagagagcggctggaaaacctgagaaagaagcctgaaaatatcccccagcccatcagcaatacatctagagccaacctgaataagctgctgaccgattacaccgaaatgaagaaggcgatcctgcatgtgtactgggaagagttccagaaggaccctgtgggcctgatgagccgggtggcccagcctgccagcaagaagatcgatcagaacaagctgaaacctgagatggacgagaagggcaacctgaccaccgccggctttgcctgctctcagtgtggccagcccctgttcgtgtacaagctggagcaggtgtctgagaagggcaaggcttacaccaactacttcggacggtgcaatgtggccgagcacgaaaagctgatcctgctggcccagctgaagcccgagaaggatagcgacgaagccgtgacatatagcctgggaaagtttgggcagagggccctggatttctacagcattcatgtgaccaaggagtccacccaccccgtgaagcccctggcccagatcgccggaaacagatacgcctccggacctgtgggaaaggccctgagcgacgcatgtatgggcacaatcgcctccttcctgtctaagtaccaggacatcatcatcgaacaccagaaggtggtgaagggcaaccagaagagactggagagcctgcgggagctggccggcaaggaaaacctggaataccctagcgtgaccctgccacctcagcctcacaccaaggagggcgttgatgcctacaacgaagtgatcgcccgggtgcgaatgtgggtgaacctgaacctgtggcagaagctgaagctaagcagagatgatgccaagcctctgctgagactgaagggattcccttcctttcctctggtcgagagacaggccaacgaagtggactggtgggacatggtgtgtaacgtgaagaagctgatcaacgagaaaaaggaggatggcaaggtgttttggcagaatctggctggctacaagagacaggaagccctgagaccatacctgagcagcgaggaagatcggaagaagggaaagaaattcgctcggtaccagctgggcgacctgctgctgcacctggaaaagaagcacggcgaggactggggaaaggtgtacgacgaggcctgggagcggattgacaagaaagtggaaggcctgagcaagcacatcaagctggaagaggaacggagaagcgaggacgcccagagcaaggccgccctgaccgactggctgcgggctaaggccagcttcgtgatcgagggcctgaaggaggccgacaaggacgagttctgcagatgcgagctgaagctgcagaagtggtacggggacctgcggggaaagcccttcgccatcgaagccgagaacagcatcctggacatcagcggcttcagcaagcagtacaactgtgccttcatctggcagaaggacggcgtgaagaagctgaacctgtacctgatcatcaactacttcaagggcggcaagctgcggttcaagaagatcaaacctgaagccttcgaagccaacagattctacaccgtgatcaacaaaaagagcggcgagatcgtgcccatggaggtgaacttcaacttcgacgaccccaacctgatcatcctgcctctggcctttggcaagagacagggcagagaattcatctggaacgacctgctgtccctggaaaccggcagcctgaagctggccaacggaagagtgatcgagaagacactgtacaacagaagaacccggcaggatgagcctgccctgttcgtggccctgaccttcgagcggcgggaggtcctggactcctccaatatcaaaccaatgaacctgatcggcgtggcaagaggcgaaaacatccccgccgtgatcgccctgaccgaccccgagggctgcccactgagccggtttaaggatagcctgggaaacccaacccacatcctgagaatcggcgagagctataaggagaagcagcggaccatccaggccaagaaggaggtggagcagcggagagccggcggctacagccggaagtacgccagcaaagccaagaatctggcagacgatatggtgagaaacaccgctagagatctgctgtactacgccgtgacccaggatgccatgctgatcttcgccaacctgagccggggcttcggccggcagggcaagcggaccttcatggccgagagacagtacacacggatggaggactggctgaccgccaagctggcctacgagggcctgagcaagacctacctgtccaagacactggcccagtacacctccaagacatgcagcaactgtgggtttaccatcaccagcgccgactacgacagggtgctggagaagctgaagaagacagcaacaggctggatgaccacaattaacggcaaggagctgaaggtggagggccagattacctactacaacagatacaagagacagaacgtagtcaaggacctgtccgtcgagctggatagactgagcgaagaatctgtgaacaacgacatctcctcctggacaaagggcagaagcggagaagctctgagcctcctgaagaaaagattctcccatagacccgtgcaggagaagttcgtgtgcctgaactgcggcttcgagacacacgcagccgagcaagccgccctgaacatcgccagatcctggctgttcctgcggagccaggagtacaagaaataccagacaaacaagacaaccggcaacaccgataagagagccttcgtcgagacctggcagtccttttaccggaagaagcttaaggaggtgtggaaacctgccgtgcggtctggcggatctggcggaggctccaccagccccaagaaaaagagaaaagtctaagctgccttctgcggggcttgccttctggccatgcccttcttctctcccttgcacctgtacctcttggtctttgaataaagcctgagtaggaaggctagcaaaaaaaaaaaaaaaaaaaaaaaaaaaaaaaaaaaaaaaaaaaaaaaaaaaaaaaaaaaaaaaaaaaaaaaaaaaaaaaa

SEQ ID NO: 9219 - RNA, 8796 nt, synthetic construct
  source 1..8796: mol_type = other RNA
aggaaataagagagaaaagaagagtaagaagaaatataagagccaccatggcccctaagaagaagcgtaaagtgagccggatgaaccacgaccaggagttcgacccccctaaggtgtaccctcccgtccccgccgagaagagaaagcccatccgggtcctgagcctgttcgatggcatcgccaccggtctgctggtgctgaaggacctgggcatccaggtggataggtacattgcctccgaggtgtgcgaggactccatcaccgtgggaatggtgcgtcatcagggcaagatcatgtacgtgggcgacgtgcggagcgtgacacagaagcatatccaggagtggggccctttcgacctggtgatcggcggcagcccttgcaatgacctgagcatcgtgaacccagcccggaagggcctgtacgagggaaccggcagactgttcttcgagttttacagactgctgcacgacgcccggcctaaggaaggcgacgaccggcccttcttttggctgttcgagaatgtggtggccatgggagtcagcgacaagcgggatattagccggttcctggagagcaaccccgtgatgatcgatgccaaggaagtgagcgccgcccaccgggccagatacttctggggcaatctgcctggcatgaacagacccctggccagcaccgtgaacgacaagctggagctgcaggagtgcctggagcacggccggatcgccaagttcagcaaggtgagaaccatcaccacccgaagcaacagcatcaaacaaggcaaggaccagcactttcctgtgttcatgaacgagaaggaggacatcctgtggtgtaccgagatggagagagtgttcgggttcccagtccactacacagatgtcagcaacatgtctagactggccagacagagactgctgggaagaagctggtccgtccctgtgatcagacacctgttcgcccctctgaaggagtacttcgcctgcgtgagcagcggcaacagcaacgccaacagccggggccccagcttctctagcggcctggtgccactgtccctgagagggagccacatgggccccatggagatctacaaaaccgtgagcgcctggaagcggcagcctgtgcgcgtgctgagcctgtttcggaatatcgataaagtcctgaaaagcctgggattcctggagagcggctctggctccggcggtggcaccctgaagtacgtggaggatgtgacaaacgtggtcagacgggatgtggagaagtggggccccttcgatctggtgtacggcagcacccaacccctgggcagctcttgtgaccggtgccctggctggtacatgtttcagttccaccggatcctgcagtacgccctgccgagacaggagtcccagcggccattcttttggattttcatggacaacttgctgctgaccgaggatgaccaggaaactaccactcggttcctgcagaccgaagccgtgaccctgcaggacgtgagaggccgggactaccagaacgccatgcgggtgtggtccaacatccctggactgaaaagcaagcacgcacctctgacccctaaagaagaggagtacctgcaggcccaggtgcggagcagaagcaagctggacgcccctaaggtggatctgctggtgaagaattgcctcctgcccctgagagagtacttcaagtatttcagccagaatagtctgcccctgggaggcagcggcggcggcatcacctacgacgacgtgcacgtgaacttcacctgggaggagtggaccctgctggaccccttccagaagaacctgtacaaggacgtgatgctggagacctacaggaacctgaccaccatcggctacagctgggaggacagcaacatcgaggtgcactgccagagcagcggcaggcacgagaggcacgagaggagccacaccggcgagaagcccagcgtgtacacccagtgcgtggagaccttcgcccaccacggcggcccaagcagcggcgcccctcctcccagcggcggcaggcggcccaagcagcggcgcccctcctcccagcggcggcagcccagccggctccccaacctctaccgaggagggcacctctgagtccgccacccccgagagcggccctggcacctccaccgagcccagcgagggcagcgcacccggcagccctgccggcagccccacctccacagaggagggaaccagcaccgagcccagcgaaggcagcgccccaggcaccagcaccgagcctagtgagcaggagattaaacggatcaacaagatcagaagaagacttgtgaaagacagcaacaccaagaaggccggcaagacaggccccatgaaaaccctgctggttagagtgatgacacccgatctgagagagcggctggaaaacctgagaaagaagcctgaaaatatcccccagcccatcagcaatacatctagagccaacctgaataagctgctgaccgattacaccgaaatgaagaaggcgatcctgcatgtgtactgggaagagttccagaaggaccctgtgggcctgatgagccgggtggcccagcctgccagcaagaagatcgatcagaacaagctgaaacctgagatggacgagaagggcaacctgaccaccgccggctttgcctgctctcagtgtggccagcccctgttcgtgtacaagctggagcaggtgtctgagaagggcaaggcttacaccaactacttcggacggtgcaatgtggccgagcacgaaaagctgatcctgctggcccagctgaagcccgagaaggatagcgacgaagccgtgacatatagcctgggaaagtttgggcagagggccctggatttctacagcattcatgtgaccaaggagtccacccaccccgtgaagcccctggcccagatcgccggaaacagatacgcctccggacctgtgggaaaggccctgagcgacgcatgtatgggcacaatcgcctccttcctgtctaagtaccaggacatcatcatcgaacaccagaaggtggtgaagggcaaccagaagagactggagagcctgcgggagctggccggcaaggaaaacctggaataccctagcgtgaccctgccacctcagcctcacaccaaggagggcgttgatgcctacaacgaagtgatcgcccgggtgcgaatgtgggtgaacctgaacctgtggcagaagctgaagctaagcagagatgatgccaagcctctgctgagactgaagggattcccttcctttcctctggtcgagagacaggccaacgaagtggactggtgggacatggtgtgtaacgtgaagaagctgatcaacgagaaaaaggaggatggcaaggtgttttggcagaatctggctggctacaagagacaggaagccctgagaccatacctgagcagcgaggaagatcggaagaagggaaagaaattcgctcggtaccagctgggcgacctgctgctgcacctggaaaagaagcacggcgaggactggggaaaggtgtacgacgaggcctgggagcggattgacaagaaagtggaaggcctgagcaagcacatcaagctggaagaggaacggagaagcgaggacgcccagagcaaggccgccctgaccgactggctgcgggctaaggccagcttcgtgatcgagggcctgaaggaggccgacaaggacgagttctgcagatgcgagctgaagctgcagaagtggtacggggacctgcggggaaagcccttcgccatcgaagccgagaacagcatcctggacatcagcggcttcagcaagcagtacaactgtgccttcatctggcagaaggacggcgtgaagaagctgaacctgtacctgatcatcaactacttcaagggcggcaagctgcggttcaagaagatcaaacctgaagccttcgaagccaacagattctacaccgtgatcaacaaaaagagcggcgagatcgtgcccatggaggtgaacttcaacttcgacgaccccaacctgatcatcctgcctctggcctttggcaagagacagggcagagaattcatctggaacgacctgctgtccctggaaaccggcagcctgaagctggccaacggaagagtgatcgagaagacactgtacaacagaagaacccggcaggatgagcctgccctgttcgtggccctgaccttcgagcggcgggaggtcctggactcctccaatatcaaaccaatgaacctgatcggcgtggcaagaggcgaaaacatccccgccgtgatcgccctgaccgaccccgagggctgcccactgagccggtttaaggatagcctgggaaacccaacccacatcctgagaatcggcgagagctataaggagaagcagcggaccatccaggccaagaaggaggtggagcagcggagagccggcggctacagccggaagtacgccagcaaagccaagaatctggcagacgatatggtgagaaacaccgctagagatctgctgtactacgccgtgacccaggatgccatgctgatcttcgccaacctgagccggggcttcggccggcagggcaagcggaccttcatggccgagagacagtacacacggatggaggactggctgaccgccaagctggcctacgagggcctgagcaagacctacctgtccaagacactggcccagtacacctccaagacatgcagcaactgtgggtttaccatcaccagcgccgactacgacagggtgctggagaagctgaagaagacagcaacaggctggatgaccacaattaacggcaaggagctgaaggtggagggccagattacctactacaacagatacaagagacagaacgtagtcaaggacctgtccgtcgagctggatagactgagcgaagaatctgtgaacaacgacatctcctcctggacaaagggcagaagcggagaagctctgagcctcctgaagaaaagattctcccatagacccgtgcaggagaagttcgtgtgcctgaactgcggcttcgagacacacgcagccgagcaagccgccctgaacatcgccagatcctggctgttcctgcggagccaggagtacaagaaataccagacaaacaagacaaccggcaacaccgataagagagccttcgtcgagacctggcagtccttttaccggaagaagcttaaggaggtgtggaaacctgccgtgcggtctggcggatctggcggaggctccaccagccccaagaaaaagagaaaagtctaagctgccttctgcggggcttgccttctggccatgcccttcttctctcccttgcacctgtacctcttggtctttgaataaagcctgagtaggaaggctagcaaaaaaaaaaaaaaaaaaaaaaaaaaaaaaaaaaaaaaaaaaaaaaaaaaaaaaaaaaaaaaaaaaaaaaaaaaaaaaaagcccagccggctccccaacctctaccgaggagggcacctctgagtccgccacccccgagagcggccctggcacctccaccgagcccagcgagggcagcgcacccggcagccctgccggcagccccacctccacagaggagggaaccagcaccgagcccagcgaaggcagcgccccaggcaccagcaccgagcctagtgagcaggagattaaacggatcaacaagatcagaagaagacttgtgaaagacagcaacaccaagaaggccggcaagacaggccccatgaaaaccctgctggttagagtgatgacacccgatctgagagagcggctggaaaacctgagaaagaagcctgaaaatatcccccagcccatcagcaatacatctagagccaacctgaataagctgctgaccgattacaccgaaatgaagaaggcgatcctgcatgtgtactgggaagagttccagaaggaccctgtgggcctgatgagccgggtggcccagcctgccagcaagaagatcgatcagaacaagctgaaacctgagatggacgagaagggcaacctgaccaccgccggctttgcctgctctcagtgtggccagcccctgttcgtgtacaagctggagcaggtgtctgagaagggcaaggcttacaccaactacttcggacggtgcaatgtggccgagcacgaaaagctgatcctgctggcccagctgaagcccgagaaggatagcgacgaagccgtgacatatagcctgggaaagtttgggcagagggccctggatttctacagcattcatgtgaccaaggagtccacccaccccgtgaagcccctggcccagatcgccggaaacagatacgcctccggacctgtgggaaaggccctgagcgacgcatgtatgggcacaatcgcctccttcctgtctaagtaccaggacatcatcatcgaacaccagaaggtggtgaagggcaaccagaagagactggagagcctgcgggagctggccggcaaggaaaacctggaataccctagcgtgaccctgccacctcagcctcacaccaaggagggcgttgatgcctacaacgaagtgatcgcccgggtgcgaatgtgggtgaacctgaacctgtggcagaagctgaagctaagcagagatgatgccaagcctctgctgagactgaagggattcccttcctttcctctggtcgagagacaggccaacgaagtggactggtgggacatggtgtgtaacgtgaagaagctgatcaacgagaaaaaggaggatggcaaggtgttttggcagaatctggctggctacaagagacaggaagccctgagaccatacctgagcagcgaggaagatcggaagaagggaaagaaattcgctcggtaccagctgggcgacctgctgctgcacctggaaaagaagcacggcgaggactggggaaaggtgtacgacgaggcctgggagcggattgacaagaaagtggaaggcctgagcaagcacatcaagctggaagaggaacggagaagcgaggacgcccagagcaaggccgccctgaccgactggctgcgggctaaggccagcttcgtgatcgagggcctgaaggaggccgacaaggacgagttctgcagatgcgagctgaagctgcagaagtggtacggggacctgcggggaaagcccttcgccatcgaagccgagaacagcatcctggacatcagcggcttcagcaagcagtacaactgtgccttcatctggcagaaggacggcgtgaagaagctgaacctgtacctgatcatcaactacttcaagggcggcaagctgcggttcaagaagatcaaacctgaagccttcgaagccaacagattctacaccgtgatcaacaaaaagagcggcgagatcgtgcccatggaggtgaacttcaacttcgacgaccccaacctgatcatcctgcctctggcctttggcaagagacagggcagagaattcatctggaacgacctgctgtccctggaaaccggcagcctgaagctggccaacggaagagtgatcgagaagacactgtacaacagaagaacccggcaggatgagcctgccctgttcgtggccctgaccttcgagcggcgggaggtcctggactcctccaatatcaaaccaatgaacctgatcggcgtggcaagaggcgaaaacatccccgccgtgatcgccctgaccgaccccgagggctgcccactgagccggtttaaggatagcctgggaaacccaacccacatcctgagaatcggcgagagctataaggagaagcagcggaccatccaggccaagaaggaggtggagcagcggagagccggcggctacagccggaagtacgccagcaaagccaagaatctggcagacgatatggtgagaaacaccgctagagatctgctgtactacgccgtgacccaggatgccatgctgatcttcgccaacctgagccggggcttcggccggcagggcaagcggaccttcatggccgagagacagtacacacggatggaggactggctgaccgccaagctggcctacgagggcctgagcaagacctacctgtccaagacactggcccagtacacctccaagacatgcagcaactgtgggtttaccatcaccagcgccgactacgacagggtgctggagaagctgaagaagacagcaacaggctggatgaccacaattaacggcaaggagctgaaggtggagggccagattacctactacaacagatacaagagacagaacgtagtcaaggacctgtccgtcgagctggatagactgagcgaagaatctgtgaacaacgacatctcctcctggacaaagggcagaagcggagaagctctgagcctcctgaagaaaagattctcccatagacccgtgcaggagaagttcgtgtgcctgaactgcggcttcgagacacacgcagccgagcaagccgccctgaacatcgccagatcctggctgttcctgcggagccaggagtacaagaaataccagacaaacaagacaaccggcaacaccgataagagagccttcgtcgagacctggcagtccttttaccggaagaagcttaaggaggtgtggaaacctgccgtgcggtctggcggatctggcggaggctccaccagccccaagaaaaagagaaaagtctaagctgccttctgcggggcttgccttctggccatgcccttcttctctcccttgcacctgtacctcttggtctttgaataaagcctgagtaggaaggctagcaaaaaaaaaaaaaaaaaaaaaaaaaaaaaaaaaaaaaaaaaaaaaaaaaaaaaaaaaaaaaaaaaaaaaaaaaaaaaaaa

SEQ ID NO: 9220 - RNA, 8787 nt, synthetic construct
  source 1..8787: mol_type = other RNA
aggaaataagagagaaaagaagagtaagaagaaatataagagccaccatggcccctaagaagaagcgtaaagtgagccggatgaaccacgaccaggagttcgacccccctaaggtgtaccctcccgtccccgccgagaagagaaagcccatccgggtcctgagcctgttcgatggcatcgccaccggtctgctggtgctgaaggacctgggcatccaggtggataggtacattgcctccgaggtgtgcgaggactccatcaccgtgggaatggtgcgtcatcagggcaagatcatgtacgtgggcgacgtgcggagcgtgacacagaagcatatccaggagtggggccctttcgacctggtgatcggcggcagcccttgcaatgacctgagcatcgtgaacccagcccggaagggcctgtacgagggaaccggcagactgttcttcgagttttacagactgctgcacgacgcccggcctaaggaaggcgacgaccggcccttcttttggctgttcgagaatgtggtggccatgggagtcagcgacaagcgggatattagccggttcctggagagcaaccccgtgatgatcgatgccaaggaagtgagcgccgcccaccgggccagatacttctggggcaatctgcctggcatgaacagacccctggccagcaccgtgaacgacaagctggagctgcaggagtgcctggagcacggccggatcgccaagttcagcaaggtgagaaccatcaccacccgaagcaacagcatcaaacaaggcaaggaccagcactttcctgtgttcatgaacgagaaggaggacatcctgtggtgtaccgagatggagagagtgttcgggttcccagtccactacacagatgtcagcaacatgtctagactggccagacagagactgctgggaagaagctggtccgtccctgtgatcagacacctgttcgcccctctgaaggagtacttcgcctgcgtgagcagcggcaacagcaacgccaacagccggggccccagcttctctagcggcctggtgccactgtccctgagagggagccacatgggccccatggagatctacaaaaccgtgagcgcctggaagcggcagcctgtgcgcgtgctgagcctgtttcggaatatcgataaagtcctgaaaagcctgggattcctggagagcggctctggctccggcggtggcaccctgaagtacgtggaggatgtgacaaacgtggtcagacgggatgtggagaagtggggccccttcgatctggtgtacggcagcacccaacccctgggcagctcttgtgaccggtgccctggctggtacatgtttcagttccaccggatcctgcagtacgccctgccgagacaggagtcccagcggccattcttttggattttcatggacaacttgctgctgaccgaggatgaccaggaaactaccactcggttcctgcagaccgaagccgtgaccctgcaggacgtgagaggccgggactaccagaacgccatgcgggtgtggtccaacatccctggactgaaaagcaagcacgcacctctgacccctaaagaagaggagtacctgcaggcccaggtgcggagcagaagcaagctggacgcccctaaggtggatctgctggtgaagaattgcctcctgcccctgagagagtacttcaagtatttcagccagaatagtctgcccctgggaggcagcggcggcggcgacgccgtgacctaccaggacctgcacatcaccttcacccaggaggagtgggccctgctggacagcagccagaggaacctgtacaaggacgtgatgctggagacctacatgaacctgaacgccatcggctacaagtgggaggacaacgacatcgagcagcactgcaggagcccccagaggcacggcaggcacgagaggagccccaccagggagaagcccagcgcctacatgcagtgcgacaagggcggcccaagcagcggcgcccctcctcccagcggcggcaggcggcccaagcagcggcgcccctcctcccagcggcggcagcccagccggctccccaacctctaccgaggagggcacctctgagtccgccacccccgagagcggccctggcacctccaccgagcccagcgagggcagcgcacccggcagccctgccggcagccccacctccacagaggagggaaccagcaccgagcccagcgaaggcagcgccccaggcaccagcaccgagcctagtgagcaggagattaaacggatcaacaagatcagaagaagacttgtgaaagacagcaacaccaagaaggccggcaagacaggccccatgaaaaccctgctggttagagtgatgacacccgatctgagagagcggctggaaaacctgagaaagaagcctgaaaatatcccccagcccatcagcaatacatctagagccaacctgaataagctgctgaccgattacaccgaaatgaagaaggcgatcctgcatgtgtactgggaagagttccagaaggaccctgtgggcctgatgagccgggtggcccagcctgccagcaagaagatcgatcagaacaagctgaaacctgagatggacgagaagggcaacctgaccaccgccggctttgcctgctctcagtgtggccagcccctgttcgtgtacaagctggagcaggtgtctgagaagggcaaggcttacaccaactacttcggacggtgcaatgtggccgagcacgaaaagctgatcctgctggcccagctgaagcccgagaaggatagcgacgaagccgtgacatatagcctgggaaagtttgggcagagggccctggatttctacagcattcatgtgaccaaggagtccacccaccccgtgaagcccctggcccagatcgccggaaacagatacgcctccggacctgtgggaaaggccctgagcgacgcatgtatgggcacaatcgcctccttcctgtctaagtaccaggacatcatcatcgaacaccagaaggtggtgaagggcaaccagaagagactggagagcctgcgggagctggccggcaaggaaaacctggaataccctagcgtgaccctgccacctcagcctcacaccaaggagggcgttgatgcctacaacgaagtgatcgcccgggtgcgaatgtgggtgaacctgaacctgtggcagaagctgaagctaagcagagatgatgccaagcctctgctgagactgaagggattcccttcctttcctctggtcgagagacaggccaacgaagtggactggtgggacatggtgtgtaacgtgaagaagctgatcaacgagaaaaaggaggatggcaaggtgttttggcagaatctggctggctacaagagacaggaagccctgagaccatacctgagcagcgaggaagatcggaagaagggaaagaaattcgctcggtaccagctgggcgacctgctgctgcacctggaaaagaagcacggcgaggactggggaaaggtgtacgacgaggcctgggagcggattgacaagaaagtggaaggcctgagcaagcacatcaagctggaagaggaacggagaagcgaggacgcccagagcaaggccgccctgaccgactggctgcgggctaaggccagcttcgtgatcgagggcctgaaggaggccgacaaggacgagttctgcagatgcgagctgaagctgcagaagtggtacggggacctgcggggaaagcccttcgccatcgaagccgagaacagcatcctggacatcagcggcttcagcaagcagtacaactgtgccttcatctggcagaaggacggcgtgaagaagctgaacctgtacctgatcatcaactacttcaagggcggcaagctgcggttcaagaagatcaaacctgaagccttcgaagccaacagattctacaccgtgatcaacaaaaagagcggcgagatcgtgcccatggaggtgaacttcaacttcgacgaccccaacctgatcatcctgcctctggcctttggcaagagacagggcagagaattcatctggaacgacctgctgtccctggaaaccggcagcctgaagctggccaacggaagagtgatcgagaagacactgtacaacagaagaacccggcaggatgagcctgccctgttcgtggccctgaccttcgagcggcgggaggtcctggactcctccaatatcaaaccaatgaacctgatcggcgtggcaagaggcgaaaacatccccgccgtgatcgccctgaccgaccccgagggctgcccactgagccggtttaaggatagcctgggaaacccaacccacatcctgagaatcggcgagagctataaggagaagcagcggaccatccaggccaagaaggaggtggagcagcggagagccggcggctacagccggaagtacgccagcaaagccaagaatctggcagacgatatggtgagaaacaccgctagagatctgctgtactacgccgtgacccaggatgccatgctgatcttcgccaacctgagccggggcttcggccggcagggcaagcggaccttcatggccgagagacagtacacacggatggaggactggctgaccgccaagctggcctacgagggcctgagcaagacctacctgtccaagacactggcccagtacacctccaagacatgcagcaactgtgggtttaccatcaccagcgccgactacgacagggtgctggagaagctgaagaagacagcaacaggctggatgaccacaattaacggcaaggagctgaaggtggagggccagattacctactacaacagatacaagagacagaacgtagtcaaggacctgtccgtcgagctggatagactgagcgaagaatctgtgaacaacgacatctcctcctggacaaagggcagaagcggagaagctctgagcctcctgaagaaaagattctcccatagacccgtgcaggagaagttcgtgtgcctgaactgcggcttcgagacacacgcagccgagcaagccgccctgaacatcgccagatcctggctgttcctgcggagccaggagtacaagaaataccagacaaacaagacaaccggcaacaccgataagagagccttcgtcgagacctggcagtccttttaccggaagaagcttaaggaggtgtggaaacctgccgtgcggtctggcggatctggcggaggctccaccagccccaagaaaaagagaaaagtctaagctgccttctgcggggcttgccttctggccatgcccttcttctctcccttgcacctgtacctcttggtctttgaataaagcctgagtaggaaggctagcaaaaaaaaaaaaaaaaaaaaaaaaaaaaaaaaaaaaaaaaaaaaaaaaaaaaaaaaaaaaaaaaaaaaaaaaaaaaaaaagcccagccggctccccaacctctaccgaggagggcacctctgagtccgccacccccgagagcggccctggcacctccaccgagcccagcgagggcagcgcacccggcagccctgccggcagccccacctccacagaggagggaaccagcaccgagcccagcgaaggcagcgccccaggcaccagcaccgagcctagtgagcaggagattaaacggatcaacaagatcagaagaagacttgtgaaagacagcaacaccaagaaggccggcaagacaggccccatgaaaaccctgctggttagagtgatgacacccgatctgagagagcggctggaaaacctgagaaagaagcctgaaaatatcccccagcccatcagcaatacatctagagccaacctgaataagctgctgaccgattacaccgaaatgaagaaggcgatcctgcatgtgtactgggaagagttccagaaggaccctgtgggcctgatgagccgggtggcccagcctgccagcaagaagatcgatcagaacaagctgaaacctgagatggacgagaagggcaacctgaccaccgccggctttgcctgctctcagtgtggccagcccctgttcgtgtacaagctggagcaggtgtctgagaagggcaaggcttacaccaactacttcggacggtgcaatgtggccgagcacgaaaagctgatcctgctggcccagctgaagcccgagaaggatagcgacgaagccgtgacatatagcctgggaaagtttgggcagagggccctggatttctacagcattcatgtgaccaaggagtccacccaccccgtgaagcccctggcccagatcgccggaaacagatacgcctccggacctgtgggaaaggccctgagcgacgcatgtatgggcacaatcgcctccttcctgtctaagtaccaggacatcatcatcgaacaccagaaggtggtgaagggcaaccagaagagactggagagcctgcgggagctggccggcaaggaaaacctggaataccctagcgtgaccctgccacctcagcctcacaccaaggagggcgttgatgcctacaacgaagtgatcgcccgggtgcgaatgtgggtgaacctgaacctgtggcagaagctgaagctaagcagagatgatgccaagcctctgctgagactgaagggattcccttcctttcctctggtcgagagacaggccaacgaagtggactggtgggacatggtgtgtaacgtgaagaagctgatcaacgagaaaaaggaggatggcaaggtgttttggcagaatctggctggctacaagagacaggaagccctgagaccatacctgagcagcgaggaagatcggaagaagggaaagaaattcgctcggtaccagctgggcgacctgctgctgcacctggaaaagaagcacggcgaggactggggaaaggtgtacgacgaggcctgggagcggattgacaagaaagtggaaggcctgagcaagcacatcaagctggaagaggaacggagaagcgaggacgcccagagcaaggccgccctgaccgactggctgcgggctaaggccagcttcgtgatcgagggcctgaaggaggccgacaaggacgagttctgcagatgcgagctgaagctgcagaagtggtacggggacctgcggggaaagcccttcgccatcgaagccgagaacagcatcctggacatcagcggcttcagcaagcagtacaactgtgccttcatctggcagaaggacggcgtgaagaagctgaacctgtacctgatcatcaactacttcaagggcggcaagctgcggttcaagaagatcaaacctgaagccttcgaagccaacagattctacaccgtgatcaacaaaaagagcggcgagatcgtgcccatggaggtgaacttcaacttcgacgaccccaacctgatcatcctgcctctggcctttggcaagagacagggcagagaattcatctggaacgacctgctgtccctggaaaccggcagcctgaagctggccaacggaagagtgatcgagaagacactgtacaacagaagaacccggcaggatgagcctgccctgttcgtggccctgaccttcgagcggcgggaggtcctggactcctccaatatcaaaccaatgaacctgatcggcgtggcaagaggcgaaaacatccccgccgtgatcgccctgaccgaccccgagggctgcccactgagccggtttaaggatagcctgggaaacccaacccacatcctgagaatcggcgagagctataaggagaagcagcggaccatccaggccaagaaggaggtggagcagcggagagccggcggctacagccggaagtacgccagcaaagccaagaatctggcagacgatatggtgagaaacaccgctagagatctgctgtactacgccgtgacccaggatgccatgctgatcttcgccaacctgagccggggcttcggccggcagggcaagcggaccttcatggccgagagacagtacacacggatggaggactggctgaccgccaagctggcctacgagggcctgagcaagacctacctgtccaagacactggcccagtacacctccaagacatgcagcaactgtgggtttaccatcaccagcgccgactacgacagggtgctggagaagctgaagaagacagcaacaggctggatgaccacaattaacggcaaggagctgaaggtggagggccagattacctactacaacagatacaagagacagaacgtagtcaaggacctgtccgtcgagctggatagactgagcgaagaatctgtgaacaacgacatctcctcctggacaaagggcagaagcggagaagctctgagcctcctgaagaaaagattctcccatagacccgtgcaggagaagttcgtgtgcctgaactgcggcttcgagacacacgcagccgagcaagccgccctgaacatcgccagatcctggctgttcctgcggagccaggagtacaagaaataccagacaaacaagacaaccggcaacaccgataagagagccttcgtcgagacctggcagtccttttaccggaagaagcttaaggaggtgtggaaacctgccgtgcggtctggcggatctggcggaggctccaccagccccaagaaaaagagaaaagtctaagctgccttctgcggggcttgccttctggccatgcccttcttctctcccttgcacctgtacctcttggtctttgaataaagcctgagtaggaaggctagcaaaaaaaaaaaaaaaaaaaaaaaaaaaaaaaaaaaaaaaaaaaaaaaaaaaaaaaaaaaaaaaaaaaaaaaaaaaaaaaa

SEQ ID NO: 9221 - RNA, 8787 nt, synthetic construct
  source 1..8787: mol_type = other RNA
aggaaataagagagaaaagaagagtaagaagaaatataagagccaccatggcccctaagaagaagcgtaaagtgagccggatgaaccacgaccaggagttcgacccccctaaggtgtaccctcccgtccccgccgagaagagaaagcccatccgggtcctgagcctgttcgatggcatcgccaccggtctgctggtgctgaaggacctgggcatccaggtggataggtacattgcctccgaggtgtgcgaggactccatcaccgtgggaatggtgcgtcatcagggcaagatcatgtacgtgggcgacgtgcggagcgtgacacagaagcatatccaggagtggggccctttcgacctggtgatcggcggcagcccttgcaatgacctgagcatcgtgaacccagcccggaagggcctgtacgagggaaccggcagactgttcttcgagttttacagactgctgcacgacgcccggcctaaggaaggcgacgaccggcccttcttttggctgttcgagaatgtggtggccatgggagtcagcgacaagcgggatattagccggttcctggagagcaaccccgtgatgatcgatgccaaggaagtgagcgccgcccaccgggccagatacttctggggcaatctgcctggcatgaacagacccctggccagcaccgtgaacgacaagctggagctgcaggagtgcctggagcacggccggatcgccaagttcagcaaggtgagaaccatcaccacccgaagcaacagcatcaaacaaggcaaggaccagcactttcctgtgttcatgaacgagaaggaggacatcctgtggtgtaccgagatggagagagtgttcgggttcccagtccactacacagatgtcagcaacatgtctagactggccagacagagactgctgggaagaagctggtccgtccctgtgatcagacacctgttcgcccctctgaaggagtacttcgcctgcgtgagcagcggcaacagcaacgccaacagccggggccccagcttctctagcggcctggtgccactgtccctgagagggagccacatgggccccatggagatctacaaaaccgtgagcgcctggaagcggcagcctgtgcgcgtgctgagcctgtttcggaatatcgataaagtcctgaaaagcctgggattcctggagagcggctctggctccggcggtggcaccctgaagtacgtggaggatgtgacaaacgtggtcagacgggatgtggagaagtggggccccttcgatctggtgtacggcagcacccaacccctgggcagctcttgtgaccggtgccctggctggtacatgtttcagttccaccggatcctgcagtacgccctgccgagacaggagtcccagcggccattcttttggattttcatggacaacttgctgctgaccgaggatgaccaggaaactaccactcggttcctgcagaccgaagccgtgaccctgcaggacgtgagaggccgggactaccagaacgccatgcgggtgtggtccaacatccctggactgaaaagcaagcacgcacctctgacccctaaagaagaggagtacctgcaggcccaggtgcggagcagaagcaagctggacgcccctaaggtggatctgctggtgaagaattgcctcctgcccctgagagagtacttcaagtatttcagccagaatagtctgcccctgggaggcagcggcggcggcagccagagcctggtgaccttcggcgacgtggccgtggacttcagcagggaggagtgggagtggctgagcagcgcccagaggaacctgtacaggaccgtgatgctggagaactacaggaacctggtgagcctgggcctgtgcatcagcaagcccgagatgatcagcagcctggagcagaggaaggagccctggatggccaagaggaggctgaccaggggcaggtgccccgacctgaagatcgtgggcggcccaagcagcggcgcccctcctcccagcggcggcaggcggcccaagcagcggcgcccctcctcccagcggcggcagcccagccggctccccaacctctaccgaggagggcacctctgagtccgccacccccgagagcggccctggcacctccaccgagcccagcgagggcagcgcacccggcagccctgccggcagccccacctccacagaggagggaaccagcaccgagcccagcgaaggcagcgccccaggcaccagcaccgagcctagtgagcaggagattaaacggatcaacaagatcagaagaagacttgtgaaagacagcaacaccaagaaggccggcaagacaggccccatgaaaaccctgctggttagagtgatgacacccgatctgagagagcggctggaaaacctgagaaagaagcctgaaaatatcccccagcccatcagcaatacatctagagccaacctgaataagctgctgaccgattacaccgaaatgaagaaggcgatcctgcatgtgtactgggaagagttccagaaggaccctgtgggcctgatgagccgggtggcccagcctgccagcaagaagatcgatcagaacaagctgaaacctgagatggacgagaagggcaacctgaccaccgccggctttgcctgctctcagtgtggccagcccctgttcgtgtacaagctggagcaggtgtctgagaagggcaaggcttacaccaactacttcggacggtgcaatgtggccgagcacgaaaagctgatcctgctggcccagctgaagcccgagaaggatagcgacgaagccgtgacatatagcctgggaaagtttgggcagagggccctggatttctacagcattcatgtgaccaaggagtccacccaccccgtgaagcccctggcccagatcgccggaaacagatacgcctccggacctgtgggaaaggccctgagcgacgcatgtatgggcacaatcgcctccttcctgtctaagtaccaggacatcatcatcgaacaccagaaggtggtgaagggcaaccagaagagactggagagcctgcgggagctggccggcaaggaaaacctggaataccctagcgtgaccctgccacctcagcctcacaccaaggagggcgttgatgcctacaacgaagtgatcgcccgggtgcgaatgtgggtgaacctgaacctgtggcagaagctgaagctaagcagagatgatgccaagcctctgctgagactgaagggattcccttcctttcctctggtcgagagacaggccaacgaagtggactggtgggacatggtgtgtaacgtgaagaagctgatcaacgagaaaaaggaggatggcaaggtgttttggcagaatctggctggctacaagagacaggaagccctgagaccatacctgagcagcgaggaagatcggaagaagggaaagaaattcgctcggtaccagctgggcgacctgctgctgcacctggaaaagaagcacggcgaggactggggaaaggtgtacgacgaggcctgggagcggattgacaagaaagtggaaggcctgagcaagcacatcaagctggaagaggaacggagaagcgaggacgcccagagcaaggccgccctgaccgactggctgcgggctaaggccagcttcgtgatcgagggcctgaaggaggccgacaaggacgagttctgcagatgcgagctgaagctgcagaagtggtacggggacctgcggggaaagcccttcgccatcgaagccgagaacagcatcctggacatcagcggcttcagcaagcagtacaactgtgccttcatctggcagaaggacggcgtgaagaagctgaacctgtacctgatcatcaactacttcaagggcggcaagctgcggttcaagaagatcaaacctgaagccttcgaagccaacagattctacaccgtgatcaacaaaaagagcggcgagatcgtgcccatggaggtgaacttcaacttcgacgaccccaacctgatcatcctgcctctggcctttggcaagagacagggcagagaattcatctggaacgacctgctgtccctggaaaccggcagcctgaagctggccaacggaagagtgatcgagaagacactgtacaacagaagaacccggcaggatgagcctgccctgttcgtggccctgaccttcgagcggcgggaggtcctggactcctccaatatcaaaccaatgaacctgatcggcgtggcaagaggcgaaaacatccccgccgtgatcgccctgaccgaccccgagggctgcccactgagccggtttaaggatagcctgggaaacccaacccacatcctgagaatcggcgagagctataaggagaagcagcggaccatccaggccaagaaggaggtggagcagcggagagccggcggctacagccggaagtacgccagcaaagccaagaatctggcagacgatatggtgagaaacaccgctagagatctgctgtactacgccgtgacccaggatgccatgctgatcttcgccaacctgagccggggcttcggccggcagggcaagcggaccttcatggccgagagacagtacacacggatggaggactggctgaccgccaagctggcctacgagggcctgagcaagacctacctgtccaagacactggcccagtacacctccaagacatgcagcaactgtgggtttaccatcaccagcgccgactacgacagggtgctggagaagctgaagaagacagcaacaggctggatgaccacaattaacggcaaggagctgaaggtggagggccagattacctactacaacagatacaagagacagaacgtagtcaaggacctgtccgtcgagctggatagactgagcgaagaatctgtgaacaacgacatctcctcctggacaaagggcagaagcggagaagctctgagcctcctgaagaaaagattctcccatagacccgtgcaggagaagttcgtgtgcctgaactgcggcttcgagacacacgcagccgagcaagccgccctgaacatcgccagatcctggctgttcctgcggagccaggagtacaagaaataccagacaaacaagacaaccggcaacaccgataagagagccttcgtcgagacctggcagtccttttaccggaagaagcttaaggaggtgtggaaacctgccgtgcggtctggcggatctggcggaggctccaccagccccaagaaaaagagaaaagtctaagctgccttctgcggggcttgccttctggccatgcccttcttctctcccttgcacctgtacctcttggtctttgaataaagcctgagtaggaaggctagcaaaaaaaaaaaaaaaaaaaaaaaaaaaaaaaaaaaaaaaaaaaaaaaaaaaaaaaaaaaaaaaaaaaaaaaaaaaaaaaagcccagccggctccccaacctctaccgaggagggcacctctgagtccgccacccccgagagcggccctggcacctccaccgagcccagcgagggcagcgcacccggcagccctgccggcagccccacctccacagaggagggaaccagcaccgagcccagcgaaggcagcgccccaggcaccagcaccgagcctagtgagcaggagattaaacggatcaacaagatcagaagaagacttgtgaaagacagcaacaccaagaaggccggcaagacaggccccatgaaaaccctgctggttagagtgatgacacccgatctgagagagcggctggaaaacctgagaaagaagcctgaaaatatcccccagcccatcagcaatacatctagagccaacctgaataagctgctgaccgattacaccgaaatgaagaaggcgatcctgcatgtgtactgggaagagttccagaaggaccctgtgggcctgatgagccgggtggcccagcctgccagcaagaagatcgatcagaacaagctgaaacctgagatggacgagaagggcaacctgaccaccgccggctttgcctgctctcagtgtggccagcccctgttcgtgtacaagctggagcaggtgtctgagaagggcaaggcttacaccaactacttcggacggtgcaatgtggccgagcacgaaaagctgatcctgctggcccagctgaagcccgagaaggatagcgacgaagccgtgacatatagcctgggaaagtttgggcagagggccctggatttctacagcattcatgtgaccaaggagtccacccaccccgtgaagcccctggcccagatcgccggaaacagatacgcctccggacctgtgggaaaggccctgagcgacgcatgtatgggcacaatcgcctccttcctgtctaagtaccaggacatcatcatcgaacaccagaaggtggtgaagggcaaccagaagagactggagagcctgcgggagctggccggcaaggaaaacctggaataccctagcgtgaccctgccacctcagcctcacaccaaggagggcgttgatgcctacaacgaagtgatcgcccgggtgcgaatgtgggtgaacctgaacctgtggcagaagctgaagctaagcagagatgatgccaagcctctgctgagactgaagggattcccttcctttcctctggtcgagagacaggccaacgaagtggactggtgggacatggtgtgtaacgtgaagaagctgatcaacgagaaaaaggaggatggcaaggtgttttggcagaatctggctggctacaagagacaggaagccctgagaccatacctgagcagcgaggaagatcggaagaagggaaagaaattcgctcggtaccagctgggcgacctgctgctgcacctggaaaagaagcacggcgaggactggggaaaggtgtacgacgaggcctgggagcggattgacaagaaagtggaaggcctgagcaagcacatcaagctggaagaggaacggagaagcgaggacgcccagagcaaggccgccctgaccgactggctgcgggctaaggccagcttcgtgatcgagggcctgaaggaggccgacaaggacgagttctgcagatgcgagctgaagctgcagaagtggtacggggacctgcggggaaagcccttcgccatcgaagccgagaacagcatcctggacatcagcggcttcagcaagcagtacaactgtgccttcatctggcagaaggacggcgtgaagaagctgaacctgtacctgatcatcaactacttcaagggcggcaagctgcggttcaagaagatcaaacctgaagccttcgaagccaacagattctacaccgtgatcaacaaaaagagcggcgagatcgtgcccatggaggtgaacttcaacttcgacgaccccaacctgatcatcctgcctctggcctttggcaagagacagggcagagaattcatctggaacgacctgctgtccctggaaaccggcagcctgaagctggccaacggaagagtgatcgagaagacactgtacaacagaagaacccggcaggatgagcctgccctgttcgtggccctgaccttcgagcggcgggaggtcctggactcctccaatatcaaaccaatgaacctgatcggcgtggcaagaggcgaaaacatccccgccgtgatcgccctgaccgaccccgagggctgcccactgagccggtttaaggatagcctgggaaacccaacccacatcctgagaatcggcgagagctataaggagaagcagcggaccatccaggccaagaaggaggtggagcagcggagagccggcggctacagccggaagtacgccagcaaagccaagaatctggcagacgatatggtgagaaacaccgctagagatctgctgtactacgccgtgacccaggatgccatgctgatcttcgccaacctgagccggggcttcggccggcagggcaagcggaccttcatggccgagagacagtacacacggatggaggactggctgaccgccaagctggcctacgagggcctgagcaagacctacctgtccaagacactggcccagtacacctccaagacatgcagcaactgtgggtttaccatcaccagcgccgactacgacagggtgctggagaagctgaagaagacagcaacaggctggatgaccacaattaacggcaaggagctgaaggtggagggccagattacctactacaacagatacaagagacagaacgtagtcaaggacctgtccgtcgagctggatagactgagcgaagaatctgtgaacaacgacatctcctcctggacaaagggcagaagcggagaagctctgagcctcctgaagaaaagattctcccatagacccgtgcaggagaagttcgtgtgcctgaactgcggcttcgagacacacgcagccgagcaagccgccctgaacatcgccagatcctggctgttcctgcggagccaggagtacaagaaataccagacaaacaagacaaccggcaacaccgataagagagccttcgtcgagacctggcagtccttttaccggaagaagcttaaggaggtgtggaaacctgccgtgcggtctggcggatctggcggaggctccaccagccccaagaaaaagagaaaagtctaagctgccttctgcggggcttgccttctggccatgcccttcttctctcccttgcacctgtacctcttggtctttgaataaagcctgagtaggaaggctagcaaaaaaaaaaaaaaaaaaaaaaaaaaaaaaaaaaaaaaaaaaaaaaaaaaaaaaaaaaaaaaaaaaaaaaaaaaaaaaaa

SEQ ID NO: 9222 - RNA, 8787 nt, synthetic construct
  source 1..8787: mol_type = other RNA
aggaaataagagagaaaagaagagtaagaagaaatataagagccaccatggcccctaagaagaagcgtaaagtgagccggatgaaccacgaccaggagttcgacccccctaaggtgtaccctcccgtccccgccgagaagagaaagcccatccgggtcctgagcctgttcgatggcatcgccaccggtctgctggtgctgaaggacctgggcatccaggtggataggtacattgcctccgaggtgtgcgaggactccatcaccgtgggaatggtgcgtcatcagggcaagatcatgtacgtgggcgacgtgcggagcgtgacacagaagcatatccaggagtggggccctttcgacctggtgatcggcggcagcccttgcaatgacctgagcatcgtgaacccagcccggaagggcctgtacgagggaaccggcagactgttcttcgagttttacagactgctgcacgacgcccggcctaaggaaggcgacgaccggcccttcttttggctgttcgagaatgtggtggccatgggagtcagcgacaagcgggatattagccggttcctggagagcaaccccgtgatgatcgatgccaaggaagtgagcgccgcccaccgggccagatacttctggggcaatctgcctggcatgaacagacccctggccagcaccgtgaacgacaagctggagctgcaggagtgcctggagcacggccggatcgccaagttcagcaaggtgagaaccatcaccacccgaagcaacagcatcaaacaaggcaaggaccagcactttcctgtgttcatgaacgagaaggaggacatcctgtggtgtaccgagatggagagagtgttcgggttcccagtccactacacagatgtcagcaacatgtctagactggccagacagagactgctgggaagaagctggtccgtccctgtgatcagacacctgttcgcccctctgaaggagtacttcgcctgcgtgagcagcggcaacagcaacgccaacagccggggccccagcttctctagcggcctggtgccactgtccctgagagggagccacatgggccccatggagatctacaaaaccgtgagcgcctggaagcggcagcctgtgcgcgtgctgagcctgtttcggaatatcgataaagtcctgaaaagcctgggattcctggagagcggctctggctccggcggtggcaccctgaagtacgtggaggatgtgacaaacgtggtcagacgggatgtggagaagtggggccccttcgatctggtgtacggcagcacccaacccctgggcagctcttgtgaccggtgccctggctggtacatgtttcagttccaccggatcctgcagtacgccctgccgagacaggagtcccagcggccattcttttggattttcatggacaacttgctgctgaccgaggatgaccaggaaactaccactcggttcctgcagaccgaagccgtgaccctgcaggacgtgagaggccgggactaccagaacgccatgcgggtgtggtccaacatccctggactgaaaagcaagcacgcacctctgacccctaaagaagaggagtacctgcaggcccaggtgcggagcagaagcaagctggacgcccctaaggtggatctgctggtgaagaattgcctcctgcccctgagagagtacttcaagtatttcagccagaatagtctgcccctgggaggcagcggcggcggcagccagggcctggtgagcttcaaggacgtggccgtggacttcacccaggacgagtggcagcagctggaccccgcccagaggaccctgtacagggacgtgatgctggagaactacagccacctggtgagcatgggctaccccgtgagcaagcccgacgtgatcagcaagctggagcagggcgaggacccctggatcatcaagagggacatcagcaactggatctaccccgacgagaaccaggccggcggcccaagcagcggcgcccctcctcccagcggcggcaggcggcccaagcagcggcgcccctcctcccagcggcggcagcccagccggctccccaacctctaccgaggagggcacctctgagtccgccacccccgagagcggccctggcacctccaccgagcccagcgagggcagcgcacccggcagccctgccggcagccccacctccacagaggagggaaccagcaccgagcccagcgaaggcagcgccccaggcaccagcaccgagcctagtgagcaggagattaaacggatcaacaagatcagaagaagacttgtgaaagacagcaacaccaagaaggccggcaagacaggccccatgaaaaccctgctggttagagtgatgacacccgatctgagagagcggctggaaaacctgagaaagaagcctgaaaatatcccccagcccatcagcaatacatctagagccaacctgaataagctgctgaccgattacaccgaaatgaagaaggcgatcctgcatgtgtactgggaagagttccagaaggaccctgtgggcctgatgagccgggtggcccagcctgccagcaagaagatcgatcagaacaagctgaaacctgagatggacgagaagggcaacctgaccaccgccggctttgcctgctctcagtgtggccagcccctgttcgtgtacaagctggagcaggtgtctgagaagggcaaggcttacaccaactacttcggacggtgcaatgtggccgagcacgaaaagctgatcctgctggcccagctgaagcccgagaaggatagcgacgaagccgtgacatatagcctgggaaagtttgggcagagggccctggatttctacagcattcatgtgaccaaggagtccacccaccccgtgaagcccctggcccagatcgccggaaacagatacgcctccggacctgtgggaaaggccctgagcgacgcatgtatgggcacaatcgcctccttcctgtctaagtaccaggacatcatcatcgaacaccagaaggtggtgaagggcaaccagaagagactggagagcctgcgggagctggccggcaaggaaaacctggaataccctagcgtgaccctgccacctcagcctcacaccaaggagggcgttgatgcctacaacgaagtgatcgcccgggtgcgaatgtgggtgaacctgaacctgtggcagaagctgaagctaagcagagatgatgccaagcctctgctgagactgaagggattcccttcctttcctctggtcgagagacaggccaacgaagtggactggtgggacatggtgtgtaacgtgaagaagctgatcaacgagaaaaaggaggatggcaaggtgttttggcagaatctggctggctacaagagacaggaagccctgagaccatacctgagcagcgaggaagatcggaagaagggaaagaaattcgctcggtaccagctgggcgacctgctgctgcacctggaaaagaagcacggcgaggactggggaaaggtgtacgacgaggcctgggagcggattgacaagaaagtggaaggcctgagcaagcacatcaagctggaagaggaacggagaagcgaggacgcccagagcaaggccgccctgaccgactggctgcgggctaaggccagcttcgtgatcgagggcctgaaggaggccgacaaggacgagttctgcagatgcgagctgaagctgcagaagtggtacggggacctgcggggaaagcccttcgccatcgaagccgagaacagcatcctggacatcagcggcttcagcaagcagtacaactgtgccttcatctggcagaaggacggcgtgaagaagctgaacctgtacctgatcatcaactacttcaagggcggcaagctgcggttcaagaagatcaaacctgaagccttcgaagccaacagattctacaccgtgatcaacaaaaagagcggcgagatcgtgcccatggaggtgaacttcaacttcgacgaccccaacctgatcatcctgcctctggcctttggcaagagacagggcagagaattcatctggaacgacctgctgtccctggaaaccggcagcctgaagctggccaacggaagagtgatcgagaagacactgtacaacagaagaacccggcaggatgagcctgccctgttcgtggccctgaccttcgagcggcgggaggtcctggactcctccaatatcaaaccaatgaacctgatcggcgtggcaagaggcgaaaacatccccgccgtgatcgccctgaccgaccccgagggctgcccactgagccggtttaaggatagcctgggaaacccaacccacatcctgagaatcggcgagagctataaggagaagcagcggaccatccaggccaagaaggaggtggagcagcggagagccggcggctacagccggaagtacgccagcaaagccaagaatctggcagacgatatggtgagaaacaccgctagagatctgctgtactacgccgtgacccaggatgccatgctgatcttcgccaacctgagccggggcttcggccggcagggcaagcggaccttcatggccgagagacagtacacacggatggaggactggctgaccgccaagctggcctacgagggcctgagcaagacctacctgtccaagacactggcccagtacacctccaagacatgcagcaactgtgggtttaccatcaccagcgccgactacgacagggtgctggagaagctgaagaagacagcaacaggctggatgaccacaattaacggcaaggagctgaaggtggagggccagattacctactacaacagatacaagagacagaacgtagtcaaggacctgtccgtcgagctggatagactgagcgaagaatctgtgaacaacgacatctcctcctggacaaagggcagaagcggagaagctctgagcctcctgaagaaaagattctcccatagacccgtgcaggagaagttcgtgtgcctgaactgcggcttcgagacacacgcagccgagcaagccgccctgaacatcgccagatcctggctgttcctgcggagccaggagtacaagaaataccagacaaacaagacaaccggcaacaccgataagagagccttcgtcgagacctggcagtccttttaccggaagaagcttaaggaggtgtggaaacctgccgtgcggtctggcggatctggcggaggctccaccagccccaagaaaaagagaaaagtctaagctgccttctgcggggcttgccttctggccatgcccttcttctctcccttgcacctgtacctcttggtctttgaataaagcctgagtaggaaggctagcaaaaaaaaaaaaaaaaaaaaaaaaaaaaaaaaaaaaaaaaaaaaaaaaaaaaaaaaaaaaaaaaaaaaaaaaaaaaaaaagcccagccggctccccaacctctaccgaggagggcacctctgagtccgccacccccgagagcggccctggcacctccaccgagcccagcgagggcagcgcacccggcagccctgccggcagccccacctccacagaggagggaaccagcaccgagcccagcgaaggcagcgccccaggcaccagcaccgagcctagtgagcaggagattaaacggatcaacaagatcagaagaagacttgtgaaagacagcaacaccaagaaggccggcaagacaggccccatgaaaaccctgctggttagagtgatgacacccgatctgagagagcggctggaaaacctgagaaagaagcctgaaaatatcccccagcccatcagcaatacatctagagccaacctgaataagctgctgaccgattacaccgaaatgaagaaggcgatcctgcatgtgtactgggaagagttccagaaggaccctgtgggcctgatgagccgggtggcccagcctgccagcaagaagatcgatcagaacaagctgaaacctgagatggacgagaagggcaacctgaccaccgccggctttgcctgctctcagtgtggccagcccctgttcgtgtacaagctggagcaggtgtctgagaagggcaaggcttacaccaactacttcggacggtgcaatgtggccgagcacgaaaagctgatcctgctggcccagctgaagcccgagaaggatagcgacgaagccgtgacatatagcctgggaaagtttgggcagagggccctggatttctacagcattcatgtgaccaaggagtccacccaccccgtgaagcccctggcccagatcgccggaaacagatacgcctccggacctgtgggaaaggccctgagcgacgcatgtatgggcacaatcgcctccttcctgtctaagtaccaggacatcatcatcgaacaccagaaggtggtgaagggcaaccagaagagactggagagcctgcgggagctggccggcaaggaaaacctggaataccctagcgtgaccctgccacctcagcctcacaccaaggagggcgttgatgcctacaacgaagtgatcgcccgggtgcgaatgtgggtgaacctgaacctgtggcagaagctgaagctaagcagagatgatgccaagcctctgctgagactgaagggattcccttcctttcctctggtcgagagacaggccaacgaagtggactggtgggacatggtgtgtaacgtgaagaagctgatcaacgagaaaaaggaggatggcaaggtgttttggcagaatctggctggctacaagagacaggaagccctgagaccatacctgagcagcgaggaagatcggaagaagggaaagaaattcgctcggtaccagctgggcgacctgctgctgcacctggaaaagaagcacggcgaggactggggaaaggtgtacgacgaggcctgggagcggattgacaagaaagtggaaggcctgagcaagcacatcaagctggaagaggaacggagaagcgaggacgcccagagcaaggccgccctgaccgactggctgcgggctaaggccagcttcgtgatcgagggcctgaaggaggccgacaaggacgagttctgcagatgcgagctgaagctgcagaagtggtacggggacctgcggggaaagcccttcgccatcgaagccgagaacagcatcctggacatcagcggcttcagcaagcagtacaactgtgccttcatctggcagaaggacggcgtgaagaagctgaacctgtacctgatcatcaactacttcaagggcggcaagctgcggttcaagaagatcaaacctgaagccttcgaagccaacagattctacaccgtgatcaacaaaaagagcggcgagatcgtgcccatggaggtgaacttcaacttcgacgaccccaacctgatcatcctgcctctggcctttggcaagagacagggcagagaattcatctggaacgacctgctgtccctggaaaccggcagcctgaagctggccaacggaagagtgatcgagaagacactgtacaacagaagaacccggcaggatgagcctgccctgttcgtggccctgaccttcgagcggcgggaggtcctggactcctccaatatcaaaccaatgaacctgatcggcgtggcaagaggcgaaaacatccccgccgtgatcgccctgaccgaccccgagggctgcccactgagccggtttaaggatagcctgggaaacccaacccacatcctgagaatcggcgagagctataaggagaagcagcggaccatccaggccaagaaggaggtggagcagcggagagccggcggctacagccggaagtacgccagcaaagccaagaatctggcagacgatatggtgagaaacaccgctagagatctgctgtactacgccgtgacccaggatgccatgctgatcttcgccaacctgagccggggcttcggccggcagggcaagcggaccttcatggccgagagacagtacacacggatggaggactggctgaccgccaagctggcctacgagggcctgagcaagacctacctgtccaagacactggcccagtacacctccaagacatgcagcaactgtgggtttaccatcaccagcgccgactacgacagggtgctggagaagctgaagaagacagcaacaggctggatgaccacaattaacggcaaggagctgaaggtggagggccagattacctactacaacagatacaagagacagaacgtagtcaaggacctgtccgtcgagctggatagactgagcgaagaatctgtgaacaacgacatctcctcctggacaaagggcagaagcggagaagctctgagcctcctgaagaaaagattctcccatagacccgtgcaggagaagttcgtgtgcctgaactgcggcttcgagacacacgcagccgagcaagccgccctgaacatcgccagatcctggctgttcctgcggagccaggagtacaagaaataccagacaaacaagacaaccggcaacaccgataagagagccttcgtcgagacctggcagtccttttaccggaagaagcttaaggaggtgtggaaacctgccgtgcggtctggcggatctggcggaggctccaccagccccaagaaaaagagaaaagtctaagctgccttctgcggggcttgccttctggccatgcccttcttctctcccttgcacctgtacctcttggtctttgaataaagcctgagtaggaaggctagcaaaaaaaaaaaaaaaaaaaaaaaaaaaaaaaaaaaaaaaaaaaaaaaaaaaaaaaaaaaaaaaaaaaaaaaaaaaaaaaa

SEQ ID NO: 9223 - RNA, 8787 nt, synthetic construct
  source 1..8787: mol_type = other RNA
aggaaataagagagaaaagaagagtaagaagaaatataagagccaccatggcccctaagaagaagcgtaaagtgagccggatgaaccacgaccaggagttcgacccccctaaggtgtaccctcccgtccccgccgagaagagaaagcccatccgggtcctgagcctgttcgatggcatcgccaccggtctgctggtgctgaaggacctgggcatccaggtggataggtacattgcctccgaggtgtgcgaggactccatcaccgtgggaatggtgcgtcatcagggcaagatcatgtacgtgggcgacgtgcggagcgtgacacagaagcatatccaggagtggggccctttcgacctggtgatcggcggcagcccttgcaatgacctgagcatcgtgaacccagcccggaagggcctgtacgagggaaccggcagactgttcttcgagttttacagactgctgcacgacgcccggcctaaggaaggcgacgaccggcccttcttttggctgttcgagaatgtggtggccatgggagtcagcgacaagcgggatattagccggttcctggagagcaaccccgtgatgatcgatgccaaggaagtgagcgccgcccaccgggccagatacttctggggcaatctgcctggcatgaacagacccctggccagcaccgtgaacgacaagctggagctgcaggagtgcctggagcacggccggatcgccaagttcagcaaggtgagaaccatcaccacccgaagcaacagcatcaaacaaggcaaggaccagcactttcctgtgttcatgaacgagaaggaggacatcctgtggtgtaccgagatggagagagtgttcgggttcccagtccactacacagatgtcagcaacatgtctagactggccagacagagactgctgggaagaagctggtccgtccctgtgatcagacacctgttcgcccctctgaaggagtacttcgcctgcgtgagcagcggcaacagcaacgccaacagccggggccccagcttctctagcggcctggtgccactgtccctgagagggagccacatgggccccatggagatctacaaaaccgtgagcgcctggaagcggcagcctgtgcgcgtgctgagcctgtttcggaatatcgataaagtcctgaaaagcctgggattcctggagagcggctctggctccggcggtggcaccctgaagtacgtggaggatgtgacaaacgtggtcagacgggatgtggagaagtggggccccttcgatctggtgtacggcagcacccaacccctgggcagctcttgtgaccggtgccctggctggtacatgtttcagttccaccggatcctgcagtacgccctgccgagacaggagtcccagcggccattcttttggattttcatggacaacttgctgctgaccgaggatgaccaggaaactaccactcggttcctgcagaccgaagccgtgaccctgcaggacgtgagaggccgggactaccagaacgccatgcgggtgtggtccaacatccctggactgaaaagcaagcacgcacctctgacccctaaagaagaggagtacctgcaggcccaggtgcggagcagaagcaagctggacgcccctaaggtggatctgctggtgaagaattgcctcctgcccctgagagagtacttcaagtatttcagccagaatagtctgcccctgggaggcagcggcggcggcgtgcacggcagcgtgaccttcagggacgtggccatcgacttcagccaggaggagtgggagtgcctgcagcccgagcagaggaccctgtacagggacgtgatgctggagaactacagccacctgatcagcctgggcagcagcatcagcaagcccgacgtgatcaccctgctggagcaggagaaggagccctggatggtggtgaggaaggagaccagcaggtggtaccccgacctggagagcaagggcggcccaagcagcggcgcccctcctcccagcggcggcaggcggcccaagcagcggcgcccctcctcccagcggcggcagcccagccggctccccaacctctaccgaggagggcacctctgagtccgccacccccgagagcggccctggcacctccaccgagcccagcgagggcagcgcacccggcagccctgccggcagccccacctccacagaggagggaaccagcaccgagcccagcgaaggcagcgccccaggcaccagcaccgagcctagtgagcaggagattaaacggatcaacaagatcagaagaagacttgtgaaagacagcaacaccaagaaggccggcaagacaggccccatgaaaaccctgctggttagagtgatgacacccgatctgagagagcggctggaaaacctgagaaagaagcctgaaaatatcccccagcccatcagcaatacatctagagccaacctgaataagctgctgaccgattacaccgaaatgaagaaggcgatcctgcatgtgtactgggaagagttccagaaggaccctgtgggcctgatgagccgggtggcccagcctgccagcaagaagatcgatcagaacaagctgaaacctgagatggacgagaagggcaacctgaccaccgccggctttgcctgctctcagtgtggccagcccctgttcgtgtacaagctggagcaggtgtctgagaagggcaaggcttacaccaactacttcggacggtgcaatgtggccgagcacgaaaagctgatcctgctggcccagctgaagcccgagaaggatagcgacgaagccgtgacatatagcctgggaaagtttgggcagagggccctggatttctacagcattcatgtgaccaaggagtccacccaccccgtgaagcccctggcccagatcgccggaaacagatacgcctccggacctgtgggaaaggccctgagcgacgcatgtatgggcacaatcgcctccttcctgtctaagtaccaggacatcatcatcgaacaccagaaggtggtgaagggcaaccagaagagactggagagcctgcgggagctggccggcaaggaaaacctggaataccctagcgtgaccctgccacctcagcctcacaccaaggagggcgttgatgcctacaacgaagtgatcgcccgggtgcgaatgtgggtgaacctgaacctgtggcagaagctgaagctaagcagagatgatgccaagcctctgctgagactgaagggattcccttcctttcctctggtcgagagacaggccaacgaagtggactggtgggacatggtgtgtaacgtgaagaagctgatcaacgagaaaaaggaggatggcaaggtgttttggcagaatctggctggctacaagagacaggaagccctgagaccatacctgagcagcgaggaagatcggaagaagggaaagaaattcgctcggtaccagctgggcgacctgctgctgcacctggaaaagaagcacggcgaggactggggaaaggtgtacgacgaggcctgggagcggattgacaagaaagtggaaggcctgagcaagcacatcaagctggaagaggaacggagaagcgaggacgcccagagcaaggccgccctgaccgactggctgcgggctaaggccagcttcgtgatcgagggcctgaaggaggccgacaaggacgagttctgcagatgcgagctgaagctgcagaagtggtacggggacctgcggggaaagcccttcgccatcgaagccgagaacagcatcctggacatcagcggcttcagcaagcagtacaactgtgccttcatctggcagaaggacggcgtgaagaagctgaacctgtacctgatcatcaactacttcaagggcggcaagctgcggttcaagaagatcaaacctgaagccttcgaagccaacagattctacaccgtgatcaacaaaaagagcggcgagatcgtgcccatggaggtgaacttcaacttcgacgaccccaacctgatcatcctgcctctggcctttggcaagagacagggcagagaattcatctggaacgacctgctgtccctggaaaccggcagcctgaagctggccaacggaagagtgatcgagaagacactgtacaacagaagaacccggcaggatgagcctgccctgttcgtggccctgaccttcgagcggcgggaggtcctggactcctccaatatcaaaccaatgaacctgatcggcgtggcaagaggcgaaaacatccccgccgtgatcgccctgaccgaccccgagggctgcccactgagccggtttaaggatagcctgggaaacccaacccacatcctgagaatcggcgagagctataaggagaagcagcggaccatccaggccaagaaggaggtggagcagcggagagccggcggctacagccggaagtacgccagcaaagccaagaatctggcagacgatatggtgagaaacaccgctagagatctgctgtactacgccgtgacccaggatgccatgctgatcttcgccaacctgagccggggcttcggccggcagggcaagcggaccttcatggccgagagacagtacacacggatggaggactggctgaccgccaagctggcctacgagggcctgagcaagacctacctgtccaagacactggcccagtacacctccaagacatgcagcaactgtgggtttaccatcaccagcgccgactacgacagggtgctggagaagctgaagaagacagcaacaggctggatgaccacaattaacggcaaggagctgaaggtggagggccagattacctactacaacagatacaagagacagaacgtagtcaaggacctgtccgtcgagctggatagactgagcgaagaatctgtgaacaacgacatctcctcctggacaaagggcagaagcggagaagctctgagcctcctgaagaaaagattctcccatagacccgtgcaggagaagttcgtgtgcctgaactgcggcttcgagacacacgcagccgagcaagccgccctgaacatcgccagatcctggctgttcctgcggagccaggagtacaagaaataccagacaaacaagacaaccggcaacaccgataagagagccttcgtcgagacctggcagtccttttaccggaagaagcttaaggaggtgtggaaacctgccgtgcggtctggcggatctggcggaggctccaccagccccaagaaaaagagaaaagtctaagctgccttctgcggggcttgccttctggccatgcccttcttctctcccttgcacctgtacctcttggtctttgaataaagcctgagtaggaaggctagcaaaaaaaaaaaaaaaaaaaaaaaaaaaaaaaaaaaaaaaaaaaaaaaaaaaaaaaaaaaaaaaaaaaaaaaaaaaaaaaagcccagccggctccccaacctctaccgaggagggcacctctgagtccgccacccccgagagcggccctggcacctccaccgagcccagcgagggcagcgcacccggcagccctgccggcagccccacctccacagaggagggaaccagcaccgagcccagcgaaggcagcgccccaggcaccagcaccgagcctagtgagcaggagattaaacggatcaacaagatcagaagaagacttgtgaaagacagcaacaccaagaaggccggcaagacaggccccatgaaaaccctgctggttagagtgatgacacccgatctgagagagcggctggaaaacctgagaaagaagcctgaaaatatcccccagcccatcagcaatacatctagagccaacctgaataagctgctgaccgattacaccgaaatgaagaaggcgatcctgcatgtgtactgggaagagttccagaaggaccctgtgggcctgatgagccgggtggcccagcctgccagcaagaagatcgatcagaacaagctgaaacctgagatggacgagaagggcaacctgaccaccgccggctttgcctgctctcagtgtggccagcccctgttcgtgtacaagctggagcaggtgtctgagaagggcaaggcttacaccaactacttcggacggtgcaatgtggccgagcacgaaaagctgatcctgctggcccagctgaagcccgagaaggatagcgacgaagccgtgacatatagcctgggaaagtttgggcagagggccctggatttctacagcattcatgtgaccaaggagtccacccaccccgtgaagcccctggcccagatcgccggaaacagatacgcctccggacctgtgggaaaggccctgagcgacgcatgtatgggcacaatcgcctccttcctgtctaagtaccaggacatcatcatcgaacaccagaaggtggtgaagggcaaccagaagagactggagagcctgcgggagctggccggcaaggaaaacctggaataccctagcgtgaccctgccacctcagcctcacaccaaggagggcgttgatgcctacaacgaagtgatcgcccgggtgcgaatgtgggtgaacctgaacctgtggcagaagctgaagctaagcagagatgatgccaagcctctgctgagactgaagggattcccttcctttcctctggtcgagagacaggccaacgaagtggactggtgggacatggtgtgtaacgtgaagaagctgatcaacgagaaaaaggaggatggcaaggtgttttggcagaatctggctggctacaagagacaggaagccctgagaccatacctgagcagcgaggaagatcggaagaagggaaagaaattcgctcggtaccagctgggcgacctgctgctgcacctggaaaagaagcacggcgaggactggggaaaggtgtacgacgaggcctgggagcggattgacaagaaagtggaaggcctgagcaagcacatcaagctggaagaggaacggagaagcgaggacgcccagagcaaggccgccctgaccgactggctgcgggctaaggccagcttcgtgatcgagggcctgaaggaggccgacaaggacgagttctgcagatgcgagctgaagctgcagaagtggtacggggacctgcggggaaagcccttcgccatcgaagccgagaacagcatcctggacatcagcggcttcagcaagcagtacaactgtgccttcatctggcagaaggacggcgtgaagaagctgaacctgtacctgatcatcaactacttcaagggcggcaagctgcggttcaagaagatcaaacctgaagccttcgaagccaacagattctacaccgtgatcaacaaaaagagcggcgagatcgtgcccatggaggtgaacttcaacttcgacgaccccaacctgatcatcctgcctctggcctttggcaagagacagggcagagaattcatctggaacgacctgctgtccctggaaaccggcagcctgaagctggccaacggaagagtgatcgagaagacactgtacaacagaagaacccggcaggatgagcctgccctgttcgtggccctgaccttcgagcggcgggaggtcctggactcctccaatatcaaaccaatgaacctgatcggcgtggcaagaggcgaaaacatccccgccgtgatcgccctgaccgaccccgagggctgcccactgagccggtttaaggatagcctgggaaacccaacccacatcctgagaatcggcgagagctataaggagaagcagcggaccatccaggccaagaaggaggtggagcagcggagagccggcggctacagccggaagtacgccagcaaagccaagaatctggcagacgatatggtgagaaacaccgctagagatctgctgtactacgccgtgacccaggatgccatgctgatcttcgccaacctgagccggggcttcggccggcagggcaagcggaccttcatggccgagagacagtacacacggatggaggactggctgaccgccaagctggcctacgagggcctgagcaagacctacctgtccaagacactggcccagtacacctccaagacatgcagcaactgtgggtttaccatcaccagcgccgactacgacagggtgctggagaagctgaagaagacagcaacaggctggatgaccacaattaacggcaaggagctgaaggtggagggccagattacctactacaacagatacaagagacagaacgtagtcaaggacctgtccgtcgagctggatagactgagcgaagaatctgtgaacaacgacatctcctcctggacaaagggcagaagcggagaagctctgagcctcctgaagaaaagattctcccatagacccgtgcaggagaagttcgtgtgcctgaactgcggcttcgagacacacgcagccgagcaagccgccctgaacatcgccagatcctggctgttcctgcggagccaggagtacaagaaataccagacaaacaagacaaccggcaacaccgataagagagccttcgtcgagacctggcagtccttttaccggaagaagcttaaggaggtgtggaaacctgccgtgcggtctggcggatctggcggaggctccaccagccccaagaaaaagagaaaagtctaagctgccttctgcggggcttgccttctggccatgcccttcttctctcccttgcacctgtacctcttggtctttgaataaagcctgagtaggaaggctagcaaaaaaaaaaaaaaaaaaaaaaaaaaaaaaaaaaaaaaaaaaaaaaaaaaaaaaaaaaaaaaaaaaaaaaaaaaaaaaaa

SEQ ID NO: 9224 - RNA, 8787 nt, synthetic construct
  source 1..8787: mol_type = other RNA
aggaaataagagagaaaagaagagtaagaagaaatataagagccaccatggcccctaagaagaagcgtaaagtgagccggatgaaccacgaccaggagttcgacccccctaaggtgtaccctcccgtccccgccgagaagagaaagcccatccgggtcctgagcctgttcgatggcatcgccaccggtctgctggtgctgaaggacctgggcatccaggtggataggtacattgcctccgaggtgtgcgaggactccatcaccgtgggaatggtgcgtcatcagggcaagatcatgtacgtgggcgacgtgcggagcgtgacacagaagcatatccaggagtggggccctttcgacctggtgatcggcggcagcccttgcaatgacctgagcatcgtgaacccagcccggaagggcctgtacgagggaaccggcagactgttcttcgagttttacagactgctgcacgacgcccggcctaaggaaggcgacgaccggcccttcttttggctgttcgagaatgtggtggccatgggagtcagcgacaagcgggatattagccggttcctggagagcaaccccgtgatgatcgatgccaaggaagtgagcgccgcccaccgggccagatacttctggggcaatctgcctggcatgaacagacccctggccagcaccgtgaacgacaagctggagctgcaggagtgcctggagcacggccggatcgccaagttcagcaaggtgagaaccatcaccacccgaagcaacagcatcaaacaaggcaaggaccagcactttcctgtgttcatgaacgagaaggaggacatcctgtggtgtaccgagatggagagagtgttcgggttcccagtccactacacagatgtcagcaacatgtctagactggccagacagagactgctgggaagaagctggtccgtccctgtgatcagacacctgttcgcccctctgaaggagtacttcgcctgcgtgagcagcggcaacagcaacgccaacagccggggccccagcttctctagcggcctggtgccactgtccctgagagggagccacatgggccccatggagatctacaaaaccgtgagcgcctggaagcggcagcctgtgcgcgtgctgagcctgtttcggaatatcgataaagtcctgaaaagcctgggattcctggagagcggctctggctccggcggtggcaccctgaagtacgtggaggatgtgacaaacgtggtcagacgggatgtggagaagtggggccccttcgatctggtgtacggcagcacccaacccctgggcagctcttgtgaccggtgccctggctggtacatgtttcagttccaccggatcctgcagtacgccctgccgagacaggagtcccagcggccattcttttggattttcatggacaacttgctgctgaccgaggatgaccaggaaactaccactcggttcctgcagaccgaagccgtgaccctgcaggacgtgagaggccgggactaccagaacgccatgcgggtgtggtccaacatccctggactgaaaagcaagcacgcacctctgacccctaaagaagaggagtacctgcaggcccaggtgcggagcagaagcaagctggacgcccctaaggtggatctgctggtgaagaattgcctcctgcccctgagagagtacttcaagtatttcagccagaatagtctgcccctgggaggcagcggcggcggcgccctgaggagcgtgatgttcagcgacgtgagcatcgacttcagccccgaggagtgggagtacctggacctggagcagaaggacctgtacagggacgtgatgctggagaactacagcaacctggtgagcctggccggctgcttcatcagcaagcccgacgtgatcagcagcctggagcagggcaaggagccctggaaggtggtgaggaagggcaggaggcagtaccccgacctggagaccaagggcggcccaagcagcggcgcccctcctcccagcggcggcaggcggcccaagcagcggcgcccctcctcccagcggcggcagcccagccggctccccaacctctaccgaggagggcacctctgagtccgccacccccgagagcggccctggcacctccaccgagcccagcgagggcagcgcacccggcagccctgccggcagccccacctccacagaggagggaaccagcaccgagcccagcgaaggcagcgccccaggcaccagcaccgagcctagtgagcaggagattaaacggatcaacaagatcagaagaagacttgtgaaagacagcaacaccaagaaggccggcaagacaggccccatgaaaaccctgctggttagagtgatgacacccgatctgagagagcggctggaaaacctgagaaagaagcctgaaaatatcccccagcccatcagcaatacatctagagccaacctgaataagctgctgaccgattacaccgaaatgaagaaggcgatcctgcatgtgtactgggaagagttccagaaggaccctgtgggcctgatgagccgggtggcccagcctgccagcaagaagatcgatcagaacaagctgaaacctgagatggacgagaagggcaacctgaccaccgccggctttgcctgctctcagtgtggccagcccctgttcgtgtacaagctggagcaggtgtctgagaagggcaaggcttacaccaactacttcggacggtgcaatgtggccgagcacgaaaagctgatcctgctggcccagctgaagcccgagaaggatagcgacgaagccgtgacatatagcctgggaaagtttgggcagagggccctggatttctacagcattcatgtgaccaaggagtccacccaccccgtgaagcccctggcccagatcgccggaaacagatacgcctccggacctgtgggaaaggccctgagcgacgcatgtatgggcacaatcgcctccttcctgtctaagtaccaggacatcatcatcgaacaccagaaggtggtgaagggcaaccagaagagactggagagcctgcgggagctggccggcaaggaaaacctggaataccctagcgtgaccctgccacctcagcctcacaccaaggagggcgttgatgcctacaacgaagtgatcgcccgggtgcgaatgtgggtgaacctgaacctgtggcagaagctgaagctaagcagagatgatgccaagcctctgctgagactgaagggattcccttcctttcctctggtcgagagacaggccaacgaagtggactggtgggacatggtgtgtaacgtgaagaagctgatcaacgagaaaaaggaggatggcaaggtgttttggcagaatctggctggctacaagagacaggaagccctgagaccatacctgagcagcgaggaagatcggaagaagggaaagaaattcgctcggtaccagctgggcgacctgctgctgcacctggaaaagaagcacggcgaggactggggaaaggtgtacgacgaggcctgggagcggattgacaagaaagtggaaggcctgagcaagcacatcaagctggaagaggaacggagaagcgaggacgcccagagcaaggccgccctgaccgactggctgcgggctaaggccagcttcgtgatcgagggcctgaaggaggccgacaaggacgagttctgcagatgcgagctgaagctgcagaagtggtacggggacctgcggggaaagcccttcgccatcgaagccgagaacagcatcctggacatcagcggcttcagcaagcagtacaactgtgccttcatctggcagaaggacggcgtgaagaagctgaacctgtacctgatcatcaactacttcaagggcggcaagctgcggttcaagaagatcaaacctgaagccttcgaagccaacagattctacaccgtgatcaacaaaaagagcggcgagatcgtgcccatggaggtgaacttcaacttcgacgaccccaacctgatcatcctgcctctggcctttggcaagagacagggcagagaattcatctggaacgacctgctgtccctggaaaccggcagcctgaagctggccaacggaagagtgatcgagaagacactgtacaacagaagaacccggcaggatgagcctgccctgttcgtggccctgaccttcgagcggcgggaggtcctggactcctccaatatcaaaccaatgaacctgatcggcgtggcaagaggcgaaaacatccccgccgtgatcgccctgaccgaccccgagggctgcccactgagccggtttaaggatagcctgggaaacccaacccacatcctgagaatcggcgagagctataaggagaagcagcggaccatccaggccaagaaggaggtggagcagcggagagccggcggctacagccggaagtacgccagcaaagccaagaatctggcagacgatatggtgagaaacaccgctagagatctgctgtactacgccgtgacccaggatgccatgctgatcttcgccaacctgagccggggcttcggccggcagggcaagcggaccttcatggccgagagacagtacacacggatggaggactggctgaccgccaagctggcctacgagggcctgagcaagacctacctgtccaagacactggcccagtacacctccaagacatgcagcaactgtgggtttaccatcaccagcgccgactacgacagggtgctggagaagctgaagaagacagcaacaggctggatgaccacaattaacggcaaggagctgaaggtggagggccagattacctactacaacagatacaagagacagaacgtagtcaaggacctgtccgtcgagctggatagactgagcgaagaatctgtgaacaacgacatctcctcctggacaaagggcagaagcggagaagctctgagcctcctgaagaaaagattctcccatagacccgtgcaggagaagttcgtgtgcctgaactgcggcttcgagacacacgcagccgagcaagccgccctgaacatcgccagatcctggctgttcctgcggagccaggagtacaagaaataccagacaaacaagacaaccggcaacaccgataagagagccttcgtcgagacctggcagtccttttaccggaagaagcttaaggaggtgtggaaacctgccgtgcggtctggcggatctggcggaggctccaccagccccaagaaaaagagaaaagtctaagctgccttctgcggggcttgccttctggccatgcccttcttctctcccttgcacctgtacctcttggtctttgaataaagcctgagtaggaaggctagcaaaaaaaaaaaaaaaaaaaaaaaaaaaaaaaaaaaaaaaaaaaaaaaaaaaaaaaaaaaaaaaaaaaaaaaaaaaaaaaagcccagccggctccccaacctctaccgaggagggcacctctgagtccgccacccccgagagcggccctggcacctccaccgagcccagcgagggcagcgcacccggcagccctgccggcagccccacctccacagaggagggaaccagcaccgagcccagcgaaggcagcgccccaggcaccagcaccgagcctagtgagcaggagattaaacggatcaacaagatcagaagaagacttgtgaaagacagcaacaccaagaaggccggcaagacaggccccatgaaaaccctgctggttagagtgatgacacccgatctgagagagcggctggaaaacctgagaaagaagcctgaaaatatcccccagcccatcagcaatacatctagagccaacctgaataagctgctgaccgattacaccgaaatgaagaaggcgatcctgcatgtgtactgggaagagttccagaaggaccctgtgggcctgatgagccgggtggcccagcctgccagcaagaagatcgatcagaacaagctgaaacctgagatggacgagaagggcaacctgaccaccgccggctttgcctgctctcagtgtggccagcccctgttcgtgtacaagctggagcaggtgtctgagaagggcaaggcttacaccaactacttcggacggtgcaatgtggccgagcacgaaaagctgatcctgctggcccagctgaagcccgagaaggatagcgacgaagccgtgacatatagcctgggaaagtttgggcagagggccctggatttctacagcattcatgtgaccaaggagtccacccaccccgtgaagcccctggcccagatcgccggaaacagatacgcctccggacctgtgggaaaggccctgagcgacgcatgtatgggcacaatcgcctccttcctgtctaagtaccaggacatcatcatcgaacaccagaaggtggtgaagggcaaccagaagagactggagagcctgcgggagctggccggcaaggaaaacctggaataccctagcgtgaccctgccacctcagcctcacaccaaggagggcgttgatgcctacaacgaagtgatcgcccgggtgcgaatgtgggtgaacctgaacctgtggcagaagctgaagctaagcagagatgatgccaagcctctgctgagactgaagggattcccttcctttcctctggtcgagagacaggccaacgaagtggactggtgggacatggtgtgtaacgtgaagaagctgatcaacgagaaaaaggaggatggcaaggtgttttggcagaatctggctggctacaagagacaggaagccctgagaccatacctgagcagcgaggaagatcggaagaagggaaagaaattcgctcggtaccagctgggcgacctgctgctgcacctggaaaagaagcacggcgaggactggggaaaggtgtacgacgaggcctgggagcggattgacaagaaagtggaaggcctgagcaagcacatcaagctggaagaggaacggagaagcgaggacgcccagagcaaggccgccctgaccgactggctgcgggctaaggccagcttcgtgatcgagggcctgaaggaggccgacaaggacgagttctgcagatgcgagctgaagctgcagaagtggtacggggacctgcggggaaagcccttcgccatcgaagccgagaacagcatcctggacatcagcggcttcagcaagcagtacaactgtgccttcatctggcagaaggacggcgtgaagaagctgaacctgtacctgatcatcaactacttcaagggcggcaagctgcggttcaagaagatcaaacctgaagccttcgaagccaacagattctacaccgtgatcaacaaaaagagcggcgagatcgtgcccatggaggtgaacttcaacttcgacgaccccaacctgatcatcctgcctctggcctttggcaagagacagggcagagaattcatctggaacgacctgctgtccctggaaaccggcagcctgaagctggccaacggaagagtgatcgagaagacactgtacaacagaagaacccggcaggatgagcctgccctgttcgtggccctgaccttcgagcggcgggaggtcctggactcctccaatatcaaaccaatgaacctgatcggcgtggcaagaggcgaaaacatccccgccgtgatcgccctgaccgaccccgagggctgcccactgagccggtttaaggatagcctgggaaacccaacccacatcctgagaatcggcgagagctataaggagaagcagcggaccatccaggccaagaaggaggtggagcagcggagagccggcggctacagccggaagtacgccagcaaagccaagaatctggcagacgatatggtgagaaacaccgctagagatctgctgtactacgccgtgacccaggatgccatgctgatcttcgccaacctgagccggggcttcggccggcagggcaagcggaccttcatggccgagagacagtacacacggatggaggactggctgaccgccaagctggcctacgagggcctgagcaagacctacctgtccaagacactggcccagtacacctccaagacatgcagcaactgtgggtttaccatcaccagcgccgactacgacagggtgctggagaagctgaagaagacagcaacaggctggatgaccacaattaacggcaaggagctgaaggtggagggccagattacctactacaacagatacaagagacagaacgtagtcaaggacctgtccgtcgagctggatagactgagcgaagaatctgtgaacaacgacatctcctcctggacaaagggcagaagcggagaagctctgagcctcctgaagaaaagattctcccatagacccgtgcaggagaagttcgtgtgcctgaactgcggcttcgagacacacgcagccgagcaagccgccctgaacatcgccagatcctggctgttcctgcggagccaggagtacaagaaataccagacaaacaagacaaccggcaacaccgataagagagccttcgtcgagacctggcagtccttttaccggaagaagcttaaggaggtgtggaaacctgccgtgcggtctggcggatctggcggaggctccaccagccccaagaaaaagagaaaagtctaagctgccttctgcggggcttgccttctggccatgcccttcttctctcccttgcacctgtacctcttggtctttgaataaagcctgagtaggaaggctagcaaaaaaaaaaaaaaaaaaaaaaaaaaaaaaaaaaaaaaaaaaaaaaaaaaaaaaaaaaaaaaaaaaaaaaaaaaaaaaaa

SEQ ID NO: 9225 - RNA, 8787 nt, synthetic construct
  source 1..8787: mol_type = other RNA
aggaaataagagagaaaagaagagtaagaagaaatataagagccaccatggcccctaagaagaagcgtaaagtgagccggatgaaccacgaccaggagttcgacccccctaaggtgtaccctcccgtccccgccgagaagagaaagcccatccgggtcctgagcctgttcgatggcatcgccaccggtctgctggtgctgaaggacctgggcatccaggtggataggtacattgcctccgaggtgtgcgaggactccatcaccgtgggaatggtgcgtcatcagggcaagatcatgtacgtgggcgacgtgcggagcgtgacacagaagcatatccaggagtggggccctttcgacctggtgatcggcggcagcccttgcaatgacctgagcatcgtgaacccagcccggaagggcctgtacgagggaaccggcagactgttcttcgagttttacagactgctgcacgacgcccggcctaaggaaggcgacgaccggcccttcttttggctgttcgagaatgtggtggccatgggagtcagcgacaagcgggatattagccggttcctggagagcaaccccgtgatgatcgatgccaaggaagtgagcgccgcccaccgggccagatacttctggggcaatctgcctggcatgaacagacccctggccagcaccgtgaacgacaagctggagctgcaggagtgcctggagcacggccggatcgccaagttcagcaaggtgagaaccatcaccacccgaagcaacagcatcaaacaaggcaaggaccagcactttcctgtgttcatgaacgagaaggaggacatcctgtggtgtaccgagatggagagagtgttcgggttcccagtccactacacagatgtcagcaacatgtctagactggccagacagagactgctgggaagaagctggtccgtccctgtgatcagacacctgttcgcccctctgaaggagtacttcgcctgcgtgagcagcggcaacagcaacgccaacagccggggccccagcttctctagcggcctggtgccactgtccctgagagggagccacatgggccccatggagatctacaaaaccgtgagcgcctggaagcggcagcctgtgcgcgtgctgagcctgtttcggaatatcgataaagtcctgaaaagcctgggattcctggagagcggctctggctccggcggtggcaccctgaagtacgtggaggatgtgacaaacgtggtcagacgggatgtggagaagtggggccccttcgatctggtgtacggcagcacccaacccctgggcagctcttgtgaccggtgccctggctggtacatgtttcagttccaccggatcctgcagtacgccctgccgagacaggagtcccagcggccattcttttggattttcatggacaacttgctgctgaccgaggatgaccaggaaactaccactcggttcctgcagaccgaagccgtgaccctgcaggacgtgagaggccgggactaccagaacgccatgcgggtgtggtccaacatccctggactgaaaagcaagcacgcacctctgacccctaaagaagaggagtacctgcaggcccaggtgcggagcagaagcaagctggacgcccctaaggtggatctgctggtgaagaattgcctcctgcccctgagagagtacttcaagtatttcagccagaatagtctgcccctgggaggcagcggcggcggcgagatggacagcgtgaccttcgaggacgtggccgtgaacttcaccagcgaggagtgggccctgctggaccccagccagaagaagctgtacagggccgtgatgagggagaccttcaggaacctggccagcatcggcctgaacctgggcaagaagtgggaggaccacaacatcgaggacaggtacaagacccacggcaagaagctgaggagccacatggtggagaagctgcacgagagcaaggagggcggcccaagcagcggcgcccctcctcccagcggcggcaggcggcccaagcagcggcgcccctcctcccagcggcggcagcccagccggctccccaacctctaccgaggagggcacctctgagtccgccacccccgagagcggccctggcacctccaccgagcccagcgagggcagcgcacccggcagccctgccggcagccccacctccacagaggagggaaccagcaccgagcccagcgaaggcagcgccccaggcaccagcaccgagcctagtgagcaggagattaaacggatcaacaagatcagaagaagacttgtgaaagacagcaacaccaagaaggccggcaagacaggccccatgaaaaccctgctggttagagtgatgacacccgatctgagagagcggctggaaaacctgagaaagaagcctgaaaatatcccccagcccatcagcaatacatctagagccaacctgaataagctgctgaccgattacaccgaaatgaagaaggcgatcctgcatgtgtactgggaagagttccagaaggaccctgtgggcctgatgagccgggtggcccagcctgccagcaagaagatcgatcagaacaagctgaaacctgagatggacgagaagggcaacctgaccaccgccggctttgcctgctctcagtgtggccagcccctgttcgtgtacaagctggagcaggtgtctgagaagggcaaggcttacaccaactacttcggacggtgcaatgtggccgagcacgaaaagctgatcctgctggcccagctgaagcccgagaaggatagcgacgaagccgtgacatatagcctgggaaagtttgggcagagggccctggatttctacagcattcatgtgaccaaggagtccacccaccccgtgaagcccctggcccagatcgccggaaacagatacgcctccggacctgtgggaaaggccctgagcgacgcatgtatgggcacaatcgcctccttcctgtctaagtaccaggacatcatcatcgaacaccagaaggtggtgaagggcaaccagaagagactggagagcctgcgggagctggccggcaaggaaaacctggaataccctagcgtgaccctgccacctcagcctcacaccaaggagggcgttgatgcctacaacgaagtgatcgcccgggtgcgaatgtgggtgaacctgaacctgtggcagaagctgaagctaagcagagatgatgccaagcctctgctgagactgaagggattcccttcctttcctctggtcgagagacaggccaacgaagtggactggtgggacatggtgtgtaacgtgaagaagctgatcaacgagaaaaaggaggatggcaaggtgttttggcagaatctggctggctacaagagacaggaagccctgagaccatacctgagcagcgaggaagatcggaagaagggaaagaaattcgctcggtaccagctgggcgacctgctgctgcacctggaaaagaagcacggcgaggactggggaaaggtgtacgacgaggcctgggagcggattgacaagaaagtggaaggcctgagcaagcacatcaagctggaagaggaacggagaagcgaggacgcccagagcaaggccgccctgaccgactggctgcgggctaaggccagcttcgtgatcgagggcctgaaggaggccgacaaggacgagttctgcagatgcgagctgaagctgcagaagtggtacggggacctgcggggaaagcccttcgccatcgaagccgagaacagcatcctggacatcagcggcttcagcaagcagtacaactgtgccttcatctggcagaaggacggcgtgaagaagctgaacctgtacctgatcatcaactacttcaagggcggcaagctgcggttcaagaagatcaaacctgaagccttcgaagccaacagattctacaccgtgatcaacaaaaagagcggcgagatcgtgcccatggaggtgaacttcaacttcgacgaccccaacctgatcatcctgcctctggcctttggcaagagacagggcagagaattcatctggaacgacctgctgtccctggaaaccggcagcctgaagctggccaacggaagagtgatcgagaagacactgtacaacagaagaacccggcaggatgagcctgccctgttcgtggccctgaccttcgagcggcgggaggtcctggactcctccaatatcaaaccaatgaacctgatcggcgtggcaagaggcgaaaacatccccgccgtgatcgccctgaccgaccccgagggctgcccactgagccggtttaaggatagcctgggaaacccaacccacatcctgagaatcggcgagagctataaggagaagcagcggaccatccaggccaagaaggaggtggagcagcggagagccggcggctacagccggaagtacgccagcaaagccaagaatctggcagacgatatggtgagaaacaccgctagagatctgctgtactacgccgtgacccaggatgccatgctgatcttcgccaacctgagccggggcttcggccggcagggcaagcggaccttcatggccgagagacagtacacacggatggaggactggctgaccgccaagctggcctacgagggcctgagcaagacctacctgtccaagacactggcccagtacacctccaagacatgcagcaactgtgggtttaccatcaccagcgccgactacgacagggtgctggagaagctgaagaagacagcaacaggctggatgaccacaattaacggcaaggagctgaaggtggagggccagattacctactacaacagatacaagagacagaacgtagtcaaggacctgtccgtcgagctggatagactgagcgaagaatctgtgaacaacgacatctcctcctggacaaagggcagaagcggagaagctctgagcctcctgaagaaaagattctcccatagacccgtgcaggagaagttcgtgtgcctgaactgcggcttcgagacacacgcagccgagcaagccgccctgaacatcgccagatcctggctgttcctgcggagccaggagtacaagaaataccagacaaacaagacaaccggcaacaccgataagagagccttcgtcgagacctggcagtccttttaccggaagaagcttaaggaggtgtggaaacctgccgtgcggtctggcggatctggcggaggctccaccagccccaagaaaaagagaaaagtctaagctgccttctgcggggcttgccttctggccatgcccttcttctctcccttgcacctgtacctcttggtctttgaataaagcctgagtaggaaggctagcaaaaaaaaaaaaaaaaaaaaaaaaaaaaaaaaaaaaaaaaaaaaaaaaaaaaaaaaaaaaaaaaaaaaaaaaaaaaaaaagcccagccggctccccaacctctaccgaggagggcacctctgagtccgccacccccgagagcggccctggcacctccaccgagcccagcgagggcagcgcacccggcagccctgccggcagccccacctccacagaggagggaaccagcaccgagcccagcgaaggcagcgccccaggcaccagcaccgagcctagtgagcaggagattaaacggatcaacaagatcagaagaagacttgtgaaagacagcaacaccaagaaggccggcaagacaggccccatgaaaaccctgctggttagagtgatgacacccgatctgagagagcggctggaaaacctgagaaagaagcctgaaaatatcccccagcccatcagcaatacatctagagccaacctgaataagctgctgaccgattacaccgaaatgaagaaggcgatcctgcatgtgtactgggaagagttccagaaggaccctgtgggcctgatgagccgggtggcccagcctgccagcaagaagatcgatcagaacaagctgaaacctgagatggacgagaagggcaacctgaccaccgccggctttgcctgctctcagtgtggccagcccctgttcgtgtacaagctggagcaggtgtctgagaagggcaaggcttacaccaactacttcggacggtgcaatgtggccgagcacgaaaagctgatcctgctggcccagctgaagcccgagaaggatagcgacgaagccgtgacatatagcctgggaaagtttgggcagagggccctggatttctacagcattcatgtgaccaaggagtccacccaccccgtgaagcccctggcccagatcgccggaaacagatacgcctccggacctgtgggaaaggccctgagcgacgcatgtatgggcacaatcgcctccttcctgtctaagtaccaggacatcatcatcgaacaccagaaggtggtgaagggcaaccagaagagactggagagcctgcgggagctggccggcaaggaaaacctggaataccctagcgtgaccctgccacctcagcctcacaccaaggagggcgttgatgcctacaacgaagtgatcgcccgggtgcgaatgtgggtgaacctgaacctgtggcagaagctgaagctaagcagagatgatgccaagcctctgctgagactgaagggattcccttcctttcctctggtcgagagacaggccaacgaagtggactggtgggacatggtgtgtaacgtgaagaagctgatcaacgagaaaaaggaggatggcaaggtgttttggcagaatctggctggctacaagagacaggaagccctgagaccatacctgagcagcgaggaagatcggaagaagggaaagaaattcgctcggtaccagctgggcgacctgctgctgcacctggaaaagaagcacggcgaggactggggaaaggtgtacgacgaggcctgggagcggattgacaagaaagtggaaggcctgagcaagcacatcaagctggaagaggaacggagaagcgaggacgcccagagcaaggccgccctgaccgactggctgcgggctaaggccagcttcgtgatcgagggcctgaaggaggccgacaaggacgagttctgcagatgcgagctgaagctgcagaagtggtacggggacctgcggggaaagcccttcgccatcgaagccgagaacagcatcctggacatcagcggcttcagcaagcagtacaactgtgccttcatctggcagaaggacggcgtgaagaagctgaacctgtacctgatcatcaactacttcaagggcggcaagctgcggttcaagaagatcaaacctgaagccttcgaagccaacagattctacaccgtgatcaacaaaaagagcggcgagatcgtgcccatggaggtgaacttcaacttcgacgaccccaacctgatcatcctgcctctggcctttggcaagagacagggcagagaattcatctggaacgacctgctgtccctggaaaccggcagcctgaagctggccaacggaagagtgatcgagaagacactgtacaacagaagaacccggcaggatgagcctgccctgttcgtggccctgaccttcgagcggcgggaggtcctggactcctccaatatcaaaccaatgaacctgatcggcgtggcaagaggcgaaaacatccccgccgtgatcgccctgaccgaccccgagggctgcccactgagccggtttaaggatagcctgggaaacccaacccacatcctgagaatcggcgagagctataaggagaagcagcggaccatccaggccaagaaggaggtggagcagcggagagccggcggctacagccggaagtacgccagcaaagccaagaatctggcagacgatatggtgagaaacaccgctagagatctgctgtactacgccgtgacccaggatgccatgctgatcttcgccaacctgagccggggcttcggccggcagggcaagcggaccttcatggccgagagacagtacacacggatggaggactggctgaccgccaagctggcctacgagggcctgagcaagacctacctgtccaagacactggcccagtacacctccaagacatgcagcaactgtgggtttaccatcaccagcgccgactacgacagggtgctggagaagctgaagaagacagcaacaggctggatgaccacaattaacggcaaggagctgaaggtggagggccagattacctactacaacagatacaagagacagaacgtagtcaaggacctgtccgtcgagctggatagactgagcgaagaatctgtgaacaacgacatctcctcctggacaaagggcagaagcggagaagctctgagcctcctgaagaaaagattctcccatagacccgtgcaggagaagttcgtgtgcctgaactgcggcttcgagacacacgcagccgagcaagccgccctgaacatcgccagatcctggctgttcctgcggagccaggagtacaagaaataccagacaaacaagacaaccggcaacaccgataagagagccttcgtcgagacctggcagtccttttaccggaagaagcttaaggaggtgtggaaacctgccgtgcggtctggcggatctggcggaggctccaccagccccaagaaaaagagaaaagtctaagctgccttctgcggggcttgccttctggccatgcccttcttctctcccttgcacctgtacctcttggtctttgaataaagcctgagtaggaaggctagcaaaaaaaaaaaaaaaaaaaaaaaaaaaaaaaaaaaaaaaaaaaaaaaaaaaaaaaaaaaaaaaaaaaaaaaaaaaaaaaa

SEQ ID NO: 9226 - RNA, 8787 nt, synthetic construct
  source 1..8787: mol_type = other RNA
aggaaataagagagaaaagaagagtaagaagaaatataagagccaccatggcccctaagaagaagcgtaaagtgagccggatgaaccacgaccaggagttcgacccccctaaggtgtaccctcccgtccccgccgagaagagaaagcccatccgggtcctgagcctgttcgatggcatcgccaccggtctgctggtgctgaaggacctgggcatccaggtggataggtacattgcctccgaggtgtgcgaggactccatcaccgtgggaatggtgcgtcatcagggcaagatcatgtacgtgggcgacgtgcggagcgtgacacagaagcatatccaggagtggggccctttcgacctggtgatcggcggcagcccttgcaatgacctgagcatcgtgaacccagcccggaagggcctgtacgagggaaccggcagactgttcttcgagttttacagactgctgcacgacgcccggcctaaggaaggcgacgaccggcccttcttttggctgttcgagaatgtggtggccatgggagtcagcgacaagcgggatattagccggttcctggagagcaaccccgtgatgatcgatgccaaggaagtgagcgccgcccaccgggccagatacttctggggcaatctgcctggcatgaacagacccctggccagcaccgtgaacgacaagctggagctgcaggagtgcctggagcacggccggatcgccaagttcagcaaggtgagaaccatcaccacccgaagcaacagcatcaaacaaggcaaggaccagcactttcctgtgttcatgaacgagaaggaggacatcctgtggtgtaccgagatggagagagtgttcgggttcccagtccactacacagatgtcagcaacatgtctagactggccagacagagactgctgggaagaagctggtccgtccctgtgatcagacacctgttcgcccctctgaaggagtacttcgcctgcgtgagcagcggcaacagcaacgccaacagccggggccccagcttctctagcggcctggtgccactgtccctgagagggagccacatgggccccatggagatctacaaaaccgtgagcgcctggaagcggcagcctgtgcgcgtgctgagcctgtttcggaatatcgataaagtcctgaaaagcctgggattcctggagagcggctctggctccggcggtggcaccctgaagtacgtggaggatgtgacaaacgtggtcagacgggatgtggagaagtggggccccttcgatctggtgtacggcagcacccaacccctgggcagctcttgtgaccggtgccctggctggtacatgtttcagttccaccggatcctgcagtacgccctgccgagacaggagtcccagcggccattcttttggattttcatggacaacttgctgctgaccgaggatgaccaggaaactaccactcggttcctgcagaccgaagccgtgaccctgcaggacgtgagaggccgggactaccagaacgccatgcgggtgtggtccaacatccctggactgaaaagcaagcacgcacctctgacccctaaagaagaggagtacctgcaggcccaggtgcggagcagaagcaagctggacgcccctaaggtggatctgctggtgaagaattgcctcctgcccctgagagagtacttcaagtatttcagccagaatagtctgcccctgggaggcagcggcggcggcagccaggagagcgtgaccttccaggacgtggccgtggacttcaccagggaggagtggaagaggctggacagcgcccagagggacctgtacagggacgtgatgctggagaactaccagaacctggtgagcctgggcctgctggtgttccagagcgacgtgatcagccagctggagaacggcgaggtgcccctggtgcccggcggcgaggtgcccaggggcaccaggcccggcagcgtgaaccagggcggcccaagcagcggcgcccctcctcccagcggcggcaggcggcccaagcagcggcgcccctcctcccagcggcggcagcccagccggctccccaacctctaccgaggagggcacctctgagtccgccacccccgagagcggccctggcacctccaccgagcccagcgagggcagcgcacccggcagccctgccggcagccccacctccacagaggagggaaccagcaccgagcccagcgaaggcagcgccccaggcaccagcaccgagcctagtgagcaggagattaaacggatcaacaagatcagaagaagacttgtgaaagacagcaacaccaagaaggccggcaagacaggccccatgaaaaccctgctggttagagtgatgacacccgatctgagagagcggctggaaaacctgagaaagaagcctgaaaatatcccccagcccatcagcaatacatctagagccaacctgaataagctgctgaccgattacaccgaaatgaagaaggcgatcctgcatgtgtactgggaagagttccagaaggaccctgtgggcctgatgagccgggtggcccagcctgccagcaagaagatcgatcagaacaagctgaaacctgagatggacgagaagggcaacctgaccaccgccggctttgcctgctctcagtgtggccagcccctgttcgtgtacaagctggagcaggtgtctgagaagggcaaggcttacaccaactacttcggacggtgcaatgtggccgagcacgaaaagctgatcctgctggcccagctgaagcccgagaaggatagcgacgaagccgtgacatatagcctgggaaagtttgggcagagggccctggatttctacagcattcatgtgaccaaggagtccacccaccccgtgaagcccctggcccagatcgccggaaacagatacgcctccggacctgtgggaaaggccctgagcgacgcatgtatgggcacaatcgcctccttcctgtctaagtaccaggacatcatcatcgaacaccagaaggtggtgaagggcaaccagaagagactggagagcctgcgggagctggccggcaaggaaaacctggaataccctagcgtgaccctgccacctcagcctcacaccaaggagggcgttgatgcctacaacgaagtgatcgcccgggtgcgaatgtgggtgaacctgaacctgtggcagaagctgaagctaagcagagatgatgccaagcctctgctgagactgaagggattcccttcctttcctctggtcgagagacaggccaacgaagtggactggtgggacatggtgtgtaacgtgaagaagctgatcaacgagaaaaaggaggatggcaaggtgttttggcagaatctggctggctacaagagacaggaagccctgagaccatacctgagcagcgaggaagatcggaagaagggaaagaaattcgctcggtaccagctgggcgacctgctgctgcacctggaaaagaagcacggcgaggactggggaaaggtgtacgacgaggcctgggagcggattgacaagaaagtggaaggcctgagcaagcacatcaagctggaagaggaacggagaagcgaggacgcccagagcaaggccgccctgaccgactggctgcgggctaaggccagcttcgtgatcgagggcctgaaggaggccgacaaggacgagttctgcagatgcgagctgaagctgcagaagtggtacggggacctgcggggaaagcccttcgccatcgaagccgagaacagcatcctggacatcagcggcttcagcaagcagtacaactgtgccttcatctggcagaaggacggcgtgaagaagctgaacctgtacctgatcatcaactacttcaagggcggcaagctgcggttcaagaagatcaaacctgaagccttcgaagccaacagattctacaccgtgatcaacaaaaagagcggcgagatcgtgcccatggaggtgaacttcaacttcgacgaccccaacctgatcatcctgcctctggcctttggcaagagacagggcagagaattcatctggaacgacctgctgtccctggaaaccggcagcctgaagctggccaacggaagagtgatcgagaagacactgtacaacagaagaacccggcaggatgagcctgccctgttcgtggccctgaccttcgagcggcgggaggtcctggactcctccaatatcaaaccaatgaacctgatcggcgtggcaagaggcgaaaacatccccgccgtgatcgccctgaccgaccccgagggctgcccactgagccggtttaaggatagcctgggaaacccaacccacatcctgagaatcggcgagagctataaggagaagcagcggaccatccaggccaagaaggaggtggagcagcggagagccggcggctacagccggaagtacgccagcaaagccaagaatctggcagacgatatggtgagaaacaccgctagagatctgctgtactacgccgtgacccaggatgccatgctgatcttcgccaacctgagccggggcttcggccggcagggcaagcggaccttcatggccgagagacagtacacacggatggaggactggctgaccgccaagctggcctacgagggcctgagcaagacctacctgtccaagacactggcccagtacacctccaagacatgcagcaactgtgggtttaccatcaccagcgccgactacgacagggtgctggagaagctgaagaagacagcaacaggctggatgaccacaattaacggcaaggagctgaaggtggagggccagattacctactacaacagatacaagagacagaacgtagtcaaggacctgtccgtcgagctggatagactgagcgaagaatctgtgaacaacgacatctcctcctggacaaagggcagaagcggagaagctctgagcctcctgaagaaaagattctcccatagacccgtgcaggagaagttcgtgtgcctgaactgcggcttcgagacacacgcagccgagcaagccgccctgaacatcgccagatcctggctgttcctgcggagccaggagtacaagaaataccagacaaacaagacaaccggcaacaccgataagagagccttcgtcgagacctggcagtccttttaccggaagaagcttaaggaggtgtggaaacctgccgtgcggtctggcggatctggcggaggctccaccagccccaagaaaaagagaaaagtctaagctgccttctgcggggcttgccttctggccatgcccttcttctctcccttgcacctgtacctcttggtctttgaataaagcctgagtaggaaggctagcaaaaaaaaaaaaaaaaaaaaaaaaaaaaaaaaaaaaaaaaaaaaaaaaaaaaaaaaaaaaaaaaaaaaaaaaaaaaaaaagcccagccggctccccaacctctaccgaggagggcacctctgagtccgccacccccgagagcggccctggcacctccaccgagcccagcgagggcagcgcacccggcagccctgccggcagccccacctccacagaggagggaaccagcaccgagcccagcgaaggcagcgccccaggcaccagcaccgagcctagtgagcaggagattaaacggatcaacaagatcagaagaagacttgtgaaagacagcaacaccaagaaggccggcaagacaggccccatgaaaaccctgctggttagagtgatgacacccgatctgagagagcggctggaaaacctgagaaagaagcctgaaaatatcccccagcccatcagcaatacatctagagccaacctgaataagctgctgaccgattacaccgaaatgaagaaggcgatcctgcatgtgtactgggaagagttccagaaggaccctgtgggcctgatgagccgggtggcccagcctgccagcaagaagatcgatcagaacaagctgaaacctgagatggacgagaagggcaacctgaccaccgccggctttgcctgctctcagtgtggccagcccctgttcgtgtacaagctggagcaggtgtctgagaagggcaaggcttacaccaactacttcggacggtgcaatgtggccgagcacgaaaagctgatcctgctggcccagctgaagcccgagaaggatagcgacgaagccgtgacatatagcctgggaaagtttgggcagagggccctggatttctacagcattcatgtgaccaaggagtccacccaccccgtgaagcccctggcccagatcgccggaaacagatacgcctccggacctgtgggaaaggccctgagcgacgcatgtatgggcacaatcgcctccttcctgtctaagtaccaggacatcatcatcgaacaccagaaggtggtgaagggcaaccagaagagactggagagcctgcgggagctggccggcaaggaaaacctggaataccctagcgtgaccctgccacctcagcctcacaccaaggagggcgttgatgcctacaacgaagtgatcgcccgggtgcgaatgtgggtgaacctgaacctgtggcagaagctgaagctaagcagagatgatgccaagcctctgctgagactgaagggattcccttcctttcctctggtcgagagacaggccaacgaagtggactggtgggacatggtgtgtaacgtgaagaagctgatcaacgagaaaaaggaggatggcaaggtgttttggcagaatctggctggctacaagagacaggaagccctgagaccatacctgagcagcgaggaagatcggaagaagggaaagaaattcgctcggtaccagctgggcgacctgctgctgcacctggaaaagaagcacggcgaggactggggaaaggtgtacgacgaggcctgggagcggattgacaagaaagtggaaggcctgagcaagcacatcaagctggaagaggaacggagaagcgaggacgcccagagcaaggccgccctgaccgactggctgcgggctaaggccagcttcgtgatcgagggcctgaaggaggccgacaaggacgagttctgcagatgcgagctgaagctgcagaagtggtacggggacctgcggggaaagcccttcgccatcgaagccgagaacagcatcctggacatcagcggcttcagcaagcagtacaactgtgccttcatctggcagaaggacggcgtgaagaagctgaacctgtacctgatcatcaactacttcaagggcggcaagctgcggttcaagaagatcaaacctgaagccttcgaagccaacagattctacaccgtgatcaacaaaaagagcggcgagatcgtgcccatggaggtgaacttcaacttcgacgaccccaacctgatcatcctgcctctggcctttggcaagagacagggcagagaattcatctggaacgacctgctgtccctggaaaccggcagcctgaagctggccaacggaagagtgatcgagaagacactgtacaacagaagaacccggcaggatgagcctgccctgttcgtggccctgaccttcgagcggcgggaggtcctggactcctccaatatcaaaccaatgaacctgatcggcgtggcaagaggcgaaaacatccccgccgtgatcgccctgaccgaccccgagggctgcccactgagccggtttaaggatagcctgggaaacccaacccacatcctgagaatcggcgagagctataaggagaagcagcggaccatccaggccaagaaggaggtggagcagcggagagccggcggctacagccggaagtacgccagcaaagccaagaatctggcagacgatatggtgagaaacaccgctagagatctgctgtactacgccgtgacccaggatgccatgctgatcttcgccaacctgagccggggcttcggccggcagggcaagcggaccttcatggccgagagacagtacacacggatggaggactggctgaccgccaagctggcctacgagggcctgagcaagacctacctgtccaagacactggcccagtacacctccaagacatgcagcaactgtgggtttaccatcaccagcgccgactacgacagggtgctggagaagctgaagaagacagcaacaggctggatgaccacaattaacggcaaggagctgaaggtggagggccagattacctactacaacagatacaagagacagaacgtagtcaaggacctgtccgtcgagctggatagactgagcgaagaatctgtgaacaacgacatctcctcctggacaaagggcagaagcggagaagctctgagcctcctgaagaaaagattctcccatagacccgtgcaggagaagttcgtgtgcctgaactgcggcttcgagacacacgcagccgagcaagccgccctgaacatcgccagatcctggctgttcctgcggagccaggagtacaagaaataccagacaaacaagacaaccggcaacaccgataagagagccttcgtcgagacctggcagtccttttaccggaagaagcttaaggaggtgtggaaacctgccgtgcggtctggcggatctggcggaggctccaccagccccaagaaaaagagaaaagtctaagctgccttctgcggggcttgccttctggccatgcccttcttctctcccttgcacctgtacctcttggtctttgaataaagcctgagtaggaaggctagcaaaaaaaaaaaaaaaaaaaaaaaaaaaaaaaaaaaaaaaaaaaaaaaaaaaaaaaaaaaaaaaaaaaaaaaaaaaaaaaa

SEQ ID NO: 9227 - RNA, 8784 nt, synthetic construct
  source 1..8784: mol_type = other RNA
aggaaataagagagaaaagaagagtaagaagaaatataagagccaccatggcccctaagaagaagcgtaaagtgagccggatgaaccacgaccaggagttcgacccccctaaggtgtaccctcccgtccccgccgagaagagaaagcccatccgggtcctgagcctgttcgatggcatcgccaccggtctgctggtgctgaaggacctgggcatccaggtggataggtacattgcctccgaggtgtgcgaggactccatcaccgtgggaatggtgcgtcatcagggcaagatcatgtacgtgggcgacgtgcggagcgtgacacagaagcatatccaggagtggggccctttcgacctggtgatcggcggcagcccttgcaatgacctgagcatcgtgaacccagcccggaagggcctgtacgagggaaccggcagactgttcttcgagttttacagactgctgcacgacgcccggcctaaggaaggcgacgaccggcccttcttttggctgttcgagaatgtggtggccatgggagtcagcgacaagcgggatattagccggttcctggagagcaaccccgtgatgatcgatgccaaggaagtgagcgccgcccaccgggccagatacttctggggcaatctgcctggcatgaacagacccctggccagcaccgtgaacgacaagctggagctgcaggagtgcctggagcacggccggatcgccaagttcagcaaggtgagaaccatcaccacccgaagcaacagcatcaaacaaggcaaggaccagcactttcctgtgttcatgaacgagaaggaggacatcctgtggtgtaccgagatggagagagtgttcgggttcccagtccactacacagatgtcagcaacatgtctagactggccagacagagactgctgggaagaagctggtccgtccctgtgatcagacacctgttcgcccctctgaaggagtacttcgcctgcgtgagcagcggcaacagcaacgccaacagccggggccccagcttctctagcggcctggtgccactgtccctgagagggagccacatgggccccatggagatctacaaaaccgtgagcgcctggaagcggcagcctgtgcgcgtgctgagcctgtttcggaatatcgataaagtcctgaaaagcctgggattcctggagagcggctctggctccggcggtggcaccctgaagtacgtggaggatgtgacaaacgtggtcagacgggatgtggagaagtggggccccttcgatctggtgtacggcagcacccaacccctgggcagctcttgtgaccggtgccctggctggtacatgtttcagttccaccggatcctgcagtacgccctgccgagacaggagtcccagcggccattcttttggattttcatggacaacttgctgctgaccgaggatgaccaggaaactaccactcggttcctgcagaccgaagccgtgaccctgcaggacgtgagaggccgggactaccagaacgccatgcgggtgtggtccaacatccctggactgaaaagcaagcacgcacctctgacccctaaagaagaggagtacctgcaggcccaggtgcggagcagaagcaagctggacgcccctaaggtggatctgctggtgaagaattgcctcctgcccctgagagagtacttcaagtatttcagccagaatagtctgcccctgggaggcagcggcggcggcctgcagaggctgctgaccttcggcgacgtggccatcgagttcagccaggaggagtggaggtgcctgagccacacccagagggagctgtacagggacgtgatgctggagaactacaggcacctgctgttcctgggcctgatcgtgagcaagcccgacctggtgagcctgctggagcagaggaaggagccctgggacgtgaagaggaagaagaccgtggtgttcgaccccggcaggtgggagggcggcccaagcagcggcgcccctcctcccagcggcggcaggcggcccaagcagcggcgcccctcctcccagcggcggcagcccagccggctccccaacctctaccgaggagggcacctctgagtccgccacccccgagagcggccctggcacctccaccgagcccagcgagggcagcgcacccggcagccctgccggcagccccacctccacagaggagggaaccagcaccgagcccagcgaaggcagcgccccaggcaccagcaccgagcctagtgagcaggagattaaacggatcaacaagatcagaagaagacttgtgaaagacagcaacaccaagaaggccggcaagacaggccccatgaaaaccctgctggttagagtgatgacacccgatctgagagagcggctggaaaacctgagaaagaagcctgaaaatatcccccagcccatcagcaatacatctagagccaacctgaataagctgctgaccgattacaccgaaatgaagaaggcgatcctgcatgtgtactgggaagagttccagaaggaccctgtgggcctgatgagccgggtggcccagcctgccagcaagaagatcgatcagaacaagctgaaacctgagatggacgagaagggcaacctgaccaccgccggctttgcctgctctcagtgtggccagcccctgttcgtgtacaagctggagcaggtgtctgagaagggcaaggcttacaccaactacttcggacggtgcaatgtggccgagcacgaaaagctgatcctgctggcccagctgaagcccgagaaggatagcgacgaagccgtgacatatagcctgggaaagtttgggcagagggccctggatttctacagcattcatgtgaccaaggagtccacccaccccgtgaagcccctggcccagatcgccggaaacagatacgcctccggacctgtgggaaaggccctgagcgacgcatgtatgggcacaatcgcctccttcctgtctaagtaccaggacatcatcatcgaacaccagaaggtggtgaagggcaaccagaagagactggagagcctgcgggagctggccggcaaggaaaacctggaataccctagcgtgaccctgccacctcagcctcacaccaaggagggcgttgatgcctacaacgaagtgatcgcccgggtgcgaatgtgggtgaacctgaacctgtggcagaagctgaagctaagcagagatgatgccaagcctctgctgagactgaagggattcccttcctttcctctggtcgagagacaggccaacgaagtggactggtgggacatggtgtgtaacgtgaagaagctgatcaacgagaaaaaggaggatggcaaggtgttttggcagaatctggctggctacaagagacaggaagccctgagaccatacctgagcagcgaggaagatcggaagaagggaaagaaattcgctcggtaccagctgggcgacctgctgctgcacctggaaaagaagcacggcgaggactggggaaaggtgtacgacgaggcctgggagcggattgacaagaaagtggaaggcctgagcaagcacatcaagctggaagaggaacggagaagcgaggacgcccagagcaaggccgccctgaccgactggctgcgggctaaggccagcttcgtgatcgagggcctgaaggaggccgacaaggacgagttctgcagatgcgagctgaagctgcagaagtggtacggggacctgcggggaaagcccttcgccatcgaagccgagaacagcatcctggacatcagcggcttcagcaagcagtacaactgtgccttcatctggcagaaggacggcgtgaagaagctgaacctgtacctgatcatcaactacttcaagggcggcaagctgcggttcaagaagatcaaacctgaagccttcgaagccaacagattctacaccgtgatcaacaaaaagagcggcgagatcgtgcccatggaggtgaacttcaacttcgacgaccccaacctgatcatcctgcctctggcctttggcaagagacagggcagagaattcatctggaacgacctgctgtccctggaaaccggcagcctgaagctggccaacggaagagtgatcgagaagacactgtacaacagaagaacccggcaggatgagcctgccctgttcgtggccctgaccttcgagcggcgggaggtcctggactcctccaatatcaaaccaatgaacctgatcggcgtggcaagaggcgaaaacatccccgccgtgatcgccctgaccgaccccgagggctgcccactgagccggtttaaggatagcctgggaaacccaacccacatcctgagaatcggcgagagctataaggagaagcagcggaccatccaggccaagaaggaggtggagcagcggagagccggcggctacagccggaagtacgccagcaaagccaagaatctggcagacgatatggtgagaaacaccgctagagatctgctgtactacgccgtgacccaggatgccatgctgatcttcgccaacctgagccggggcttcggccggcagggcaagcggaccttcatggccgagagacagtacacacggatggaggactggctgaccgccaagctggcctacgagggcctgagcaagacctacctgtccaagacactggcccagtacacctccaagacatgcagcaactgtgggtttaccatcaccagcgccgactacgacagggtgctggagaagctgaagaagacagcaacaggctggatgaccacaattaacggcaaggagctgaaggtggagggccagattacctactacaacagatacaagagacagaacgtagtcaaggacctgtccgtcgagctggatagactgagcgaagaatctgtgaacaacgacatctcctcctggacaaagggcagaagcggagaagctctgagcctcctgaagaaaagattctcccatagacccgtgcaggagaagttcgtgtgcctgaactgcggcttcgagacacacgcagccgagcaagccgccctgaacatcgccagatcctggctgttcctgcggagccaggagtacaagaaataccagacaaacaagacaaccggcaacaccgataagagagccttcgtcgagacctggcagtccttttaccggaagaagcttaaggaggtgtggaaacctgccgtgcggtctggcggatctggcggaggctccaccagccccaagaaaaagagaaaagtctaagctgccttctgcggggcttgccttctggccatgcccttcttctctcccttgcacctgtacctcttggtctttgaataaagcctgagtaggaaggctagcaaaaaaaaaaaaaaaaaaaaaaaaaaaaaaaaaaaaaaaaaaaaaaaaaaaaaaaaaaaaaaaaaaaaaaaaaaaaaaaagcccagccggctccccaacctctaccgaggagggcacctctgagtccgccacccccgagagcggccctggcacctccaccgagcccagcgagggcagcgcacccggcagccctgccggcagccccacctccacagaggagggaaccagcaccgagcccagcgaaggcagcgccccaggcaccagcaccgagcctagtgagcaggagattaaacggatcaacaagatcagaagaagacttgtgaaagacagcaacaccaagaaggccggcaagacaggccccatgaaaaccctgctggttagagtgatgacacccgatctgagagagcggctggaaaacctgagaaagaagcctgaaaatatcccccagcccatcagcaatacatctagagccaacctgaataagctgctgaccgattacaccgaaatgaagaaggcgatcctgcatgtgtactgggaagagttccagaaggaccctgtgggcctgatgagccgggtggcccagcctgccagcaagaagatcgatcagaacaagctgaaacctgagatggacgagaagggcaacctgaccaccgccggctttgcctgctctcagtgtggccagcccctgttcgtgtacaagctggagcaggtgtctgagaagggcaaggcttacaccaactacttcggacggtgcaatgtggccgagcacgaaaagctgatcctgctggcccagctgaagcccgagaaggatagcgacgaagccgtgacatatagcctgggaaagtttgggcagagggccctggatttctacagcattcatgtgaccaaggagtccacccaccccgtgaagcccctggcccagatcgccggaaacagatacgcctccggacctgtgggaaaggccctgagcgacgcatgtatgggcacaatcgcctccttcctgtctaagtaccaggacatcatcatcgaacaccagaaggtggtgaagggcaaccagaagagactggagagcctgcgggagctggccggcaaggaaaacctggaataccctagcgtgaccctgccacctcagcctcacaccaaggagggcgttgatgcctacaacgaagtgatcgcccgggtgcgaatgtgggtgaacctgaacctgtggcagaagctgaagctaagcagagatgatgccaagcctctgctgagactgaagggattcccttcctttcctctggtcgagagacaggccaacgaagtggactggtgggacatggtgtgtaacgtgaagaagctgatcaacgagaaaaaggaggatggcaaggtgttttggcagaatctggctggctacaagagacaggaagccctgagaccatacctgagcagcgaggaagatcggaagaagggaaagaaattcgctcggtaccagctgggcgacctgctgctgcacctggaaaagaagcacggcgaggactggggaaaggtgtacgacgaggcctgggagcggattgacaagaaagtggaaggcctgagcaagcacatcaagctggaagaggaacggagaagcgaggacgcccagagcaaggccgccctgaccgactggctgcgggctaaggccagcttcgtgatcgagggcctgaaggaggccgacaaggacgagttctgcagatgcgagctgaagctgcagaagtggtacggggacctgcggggaaagcccttcgccatcgaagccgagaacagcatcctggacatcagcggcttcagcaagcagtacaactgtgccttcatctggcagaaggacggcgtgaagaagctgaacctgtacctgatcatcaactacttcaagggcggcaagctgcggttcaagaagatcaaacctgaagccttcgaagccaacagattctacaccgtgatcaacaaaaagagcggcgagatcgtgcccatggaggtgaacttcaacttcgacgaccccaacctgatcatcctgcctctggcctttggcaagagacagggcagagaattcatctggaacgacctgctgtccctggaaaccggcagcctgaagctggccaacggaagagtgatcgagaagacactgtacaacagaagaacccggcaggatgagcctgccctgttcgtggccctgaccttcgagcggcgggaggtcctggactcctccaatatcaaaccaatgaacctgatcggcgtggcaagaggcgaaaacatccccgccgtgatcgccctgaccgaccccgagggctgcccactgagccggtttaaggatagcctgggaaacccaacccacatcctgagaatcggcgagagctataaggagaagcagcggaccatccaggccaagaaggaggtggagcagcggagagccggcggctacagccggaagtacgccagcaaagccaagaatctggcagacgatatggtgagaaacaccgctagagatctgctgtactacgccgtgacccaggatgccatgctgatcttcgccaacctgagccggggcttcggccggcagggcaagcggaccttcatggccgagagacagtacacacggatggaggactggctgaccgccaagctggcctacgagggcctgagcaagacctacctgtccaagacactggcccagtacacctccaagacatgcagcaactgtgggtttaccatcaccagcgccgactacgacagggtgctggagaagctgaagaagacagcaacaggctggatgaccacaattaacggcaaggagctgaaggtggagggccagattacctactacaacagatacaagagacagaacgtagtcaaggacctgtccgtcgagctggatagactgagcgaagaatctgtgaacaacgacatctcctcctggacaaagggcagaagcggagaagctctgagcctcctgaagaaaagattctcccatagacccgtgcaggagaagttcgtgtgcctgaactgcggcttcgagacacacgcagccgagcaagccgccctgaacatcgccagatcctggctgttcctgcggagccaggagtacaagaaataccagacaaacaagacaaccggcaacaccgataagagagccttcgtcgagacctggcagtccttttaccggaagaagcttaaggaggtgtggaaacctgccgtgcggtctggcggatctggcggaggctccaccagccccaagaaaaagagaaaagtctaagctgccttctgcggggcttgccttctggccatgcccttcttctctcccttgcacctgtacctcttggtctttgaataaagcctgagtaggaaggctagcaaaaaaaaaaaaaaaaaaaaaaaaaaaaaaaaaaaaaaaaaaaaaaaaaaaaaaaaaaaaaaaaaaaaaaaaaaaaaaaa

SEQ ID NO: 9228 - RNA, 8787 nt, synthetic construct
  source 1..8787: mol_type = other RNA
aggaaataagagagaaaagaagagtaagaagaaatataagagccaccatggcccctaagaagaagcgtaaagtgagccggatgaaccacgaccaggagttcgacccccctaaggtgtaccctcccgtccccgccgagaagagaaagcccatccgggtcctgagcctgttcgatggcatcgccaccggtctgctggtgctgaaggacctgggcatccaggtggataggtacattgcctccgaggtgtgcgaggactccatcaccgtgggaatggtgcgtcatcagggcaagatcatgtacgtgggcgacgtgcggagcgtgacacagaagcatatccaggagtggggccctttcgacctggtgatcggcggcagcccttgcaatgacctgagcatcgtgaacccagcccggaagggcctgtacgagggaaccggcagactgttcttcgagttttacagactgctgcacgacgcccggcctaaggaaggcgacgaccggcccttcttttggctgttcgagaatgtggtggccatgggagtcagcgacaagcgggatattagccggttcctggagagcaaccccgtgatgatcgatgccaaggaagtgagcgccgcccaccgggccagatacttctggggcaatctgcctggcatgaacagacccctggccagcaccgtgaacgacaagctggagctgcaggagtgcctggagcacggccggatcgccaagttcagcaaggtgagaaccatcaccacccgaagcaacagcatcaaacaaggcaaggaccagcactttcctgtgttcatgaacgagaaggaggacatcctgtggtgtaccgagatggagagagtgttcgggttcccagtccactacacagatgtcagcaacatgtctagactggccagacagagactgctgggaagaagctggtccgtccctgtgatcagacacctgttcgcccctctgaaggagtacttcgcctgcgtgagcagcggcaacagcaacgccaacagccggggccccagcttctctagcggcctggtgccactgtccctgagagggagccacatgggccccatggagatctacaaaaccgtgagcgcctggaagcggcagcctgtgcgcgtgctgagcctgtttcggaatatcgataaagtcctgaaaagcctgggattcctggagagcggctctggctccggcggtggcaccctgaagtacgtggaggatgtgacaaacgtggtcagacgggatgtggagaagtggggccccttcgatctggtgtacggcagcacccaacccctgggcagctcttgtgaccggtgccctggctggtacatgtttcagttccaccggatcctgcagtacgccctgccgagacaggagtcccagcggccattcttttggattttcatggacaacttgctgctgaccgaggatgaccaggaaactaccactcggttcctgcagaccgaagccgtgaccctgcaggacgtgagaggccgggactaccagaacgccatgcgggtgtggtccaacatccctggactgaaaagcaagcacgcacctctgacccctaaagaagaggagtacctgcaggcccaggtgcggagcagaagcaagctggacgcccctaaggtggatctgctggtgaagaattgcctcctgcccctgagagagtacttcaagtatttcagccagaatagtctgcccctgggaggcagcggcggcggcgaccacgagctggtgaccttcagggacgtgatcatcaacttcagccaggacgagtgggagtacctgaacagcgcccagagggacctgtactgggacgtgatgatggagaactacagcaacctggtgagcctgggctgcttcatcagcaagcccgacgtgatcagcctgctggagcagggcaaggagccctggaaggtggtgaggaaggagaggaggaggtaccccgacctggagaccaggcacggcggcccaagcagcggcgcccctcctcccagcggcggcaggcggcccaagcagcggcgcccctcctcccagcggcggcagcccagccggctccccaacctctaccgaggagggcacctctgagtccgccacccccgagagcggccctggcacctccaccgagcccagcgagggcagcgcacccggcagccctgccggcagccccacctccacagaggagggaaccagcaccgagcccagcgaaggcagcgccccaggcaccagcaccgagcctagtgagcaggagattaaacggatcaacaagatcagaagaagacttgtgaaagacagcaacaccaagaaggccggcaagacaggccccatgaaaaccctgctggttagagtgatgacacccgatctgagagagcggctggaaaacctgagaaagaagcctgaaaatatcccccagcccatcagcaatacatctagagccaacctgaataagctgctgaccgattacaccgaaatgaagaaggcgatcctgcatgtgtactgggaagagttccagaaggaccctgtgggcctgatgagccgggtggcccagcctgccagcaagaagatcgatcagaacaagctgaaacctgagatggacgagaagggcaacctgaccaccgccggctttgcctgctctcagtgtggccagcccctgttcgtgtacaagctggagcaggtgtctgagaagggcaaggcttacaccaactacttcggacggtgcaatgtggccgagcacgaaaagctgatcctgctggcccagctgaagcccgagaaggatagcgacgaagccgtgacatatagcctgggaaagtttgggcagagggccctggatttctacagcattcatgtgaccaaggagtccacccaccccgtgaagcccctggcccagatcgccggaaacagatacgcctccggacctgtgggaaaggccctgagcgacgcatgtatgggcacaatcgcctccttcctgtctaagtaccaggacatcatcatcgaacaccagaaggtggtgaagggcaaccagaagagactggagagcctgcgggagctggccggcaaggaaaacctggaataccctagcgtgaccctgccacctcagcctcacaccaaggagggcgttgatgcctacaacgaagtgatcgcccgggtgcgaatgtgggtgaacctgaacctgtggcagaagctgaagctaagcagagatgatgccaagcctctgctgagactgaagggattcccttcctttcctctggtcgagagacaggccaacgaagtggactggtgggacatggtgtgtaacgtgaagaagctgatcaacgagaaaaaggaggatggcaaggtgttttggcagaatctggctggctacaagagacaggaagccctgagaccatacctgagcagcgaggaagatcggaagaagggaaagaaattcgctcggtaccagctgggcgacctgctgctgcacctggaaaagaagcacggcgaggactggggaaaggtgtacgacgaggcctgggagcggattgacaagaaagtggaaggcctgagcaagcacatcaagctggaagaggaacggagaagcgaggacgcccagagcaaggccgccctgaccgactggctgcgggctaaggccagcttcgtgatcgagggcctgaaggaggccgacaaggacgagttctgcagatgcgagctgaagctgcagaagtggtacggggacctgcggggaaagcccttcgccatcgaagccgagaacagcatcctggacatcagcggcttcagcaagcagtacaactgtgccttcatctggcagaaggacggcgtgaagaagctgaacctgtacctgatcatcaactacttcaagggcggcaagctgcggttcaagaagatcaaacctgaagccttcgaagccaacagattctacaccgtgatcaacaaaaagagcggcgagatcgtgcccatggaggtgaacttcaacttcgacgaccccaacctgatcatcctgcctctggcctttggcaagagacagggcagagaattcatctggaacgacctgctgtccctggaaaccggcagcctgaagctggccaacggaagagtgatcgagaagacactgtacaacagaagaacccggcaggatgagcctgccctgttcgtggccctgaccttcgagcggcgggaggtcctggactcctccaatatcaaaccaatgaacctgatcggcgtggcaagaggcgaaaacatccccgccgtgatcgccctgaccgaccccgagggctgcccactgagccggtttaaggatagcctgggaaacccaacccacatcctgagaatcggcgagagctataaggagaagcagcggaccatccaggccaagaaggaggtggagcagcggagagccggcggctacagccggaagtacgccagcaaagccaagaatctggcagacgatatggtgagaaacaccgctagagatctgctgtactacgccgtgacccaggatgccatgctgatcttcgccaacctgagccggggcttcggccggcagggcaagcggaccttcatggccgagagacagtacacacggatggaggactggctgaccgccaagctggcctacgagggcctgagcaagacctacctgtccaagacactggcccagtacacctccaagacatgcagcaactgtgggtttaccatcaccagcgccgactacgacagggtgctggagaagctgaagaagacagcaacaggctggatgaccacaattaacggcaaggagctgaaggtggagggccagattacctactacaacagatacaagagacagaacgtagtcaaggacctgtccgtcgagctggatagactgagcgaagaatctgtgaacaacgacatctcctcctggacaaagggcagaagcggagaagctctgagcctcctgaagaaaagattctcccatagacccgtgcaggagaagttcgtgtgcctgaactgcggcttcgagacacacgcagccgagcaagccgccctgaacatcgccagatcctggctgttcctgcggagccaggagtacaagaaataccagacaaacaagacaaccggcaacaccgataagagagccttcgtcgagacctggcagtccttttaccggaagaagcttaaggaggtgtggaaacctgccgtgcggtctggcggatctggcggaggctccaccagccccaagaaaaagagaaaagtctaagctgccttctgcggggcttgccttctggccatgcccttcttctctcccttgcacctgtacctcttggtctttgaataaagcctgagtaggaaggctagcaaaaaaaaaaaaaaaaaaaaaaaaaaaaaaaaaaaaaaaaaaaaaaaaaaaaaaaaaaaaaaaaaaaaaaaaaaaaaaaagcccagccggctccccaacctctaccgaggagggcacctctgagtccgccacccccgagagcggccctggcacctccaccgagcccagcgagggcagcgcacccggcagccctgccggcagccccacctccacagaggagggaaccagcaccgagcccagcgaaggcagcgccccaggcaccagcaccgagcctagtgagcaggagattaaacggatcaacaagatcagaagaagacttgtgaaagacagcaacaccaagaaggccggcaagacaggccccatgaaaaccctgctggttagagtgatgacacccgatctgagagagcggctggaaaacctgagaaagaagcctgaaaatatcccccagcccatcagcaatacatctagagccaacctgaataagctgctgaccgattacaccgaaatgaagaaggcgatcctgcatgtgtactgggaagagttccagaaggaccctgtgggcctgatgagccgggtggcccagcctgccagcaagaagatcgatcagaacaagctgaaacctgagatggacgagaagggcaacctgaccaccgccggctttgcctgctctcagtgtggccagcccctgttcgtgtacaagctggagcaggtgtctgagaagggcaaggcttacaccaactacttcggacggtgcaatgtggccgagcacgaaaagctgatcctgctggcccagctgaagcccgagaaggatagcgacgaagccgtgacatatagcctgggaaagtttgggcagagggccctggatttctacagcattcatgtgaccaaggagtccacccaccccgtgaagcccctggcccagatcgccggaaacagatacgcctccggacctgtgggaaaggccctgagcgacgcatgtatgggcacaatcgcctccttcctgtctaagtaccaggacatcatcatcgaacaccagaaggtggtgaagggcaaccagaagagactggagagcctgcgggagctggccggcaaggaaaacctggaataccctagcgtgaccctgccacctcagcctcacaccaaggagggcgttgatgcctacaacgaagtgatcgcccgggtgcgaatgtgggtgaacctgaacctgtggcagaagctgaagctaagcagagatgatgccaagcctctgctgagactgaagggattcccttcctttcctctggtcgagagacaggccaacgaagtggactggtgggacatggtgtgtaacgtgaagaagctgatcaacgagaaaaaggaggatggcaaggtgttttggcagaatctggctggctacaagagacaggaagccctgagaccatacctgagcagcgaggaagatcggaagaagggaaagaaattcgctcggtaccagctgggcgacctgctgctgcacctggaaaagaagcacggcgaggactggggaaaggtgtacgacgaggcctgggagcggattgacaagaaagtggaaggcctgagcaagcacatcaagctggaagaggaacggagaagcgaggacgcccagagcaaggccgccctgaccgactggctgcgggctaaggccagcttcgtgatcgagggcctgaaggaggccgacaaggacgagttctgcagatgcgagctgaagctgcagaagtggtacggggacctgcggggaaagcccttcgccatcgaagccgagaacagcatcctggacatcagcggcttcagcaagcagtacaactgtgccttcatctggcagaaggacggcgtgaagaagctgaacctgtacctgatcatcaactacttcaagggcggcaagctgcggttcaagaagatcaaacctgaagccttcgaagccaacagattctacaccgtgatcaacaaaaagagcggcgagatcgtgcccatggaggtgaacttcaacttcgacgaccccaacctgatcatcctgcctctggcctttggcaagagacagggcagagaattcatctggaacgacctgctgtccctggaaaccggcagcctgaagctggccaacggaagagtgatcgagaagacactgtacaacagaagaacccggcaggatgagcctgccctgttcgtggccctgaccttcgagcggcgggaggtcctggactcctccaatatcaaaccaatgaacctgatcggcgtggcaagaggcgaaaacatccccgccgtgatcgccctgaccgaccccgagggctgcccactgagccggtttaaggatagcctgggaaacccaacccacatcctgagaatcggcgagagctataaggagaagcagcggaccatccaggccaagaaggaggtggagcagcggagagccggcggctacagccggaagtacgccagcaaagccaagaatctggcagacgatatggtgagaaacaccgctagagatctgctgtactacgccgtgacccaggatgccatgctgatcttcgccaacctgagccggggcttcggccggcagggcaagcggaccttcatggccgagagacagtacacacggatggaggactggctgaccgccaagctggcctacgagggcctgagcaagacctacctgtccaagacactggcccagtacacctccaagacatgcagcaactgtgggtttaccatcaccagcgccgactacgacagggtgctggagaagctgaagaagacagcaacaggctggatgaccacaattaacggcaaggagctgaaggtggagggccagattacctactacaacagatacaagagacagaacgtagtcaaggacctgtccgtcgagctggatagactgagcgaagaatctgtgaacaacgacatctcctcctggacaaagggcagaagcggagaagctctgagcctcctgaagaaaagattctcccatagacccgtgcaggagaagttcgtgtgcctgaactgcggcttcgagacacacgcagccgagcaagccgccctgaacatcgccagatcctggctgttcctgcggagccaggagtacaagaaataccagacaaacaagacaaccggcaacaccgataagagagccttcgtcgagacctggcagtccttttaccggaagaagcttaaggaggtgtggaaacctgccgtgcggtctggcggatctggcggaggctccaccagccccaagaaaaagagaaaagtctaagctgccttctgcggggcttgccttctggccatgcccttcttctctcccttgcacctgtacctcttggtctttgaataaagcctgagtaggaaggctagcaaaaaaaaaaaaaaaaaaaaaaaaaaaaaaaaaaaaaaaaaaaaaaaaaaaaaaaaaaaaaaaaaaaaaaaaaaaaaaaa

SEQ ID NO: 9229 - RNA, 8787 nt, synthetic construct
  source 1..8787: mol_type = other RNA
aggaaataagagagaaaagaagagtaagaagaaatataagagccaccatggcccctaagaagaagcgtaaagtgagccggatgaaccacgaccaggagttcgacccccctaaggtgtaccctcccgtccccgccgagaagagaaagcccatccgggtcctgagcctgttcgatggcatcgccaccggtctgctggtgctgaaggacctgggcatccaggtggataggtacattgcctccgaggtgtgcgaggactccatcaccgtgggaatggtgcgtcatcagggcaagatcatgtacgtgggcgacgtgcggagcgtgacacagaagcatatccaggagtggggccctttcgacctggtgatcggcggcagcccttgcaatgacctgagcatcgtgaacccagcccggaagggcctgtacgagggaaccggcagactgttcttcgagttttacagactgctgcacgacgcccggcctaaggaaggcgacgaccggcccttcttttggctgttcgagaatgtggtggccatgggagtcagcgacaagcgggatattagccggttcctggagagcaaccccgtgatgatcgatgccaaggaagtgagcgccgcccaccgggccagatacttctggggcaatctgcctggcatgaacagacccctggccagcaccgtgaacgacaagctggagctgcaggagtgcctggagcacggccggatcgccaagttcagcaaggtgagaaccatcaccacccgaagcaacagcatcaaacaaggcaaggaccagcactttcctgtgttcatgaacgagaaggaggacatcctgtggtgtaccgagatggagagagtgttcgggttcccagtccactacacagatgtcagcaacatgtctagactggccagacagagactgctgggaagaagctggtccgtccctgtgatcagacacctgttcgcccctctgaaggagtacttcgcctgcgtgagcagcggcaacagcaacgccaacagccggggccccagcttctctagcggcctggtgccactgtccctgagagggagccacatgggccccatggagatctacaaaaccgtgagcgcctggaagcggcagcctgtgcgcgtgctgagcctgtttcggaatatcgataaagtcctgaaaagcctgggattcctggagagcggctctggctccggcggtggcaccctgaagtacgtggaggatgtgacaaacgtggtcagacgggatgtggagaagtggggccccttcgatctggtgtacggcagcacccaacccctgggcagctcttgtgaccggtgccctggctggtacatgtttcagttccaccggatcctgcagtacgccctgccgagacaggagtcccagcggccattcttttggattttcatggacaacttgctgctgaccgaggatgaccaggaaactaccactcggttcctgcagaccgaagccgtgaccctgcaggacgtgagaggccgggactaccagaacgccatgcgggtgtggtccaacatccctggactgaaaagcaagcacgcacctctgacccctaaagaagaggagtacctgcaggcccaggtgcggagcagaagcaagctggacgcccctaaggtggatctgctggtgaagaattgcctcctgcccctgagagagtacttcaagtatttcagccagaatagtctgcccctgggaggcagcggcggcggccagctgggcagcgtggccttcgaggacgtggccgtggacttcacccaggaggagtggggctacctggcccccgcccagagggacctgcacagggaggtgatgctggagaactacaggaacctggtgttcctgggcctggtggccagcaagcccgacgtgatctgccacctggagcagaggaaggagccctggagcctgaggggcatcgagaagaggaaggccctgaggggcacctgccccgacggcggcccaagcagcggcgcccctcctcccagcggcggcaggcggcccaagcagcggcgcccctcctcccagcggcggcagcccagccggctccccaacctctaccgaggagggcacctctgagtccgccacccccgagagcggccctggcacctccaccgagcccagcgagggcagcgcacccggcagccctgccggcagccccacctccacagaggagggaaccagcaccgagcccagcgaaggcagcgccccaggcaccagcaccgagcctagtgagcaggagattaaacggatcaacaagatcagaagaagacttgtgaaagacagcaacaccaagaaggccggcaagacaggccccatgaaaaccctgctggttagagtgatgacacccgatctgagagagcggctggaaaacctgagaaagaagcctgaaaatatcccccagcccatcagcaatacatctagagccaacctgaataagctgctgaccgattacaccgaaatgaagaaggcgatcctgcatgtgtactgggaagagttccagaaggaccctgtgggcctgatgagccgggtggcccagcctgccagcaagaagatcgatcagaacaagctgaaacctgagatggacgagaagggcaacctgaccaccgccggctttgcctgctctcagtgtggccagcccctgttcgtgtacaagctggagcaggtgtctgagaagggcaaggcttacaccaactacttcggacggtgcaatgtggccgagcacgaaaagctgatcctgctggcccagctgaagcccgagaaggatagcgacgaagccgtgacatatagcctgggaaagtttgggcagagggccctggatttctacagcattcatgtgaccaaggagtccacccaccccgtgaagcccctggcccagatcgccggaaacagatacgcctccggacctgtgggaaaggccctgagcgacgcatgtatgggcacaatcgcctccttcctgtctaagtaccaggacatcatcatcgaacaccagaaggtggtgaagggcaaccagaagagactggagagcctgcgggagctggccggcaaggaaaacctggaataccctagcgtgaccctgccacctcagcctcacaccaaggagggcgttgatgcctacaacgaagtgatcgcccgggtgcgaatgtgggtgaacctgaacctgtggcagaagctgaagctaagcagagatgatgccaagcctctgctgagactgaagggattcccttcctttcctctggtcgagagacaggccaacgaagtggactggtgggacatggtgtgtaacgtgaagaagctgatcaacgagaaaaaggaggatggcaaggtgttttggcagaatctggctggctacaagagacaggaagccctgagaccatacctgagcagcgaggaagatcggaagaagggaaagaaattcgctcggtaccagctgggcgacctgctgctgcacctggaaaagaagcacggcgaggactggggaaaggtgtacgacgaggcctgggagcggattgacaagaaagtggaaggcctgagcaagcacatcaagctggaagaggaacggagaagcgaggacgcccagagcaaggccgccctgaccgactggctgcgggctaaggccagcttcgtgatcgagggcctgaaggaggccgacaaggacgagttctgcagatgcgagctgaagctgcagaagtggtacggggacctgcggggaaagcccttcgccatcgaagccgagaacagcatcctggacatcagcggcttcagcaagcagtacaactgtgccttcatctggcagaaggacggcgtgaagaagctgaacctgtacctgatcatcaactacttcaagggcggcaagctgcggttcaagaagatcaaacctgaagccttcgaagccaacagattctacaccgtgatcaacaaaaagagcggcgagatcgtgcccatggaggtgaacttcaacttcgacgaccccaacctgatcatcctgcctctggcctttggcaagagacagggcagagaattcatctggaacgacctgctgtccctggaaaccggcagcctgaagctggccaacggaagagtgatcgagaagacactgtacaacagaagaacccggcaggatgagcctgccctgttcgtggccctgaccttcgagcggcgggaggtcctggactcctccaatatcaaaccaatgaacctgatcggcgtggcaagaggcgaaaacatccccgccgtgatcgccctgaccgaccccgagggctgcccactgagccggtttaaggatagcctgggaaacccaacccacatcctgagaatcggcgagagctataaggagaagcagcggaccatccaggccaagaaggaggtggagcagcggagagccggcggctacagccggaagtacgccagcaaagccaagaatctggcagacgatatggtgagaaacaccgctagagatctgctgtactacgccgtgacccaggatgccatgctgatcttcgccaacctgagccggggcttcggccggcagggcaagcggaccttcatggccgagagacagtacacacggatggaggactggctgaccgccaagctggcctacgagggcctgagcaagacctacctgtccaagacactggcccagtacacctccaagacatgcagcaactgtgggtttaccatcaccagcgccgactacgacagggtgctggagaagctgaagaagacagcaacaggctggatgaccacaattaacggcaaggagctgaaggtggagggccagattacctactacaacagatacaagagacagaacgtagtcaaggacctgtccgtcgagctggatagactgagcgaagaatctgtgaacaacgacatctcctcctggacaaagggcagaagcggagaagctctgagcctcctgaagaaaagattctcccatagacccgtgcaggagaagttcgtgtgcctgaactgcggcttcgagacacacgcagccgagcaagccgccctgaacatcgccagatcctggctgttcctgcggagccaggagtacaagaaataccagacaaacaagacaaccggcaacaccgataagagagccttcgtcgagacctggcagtccttttaccggaagaagcttaaggaggtgtggaaacctgccgtgcggtctggcggatctggcggaggctccaccagccccaagaaaaagagaaaagtctaagctgccttctgcggggcttgccttctggccatgcccttcttctctcccttgcacctgtacctcttggtctttgaataaagcctgagtaggaaggctagcaaaaaaaaaaaaaaaaaaaaaaaaaaaaaaaaaaaaaaaaaaaaaaaaaaaaaaaaaaaaaaaaaaaaaaaaaaaaaaaagcccagccggctccccaacctctaccgaggagggcacctctgagtccgccacccccgagagcggccctggcacctccaccgagcccagcgagggcagcgcacccggcagccctgccggcagccccacctccacagaggagggaaccagcaccgagcccagcgaaggcagcgccccaggcaccagcaccgagcctagtgagcaggagattaaacggatcaacaagatcagaagaagacttgtgaaagacagcaacaccaagaaggccggcaagacaggccccatgaaaaccctgctggttagagtgatgacacccgatctgagagagcggctggaaaacctgagaaagaagcctgaaaatatcccccagcccatcagcaatacatctagagccaacctgaataagctgctgaccgattacaccgaaatgaagaaggcgatcctgcatgtgtactgggaagagttccagaaggaccctgtgggcctgatgagccgggtggcccagcctgccagcaagaagatcgatcagaacaagctgaaacctgagatggacgagaagggcaacctgaccaccgccggctttgcctgctctcagtgtggccagcccctgttcgtgtacaagctggagcaggtgtctgagaagggcaaggcttacaccaactacttcggacggtgcaatgtggccgagcacgaaaagctgatcctgctggcccagctgaagcccgagaaggatagcgacgaagccgtgacatatagcctgggaaagtttgggcagagggccctggatttctacagcattcatgtgaccaaggagtccacccaccccgtgaagcccctggcccagatcgccggaaacagatacgcctccggacctgtgggaaaggccctgagcgacgcatgtatgggcacaatcgcctccttcctgtctaagtaccaggacatcatcatcgaacaccagaaggtggtgaagggcaaccagaagagactggagagcctgcgggagctggccggcaaggaaaacctggaataccctagcgtgaccctgccacctcagcctcacaccaaggagggcgttgatgcctacaacgaagtgatcgcccgggtgcgaatgtgggtgaacctgaacctgtggcagaagctgaagctaagcagagatgatgccaagcctctgctgagactgaagggattcccttcctttcctctggtcgagagacaggccaacgaagtggactggtgggacatggtgtgtaacgtgaagaagctgatcaacgagaaaaaggaggatggcaaggtgttttggcagaatctggctggctacaagagacaggaagccctgagaccatacctgagcagcgaggaagatcggaagaagggaaagaaattcgctcggtaccagctgggcgacctgctgctgcacctggaaaagaagcacggcgaggactggggaaaggtgtacgacgaggcctgggagcggattgacaagaaagtggaaggcctgagcaagcacatcaagctggaagaggaacggagaagcgaggacgcccagagcaaggccgccctgaccgactggctgcgggctaaggccagcttcgtgatcgagggcctgaaggaggccgacaaggacgagttctgcagatgcgagctgaagctgcagaagtggtacggggacctgcggggaaagcccttcgccatcgaagccgagaacagcatcctggacatcagcggcttcagcaagcagtacaactgtgccttcatctggcagaaggacggcgtgaagaagctgaacctgtacctgatcatcaactacttcaagggcggcaagctgcggttcaagaagatcaaacctgaagccttcgaagccaacagattctacaccgtgatcaacaaaaagagcggcgagatcgtgcccatggaggtgaacttcaacttcgacgaccccaacctgatcatcctgcctctggcctttggcaagagacagggcagagaattcatctggaacgacctgctgtccctggaaaccggcagcctgaagctggccaacggaagagtgatcgagaagacactgtacaacagaagaacccggcaggatgagcctgccctgttcgtggccctgaccttcgagcggcgggaggtcctggactcctccaatatcaaaccaatgaacctgatcggcgtggcaagaggcgaaaacatccccgccgtgatcgccctgaccgaccccgagggctgcccactgagccggtttaaggatagcctgggaaacccaacccacatcctgagaatcggcgagagctataaggagaagcagcggaccatccaggccaagaaggaggtggagcagcggagagccggcggctacagccggaagtacgccagcaaagccaagaatctggcagacgatatggtgagaaacaccgctagagatctgctgtactacgccgtgacccaggatgccatgctgatcttcgccaacctgagccggggcttcggccggcagggcaagcggaccttcatggccgagagacagtacacacggatggaggactggctgaccgccaagctggcctacgagggcctgagcaagacctacctgtccaagacactggcccagtacacctccaagacatgcagcaactgtgggtttaccatcaccagcgccgactacgacagggtgctggagaagctgaagaagacagcaacaggctggatgaccacaattaacggcaaggagctgaaggtggagggccagattacctactacaacagatacaagagacagaacgtagtcaaggacctgtccgtcgagctggatagactgagcgaagaatctgtgaacaacgacatctcctcctggacaaagggcagaagcggagaagctctgagcctcctgaagaaaagattctcccatagacccgtgcaggagaagttcgtgtgcctgaactgcggcttcgagacacacgcagccgagcaagccgccctgaacatcgccagatcctggctgttcctgcggagccaggagtacaagaaataccagacaaacaagacaaccggcaacaccgataagagagccttcgtcgagacctggcagtccttttaccggaagaagcttaaggaggtgtggaaacctgccgtgcggtctggcggatctggcggaggctccaccagccccaagaaaaagagaaaagtctaagctgccttctgcggggcttgccttctggccatgcccttcttctctcccttgcacctgtacctcttggtctttgaataaagcctgagtaggaaggctagcaaaaaaaaaaaaaaaaaaaaaaaaaaaaaaaaaaaaaaaaaaaaaaaaaaaaaaaaaaaaaaaaaaaaaaaaaaaaaaaa

SEQ ID NO: 9230 - RNA, 8787 nt, synthetic construct
  source 1..8787: mol_type = other RNA
aggaaataagagagaaaagaagagtaagaagaaatataagagccaccatggcccctaagaagaagcgtaaagtgagccggatgaaccacgaccaggagttcgacccccctaaggtgtaccctcccgtccccgccgagaagagaaagcccatccgggtcctgagcctgttcgatggcatcgccaccggtctgctggtgctgaaggacctgggcatccaggtggataggtacattgcctccgaggtgtgcgaggactccatcaccgtgggaatggtgcgtcatcagggcaagatcatgtacgtgggcgacgtgcggagcgtgacacagaagcatatccaggagtggggccctttcgacctggtgatcggcggcagcccttgcaatgacctgagcatcgtgaacccagcccggaagggcctgtacgagggaaccggcagactgttcttcgagttttacagactgctgcacgacgcccggcctaaggaaggcgacgaccggcccttcttttggctgttcgagaatgtggtggccatgggagtcagcgacaagcgggatattagccggttcctggagagcaaccccgtgatgatcgatgccaaggaagtgagcgccgcccaccgggccagatacttctggggcaatctgcctggcatgaacagacccctggccagcaccgtgaacgacaagctggagctgcaggagtgcctggagcacggccggatcgccaagttcagcaaggtgagaaccatcaccacccgaagcaacagcatcaaacaaggcaaggaccagcactttcctgtgttcatgaacgagaaggaggacatcctgtggtgtaccgagatggagagagtgttcgggttcccagtccactacacagatgtcagcaacatgtctagactggccagacagagactgctgggaagaagctggtccgtccctgtgatcagacacctgttcgcccctctgaaggagtacttcgcctgcgtgagcagcggcaacagcaacgccaacagccggggccccagcttctctagcggcctggtgccactgtccctgagagggagccacatgggccccatggagatctacaaaaccgtgagcgcctggaagcggcagcctgtgcgcgtgctgagcctgtttcggaatatcgataaagtcctgaaaagcctgggattcctggagagcggctctggctccggcggtggcaccctgaagtacgtggaggatgtgacaaacgtggtcagacgggatgtggagaagtggggccccttcgatctggtgtacggcagcacccaacccctgggcagctcttgtgaccggtgccctggctggtacatgtttcagttccaccggatcctgcagtacgccctgccgagacaggagtcccagcggccattcttttggattttcatggacaacttgctgctgaccgaggatgaccaggaaactaccactcggttcctgcagaccgaagccgtgaccctgcaggacgtgagaggccgggactaccagaacgccatgcgggtgtggtccaacatccctggactgaaaagcaagcacgcacctctgacccctaaagaagaggagtacctgcaggcccaggtgcggagcagaagcaagctggacgcccctaaggtggatctgctggtgaagaattgcctcctgcccctgagagagtacttcaagtatttcagccagaatagtctgcccctgggaggcagcggcggcggccccaccgcccccgtggccttcagcgacctgaccatctgcttcagccaggaggagtggggctggctgagccccacccagaagctgctgtacgaggaggtgatgctggagaactaccagaacctggtgagcgtgggcctgtgcaccaggaagccccacatcatcaccctgctggagaagggcaaggacccctggatcgccgagcccctgaggaagaggggcggccccgaccccgccagcaggtacggcggcccaagcagcggcgcccctcctcccagcggcggcaggcggcccaagcagcggcgcccctcctcccagcggcggcagcccagccggctccccaacctctaccgaggagggcacctctgagtccgccacccccgagagcggccctggcacctccaccgagcccagcgagggcagcgcacccggcagccctgccggcagccccacctccacagaggagggaaccagcaccgagcccagcgaaggcagcgccccaggcaccagcaccgagcctagtgagcaggagattaaacggatcaacaagatcagaagaagacttgtgaaagacagcaacaccaagaaggccggcaagacaggccccatgaaaaccctgctggttagagtgatgacacccgatctgagagagcggctggaaaacctgagaaagaagcctgaaaatatcccccagcccatcagcaatacatctagagccaacctgaataagctgctgaccgattacaccgaaatgaagaaggcgatcctgcatgtgtactgggaagagttccagaaggaccctgtgggcctgatgagccgggtggcccagcctgccagcaagaagatcgatcagaacaagctgaaacctgagatggacgagaagggcaacctgaccaccgccggctttgcctgctctcagtgtggccagcccctgttcgtgtacaagctggagcaggtgtctgagaagggcaaggcttacaccaactacttcggacggtgcaatgtggccgagcacgaaaagctgatcctgctggcccagctgaagcccgagaaggatagcgacgaagccgtgacatatagcctgggaaagtttgggcagagggccctggatttctacagcattcatgtgaccaaggagtccacccaccccgtgaagcccctggcccagatcgccggaaacagatacgcctccggacctgtgggaaaggccctgagcgacgcatgtatgggcacaatcgcctccttcctgtctaagtaccaggacatcatcatcgaacaccagaaggtggtgaagggcaaccagaagagactggagagcctgcgggagctggccggcaaggaaaacctggaataccctagcgtgaccctgccacctcagcctcacaccaaggagggcgttgatgcctacaacgaagtgatcgcccgggtgcgaatgtgggtgaacctgaacctgtggcagaagctgaagctaagcagagatgatgccaagcctctgctgagactgaagggattcccttcctttcctctggtcgagagacaggccaacgaagtggactggtgggacatggtgtgtaacgtgaagaagctgatcaacgagaaaaaggaggatggcaaggtgttttggcagaatctggctggctacaagagacaggaagccctgagaccatacctgagcagcgaggaagatcggaagaagggaaagaaattcgctcggtaccagctgggcgacctgctgctgcacctggaaaagaagcacggcgaggactggggaaaggtgtacgacgaggcctgggagcggattgacaagaaagtggaaggcctgagcaagcacatcaagctggaagaggaacggagaagcgaggacgcccagagcaaggccgccctgaccgactggctgcgggctaaggccagcttcgtgatcgagggcctgaaggaggccgacaaggacgagttctgcagatgcgagctgaagctgcagaagtggtacggggacctgcggggaaagcccttcgccatcgaagccgagaacagcatcctggacatcagcggcttcagcaagcagtacaactgtgccttcatctggcagaaggacggcgtgaagaagctgaacctgtacctgatcatcaactacttcaagggcggcaagctgcggttcaagaagatcaaacctgaagccttcgaagccaacagattctacaccgtgatcaacaaaaagagcggcgagatcgtgcccatggaggtgaacttcaacttcgacgaccccaacctgatcatcctgcctctggcctttggcaagagacagggcagagaattcatctggaacgacctgctgtccctggaaaccggcagcctgaagctggccaacggaagagtgatcgagaagacactgtacaacagaagaacccggcaggatgagcctgccctgttcgtggccctgaccttcgagcggcgggaggtcctggactcctccaatatcaaaccaatgaacctgatcggcgtggcaagaggcgaaaacatccccgccgtgatcgccctgaccgaccccgagggctgcccactgagccggtttaaggatagcctgggaaacccaacccacatcctgagaatcggcgagagctataaggagaagcagcggaccatccaggccaagaaggaggtggagcagcggagagccggcggctacagccggaagtacgccagcaaagccaagaatctggcagacgatatggtgagaaacaccgctagagatctgctgtactacgccgtgacccaggatgccatgctgatcttcgccaacctgagccggggcttcggccggcagggcaagcggaccttcatggccgagagacagtacacacggatggaggactggctgaccgccaagctggcctacgagggcctgagcaagacctacctgtccaagacactggcccagtacacctccaagacatgcagcaactgtgggtttaccatcaccagcgccgactacgacagggtgctggagaagctgaagaagacagcaacaggctggatgaccacaattaacggcaaggagctgaaggtggagggccagattacctactacaacagatacaagagacagaacgtagtcaaggacctgtccgtcgagctggatagactgagcgaagaatctgtgaacaacgacatctcctcctggacaaagggcagaagcggagaagctctgagcctcctgaagaaaagattctcccatagacccgtgcaggagaagttcgtgtgcctgaactgcggcttcgagacacacgcagccgagcaagccgccctgaacatcgccagatcctggctgttcctgcggagccaggagtacaagaaataccagacaaacaagacaaccggcaacaccgataagagagccttcgtcgagacctggcagtccttttaccggaagaagcttaaggaggtgtggaaacctgccgtgcggtctggcggatctggcggaggctccaccagccccaagaaaaagagaaaagtctaagctgccttctgcggggcttgccttctggccatgcccttcttctctcccttgcacctgtacctcttggtctttgaataaagcctgagtaggaaggctagcaaaaaaaaaaaaaaaaaaaaaaaaaaaaaaaaaaaaaaaaaaaaaaaaaaaaaaaaaaaaaaaaaaaaaaaaaaaaaaaagcccagccggctccccaacctctaccgaggagggcacctctgagtccgccacccccgagagcggccctggcacctccaccgagcccagcgagggcagcgcacccggcagccctgccggcagccccacctccacagaggagggaaccagcaccgagcccagcgaaggcagcgccccaggcaccagcaccgagcctagtgagcaggagattaaacggatcaacaagatcagaagaagacttgtgaaagacagcaacaccaagaaggccggcaagacaggccccatgaaaaccctgctggttagagtgatgacacccgatctgagagagcggctggaaaacctgagaaagaagcctgaaaatatcccccagcccatcagcaatacatctagagccaacctgaataagctgctgaccgattacaccgaaatgaagaaggcgatcctgcatgtgtactgggaagagttccagaaggaccctgtgggcctgatgagccgggtggcccagcctgccagcaagaagatcgatcagaacaagctgaaacctgagatggacgagaagggcaacctgaccaccgccggctttgcctgctctcagtgtggccagcccctgttcgtgtacaagctggagcaggtgtctgagaagggcaaggcttacaccaactacttcggacggtgcaatgtggccgagcacgaaaagctgatcctgctggcccagctgaagcccgagaaggatagcgacgaagccgtgacatatagcctgggaaagtttgggcagagggccctggatttctacagcattcatgtgaccaaggagtccacccaccccgtgaagcccctggcccagatcgccggaaacagatacgcctccggacctgtgggaaaggccctgagcgacgcatgtatgggcacaatcgcctccttcctgtctaagtaccaggacatcatcatcgaacaccagaaggtggtgaagggcaaccagaagagactggagagcctgcgggagctggccggcaaggaaaacctggaataccctagcgtgaccctgccacctcagcctcacaccaaggagggcgttgatgcctacaacgaagtgatcgcccgggtgcgaatgtgggtgaacctgaacctgtggcagaagctgaagctaagcagagatgatgccaagcctctgctgagactgaagggattcccttcctttcctctggtcgagagacaggccaacgaagtggactggtgggacatggtgtgtaacgtgaagaagctgatcaacgagaaaaaggaggatggcaaggtgttttggcagaatctggctggctacaagagacaggaagccctgagaccatacctgagcagcgaggaagatcggaagaagggaaagaaattcgctcggtaccagctgggcgacctgctgctgcacctggaaaagaagcacggcgaggactggggaaaggtgtacgacgaggcctgggagcggattgacaagaaagtggaaggcctgagcaagcacatcaagctggaagaggaacggagaagcgaggacgcccagagcaaggccgccctgaccgactggctgcgggctaaggccagcttcgtgatcgagggcctgaaggaggccgacaaggacgagttctgcagatgcgagctgaagctgcagaagtggtacggggacctgcggggaaagcccttcgccatcgaagccgagaacagcatcctggacatcagcggcttcagcaagcagtacaactgtgccttcatctggcagaaggacggcgtgaagaagctgaacctgtacctgatcatcaactacttcaagggcggcaagctgcggttcaagaagatcaaacctgaagccttcgaagccaacagattctacaccgtgatcaacaaaaagagcggcgagatcgtgcccatggaggtgaacttcaacttcgacgaccccaacctgatcatcctgcctctggcctttggcaagagacagggcagagaattcatctggaacgacctgctgtccctggaaaccggcagcctgaagctggccaacggaagagtgatcgagaagacactgtacaacagaagaacccggcaggatgagcctgccctgttcgtggccctgaccttcgagcggcgggaggtcctggactcctccaatatcaaaccaatgaacctgatcggcgtggcaagaggcgaaaacatccccgccgtgatcgccctgaccgaccccgagggctgcccactgagccggtttaaggatagcctgggaaacccaacccacatcctgagaatcggcgagagctataaggagaagcagcggaccatccaggccaagaaggaggtggagcagcggagagccggcggctacagccggaagtacgccagcaaagccaagaatctggcagacgatatggtgagaaacaccgctagagatctgctgtactacgccgtgacccaggatgccatgctgatcttcgccaacctgagccggggcttcggccggcagggcaagcggaccttcatggccgagagacagtacacacggatggaggactggctgaccgccaagctggcctacgagggcctgagcaagacctacctgtccaagacactggcccagtacacctccaagacatgcagcaactgtgggtttaccatcaccagcgccgactacgacagggtgctggagaagctgaagaagacagcaacaggctggatgaccacaattaacggcaaggagctgaaggtggagggccagattacctactacaacagatacaagagacagaacgtagtcaaggacctgtccgtcgagctggatagactgagcgaagaatctgtgaacaacgacatctcctcctggacaaagggcagaagcggagaagctctgagcctcctgaagaaaagattctcccatagacccgtgcaggagaagttcgtgtgcctgaactgcggcttcgagacacacgcagccgagcaagccgccctgaacatcgccagatcctggctgttcctgcggagccaggagtacaagaaataccagacaaacaagacaaccggcaacaccgataagagagccttcgtcgagacctggcagtccttttaccggaagaagcttaaggaggtgtggaaacctgccgtgcggtctggcggatctggcggaggctccaccagccccaagaaaaagagaaaagtctaagctgccttctgcggggcttgccttctggccatgcccttcttctctcccttgcacctgtacctcttggtctttgaataaagcctgagtaggaaggctagcaaaaaaaaaaaaaaaaaaaaaaaaaaaaaaaaaaaaaaaaaaaaaaaaaaaaaaaaaaaaaaaaaaaaaaaaaaaaaaaa

SEQ ID NO: 9231 - RNA, 8787 nt, synthetic construct
  source 1..8787: mol_type = other RNA
aggaaataagagagaaaagaagagtaagaagaaatataagagccaccatggcccctaagaagaagcgtaaagtgagccggatgaaccacgaccaggagttcgacccccctaaggtgtaccctcccgtccccgccgagaagagaaagcccatccgggtcctgagcctgttcgatggcatcgccaccggtctgctggtgctgaaggacctgggcatccaggtggataggtacattgcctccgaggtgtgcgaggactccatcaccgtgggaatggtgcgtcatcagggcaagatcatgtacgtgggcgacgtgcggagcgtgacacagaagcatatccaggagtggggccctttcgacctggtgatcggcggcagcccttgcaatgacctgagcatcgtgaacccagcccggaagggcctgtacgagggaaccggcagactgttcttcgagttttacagactgctgcacgacgcccggcctaaggaaggcgacgaccggcccttcttttggctgttcgagaatgtggtggccatgggagtcagcgacaagcgggatattagccggttcctggagagcaaccccgtgatgatcgatgccaaggaagtgagcgccgcccaccgggccagatacttctggggcaatctgcctggcatgaacagacccctggccagcaccgtgaacgacaagctggagctgcaggagtgcctggagcacggccggatcgccaagttcagcaaggtgagaaccatcaccacccgaagcaacagcatcaaacaaggcaaggaccagcactttcctgtgttcatgaacgagaaggaggacatcctgtggtgtaccgagatggagagagtgttcgggttcccagtccactacacagatgtcagcaacatgtctagactggccagacagagactgctgggaagaagctggtccgtccctgtgatcagacacctgttcgcccctctgaaggagtacttcgcctgcgtgagcagcggcaacagcaacgccaacagccggggccccagcttctctagcggcctggtgccactgtccctgagagggagccacatgggccccatggagatctacaaaaccgtgagcgcctggaagcggcagcctgtgcgcgtgctgagcctgtttcggaatatcgataaagtcctgaaaagcctgggattcctggagagcggctctggctccggcggtggcaccctgaagtacgtggaggatgtgacaaacgtggtcagacgggatgtggagaagtggggccccttcgatctggtgtacggcagcacccaacccctgggcagctcttgtgaccggtgccctggctggtacatgtttcagttccaccggatcctgcagtacgccctgccgagacaggagtcccagcggccattcttttggattttcatggacaacttgctgctgaccgaggatgaccaggaaactaccactcggttcctgcagaccgaagccgtgaccctgcaggacgtgagaggccgggactaccagaacgccatgcgggtgtggtccaacatccctggactgaaaagcaagcacgcacctctgacccctaaagaagaggagtacctgcaggcccaggtgcggagcagaagcaagctggacgcccctaaggtggatctgctggtgaagaattgcctcctgcccctgagagagtacttcaagtatttcagccagaatagtctgcccctgggaggcagcggcggcggcgaggagccccccgtggtgttcgaggacgtggccgtgtacttcaccagggaggagtggggcaccctggtgaccaggcagaaggagctgtacagggacgtgatgaggctgaactacgagctgctggccagcctggagcccgccgccgccaagcccgacctgatcagcaagctggagaggagggccgccccctggatcagggaccccagcggccccaagtggggcaagggcaggccccccggcaagggcggcccaagcagcggcgcccctcctcccagcggcggcaggcggcccaagcagcggcgcccctcctcccagcggcggcagcccagccggctccccaacctctaccgaggagggcacctctgagtccgccacccccgagagcggccctggcacctccaccgagcccagcgagggcagcgcacccggcagccctgccggcagccccacctccacagaggagggaaccagcaccgagcccagcgaaggcagcgccccaggcaccagcaccgagcctagtgagcaggagattaaacggatcaacaagatcagaagaagacttgtgaaagacagcaacaccaagaaggccggcaagacaggccccatgaaaaccctgctggttagagtgatgacacccgatctgagagagcggctggaaaacctgagaaagaagcctgaaaatatcccccagcccatcagcaatacatctagagccaacctgaataagctgctgaccgattacaccgaaatgaagaaggcgatcctgcatgtgtactgggaagagttccagaaggaccctgtgggcctgatgagccgggtggcccagcctgccagcaagaagatcgatcagaacaagctgaaacctgagatggacgagaagggcaacctgaccaccgccggctttgcctgctctcagtgtggccagcccctgttcgtgtacaagctggagcaggtgtctgagaagggcaaggcttacaccaactacttcggacggtgcaatgtggccgagcacgaaaagctgatcctgctggcccagctgaagcccgagaaggatagcgacgaagccgtgacatatagcctgggaaagtttgggcagagggccctggatttctacagcattcatgtgaccaaggagtccacccaccccgtgaagcccctggcccagatcgccggaaacagatacgcctccggacctgtgggaaaggccctgagcgacgcatgtatgggcacaatcgcctccttcctgtctaagtaccaggacatcatcatcgaacaccagaaggtggtgaagggcaaccagaagagactggagagcctgcgggagctggccggcaaggaaaacctggaataccctagcgtgaccctgccacctcagcctcacaccaaggagggcgttgatgcctacaacgaagtgatcgcccgggtgcgaatgtgggtgaacctgaacctgtggcagaagctgaagctaagcagagatgatgccaagcctctgctgagactgaagggattcccttcctttcctctggtcgagagacaggccaacgaagtggactggtgggacatggtgtgtaacgtgaagaagctgatcaacgagaaaaaggaggatggcaaggtgttttggcagaatctggctggctacaagagacaggaagccctgagaccatacctgagcagcgaggaagatcggaagaagggaaagaaattcgctcggtaccagctgggcgacctgctgctgcacctggaaaagaagcacggcgaggactggggaaaggtgtacgacgaggcctgggagcggattgacaagaaagtggaaggcctgagcaagcacatcaagctggaagaggaacggagaagcgaggacgcccagagcaaggccgccctgaccgactggctgcgggctaaggccagcttcgtgatcgagggcctgaaggaggccgacaaggacgagttctgcagatgcgagctgaagctgcagaagtggtacggggacctgcggggaaagcccttcgccatcgaagccgagaacagcatcctggacatcagcggcttcagcaagcagtacaactgtgccttcatctggcagaaggacggcgtgaagaagctgaacctgtacctgatcatcaactacttcaagggcggcaagctgcggttcaagaagatcaaacctgaagccttcgaagccaacagattctacaccgtgatcaacaaaaagagcggcgagatcgtgcccatggaggtgaacttcaacttcgacgaccccaacctgatcatcctgcctctggcctttggcaagagacagggcagagaattcatctggaacgacctgctgtccctggaaaccggcagcctgaagctggccaacggaagagtgatcgagaagacactgtacaacagaagaacccggcaggatgagcctgccctgttcgtggccctgaccttcgagcggcgggaggtcctggactcctccaatatcaaaccaatgaacctgatcggcgtggcaagaggcgaaaacatccccgccgtgatcgccctgaccgaccccgagggctgcccactgagccggtttaaggatagcctgggaaacccaacccacatcctgagaatcggcgagagctataaggagaagcagcggaccatccaggccaagaaggaggtggagcagcggagagccggcggctacagccggaagtacgccagcaaagccaagaatctggcagacgatatggtgagaaacaccgctagagatctgctgtactacgccgtgacccaggatgccatgctgatcttcgccaacctgagccggggcttcggccggcagggcaagcggaccttcatggccgagagacagtacacacggatggaggactggctgaccgccaagctggcctacgagggcctgagcaagacctacctgtccaagacactggcccagtacacctccaagacatgcagcaactgtgggtttaccatcaccagcgccgactacgacagggtgctggagaagctgaagaagacagcaacaggctggatgaccacaattaacggcaaggagctgaaggtggagggccagattacctactacaacagatacaagagacagaacgtagtcaaggacctgtccgtcgagctggatagactgagcgaagaatctgtgaacaacgacatctcctcctggacaaagggcagaagcggagaagctctgagcctcctgaagaaaagattctcccatagacccgtgcaggagaagttcgtgtgcctgaactgcggcttcgagacacacgcagccgagcaagccgccctgaacatcgccagatcctggctgttcctgcggagccaggagtacaagaaataccagacaaacaagacaaccggcaacaccgataagagagccttcgtcgagacctggcagtccttttaccggaagaagcttaaggaggtgtggaaacctgccgtgcggtctggcggatctggcggaggctccaccagccccaagaaaaagagaaaagtctaagctgccttctgcggggcttgccttctggccatgcccttcttctctcccttgcacctgtacctcttggtctttgaataaagcctgagtaggaaggctagcaaaaaaaaaaaaaaaaaaaaaaaaaaaaaaaaaaaaaaaaaaaaaaaaaaaaaaaaaaaaaaaaaaaaaaaaaaaaaaaagcccagccggctccccaacctctaccgaggagggcacctctgagtccgccacccccgagagcggccctggcacctccaccgagcccagcgagggcagcgcacccggcagccctgccggcagccccacctccacagaggagggaaccagcaccgagcccagcgaaggcagcgccccaggcaccagcaccgagcctagtgagcaggagattaaacggatcaacaagatcagaagaagacttgtgaaagacagcaacaccaagaaggccggcaagacaggccccatgaaaaccctgctggttagagtgatgacacccgatctgagagagcggctggaaaacctgagaaagaagcctgaaaatatcccccagcccatcagcaatacatctagagccaacctgaataagctgctgaccgattacaccgaaatgaagaaggcgatcctgcatgtgtactgggaagagttccagaaggaccctgtgggcctgatgagccgggtggcccagcctgccagcaagaagatcgatcagaacaagctgaaacctgagatggacgagaagggcaacctgaccaccgccggctttgcctgctctcagtgtggccagcccctgttcgtgtacaagctggagcaggtgtctgagaagggcaaggcttacaccaactacttcggacggtgcaatgtggccgagcacgaaaagctgatcctgctggcccagctgaagcccgagaaggatagcgacgaagccgtgacatatagcctgggaaagtttgggcagagggccctggatttctacagcattcatgtgaccaaggagtccacccaccccgtgaagcccctggcccagatcgccggaaacagatacgcctccggacctgtgggaaaggccctgagcgacgcatgtatgggcacaatcgcctccttcctgtctaagtaccaggacatcatcatcgaacaccagaaggtggtgaagggcaaccagaagagactggagagcctgcgggagctggccggcaaggaaaacctggaataccctagcgtgaccctgccacctcagcctcacaccaaggagggcgttgatgcctacaacgaagtgatcgcccgggtgcgaatgtgggtgaacctgaacctgtggcagaagctgaagctaagcagagatgatgccaagcctctgctgagactgaagggattcccttcctttcctctggtcgagagacaggccaacgaagtggactggtgggacatggtgtgtaacgtgaagaagctgatcaacgagaaaaaggaggatggcaaggtgttttggcagaatctggctggctacaagagacaggaagccctgagaccatacctgagcagcgaggaagatcggaagaagggaaagaaattcgctcggtaccagctgggcgacctgctgctgcacctggaaaagaagcacggcgaggactggggaaaggtgtacgacgaggcctgggagcggattgacaagaaagtggaaggcctgagcaagcacatcaagctggaagaggaacggagaagcgaggacgcccagagcaaggccgccctgaccgactggctgcgggctaaggccagcttcgtgatcgagggcctgaaggaggccgacaaggacgagttctgcagatgcgagctgaagctgcagaagtggtacggggacctgcggggaaagcccttcgccatcgaagccgagaacagcatcctggacatcagcggcttcagcaagcagtacaactgtgccttcatctggcagaaggacggcgtgaagaagctgaacctgtacctgatcatcaactacttcaagggcggcaagctgcggttcaagaagatcaaacctgaagccttcgaagccaacagattctacaccgtgatcaacaaaaagagcggcgagatcgtgcccatggaggtgaacttcaacttcgacgaccccaacctgatcatcctgcctctggcctttggcaagagacagggcagagaattcatctggaacgacctgctgtccctggaaaccggcagcctgaagctggccaacggaagagtgatcgagaagacactgtacaacagaagaacccggcaggatgagcctgccctgttcgtggccctgaccttcgagcggcgggaggtcctggactcctccaatatcaaaccaatgaacctgatcggcgtggcaagaggcgaaaacatccccgccgtgatcgccctgaccgaccccgagggctgcccactgagccggtttaaggatagcctgggaaacccaacccacatcctgagaatcggcgagagctataaggagaagcagcggaccatccaggccaagaaggaggtggagcagcggagagccggcggctacagccggaagtacgccagcaaagccaagaatctggcagacgatatggtgagaaacaccgctagagatctgctgtactacgccgtgacccaggatgccatgctgatcttcgccaacctgagccggggcttcggccggcagggcaagcggaccttcatggccgagagacagtacacacggatggaggactggctgaccgccaagctggcctacgagggcctgagcaagacctacctgtccaagacactggcccagtacacctccaagacatgcagcaactgtgggtttaccatcaccagcgccgactacgacagggtgctggagaagctgaagaagacagcaacaggctggatgaccacaattaacggcaaggagctgaaggtggagggccagattacctactacaacagatacaagagacagaacgtagtcaaggacctgtccgtcgagctggatagactgagcgaagaatctgtgaacaacgacatctcctcctggacaaagggcagaagcggagaagctctgagcctcctgaagaaaagattctcccatagacccgtgcaggagaagttcgtgtgcctgaactgcggcttcgagacacacgcagccgagcaagccgccctgaacatcgccagatcctggctgttcctgcggagccaggagtacaagaaataccagacaaacaagacaaccggcaacaccgataagagagccttcgtcgagacctggcagtccttttaccggaagaagcttaaggaggtgtggaaacctgccgtgcggtctggcggatctggcggaggctccaccagccccaagaaaaagagaaaagtctaagctgccttctgcggggcttgccttctggccatgcccttcttctctcccttgcacctgtacctcttggtctttgaataaagcctgagtaggaaggctagcaaaaaaaaaaaaaaaaaaaaaaaaaaaaaaaaaaaaaaaaaaaaaaaaaaaaaaaaaaaaaaaaaaaaaaaaaaaaaaaa

SEQ ID NO: 9232 - RNA, 8787 nt, synthetic construct
  source 1..8787: mol_type = other RNA
aggaaataagagagaaaagaagagtaagaagaaatataagagccaccatggcccctaagaagaagcgtaaagtgagccggatgaaccacgaccaggagttcgacccccctaaggtgtaccctcccgtccccgccgagaagagaaagcccatccgggtcctgagcctgttcgatggcatcgccaccggtctgctggtgctgaaggacctgggcatccaggtggataggtacattgcctccgaggtgtgcgaggactccatcaccgtgggaatggtgcgtcatcagggcaagatcatgtacgtgggcgacgtgcggagcgtgacacagaagcatatccaggagtggggccctttcgacctggtgatcggcggcagcccttgcaatgacctgagcatcgtgaacccagcccggaagggcctgtacgagggaaccggcagactgttcttcgagttttacagactgctgcacgacgcccggcctaaggaaggcgacgaccggcccttcttttggctgttcgagaatgtggtggccatgggagtcagcgacaagcgggatattagccggttcctggagagcaaccccgtgatgatcgatgccaaggaagtgagcgccgcccaccgggccagatacttctggggcaatctgcctggcatgaacagacccctggccagcaccgtgaacgacaagctggagctgcaggagtgcctggagcacggccggatcgccaagttcagcaaggtgagaaccatcaccacccgaagcaacagcatcaaacaaggcaaggaccagcactttcctgtgttcatgaacgagaaggaggacatcctgtggtgtaccgagatggagagagtgttcgggttcccagtccactacacagatgtcagcaacatgtctagactggccagacagagactgctgggaagaagctggtccgtccctgtgatcagacacctgttcgcccctctgaaggagtacttcgcctgcgtgagcagcggcaacagcaacgccaacagccggggccccagcttctctagcggcctggtgccactgtccctgagagggagccacatgggccccatggagatctacaaaaccgtgagcgcctggaagcggcagcctgtgcgcgtgctgagcctgtttcggaatatcgataaagtcctgaaaagcctgggattcctggagagcggctctggctccggcggtggcaccctgaagtacgtggaggatgtgacaaacgtggtcagacgggatgtggagaagtggggccccttcgatctggtgtacggcagcacccaacccctgggcagctcttgtgaccggtgccctggctggtacatgtttcagttccaccggatcctgcagtacgccctgccgagacaggagtcccagcggccattcttttggattttcatggacaacttgctgctgaccgaggatgaccaggaaactaccactcggttcctgcagaccgaagccgtgaccctgcaggacgtgagaggccgggactaccagaacgccatgcgggtgtggtccaacatccctggactgaaaagcaagcacgcacctctgacccctaaagaagaggagtacctgcaggcccaggtgcggagcagaagcaagctggacgcccctaaggtggatctgctggtgaagaattgcctcctgcccctgagagagtacttcaagtatttcagccagaatagtctgcccctgggaggcagcggcggcggccagggcagcgtgatgttcagcgacgtgagcatcatcttcagccaggaggagtgggagtacctggacagggagcagaggaacctgtacaggaacgtgatgatggagaactacagcaacctggtgagcctggccggctgcttcatcagcaagcccgacgtgatcaccctgctggagcagggcaaggacccctggaaggtggtgaggaagggcaggaagaggtacagcgacctggagaccagccacggcggcccaagcagcggcgcccctcctcccagcggcggcaggcggcccaagcagcggcgcccctcctcccagcggcggcagcccagccggctccccaacctctaccgaggagggcacctctgagtccgccacccccgagagcggccctggcacctccaccgagcccagcgagggcagcgcacccggcagccctgccggcagccccacctccacagaggagggaaccagcaccgagcccagcgaaggcagcgccccaggcaccagcaccgagcctagtgagcaggagattaaacggatcaacaagatcagaagaagacttgtgaaagacagcaacaccaagaaggccggcaagacaggccccatgaaaaccctgctggttagagtgatgacacccgatctgagagagcggctggaaaacctgagaaagaagcctgaaaatatcccccagcccatcagcaatacatctagagccaacctgaataagctgctgaccgattacaccgaaatgaagaaggcgatcctgcatgtgtactgggaagagttccagaaggaccctgtgggcctgatgagccgggtggcccagcctgccagcaagaagatcgatcagaacaagctgaaacctgagatggacgagaagggcaacctgaccaccgccggctttgcctgctctcagtgtggccagcccctgttcgtgtacaagctggagcaggtgtctgagaagggcaaggcttacaccaactacttcggacggtgcaatgtggccgagcacgaaaagctgatcctgctggcccagctgaagcccgagaaggatagcgacgaagccgtgacatatagcctgggaaagtttgggcagagggccctggatttctacagcattcatgtgaccaaggagtccacccaccccgtgaagcccctggcccagatcgccggaaacagatacgcctccggacctgtgggaaaggccctgagcgacgcatgtatgggcacaatcgcctccttcctgtctaagtaccaggacatcatcatcgaacaccagaaggtggtgaagggcaaccagaagagactggagagcctgcgggagctggccggcaaggaaaacctggaataccctagcgtgaccctgccacctcagcctcacaccaaggagggcgttgatgcctacaacgaagtgatcgcccgggtgcgaatgtgggtgaacctgaacctgtggcagaagctgaagctaagcagagatgatgccaagcctctgctgagactgaagggattcccttcctttcctctggtcgagagacaggccaacgaagtggactggtgggacatggtgtgtaacgtgaagaagctgatcaacgagaaaaaggaggatggcaaggtgttttggcagaatctggctggctacaagagacaggaagccctgagaccatacctgagcagcgaggaagatcggaagaagggaaagaaattcgctcggtaccagctgggcgacctgctgctgcacctggaaaagaagcacggcgaggactggggaaaggtgtacgacgaggcctgggagcggattgacaagaaagtggaaggcctgagcaagcacatcaagctggaagaggaacggagaagcgaggacgcccagagcaaggccgccctgaccgactggctgcgggctaaggccagcttcgtgatcgagggcctgaaggaggccgacaaggacgagttctgcagatgcgagctgaagctgcagaagtggtacggggacctgcggggaaagcccttcgccatcgaagccgagaacagcatcctggacatcagcggcttcagcaagcagtacaactgtgccttcatctggcagaaggacggcgtgaagaagctgaacctgtacctgatcatcaactacttcaagggcggcaagctgcggttcaagaagatcaaacctgaagccttcgaagccaacagattctacaccgtgatcaacaaaaagagcggcgagatcgtgcccatggaggtgaacttcaacttcgacgaccccaacctgatcatcctgcctctggcctttggcaagagacagggcagagaattcatctggaacgacctgctgtccctggaaaccggcagcctgaagctggccaacggaagagtgatcgagaagacactgtacaacagaagaacccggcaggatgagcctgccctgttcgtggccctgaccttcgagcggcgggaggtcctggactcctccaatatcaaaccaatgaacctgatcggcgtggcaagaggcgaaaacatccccgccgtgatcgccctgaccgaccccgagggctgcccactgagccggtttaaggatagcctgggaaacccaacccacatcctgagaatcggcgagagctataaggagaagcagcggaccatccaggccaagaaggaggtggagcagcggagagccggcggctacagccggaagtacgccagcaaagccaagaatctggcagacgatatggtgagaaacaccgctagagatctgctgtactacgccgtgacccaggatgccatgctgatcttcgccaacctgagccggggcttcggccggcagggcaagcggaccttcatggccgagagacagtacacacggatggaggactggctgaccgccaagctggcctacgagggcctgagcaagacctacctgtccaagacactggcccagtacacctccaagacatgcagcaactgtgggtttaccatcaccagcgccgactacgacagggtgctggagaagctgaagaagacagcaacaggctggatgaccacaattaacggcaaggagctgaaggtggagggccagattacctactacaacagatacaagagacagaacgtagtcaaggacctgtccgtcgagctggatagactgagcgaagaatctgtgaacaacgacatctcctcctggacaaagggcagaagcggagaagctctgagcctcctgaagaaaagattctcccatagacccgtgcaggagaagttcgtgtgcctgaactgcggcttcgagacacacgcagccgagcaagccgccctgaacatcgccagatcctggctgttcctgcggagccaggagtacaagaaataccagacaaacaagacaaccggcaacaccgataagagagccttcgtcgagacctggcagtccttttaccggaagaagcttaaggaggtgtggaaacctgccgtgcggtctggcggatctggcggaggctccaccagccccaagaaaaagagaaaagtctaagctgccttctgcggggcttgccttctggccatgcccttcttctctcccttgcacctgtacctcttggtctttgaataaagcctgagtaggaaggctagcaaaaaaaaaaaaaaaaaaaaaaaaaaaaaaaaaaaaaaaaaaaaaaaaaaaaaaaaaaaaaaaaaaaaaaaaaaaaaaaagcccagccggctccccaacctctaccgaggagggcacctctgagtccgccacccccgagagcggccctggcacctccaccgagcccagcgagggcagcgcacccggcagccctgccggcagccccacctccacagaggagggaaccagcaccgagcccagcgaaggcagcgccccaggcaccagcaccgagcctagtgagcaggagattaaacggatcaacaagatcagaagaagacttgtgaaagacagcaacaccaagaaggccggcaagacaggccccatgaaaaccctgctggttagagtgatgacacccgatctgagagagcggctggaaaacctgagaaagaagcctgaaaatatcccccagcccatcagcaatacatctagagccaacctgaataagctgctgaccgattacaccgaaatgaagaaggcgatcctgcatgtgtactgggaagagttccagaaggaccctgtgggcctgatgagccgggtggcccagcctgccagcaagaagatcgatcagaacaagctgaaacctgagatggacgagaagggcaacctgaccaccgccggctttgcctgctctcagtgtggccagcccctgttcgtgtacaagctggagcaggtgtctgagaagggcaaggcttacaccaactacttcggacggtgcaatgtggccgagcacgaaaagctgatcctgctggcccagctgaagcccgagaaggatagcgacgaagccgtgacatatagcctgggaaagtttgggcagagggccctggatttctacagcattcatgtgaccaaggagtccacccaccccgtgaagcccctggcccagatcgccggaaacagatacgcctccggacctgtgggaaaggccctgagcgacgcatgtatgggcacaatcgcctccttcctgtctaagtaccaggacatcatcatcgaacaccagaaggtggtgaagggcaaccagaagagactggagagcctgcgggagctggccggcaaggaaaacctggaataccctagcgtgaccctgccacctcagcctcacaccaaggagggcgttgatgcctacaacgaagtgatcgcccgggtgcgaatgtgggtgaacctgaacctgtggcagaagctgaagctaagcagagatgatgccaagcctctgctgagactgaagggattcccttcctttcctctggtcgagagacaggccaacgaagtggactggtgggacatggtgtgtaacgtgaagaagctgatcaacgagaaaaaggaggatggcaaggtgttttggcagaatctggctggctacaagagacaggaagccctgagaccatacctgagcagcgaggaagatcggaagaagggaaagaaattcgctcggtaccagctgggcgacctgctgctgcacctggaaaagaagcacggcgaggactggggaaaggtgtacgacgaggcctgggagcggattgacaagaaagtggaaggcctgagcaagcacatcaagctggaagaggaacggagaagcgaggacgcccagagcaaggccgccctgaccgactggctgcgggctaaggccagcttcgtgatcgagggcctgaaggaggccgacaaggacgagttctgcagatgcgagctgaagctgcagaagtggtacggggacctgcggggaaagcccttcgccatcgaagccgagaacagcatcctggacatcagcggcttcagcaagcagtacaactgtgccttcatctggcagaaggacggcgtgaagaagctgaacctgtacctgatcatcaactacttcaagggcggcaagctgcggttcaagaagatcaaacctgaagccttcgaagccaacagattctacaccgtgatcaacaaaaagagcggcgagatcgtgcccatggaggtgaacttcaacttcgacgaccccaacctgatcatcctgcctctggcctttggcaagagacagggcagagaattcatctggaacgacctgctgtccctggaaaccggcagcctgaagctggccaacggaagagtgatcgagaagacactgtacaacagaagaacccggcaggatgagcctgccctgttcgtggccctgaccttcgagcggcgggaggtcctggactcctccaatatcaaaccaatgaacctgatcggcgtggcaagaggcgaaaacatccccgccgtgatcgccctgaccgaccccgagggctgcccactgagccggtttaaggatagcctgggaaacccaacccacatcctgagaatcggcgagagctataaggagaagcagcggaccatccaggccaagaaggaggtggagcagcggagagccggcggctacagccggaagtacgccagcaaagccaagaatctggcagacgatatggtgagaaacaccgctagagatctgctgtactacgccgtgacccaggatgccatgctgatcttcgccaacctgagccggggcttcggccggcagggcaagcggaccttcatggccgagagacagtacacacggatggaggactggctgaccgccaagctggcctacgagggcctgagcaagacctacctgtccaagacactggcccagtacacctccaagacatgcagcaactgtgggtttaccatcaccagcgccgactacgacagggtgctggagaagctgaagaagacagcaacaggctggatgaccacaattaacggcaaggagctgaaggtggagggccagattacctactacaacagatacaagagacagaacgtagtcaaggacctgtccgtcgagctggatagactgagcgaagaatctgtgaacaacgacatctcctcctggacaaagggcagaagcggagaagctctgagcctcctgaagaaaagattctcccatagacccgtgcaggagaagttcgtgtgcctgaactgcggcttcgagacacacgcagccgagcaagccgccctgaacatcgccagatcctggctgttcctgcggagccaggagtacaagaaataccagacaaacaagacaaccggcaacaccgataagagagccttcgtcgagacctggcagtccttttaccggaagaagcttaaggaggtgtggaaacctgccgtgcggtctggcggatctggcggaggctccaccagccccaagaaaaagagaaaagtctaagctgccttctgcggggcttgccttctggccatgcccttcttctctcccttgcacctgtacctcttggtctttgaataaagcctgagtaggaaggctagcaaaaaaaaaaaaaaaaaaaaaaaaaaaaaaaaaaaaaaaaaaaaaaaaaaaaaaaaaaaaaaaaaaaaaaaaaaaaaaaa

SEQ ID NO: 9233 - RNA, 8787 nt, synthetic construct
  source 1..8787: mol_type = other RNA
aggaaataagagagaaaagaagagtaagaagaaatataagagccaccatggcccctaagaagaagcgtaaagtgagccggatgaaccacgaccaggagttcgacccccctaaggtgtaccctcccgtccccgccgagaagagaaagcccatccgggtcctgagcctgttcgatggcatcgccaccggtctgctggtgctgaaggacctgggcatccaggtggataggtacattgcctccgaggtgtgcgaggactccatcaccgtgggaatggtgcgtcatcagggcaagatcatgtacgtgggcgacgtgcggagcgtgacacagaagcatatccaggagtggggccctttcgacctggtgatcggcggcagcccttgcaatgacctgagcatcgtgaacccagcccggaagggcctgtacgagggaaccggcagactgttcttcgagttttacagactgctgcacgacgcccggcctaaggaaggcgacgaccggcccttcttttggctgttcgagaatgtggtggccatgggagtcagcgacaagcgggatattagccggttcctggagagcaaccccgtgatgatcgatgccaaggaagtgagcgccgcccaccgggccagatacttctggggcaatctgcctggcatgaacagacccctggccagcaccgtgaacgacaagctggagctgcaggagtgcctggagcacggccggatcgccaagttcagcaaggtgagaaccatcaccacccgaagcaacagcatcaaacaaggcaaggaccagcactttcctgtgttcatgaacgagaaggaggacatcctgtggtgtaccgagatggagagagtgttcgggttcccagtccactacacagatgtcagcaacatgtctagactggccagacagagactgctgggaagaagctggtccgtccctgtgatcagacacctgttcgcccctctgaaggagtacttcgcctgcgtgagcagcggcaacagcaacgccaacagccggggccccagcttctctagcggcctggtgccactgtccctgagagggagccacatgggccccatggagatctacaaaaccgtgagcgcctggaagcggcagcctgtgcgcgtgctgagcctgtttcggaatatcgataaagtcctgaaaagcctgggattcctggagagcggctctggctccggcggtggcaccctgaagtacgtggaggatgtgacaaacgtggtcagacgggatgtggagaagtggggccccttcgatctggtgtacggcagcacccaacccctgggcagctcttgtgaccggtgccctggctggtacatgtttcagttccaccggatcctgcagtacgccctgccgagacaggagtcccagcggccattcttttggattttcatggacaacttgctgctgaccgaggatgaccaggaaactaccactcggttcctgcagaccgaagccgtgaccctgcaggacgtgagaggccgggactaccagaacgccatgcgggtgtggtccaacatccctggactgaaaagcaagcacgcacctctgacccctaaagaagaggagtacctgcaggcccaggtgcggagcagaagcaagctggacgcccctaaggtggatctgctggtgaagaattgcctcctgcccctgagagagtacttcaagtatttcagccagaatagtctgcccctgggaggcagcggcggcggcacccagggcagcctgaccttcaaggacgtggccatcgagttcagccaggaggagtggaagtgcctggaccccgtgcagaaggccctgtacagggacgtgatgctggagaactacaggaacctgggcttcctgggcctgtgcctgcccgacctggacatcatcagcatgctggagcagggcaaggagccctggaccgtggtgagccaggtgaagatcaccaggaaccccaactgcggcgagtgcggcggcccaagcagcggcgcccctcctcccagcggcggcaggcggcccaagcagcggcgcccctcctcccagcggcggcagcccagccggctccccaacctctaccgaggagggcacctctgagtccgccacccccgagagcggccctggcacctccaccgagcccagcgagggcagcgcacccggcagccctgccggcagccccacctccacagaggagggaaccagcaccgagcccagcgaaggcagcgccccaggcaccagcaccgagcctagtgagcaggagattaaacggatcaacaagatcagaagaagacttgtgaaagacagcaacaccaagaaggccggcaagacaggccccatgaaaaccctgctggttagagtgatgacacccgatctgagagagcggctggaaaacctgagaaagaagcctgaaaatatcccccagcccatcagcaatacatctagagccaacctgaataagctgctgaccgattacaccgaaatgaagaaggcgatcctgcatgtgtactgggaagagttccagaaggaccctgtgggcctgatgagccgggtggcccagcctgccagcaagaagatcgatcagaacaagctgaaacctgagatggacgagaagggcaacctgaccaccgccggctttgcctgctctcagtgtggccagcccctgttcgtgtacaagctggagcaggtgtctgagaagggcaaggcttacaccaactacttcggacggtgcaatgtggccgagcacgaaaagctgatcctgctggcccagctgaagcccgagaaggatagcgacgaagccgtgacatatagcctgggaaagtttgggcagagggccctggatttctacagcattcatgtgaccaaggagtccacccaccccgtgaagcccctggcccagatcgccggaaacagatacgcctccggacctgtgggaaaggccctgagcgacgcatgtatgggcacaatcgcctccttcctgtctaagtaccaggacatcatcatcgaacaccagaaggtggtgaagggcaaccagaagagactggagagcctgcgggagctggccggcaaggaaaacctggaataccctagcgtgaccctgccacctcagcctcacaccaaggagggcgttgatgcctacaacgaagtgatcgcccgggtgcgaatgtgggtgaacctgaacctgtggcagaagctgaagctaagcagagatgatgccaagcctctgctgagactgaagggattcccttcctttcctctggtcgagagacaggccaacgaagtggactggtgggacatggtgtgtaacgtgaagaagctgatcaacgagaaaaaggaggatggcaaggtgttttggcagaatctggctggctacaagagacaggaagccctgagaccatacctgagcagcgaggaagatcggaagaagggaaagaaattcgctcggtaccagctgggcgacctgctgctgcacctggaaaagaagcacggcgaggactggggaaaggtgtacgacgaggcctgggagcggattgacaagaaagtggaaggcctgagcaagcacatcaagctggaagaggaacggagaagcgaggacgcccagagcaaggccgccctgaccgactggctgcgggctaaggccagcttcgtgatcgagggcctgaaggaggccgacaaggacgagttctgcagatgcgagctgaagctgcagaagtggtacggggacctgcggggaaagcccttcgccatcgaagccgagaacagcatcctggacatcagcggcttcagcaagcagtacaactgtgccttcatctggcagaaggacggcgtgaagaagctgaacctgtacctgatcatcaactacttcaagggcggcaagctgcggttcaagaagatcaaacctgaagccttcgaagccaacagattctacaccgtgatcaacaaaaagagcggcgagatcgtgcccatggaggtgaacttcaacttcgacgaccccaacctgatcatcctgcctctggcctttggcaagagacagggcagagaattcatctggaacgacctgctgtccctggaaaccggcagcctgaagctggccaacggaagagtgatcgagaagacactgtacaacagaagaacccggcaggatgagcctgccctgttcgtggccctgaccttcgagcggcgggaggtcctggactcctccaatatcaaaccaatgaacctgatcggcgtggcaagaggcgaaaacatccccgccgtgatcgccctgaccgaccccgagggctgcccactgagccggtttaaggatagcctgggaaacccaacccacatcctgagaatcggcgagagctataaggagaagcagcggaccatccaggccaagaaggaggtggagcagcggagagccggcggctacagccggaagtacgccagcaaagccaagaatctggcagacgatatggtgagaaacaccgctagagatctgctgtactacgccgtgacccaggatgccatgctgatcttcgccaacctgagccggggcttcggccggcagggcaagcggaccttcatggccgagagacagtacacacggatggaggactggctgaccgccaagctggcctacgagggcctgagcaagacctacctgtccaagacactggcccagtacacctccaagacatgcagcaactgtgggtttaccatcaccagcgccgactacgacagggtgctggagaagctgaagaagacagcaacaggctggatgaccacaattaacggcaaggagctgaaggtggagggccagattacctactacaacagatacaagagacagaacgtagtcaaggacctgtccgtcgagctggatagactgagcgaagaatctgtgaacaacgacatctcctcctggacaaagggcagaagcggagaagctctgagcctcctgaagaaaagattctcccatagacccgtgcaggagaagttcgtgtgcctgaactgcggcttcgagacacacgcagccgagcaagccgccctgaacatcgccagatcctggctgttcctgcggagccaggagtacaagaaataccagacaaacaagacaaccggcaacaccgataagagagccttcgtcgagacctggcagtccttttaccggaagaagcttaaggaggtgtggaaacctgccgtgcggtctggcggatctggcggaggctccaccagccccaagaaaaagagaaaagtctaagctgccttctgcggggcttgccttctggccatgcccttcttctctcccttgcacctgtacctcttggtctttgaataaagcctgagtaggaaggctagcaaaaaaaaaaaaaaaaaaaaaaaaaaaaaaaaaaaaaaaaaaaaaaaaaaaaaaaaaaaaaaaaaaaaaaaaaaaaaaaagcccagccggctccccaacctctaccgaggagggcacctctgagtccgccacccccgagagcggccctggcacctccaccgagcccagcgagggcagcgcacccggcagccctgccggcagccccacctccacagaggagggaaccagcaccgagcccagcgaaggcagcgccccaggcaccagcaccgagcctagtgagcaggagattaaacggatcaacaagatcagaagaagacttgtgaaagacagcaacaccaagaaggccggcaagacaggccccatgaaaaccctgctggttagagtgatgacacccgatctgagagagcggctggaaaacctgagaaagaagcctgaaaatatcccccagcccatcagcaatacatctagagccaacctgaataagctgctgaccgattacaccgaaatgaagaaggcgatcctgcatgtgtactgggaagagttccagaaggaccctgtgggcctgatgagccgggtggcccagcctgccagcaagaagatcgatcagaacaagctgaaacctgagatggacgagaagggcaacctgaccaccgccggctttgcctgctctcagtgtggccagcccctgttcgtgtacaagctggagcaggtgtctgagaagggcaaggcttacaccaactacttcggacggtgcaatgtggccgagcacgaaaagctgatcctgctggcccagctgaagcccgagaaggatagcgacgaagccgtgacatatagcctgggaaagtttgggcagagggccctggatttctacagcattcatgtgaccaaggagtccacccaccccgtgaagcccctggcccagatcgccggaaacagatacgcctccggacctgtgggaaaggccctgagcgacgcatgtatgggcacaatcgcctccttcctgtctaagtaccaggacatcatcatcgaacaccagaaggtggtgaagggcaaccagaagagactggagagcctgcgggagctggccggcaaggaaaacctggaataccctagcgtgaccctgccacctcagcctcacaccaaggagggcgttgatgcctacaacgaagtgatcgcccgggtgcgaatgtgggtgaacctgaacctgtggcagaagctgaagctaagcagagatgatgccaagcctctgctgagactgaagggattcccttcctttcctctggtcgagagacaggccaacgaagtggactggtgggacatggtgtgtaacgtgaagaagctgatcaacgagaaaaaggaggatggcaaggtgttttggcagaatctggctggctacaagagacaggaagccctgagaccatacctgagcagcgaggaagatcggaagaagggaaagaaattcgctcggtaccagctgggcgacctgctgctgcacctggaaaagaagcacggcgaggactggggaaaggtgtacgacgaggcctgggagcggattgacaagaaagtggaaggcctgagcaagcacatcaagctggaagaggaacggagaagcgaggacgcccagagcaaggccgccctgaccgactggctgcgggctaaggccagcttcgtgatcgagggcctgaaggaggccgacaaggacgagttctgcagatgcgagctgaagctgcagaagtggtacggggacctgcggggaaagcccttcgccatcgaagccgagaacagcatcctggacatcagcggcttcagcaagcagtacaactgtgccttcatctggcagaaggacggcgtgaagaagctgaacctgtacctgatcatcaactacttcaagggcggcaagctgcggttcaagaagatcaaacctgaagccttcgaagccaacagattctacaccgtgatcaacaaaaagagcggcgagatcgtgcccatggaggtgaacttcaacttcgacgaccccaacctgatcatcctgcctctggcctttggcaagagacagggcagagaattcatctggaacgacctgctgtccctggaaaccggcagcctgaagctggccaacggaagagtgatcgagaagacactgtacaacagaagaacccggcaggatgagcctgccctgttcgtggccctgaccttcgagcggcgggaggtcctggactcctccaatatcaaaccaatgaacctgatcggcgtggcaagaggcgaaaacatccccgccgtgatcgccctgaccgaccccgagggctgcccactgagccggtttaaggatagcctgggaaacccaacccacatcctgagaatcggcgagagctataaggagaagcagcggaccatccaggccaagaaggaggtggagcagcggagagccggcggctacagccggaagtacgccagcaaagccaagaatctggcagacgatatggtgagaaacaccgctagagatctgctgtactacgccgtgacccaggatgccatgctgatcttcgccaacctgagccggggcttcggccggcagggcaagcggaccttcatggccgagagacagtacacacggatggaggactggctgaccgccaagctggcctacgagggcctgagcaagacctacctgtccaagacactggcccagtacacctccaagacatgcagcaactgtgggtttaccatcaccagcgccgactacgacagggtgctggagaagctgaagaagacagcaacaggctggatgaccacaattaacggcaaggagctgaaggtggagggccagattacctactacaacagatacaagagacagaacgtagtcaaggacctgtccgtcgagctggatagactgagcgaagaatctgtgaacaacgacatctcctcctggacaaagggcagaagcggagaagctctgagcctcctgaagaaaagattctcccatagacccgtgcaggagaagttcgtgtgcctgaactgcggcttcgagacacacgcagccgagcaagccgccctgaacatcgccagatcctggctgttcctgcggagccaggagtacaagaaataccagacaaacaagacaaccggcaacaccgataagagagccttcgtcgagacctggcagtccttttaccggaagaagcttaaggaggtgtggaaacctgccgtgcggtctggcggatctggcggaggctccaccagccccaagaaaaagagaaaagtctaagctgccttctgcggggcttgccttctggccatgcccttcttctctcccttgcacctgtacctcttggtctttgaataaagcctgagtaggaaggctagcaaaaaaaaaaaaaaaaaaaaaaaaaaaaaaaaaaaaaaaaaaaaaaaaaaaaaaaaaaaaaaaaaaaaaaaaaaaaaaaa

SEQ ID NO: 9234 - RNA, 8787 nt, synthetic construct
  source 1..8787: mol_type = other RNA
aggaaataagagagaaaagaagagtaagaagaaatataagagccaccatggcccctaagaagaagcgtaaagtgagccggatgaaccacgaccaggagttcgacccccctaaggtgtaccctcccgtccccgccgagaagagaaagcccatccgggtcctgagcctgttcgatggcatcgccaccggtctgctggtgctgaaggacctgggcatccaggtggataggtacattgcctccgaggtgtgcgaggactccatcaccgtgggaatggtgcgtcatcagggcaagatcatgtacgtgggcgacgtgcggagcgtgacacagaagcatatccaggagtggggccctttcgacctggtgatcggcggcagcccttgcaatgacctgagcatcgtgaacccagcccggaagggcctgtacgagggaaccggcagactgttcttcgagttttacagactgctgcacgacgcccggcctaaggaaggcgacgaccggcccttcttttggctgttcgagaatgtggtggccatgggagtcagcgacaagcgggatattagccggttcctggagagcaaccccgtgatgatcgatgccaaggaagtgagcgccgcccaccgggccagatacttctggggcaatctgcctggcatgaacagacccctggccagcaccgtgaacgacaagctggagctgcaggagtgcctggagcacggccggatcgccaagttcagcaaggtgagaaccatcaccacccgaagcaacagcatcaaacaaggcaaggaccagcactttcctgtgttcatgaacgagaaggaggacatcctgtggtgtaccgagatggagagagtgttcgggttcccagtccactacacagatgtcagcaacatgtctagactggccagacagagactgctgggaagaagctggtccgtccctgtgatcagacacctgttcgcccctctgaaggagtacttcgcctgcgtgagcagcggcaacagcaacgccaacagccggggccccagcttctctagcggcctggtgccactgtccctgagagggagccacatgggccccatggagatctacaaaaccgtgagcgcctggaagcggcagcctgtgcgcgtgctgagcctgtttcggaatatcgataaagtcctgaaaagcctgggattcctggagagcggctctggctccggcggtggcaccctgaagtacgtggaggatgtgacaaacgtggtcagacgggatgtggagaagtggggccccttcgatctggtgtacggcagcacccaacccctgggcagctcttgtgaccggtgccctggctggtacatgtttcagttccaccggatcctgcagtacgccctgccgagacaggagtcccagcggccattcttttggattttcatggacaacttgctgctgaccgaggatgaccaggaaactaccactcggttcctgcagaccgaagccgtgaccctgcaggacgtgagaggccgggactaccagaacgccatgcgggtgtggtccaacatccctggactgaaaagcaagcacgcacctctgacccctaaagaagaggagtacctgcaggcccaggtgcggagcagaagcaagctggacgcccctaaggtggatctgctggtgaagaattgcctcctgcccctgagagagtacttcaagtatttcagccagaatagtctgcccctgggaggcagcggcggcggcttcaaggagctggtggtgttcagggacgtggccgtggagttctgcaaggaggagtgggagtgcctgggccccgagcagaggagcctgtacagggacgtgatgctggagaactacagcaacttcgtgagcctgggcctggccatcagcaagcccaccatcatcagcctgctggagcagggcaaggagccctggatcgtggagcaggccggctggtaccccgacctgctgagcgagaacgaggccggcggcccaagcagcggcgcccctcctcccagcggcggcaggcggcccaagcagcggcgcccctcctcccagcggcggcagcccagccggctccccaacctctaccgaggagggcacctctgagtccgccacccccgagagcggccctggcacctccaccgagcccagcgagggcagcgcacccggcagccctgccggcagccccacctccacagaggagggaaccagcaccgagcccagcgaaggcagcgccccaggcaccagcaccgagcctagtgagcaggagattaaacggatcaacaagatcagaagaagacttgtgaaagacagcaacaccaagaaggccggcaagacaggccccatgaaaaccctgctggttagagtgatgacacccgatctgagagagcggctggaaaacctgagaaagaagcctgaaaatatcccccagcccatcagcaatacatctagagccaacctgaataagctgctgaccgattacaccgaaatgaagaaggcgatcctgcatgtgtactgggaagagttccagaaggaccctgtgggcctgatgagccgggtggcccagcctgccagcaagaagatcgatcagaacaagctgaaacctgagatggacgagaagggcaacctgaccaccgccggctttgcctgctctcagtgtggccagcccctgttcgtgtacaagctggagcaggtgtctgagaagggcaaggcttacaccaactacttcggacggtgcaatgtggccgagcacgaaaagctgatcctgctggcccagctgaagcccgagaaggatagcgacgaagccgtgacatatagcctgggaaagtttgggcagagggccctggatttctacagcattcatgtgaccaaggagtccacccaccccgtgaagcccctggcccagatcgccggaaacagatacgcctccggacctgtgggaaaggccctgagcgacgcatgtatgggcacaatcgcctccttcctgtctaagtaccaggacatcatcatcgaacaccagaaggtggtgaagggcaaccagaagagactggagagcctgcgggagctggccggcaaggaaaacctggaataccctagcgtgaccctgccacctcagcctcacaccaaggagggcgttgatgcctacaacgaagtgatcgcccgggtgcgaatgtgggtgaacctgaacctgtggcagaagctgaagctaagcagagatgatgccaagcctctgctgagactgaagggattcccttcctttcctctggtcgagagacaggccaacgaagtggactggtgggacatggtgtgtaacgtgaagaagctgatcaacgagaaaaaggaggatggcaaggtgttttggcagaatctggctggctacaagagacaggaagccctgagaccatacctgagcagcgaggaagatcggaagaagggaaagaaattcgctcggtaccagctgggcgacctgctgctgcacctggaaaagaagcacggcgaggactggggaaaggtgtacgacgaggcctgggagcggattgacaagaaagtggaaggcctgagcaagcacatcaagctggaagaggaacggagaagcgaggacgcccagagcaaggccgccctgaccgactggctgcgggctaaggccagcttcgtgatcgagggcctgaaggaggccgacaaggacgagttctgcagatgcgagctgaagctgcagaagtggtacggggacctgcggggaaagcccttcgccatcgaagccgagaacagcatcctggacatcagcggcttcagcaagcagtacaactgtgccttcatctggcagaaggacggcgtgaagaagctgaacctgtacctgatcatcaactacttcaagggcggcaagctgcggttcaagaagatcaaacctgaagccttcgaagccaacagattctacaccgtgatcaacaaaaagagcggcgagatcgtgcccatggaggtgaacttcaacttcgacgaccccaacctgatcatcctgcctctggcctttggcaagagacagggcagagaattcatctggaacgacctgctgtccctggaaaccggcagcctgaagctggccaacggaagagtgatcgagaagacactgtacaacagaagaacccggcaggatgagcctgccctgttcgtggccctgaccttcgagcggcgggaggtcctggactcctccaatatcaaaccaatgaacctgatcggcgtggcaagaggcgaaaacatccccgccgtgatcgccctgaccgaccccgagggctgcccactgagccggtttaaggatagcctgggaaacccaacccacatcctgagaatcggcgagagctataaggagaagcagcggaccatccaggccaagaaggaggtggagcagcggagagccggcggctacagccggaagtacgccagcaaagccaagaatctggcagacgatatggtgagaaacaccgctagagatctgctgtactacgccgtgacccaggatgccatgctgatcttcgccaacctgagccggggcttcggccggcagggcaagcggaccttcatggccgagagacagtacacacggatggaggactggctgaccgccaagctggcctacgagggcctgagcaagacctacctgtccaagacactggcccagtacacctccaagacatgcagcaactgtgggtttaccatcaccagcgccgactacgacagggtgctggagaagctgaagaagacagcaacaggctggatgaccacaattaacggcaaggagctgaaggtggagggccagattacctactacaacagatacaagagacagaacgtagtcaaggacctgtccgtcgagctggatagactgagcgaagaatctgtgaacaacgacatctcctcctggacaaagggcagaagcggagaagctctgagcctcctgaagaaaagattctcccatagacccgtgcaggagaagttcgtgtgcctgaactgcggcttcgagacacacgcagccgagcaagccgccctgaacatcgccagatcctggctgttcctgcggagccaggagtacaagaaataccagacaaacaagacaaccggcaacaccgataagagagccttcgtcgagacctggcagtccttttaccggaagaagcttaaggaggtgtggaaacctgccgtgcggtctggcggatctggcggaggctccaccagccccaagaaaaagagaaaagtctaagctgccttctgcggggcttgccttctggccatgcccttcttctctcccttgcacctgtacctcttggtctttgaataaagcctgagtaggaaggctagcaaaaaaaaaaaaaaaaaaaaaaaaaaaaaaaaaaaaaaaaaaaaaaaaaaaaaaaaaaaaaaaaaaaaaaaaaaaaaaaagcccagccggctccccaacctctaccgaggagggcacctctgagtccgccacccccgagagcggccctggcacctccaccgagcccagcgagggcagcgcacccggcagccctgccggcagccccacctccacagaggagggaaccagcaccgagcccagcgaaggcagcgccccaggcaccagcaccgagcctagtgagcaggagattaaacggatcaacaagatcagaagaagacttgtgaaagacagcaacaccaagaaggccggcaagacaggccccatgaaaaccctgctggttagagtgatgacacccgatctgagagagcggctggaaaacctgagaaagaagcctgaaaatatcccccagcccatcagcaatacatctagagccaacctgaataagctgctgaccgattacaccgaaatgaagaaggcgatcctgcatgtgtactgggaagagttccagaaggaccctgtgggcctgatgagccgggtggcccagcctgccagcaagaagatcgatcagaacaagctgaaacctgagatggacgagaagggcaacctgaccaccgccggctttgcctgctctcagtgtggccagcccctgttcgtgtacaagctggagcaggtgtctgagaagggcaaggcttacaccaactacttcggacggtgcaatgtggccgagcacgaaaagctgatcctgctggcccagctgaagcccgagaaggatagcgacgaagccgtgacatatagcctgggaaagtttgggcagagggccctggatttctacagcattcatgtgaccaaggagtccacccaccccgtgaagcccctggcccagatcgccggaaacagatacgcctccggacctgtgggaaaggccctgagcgacgcatgtatgggcacaatcgcctccttcctgtctaagtaccaggacatcatcatcgaacaccagaaggtggtgaagggcaaccagaagagactggagagcctgcgggagctggccggcaaggaaaacctggaataccctagcgtgaccctgccacctcagcctcacaccaaggagggcgttgatgcctacaacgaagtgatcgcccgggtgcgaatgtgggtgaacctgaacctgtggcagaagctgaagctaagcagagatgatgccaagcctctgctgagactgaagggattcccttcctttcctctggtcgagagacaggccaacgaagtggactggtgggacatggtgtgtaacgtgaagaagctgatcaacgagaaaaaggaggatggcaaggtgttttggcagaatctggctggctacaagagacaggaagccctgagaccatacctgagcagcgaggaagatcggaagaagggaaagaaattcgctcggtaccagctgggcgacctgctgctgcacctggaaaagaagcacggcgaggactggggaaaggtgtacgacgaggcctgggagcggattgacaagaaagtggaaggcctgagcaagcacatcaagctggaagaggaacggagaagcgaggacgcccagagcaaggccgccctgaccgactggctgcgggctaaggccagcttcgtgatcgagggcctgaaggaggccgacaaggacgagttctgcagatgcgagctgaagctgcagaagtggtacggggacctgcggggaaagcccttcgccatcgaagccgagaacagcatcctggacatcagcggcttcagcaagcagtacaactgtgccttcatctggcagaaggacggcgtgaagaagctgaacctgtacctgatcatcaactacttcaagggcggcaagctgcggttcaagaagatcaaacctgaagccttcgaagccaacagattctacaccgtgatcaacaaaaagagcggcgagatcgtgcccatggaggtgaacttcaacttcgacgaccccaacctgatcatcctgcctctggcctttggcaagagacagggcagagaattcatctggaacgacctgctgtccctggaaaccggcagcctgaagctggccaacggaagagtgatcgagaagacactgtacaacagaagaacccggcaggatgagcctgccctgttcgtggccctgaccttcgagcggcgggaggtcctggactcctccaatatcaaaccaatgaacctgatcggcgtggcaagaggcgaaaacatccccgccgtgatcgccctgaccgaccccgagggctgcccactgagccggtttaaggatagcctgggaaacccaacccacatcctgagaatcggcgagagctataaggagaagcagcggaccatccaggccaagaaggaggtggagcagcggagagccggcggctacagccggaagtacgccagcaaagccaagaatctggcagacgatatggtgagaaacaccgctagagatctgctgtactacgccgtgacccaggatgccatgctgatcttcgccaacctgagccggggcttcggccggcagggcaagcggaccttcatggccgagagacagtacacacggatggaggactggctgaccgccaagctggcctacgagggcctgagcaagacctacctgtccaagacactggcccagtacacctccaagacatgcagcaactgtgggtttaccatcaccagcgccgactacgacagggtgctggagaagctgaagaagacagcaacaggctggatgaccacaattaacggcaaggagctgaaggtggagggccagattacctactacaacagatacaagagacagaacgtagtcaaggacctgtccgtcgagctggatagactgagcgaagaatctgtgaacaacgacatctcctcctggacaaagggcagaagcggagaagctctgagcctcctgaagaaaagattctcccatagacccgtgcaggagaagttcgtgtgcctgaactgcggcttcgagacacacgcagccgagcaagccgccctgaacatcgccagatcctggctgttcctgcggagccaggagtacaagaaataccagacaaacaagacaaccggcaacaccgataagagagccttcgtcgagacctggcagtccttttaccggaagaagcttaaggaggtgtggaaacctgccgtgcggtctggcggatctggcggaggctccaccagccccaagaaaaagagaaaagtctaagctgccttctgcggggcttgccttctggccatgcccttcttctctcccttgcacctgtacctcttggtctttgaataaagcctgagtaggaaggctagcaaaaaaaaaaaaaaaaaaaaaaaaaaaaaaaaaaaaaaaaaaaaaaaaaaaaaaaaaaaaaaaaaaaaaaaaaaaaaaaa

SEQ ID NO: 9235 - RNA, 8787 nt, synthetic construct
  source 1..8787: mol_type = other RNA
aggaaataagagagaaaagaagagtaagaagaaatataagagccaccatggcccctaagaagaagcgtaaagtgagccggatgaaccacgaccaggagttcgacccccctaaggtgtaccctcccgtccccgccgagaagagaaagcccatccgggtcctgagcctgttcgatggcatcgccaccggtctgctggtgctgaaggacctgggcatccaggtggataggtacattgcctccgaggtgtgcgaggactccatcaccgtgggaatggtgcgtcatcagggcaagatcatgtacgtgggcgacgtgcggagcgtgacacagaagcatatccaggagtggggccctttcgacctggtgatcggcggcagcccttgcaatgacctgagcatcgtgaacccagcccggaagggcctgtacgagggaaccggcagactgttcttcgagttttacagactgctgcacgacgcccggcctaaggaaggcgacgaccggcccttcttttggctgttcgagaatgtggtggccatgggagtcagcgacaagcgggatattagccggttcctggagagcaaccccgtgatgatcgatgccaaggaagtgagcgccgcccaccgggccagatacttctggggcaatctgcctggcatgaacagacccctggccagcaccgtgaacgacaagctggagctgcaggagtgcctggagcacggccggatcgccaagttcagcaaggtgagaaccatcaccacccgaagcaacagcatcaaacaaggcaaggaccagcactttcctgtgttcatgaacgagaaggaggacatcctgtggtgtaccgagatggagagagtgttcgggttcccagtccactacacagatgtcagcaacatgtctagactggccagacagagactgctgggaagaagctggtccgtccctgtgatcagacacctgttcgcccctctgaaggagtacttcgcctgcgtgagcagcggcaacagcaacgccaacagccggggccccagcttctctagcggcctggtgccactgtccctgagagggagccacatgggccccatggagatctacaaaaccgtgagcgcctggaagcggcagcctgtgcgcgtgctgagcctgtttcggaatatcgataaagtcctgaaaagcctgggattcctggagagcggctctggctccggcggtggcaccctgaagtacgtggaggatgtgacaaacgtggtcagacgggatgtggagaagtggggccccttcgatctggtgtacggcagcacccaacccctgggcagctcttgtgaccggtgccctggctggtacatgtttcagttccaccggatcctgcagtacgccctgccgagacaggagtcccagcggccattcttttggattttcatggacaacttgctgctgaccgaggatgaccaggaaactaccactcggttcctgcagaccgaagccgtgaccctgcaggacgtgagaggccgggactaccagaacgccatgcgggtgtggtccaacatccctggactgaaaagcaagcacgcacctctgacccctaaagaagaggagtacctgcaggcccaggtgcggagcagaagcaagctggacgcccctaaggtggatctgctggtgaagaattgcctcctgcccctgagagagtacttcaagtatttcagccagaatagtctgcccctgggaggcagcggcggcggccccctggagaccgtgaccttcggcgacgtggtgctggacttcacccaggaggagtgggccctgctggacaccagccagaagaagctgttcagggacgtgatgctggagaacatccaccacctggtgagcgtgggctaccagatcagcaagagcgacgtgatcctgcagctggagcagggcaaggagctgtggagggagggcgagggcaggccccagggcaggggccccggcagcgagagccccggcggcccaagcagcggcgcccctcctcccagcggcggcaggcggcccaagcagcggcgcccctcctcccagcggcggcagcccagccggctccccaacctctaccgaggagggcacctctgagtccgccacccccgagagcggccctggcacctccaccgagcccagcgagggcagcgcacccggcagccctgccggcagccccacctccacagaggagggaaccagcaccgagcccagcgaaggcagcgccccaggcaccagcaccgagcctagtgagcaggagattaaacggatcaacaagatcagaagaagacttgtgaaagacagcaacaccaagaaggccggcaagacaggccccatgaaaaccctgctggttagagtgatgacacccgatctgagagagcggctggaaaacctgagaaagaagcctgaaaatatcccccagcccatcagcaatacatctagagccaacctgaataagctgctgaccgattacaccgaaatgaagaaggcgatcctgcatgtgtactgggaagagttccagaaggaccctgtgggcctgatgagccgggtggcccagcctgccagcaagaagatcgatcagaacaagctgaaacctgagatggacgagaagggcaacctgaccaccgccggctttgcctgctctcagtgtggccagcccctgttcgtgtacaagctggagcaggtgtctgagaagggcaaggcttacaccaactacttcggacggtgcaatgtggccgagcacgaaaagctgatcctgctggcccagctgaagcccgagaaggatagcgacgaagccgtgacatatagcctgggaaagtttgggcagagggccctggatttctacagcattcatgtgaccaaggagtccacccaccccgtgaagcccctggcccagatcgccggaaacagatacgcctccggacctgtgggaaaggccctgagcgacgcatgtatgggcacaatcgcctccttcctgtctaagtaccaggacatcatcatcgaacaccagaaggtggtgaagggcaaccagaagagactggagagcctgcgggagctggccggcaaggaaaacctggaataccctagcgtgaccctgccacctcagcctcacaccaaggagggcgttgatgcctacaacgaagtgatcgcccgggtgcgaatgtgggtgaacctgaacctgtggcagaagctgaagctaagcagagatgatgccaagcctctgctgagactgaagggattcccttcctttcctctggtcgagagacaggccaacgaagtggactggtgggacatggtgtgtaacgtgaagaagctgatcaacgagaaaaaggaggatggcaaggtgttttggcagaatctggctggctacaagagacaggaagccctgagaccatacctgagcagcgaggaagatcggaagaagggaaagaaattcgctcggtaccagctgggcgacctgctgctgcacctggaaaagaagcacggcgaggactggggaaaggtgtacgacgaggcctgggagcggattgacaagaaagtggaaggcctgagcaagcacatcaagctggaagaggaacggagaagcgaggacgcccagagcaaggccgccctgaccgactggctgcgggctaaggccagcttcgtgatcgagggcctgaaggaggccgacaaggacgagttctgcagatgcgagctgaagctgcagaagtggtacggggacctgcggggaaagcccttcgccatcgaagccgagaacagcatcctggacatcagcggcttcagcaagcagtacaactgtgccttcatctggcagaaggacggcgtgaagaagctgaacctgtacctgatcatcaactacttcaagggcggcaagctgcggttcaagaagatcaaacctgaagccttcgaagccaacagattctacaccgtgatcaacaaaaagagcggcgagatcgtgcccatggaggtgaacttcaacttcgacgaccccaacctgatcatcctgcctctggcctttggcaagagacagggcagagaattcatctggaacgacctgctgtccctggaaaccggcagcctgaagctggccaacggaagagtgatcgagaagacactgtacaacagaagaacccggcaggatgagcctgccctgttcgtggccctgaccttcgagcggcgggaggtcctggactcctccaatatcaaaccaatgaacctgatcggcgtggcaagaggcgaaaacatccccgccgtgatcgccctgaccgaccccgagggctgcccactgagccggtttaaggatagcctgggaaacccaacccacatcctgagaatcggcgagagctataaggagaagcagcggaccatccaggccaagaaggaggtggagcagcggagagccggcggctacagccggaagtacgccagcaaagccaagaatctggcagacgatatggtgagaaacaccgctagagatctgctgtactacgccgtgacccaggatgccatgctgatcttcgccaacctgagccggggcttcggccggcagggcaagcggaccttcatggccgagagacagtacacacggatggaggactggctgaccgccaagctggcctacgagggcctgagcaagacctacctgtccaagacactggcccagtacacctccaagacatgcagcaactgtgggtttaccatcaccagcgccgactacgacagggtgctggagaagctgaagaagacagcaacaggctggatgaccacaattaacggcaaggagctgaaggtggagggccagattacctactacaacagatacaagagacagaacgtagtcaaggacctgtccgtcgagctggatagactgagcgaagaatctgtgaacaacgacatctcctcctggacaaagggcagaagcggagaagctctgagcctcctgaagaaaagattctcccatagacccgtgcaggagaagttcgtgtgcctgaactgcggcttcgagacacacgcagccgagcaagccgccctgaacatcgccagatcctggctgttcctgcggagccaggagtacaagaaataccagacaaacaagacaaccggcaacaccgataagagagccttcgtcgagacctggcagtccttttaccggaagaagcttaaggaggtgtggaaacctgccgtgcggtctggcggatctggcggaggctccaccagccccaagaaaaagagaaaagtctaagctgccttctgcggggcttgccttctggccatgcccttcttctctcccttgcacctgtacctcttggtctttgaataaagcctgagtaggaaggctagcaaaaaaaaaaaaaaaaaaaaaaaaaaaaaaaaaaaaaaaaaaaaaaaaaaaaaaaaaaaaaaaaaaaaaaaaaaaaaaaagcccagccggctccccaacctctaccgaggagggcacctctgagtccgccacccccgagagcggccctggcacctccaccgagcccagcgagggcagcgcacccggcagccctgccggcagccccacctccacagaggagggaaccagcaccgagcccagcgaaggcagcgccccaggcaccagcaccgagcctagtgagcaggagattaaacggatcaacaagatcagaagaagacttgtgaaagacagcaacaccaagaaggccggcaagacaggccccatgaaaaccctgctggttagagtgatgacacccgatctgagagagcggctggaaaacctgagaaagaagcctgaaaatatcccccagcccatcagcaatacatctagagccaacctgaataagctgctgaccgattacaccgaaatgaagaaggcgatcctgcatgtgtactgggaagagttccagaaggaccctgtgggcctgatgagccgggtggcccagcctgccagcaagaagatcgatcagaacaagctgaaacctgagatggacgagaagggcaacctgaccaccgccggctttgcctgctctcagtgtggccagcccctgttcgtgtacaagctggagcaggtgtctgagaagggcaaggcttacaccaactacttcggacggtgcaatgtggccgagcacgaaaagctgatcctgctggcccagctgaagcccgagaaggatagcgacgaagccgtgacatatagcctgggaaagtttgggcagagggccctggatttctacagcattcatgtgaccaaggagtccacccaccccgtgaagcccctggcccagatcgccggaaacagatacgcctccggacctgtgggaaaggccctgagcgacgcatgtatgggcacaatcgcctccttcctgtctaagtaccaggacatcatcatcgaacaccagaaggtggtgaagggcaaccagaagagactggagagcctgcgggagctggccggcaaggaaaacctggaataccctagcgtgaccctgccacctcagcctcacaccaaggagggcgttgatgcctacaacgaagtgatcgcccgggtgcgaatgtgggtgaacctgaacctgtggcagaagctgaagctaagcagagatgatgccaagcctctgctgagactgaagggattcccttcctttcctctggtcgagagacaggccaacgaagtggactggtgggacatggtgtgtaacgtgaagaagctgatcaacgagaaaaaggaggatggcaaggtgttttggcagaatctggctggctacaagagacaggaagccctgagaccatacctgagcagcgaggaagatcggaagaagggaaagaaattcgctcggtaccagctgggcgacctgctgctgcacctggaaaagaagcacggcgaggactggggaaaggtgtacgacgaggcctgggagcggattgacaagaaagtggaaggcctgagcaagcacatcaagctggaagaggaacggagaagcgaggacgcccagagcaaggccgccctgaccgactggctgcgggctaaggccagcttcgtgatcgagggcctgaaggaggccgacaaggacgagttctgcagatgcgagctgaagctgcagaagtggtacggggacctgcggggaaagcccttcgccatcgaagccgagaacagcatcctggacatcagcggcttcagcaagcagtacaactgtgccttcatctggcagaaggacggcgtgaagaagctgaacctgtacctgatcatcaactacttcaagggcggcaagctgcggttcaagaagatcaaacctgaagccttcgaagccaacagattctacaccgtgatcaacaaaaagagcggcgagatcgtgcccatggaggtgaacttcaacttcgacgaccccaacctgatcatcctgcctctggcctttggcaagagacagggcagagaattcatctggaacgacctgctgtccctggaaaccggcagcctgaagctggccaacggaagagtgatcgagaagacactgtacaacagaagaacccggcaggatgagcctgccctgttcgtggccctgaccttcgagcggcgggaggtcctggactcctccaatatcaaaccaatgaacctgatcggcgtggcaagaggcgaaaacatccccgccgtgatcgccctgaccgaccccgagggctgcccactgagccggtttaaggatagcctgggaaacccaacccacatcctgagaatcggcgagagctataaggagaagcagcggaccatccaggccaagaaggaggtggagcagcggagagccggcggctacagccggaagtacgccagcaaagccaagaatctggcagacgatatggtgagaaacaccgctagagatctgctgtactacgccgtgacccaggatgccatgctgatcttcgccaacctgagccggggcttcggccggcagggcaagcggaccttcatggccgagagacagtacacacggatggaggactggctgaccgccaagctggcctacgagggcctgagcaagacctacctgtccaagacactggcccagtacacctccaagacatgcagcaactgtgggtttaccatcaccagcgccgactacgacagggtgctggagaagctgaagaagacagcaacaggctggatgaccacaattaacggcaaggagctgaaggtggagggccagattacctactacaacagatacaagagacagaacgtagtcaaggacctgtccgtcgagctggatagactgagcgaagaatctgtgaacaacgacatctcctcctggacaaagggcagaagcggagaagctctgagcctcctgaagaaaagattctcccatagacccgtgcaggagaagttcgtgtgcctgaactgcggcttcgagacacacgcagccgagcaagccgccctgaacatcgccagatcctggctgttcctgcggagccaggagtacaagaaataccagacaaacaagacaaccggcaacaccgataagagagccttcgtcgagacctggcagtccttttaccggaagaagcttaaggaggtgtggaaacctgccgtgcggtctggcggatctggcggaggctccaccagccccaagaaaaagagaaaagtctaagctgccttctgcggggcttgccttctggccatgcccttcttctctcccttgcacctgtacctcttggtctttgaataaagcctgagtaggaaggctagcaaaaaaaaaaaaaaaaaaaaaaaaaaaaaaaaaaaaaaaaaaaaaaaaaaaaaaaaaaaaaaaaaaaaaaaaaaaaaaaa

SEQ ID NO: 9236 - RNA, 8787 nt, synthetic construct
  source 1..8787: mol_type = other RNA
aggaaataagagagaaaagaagagtaagaagaaatataagagccaccatggcccctaagaagaagcgtaaagtgagccggatgaaccacgaccaggagttcgacccccctaaggtgtaccctcccgtccccgccgagaagagaaagcccatccgggtcctgagcctgttcgatggcatcgccaccggtctgctggtgctgaaggacctgggcatccaggtggataggtacattgcctccgaggtgtgcgaggactccatcaccgtgggaatggtgcgtcatcagggcaagatcatgtacgtgggcgacgtgcggagcgtgacacagaagcatatccaggagtggggccctttcgacctggtgatcggcggcagcccttgcaatgacctgagcatcgtgaacccagcccggaagggcctgtacgagggaaccggcagactgttcttcgagttttacagactgctgcacgacgcccggcctaaggaaggcgacgaccggcccttcttttggctgttcgagaatgtggtggccatgggagtcagcgacaagcgggatattagccggttcctggagagcaaccccgtgatgatcgatgccaaggaagtgagcgccgcccaccgggccagatacttctggggcaatctgcctggcatgaacagacccctggccagcaccgtgaacgacaagctggagctgcaggagtgcctggagcacggccggatcgccaagttcagcaaggtgagaaccatcaccacccgaagcaacagcatcaaacaaggcaaggaccagcactttcctgtgttcatgaacgagaaggaggacatcctgtggtgtaccgagatggagagagtgttcgggttcccagtccactacacagatgtcagcaacatgtctagactggccagacagagactgctgggaagaagctggtccgtccctgtgatcagacacctgttcgcccctctgaaggagtacttcgcctgcgtgagcagcggcaacagcaacgccaacagccggggccccagcttctctagcggcctggtgccactgtccctgagagggagccacatgggccccatggagatctacaaaaccgtgagcgcctggaagcggcagcctgtgcgcgtgctgagcctgtttcggaatatcgataaagtcctgaaaagcctgggattcctggagagcggctctggctccggcggtggcaccctgaagtacgtggaggatgtgacaaacgtggtcagacgggatgtggagaagtggggccccttcgatctggtgtacggcagcacccaacccctgggcagctcttgtgaccggtgccctggctggtacatgtttcagttccaccggatcctgcagtacgccctgccgagacaggagtcccagcggccattcttttggattttcatggacaacttgctgctgaccgaggatgaccaggaaactaccactcggttcctgcagaccgaagccgtgaccctgcaggacgtgagaggccgggactaccagaacgccatgcgggtgtggtccaacatccctggactgaaaagcaagcacgcacctctgacccctaaagaagaggagtacctgcaggcccaggtgcggagcagaagcaagctggacgcccctaaggtggatctgctggtgaagaattgcctcctgcccctgagagagtacttcaagtatttcagccagaatagtctgcccctgggaggcagcggcggcggcagccagggcctgctgaccttcaaggacgtggccatcgagttcagccccgaggagtgggagtacctggaccccccccagaggatgctgtacaggaccgtgatgctggagaaccacaggaacctggtgttcctgggcctggccgtgagcaagcccgacctgatcatgtgcctggagcagaggagggagccctggaacgtgaagagccacagcaagctggccaagagccccgccgtgaccagccacggcggcccaagcagcggcgcccctcctcccagcggcggcaggcggcccaagcagcggcgcccctcctcccagcggcggcagcccagccggctccccaacctctaccgaggagggcacctctgagtccgccacccccgagagcggccctggcacctccaccgagcccagcgagggcagcgcacccggcagccctgccggcagccccacctccacagaggagggaaccagcaccgagcccagcgaaggcagcgccccaggcaccagcaccgagcctagtgagcaggagattaaacggatcaacaagatcagaagaagacttgtgaaagacagcaacaccaagaaggccggcaagacaggccccatgaaaaccctgctggttagagtgatgacacccgatctgagagagcggctggaaaacctgagaaagaagcctgaaaatatcccccagcccatcagcaatacatctagagccaacctgaataagctgctgaccgattacaccgaaatgaagaaggcgatcctgcatgtgtactgggaagagttccagaaggaccctgtgggcctgatgagccgggtggcccagcctgccagcaagaagatcgatcagaacaagctgaaacctgagatggacgagaagggcaacctgaccaccgccggctttgcctgctctcagtgtggccagcccctgttcgtgtacaagctggagcaggtgtctgagaagggcaaggcttacaccaactacttcggacggtgcaatgtggccgagcacgaaaagctgatcctgctggcccagctgaagcccgagaaggatagcgacgaagccgtgacatatagcctgggaaagtttgggcagagggccctggatttctacagcattcatgtgaccaaggagtccacccaccccgtgaagcccctggcccagatcgccggaaacagatacgcctccggacctgtgggaaaggccctgagcgacgcatgtatgggcacaatcgcctccttcctgtctaagtaccaggacatcatcatcgaacaccagaaggtggtgaagggcaaccagaagagactggagagcctgcgggagctggccggcaaggaaaacctggaataccctagcgtgaccctgccacctcagcctcacaccaaggagggcgttgatgcctacaacgaagtgatcgcccgggtgcgaatgtgggtgaacctgaacctgtggcagaagctgaagctaagcagagatgatgccaagcctctgctgagactgaagggattcccttcctttcctctggtcgagagacaggccaacgaagtggactggtgggacatggtgtgtaacgtgaagaagctgatcaacgagaaaaaggaggatggcaaggtgttttggcagaatctggctggctacaagagacaggaagccctgagaccatacctgagcagcgaggaagatcggaagaagggaaagaaattcgctcggtaccagctgggcgacctgctgctgcacctggaaaagaagcacggcgaggactggggaaaggtgtacgacgaggcctgggagcggattgacaagaaagtggaaggcctgagcaagcacatcaagctggaagaggaacggagaagcgaggacgcccagagcaaggccgccctgaccgactggctgcgggctaaggccagcttcgtgatcgagggcctgaaggaggccgacaaggacgagttctgcagatgcgagctgaagctgcagaagtggtacggggacctgcggggaaagcccttcgccatcgaagccgagaacagcatcctggacatcagcggcttcagcaagcagtacaactgtgccttcatctggcagaaggacggcgtgaagaagctgaacctgtacctgatcatcaactacttcaagggcggcaagctgcggttcaagaagatcaaacctgaagccttcgaagccaacagattctacaccgtgatcaacaaaaagagcggcgagatcgtgcccatggaggtgaacttcaacttcgacgaccccaacctgatcatcctgcctctggcctttggcaagagacagggcagagaattcatctggaacgacctgctgtccctggaaaccggcagcctgaagctggccaacggaagagtgatcgagaagacactgtacaacagaagaacccggcaggatgagcctgccctgttcgtggccctgaccttcgagcggcgggaggtcctggactcctccaatatcaaaccaatgaacctgatcggcgtggcaagaggcgaaaacatccccgccgtgatcgccctgaccgaccccgagggctgcccactgagccggtttaaggatagcctgggaaacccaacccacatcctgagaatcggcgagagctataaggagaagcagcggaccatccaggccaagaaggaggtggagcagcggagagccggcggctacagccggaagtacgccagcaaagccaagaatctggcagacgatatggtgagaaacaccgctagagatctgctgtactacgccgtgacccaggatgccatgctgatcttcgccaacctgagccggggcttcggccggcagggcaagcggaccttcatggccgagagacagtacacacggatggaggactggctgaccgccaagctggcctacgagggcctgagcaagacctacctgtccaagacactggcccagtacacctccaagacatgcagcaactgtgggtttaccatcaccagcgccgactacgacagggtgctggagaagctgaagaagacagcaacaggctggatgaccacaattaacggcaaggagctgaaggtggagggccagattacctactacaacagatacaagagacagaacgtagtcaaggacctgtccgtcgagctggatagactgagcgaagaatctgtgaacaacgacatctcctcctggacaaagggcagaagcggagaagctctgagcctcctgaagaaaagattctcccatagacccgtgcaggagaagttcgtgtgcctgaactgcggcttcgagacacacgcagccgagcaagccgccctgaacatcgccagatcctggctgttcctgcggagccaggagtacaagaaataccagacaaacaagacaaccggcaacaccgataagagagccttcgtcgagacctggcagtccttttaccggaagaagcttaaggaggtgtggaaacctgccgtgcggtctggcggatctggcggaggctccaccagccccaagaaaaagagaaaagtctaagctgccttctgcggggcttgccttctggccatgcccttcttctctcccttgcacctgtacctcttggtctttgaataaagcctgagtaggaaggctagcaaaaaaaaaaaaaaaaaaaaaaaaaaaaaaaaaaaaaaaaaaaaaaaaaaaaaaaaaaaaaaaaaaaaaaaaaaaaaaaagcccagccggctccccaacctctaccgaggagggcacctctgagtccgccacccccgagagcggccctggcacctccaccgagcccagcgagggcagcgcacccggcagccctgccggcagccccacctccacagaggagggaaccagcaccgagcccagcgaaggcagcgccccaggcaccagcaccgagcctagtgagcaggagattaaacggatcaacaagatcagaagaagacttgtgaaagacagcaacaccaagaaggccggcaagacaggccccatgaaaaccctgctggttagagtgatgacacccgatctgagagagcggctggaaaacctgagaaagaagcctgaaaatatcccccagcccatcagcaatacatctagagccaacctgaataagctgctgaccgattacaccgaaatgaagaaggcgatcctgcatgtgtactgggaagagttccagaaggaccctgtgggcctgatgagccgggtggcccagcctgccagcaagaagatcgatcagaacaagctgaaacctgagatggacgagaagggcaacctgaccaccgccggctttgcctgctctcagtgtggccagcccctgttcgtgtacaagctggagcaggtgtctgagaagggcaaggcttacaccaactacttcggacggtgcaatgtggccgagcacgaaaagctgatcctgctggcccagctgaagcccgagaaggatagcgacgaagccgtgacatatagcctgggaaagtttgggcagagggccctggatttctacagcattcatgtgaccaaggagtccacccaccccgtgaagcccctggcccagatcgccggaaacagatacgcctccggacctgtgggaaaggccctgagcgacgcatgtatgggcacaatcgcctccttcctgtctaagtaccaggacatcatcatcgaacaccagaaggtggtgaagggcaaccagaagagactggagagcctgcgggagctggccggcaaggaaaacctggaataccctagcgtgaccctgccacctcagcctcacaccaaggagggcgttgatgcctacaacgaagtgatcgcccgggtgcgaatgtgggtgaacctgaacctgtggcagaagctgaagctaagcagagatgatgccaagcctctgctgagactgaagggattcccttcctttcctctggtcgagagacaggccaacgaagtggactggtgggacatggtgtgtaacgtgaagaagctgatcaacgagaaaaaggaggatggcaaggtgttttggcagaatctggctggctacaagagacaggaagccctgagaccatacctgagcagcgaggaagatcggaagaagggaaagaaattcgctcggtaccagctgggcgacctgctgctgcacctggaaaagaagcacggcgaggactggggaaaggtgtacgacgaggcctgggagcggattgacaagaaagtggaaggcctgagcaagcacatcaagctggaagaggaacggagaagcgaggacgcccagagcaaggccgccctgaccgactggctgcgggctaaggccagcttcgtgatcgagggcctgaaggaggccgacaaggacgagttctgcagatgcgagctgaagctgcagaagtggtacggggacctgcggggaaagcccttcgccatcgaagccgagaacagcatcctggacatcagcggcttcagcaagcagtacaactgtgccttcatctggcagaaggacggcgtgaagaagctgaacctgtacctgatcatcaactacttcaagggcggcaagctgcggttcaagaagatcaaacctgaagccttcgaagccaacagattctacaccgtgatcaacaaaaagagcggcgagatcgtgcccatggaggtgaacttcaacttcgacgaccccaacctgatcatcctgcctctggcctttggcaagagacagggcagagaattcatctggaacgacctgctgtccctggaaaccggcagcctgaagctggccaacggaagagtgatcgagaagacactgtacaacagaagaacccggcaggatgagcctgccctgttcgtggccctgaccttcgagcggcgggaggtcctggactcctccaatatcaaaccaatgaacctgatcggcgtggcaagaggcgaaaacatccccgccgtgatcgccctgaccgaccccgagggctgcccactgagccggtttaaggatagcctgggaaacccaacccacatcctgagaatcggcgagagctataaggagaagcagcggaccatccaggccaagaaggaggtggagcagcggagagccggcggctacagccggaagtacgccagcaaagccaagaatctggcagacgatatggtgagaaacaccgctagagatctgctgtactacgccgtgacccaggatgccatgctgatcttcgccaacctgagccggggcttcggccggcagggcaagcggaccttcatggccgagagacagtacacacggatggaggactggctgaccgccaagctggcctacgagggcctgagcaagacctacctgtccaagacactggcccagtacacctccaagacatgcagcaactgtgggtttaccatcaccagcgccgactacgacagggtgctggagaagctgaagaagacagcaacaggctggatgaccacaattaacggcaaggagctgaaggtggagggccagattacctactacaacagatacaagagacagaacgtagtcaaggacctgtccgtcgagctggatagactgagcgaagaatctgtgaacaacgacatctcctcctggacaaagggcagaagcggagaagctctgagcctcctgaagaaaagattctcccatagacccgtgcaggagaagttcgtgtgcctgaactgcggcttcgagacacacgcagccgagcaagccgccctgaacatcgccagatcctggctgttcctgcggagccaggagtacaagaaataccagacaaacaagacaaccggcaacaccgataagagagccttcgtcgagacctggcagtccttttaccggaagaagcttaaggaggtgtggaaacctgccgtgcggtctggcggatctggcggaggctccaccagccccaagaaaaagagaaaagtctaagctgccttctgcggggcttgccttctggccatgcccttcttctctcccttgcacctgtacctcttggtctttgaataaagcctgagtaggaaggctagcaaaaaaaaaaaaaaaaaaaaaaaaaaaaaaaaaaaaaaaaaaaaaaaaaaaaaaaaaaaaaaaaaaaaaaaaaaaaaaaa

SEQ ID NO: 9237 - RNA, 8787 nt, synthetic construct
  source 1..8787: mol_type = other RNA
aggaaataagagagaaaagaagagtaagaagaaatataagagccaccatggcccctaagaagaagcgtaaagtgagccggatgaaccacgaccaggagttcgacccccctaaggtgtaccctcccgtccccgccgagaagagaaagcccatccgggtcctgagcctgttcgatggcatcgccaccggtctgctggtgctgaaggacctgggcatccaggtggataggtacattgcctccgaggtgtgcgaggactccatcaccgtgggaatggtgcgtcatcagggcaagatcatgtacgtgggcgacgtgcggagcgtgacacagaagcatatccaggagtggggccctttcgacctggtgatcggcggcagcccttgcaatgacctgagcatcgtgaacccagcccggaagggcctgtacgagggaaccggcagactgttcttcgagttttacagactgctgcacgacgcccggcctaaggaaggcgacgaccggcccttcttttggctgttcgagaatgtggtggccatgggagtcagcgacaagcgggatattagccggttcctggagagcaaccccgtgatgatcgatgccaaggaagtgagcgccgcccaccgggccagatacttctggggcaatctgcctggcatgaacagacccctggccagcaccgtgaacgacaagctggagctgcaggagtgcctggagcacggccggatcgccaagttcagcaaggtgagaaccatcaccacccgaagcaacagcatcaaacaaggcaaggaccagcactttcctgtgttcatgaacgagaaggaggacatcctgtggtgtaccgagatggagagagtgttcgggttcccagtccactacacagatgtcagcaacatgtctagactggccagacagagactgctgggaagaagctggtccgtccctgtgatcagacacctgttcgcccctctgaaggagtacttcgcctgcgtgagcagcggcaacagcaacgccaacagccggggccccagcttctctagcggcctggtgccactgtccctgagagggagccacatgggccccatggagatctacaaaaccgtgagcgcctggaagcggcagcctgtgcgcgtgctgagcctgtttcggaatatcgataaagtcctgaaaagcctgggattcctggagagcggctctggctccggcggtggcaccctgaagtacgtggaggatgtgacaaacgtggtcagacgggatgtggagaagtggggccccttcgatctggtgtacggcagcacccaacccctgggcagctcttgtgaccggtgccctggctggtacatgtttcagttccaccggatcctgcagtacgccctgccgagacaggagtcccagcggccattcttttggattttcatggacaacttgctgctgaccgaggatgaccaggaaactaccactcggttcctgcagaccgaagccgtgaccctgcaggacgtgagaggccgggactaccagaacgccatgcgggtgtggtccaacatccctggactgaaaagcaagcacgcacctctgacccctaaagaagaggagtacctgcaggcccaggtgcggagcagaagcaagctggacgcccctaaggtggatctgctggtgaagaattgcctcctgcccctgagagagtacttcaagtatttcagccagaatagtctgcccctgggaggcagcggcggcggcagccaggagcccgtgaccttcgaggacgtggccgtgtacttcacccagaaccagtgggccagcctggaccccatgcagagggccctgtacctggaggtgatgctggagaactacgccaacatcaccagcctggccgccctgcccttccccaagcccgacctgatcctgcagctggagcagggcggcgccccctggggcctggacccctggacccccctggagggcgaggccctgggcggcgtgggcggcccaagcagcggcgcccctcctcccagcggcggcaggcggcccaagcagcggcgcccctcctcccagcggcggcagcccagccggctccccaacctctaccgaggagggcacctctgagtccgccacccccgagagcggccctggcacctccaccgagcccagcgagggcagcgcacccggcagccctgccggcagccccacctccacagaggagggaaccagcaccgagcccagcgaaggcagcgccccaggcaccagcaccgagcctagtgagcaggagattaaacggatcaacaagatcagaagaagacttgtgaaagacagcaacaccaagaaggccggcaagacaggccccatgaaaaccctgctggttagagtgatgacacccgatctgagagagcggctggaaaacctgagaaagaagcctgaaaatatcccccagcccatcagcaatacatctagagccaacctgaataagctgctgaccgattacaccgaaatgaagaaggcgatcctgcatgtgtactgggaagagttccagaaggaccctgtgggcctgatgagccgggtggcccagcctgccagcaagaagatcgatcagaacaagctgaaacctgagatggacgagaagggcaacctgaccaccgccggctttgcctgctctcagtgtggccagcccctgttcgtgtacaagctggagcaggtgtctgagaagggcaaggcttacaccaactacttcggacggtgcaatgtggccgagcacgaaaagctgatcctgctggcccagctgaagcccgagaaggatagcgacgaagccgtgacatatagcctgggaaagtttgggcagagggccctggatttctacagcattcatgtgaccaaggagtccacccaccccgtgaagcccctggcccagatcgccggaaacagatacgcctccggacctgtgggaaaggccctgagcgacgcatgtatgggcacaatcgcctccttcctgtctaagtaccaggacatcatcatcgaacaccagaaggtggtgaagggcaaccagaagagactggagagcctgcgggagctggccggcaaggaaaacctggaataccctagcgtgaccctgccacctcagcctcacaccaaggagggcgttgatgcctacaacgaagtgatcgcccgggtgcgaatgtgggtgaacctgaacctgtggcagaagctgaagctaagcagagatgatgccaagcctctgctgagactgaagggattcccttcctttcctctggtcgagagacaggccaacgaagtggactggtgggacatggtgtgtaacgtgaagaagctgatcaacgagaaaaaggaggatggcaaggtgttttggcagaatctggctggctacaagagacaggaagccctgagaccatacctgagcagcgaggaagatcggaagaagggaaagaaattcgctcggtaccagctgggcgacctgctgctgcacctggaaaagaagcacggcgaggactggggaaaggtgtacgacgaggcctgggagcggattgacaagaaagtggaaggcctgagcaagcacatcaagctggaagaggaacggagaagcgaggacgcccagagcaaggccgccctgaccgactggctgcgggctaaggccagcttcgtgatcgagggcctgaaggaggccgacaaggacgagttctgcagatgcgagctgaagctgcagaagtggtacggggacctgcggggaaagcccttcgccatcgaagccgagaacagcatcctggacatcagcggcttcagcaagcagtacaactgtgccttcatctggcagaaggacggcgtgaagaagctgaacctgtacctgatcatcaactacttcaagggcggcaagctgcggttcaagaagatcaaacctgaagccttcgaagccaacagattctacaccgtgatcaacaaaaagagcggcgagatcgtgcccatggaggtgaacttcaacttcgacgaccccaacctgatcatcctgcctctggcctttggcaagagacagggcagagaattcatctggaacgacctgctgtccctggaaaccggcagcctgaagctggccaacggaagagtgatcgagaagacactgtacaacagaagaacccggcaggatgagcctgccctgttcgtggccctgaccttcgagcggcgggaggtcctggactcctccaatatcaaaccaatgaacctgatcggcgtggcaagaggcgaaaacatccccgccgtgatcgccctgaccgaccccgagggctgcccactgagccggtttaaggatagcctgggaaacccaacccacatcctgagaatcggcgagagctataaggagaagcagcggaccatccaggccaagaaggaggtggagcagcggagagccggcggctacagccggaagtacgccagcaaagccaagaatctggcagacgatatggtgagaaacaccgctagagatctgctgtactacgccgtgacccaggatgccatgctgatcttcgccaacctgagccggggcttcggccggcagggcaagcggaccttcatggccgagagacagtacacacggatggaggactggctgaccgccaagctggcctacgagggcctgagcaagacctacctgtccaagacactggcccagtacacctccaagacatgcagcaactgtgggtttaccatcaccagcgccgactacgacagggtgctggagaagctgaagaagacagcaacaggctggatgaccacaattaacggcaaggagctgaaggtggagggccagattacctactacaacagatacaagagacagaacgtagtcaaggacctgtccgtcgagctggatagactgagcgaagaatctgtgaacaacgacatctcctcctggacaaagggcagaagcggagaagctctgagcctcctgaagaaaagattctcccatagacccgtgcaggagaagttcgtgtgcctgaactgcggcttcgagacacacgcagccgagcaagccgccctgaacatcgccagatcctggctgttcctgcggagccaggagtacaagaaataccagacaaacaagacaaccggcaacaccgataagagagccttcgtcgagacctggcagtccttttaccggaagaagcttaaggaggtgtggaaacctgccgtgcggtctggcggatctggcggaggctccaccagccccaagaaaaagagaaaagtctaagctgccttctgcggggcttgccttctggccatgcccttcttctctcccttgcacctgtacctcttggtctttgaataaagcctgagtaggaaggctagcaaaaaaaaaaaaaaaaaaaaaaaaaaaaaaaaaaaaaaaaaaaaaaaaaaaaaaaaaaaaaaaaaaaaaaaaaaaaaaaagcccagccggctccccaacctctaccgaggagggcacctctgagtccgccacccccgagagcggccctggcacctccaccgagcccagcgagggcagcgcacccggcagccctgccggcagccccacctccacagaggagggaaccagcaccgagcccagcgaaggcagcgccccaggcaccagcaccgagcctagtgagcaggagattaaacggatcaacaagatcagaagaagacttgtgaaagacagcaacaccaagaaggccggcaagacaggccccatgaaaaccctgctggttagagtgatgacacccgatctgagagagcggctggaaaacctgagaaagaagcctgaaaatatcccccagcccatcagcaatacatctagagccaacctgaataagctgctgaccgattacaccgaaatgaagaaggcgatcctgcatgtgtactgggaagagttccagaaggaccctgtgggcctgatgagccgggtggcccagcctgccagcaagaagatcgatcagaacaagctgaaacctgagatggacgagaagggcaacctgaccaccgccggctttgcctgctctcagtgtggccagcccctgttcgtgtacaagctggagcaggtgtctgagaagggcaaggcttacaccaactacttcggacggtgcaatgtggccgagcacgaaaagctgatcctgctggcccagctgaagcccgagaaggatagcgacgaagccgtgacatatagcctgggaaagtttgggcagagggccctggatttctacagcattcatgtgaccaaggagtccacccaccccgtgaagcccctggcccagatcgccggaaacagatacgcctccggacctgtgggaaaggccctgagcgacgcatgtatgggcacaatcgcctccttcctgtctaagtaccaggacatcatcatcgaacaccagaaggtggtgaagggcaaccagaagagactggagagcctgcgggagctggccggcaaggaaaacctggaataccctagcgtgaccctgccacctcagcctcacaccaaggagggcgttgatgcctacaacgaagtgatcgcccgggtgcgaatgtgggtgaacctgaacctgtggcagaagctgaagctaagcagagatgatgccaagcctctgctgagactgaagggattcccttcctttcctctggtcgagagacaggccaacgaagtggactggtgggacatggtgtgtaacgtgaagaagctgatcaacgagaaaaaggaggatggcaaggtgttttggcagaatctggctggctacaagagacaggaagccctgagaccatacctgagcagcgaggaagatcggaagaagggaaagaaattcgctcggtaccagctgggcgacctgctgctgcacctggaaaagaagcacggcgaggactggggaaaggtgtacgacgaggcctgggagcggattgacaagaaagtggaaggcctgagcaagcacatcaagctggaagaggaacggagaagcgaggacgcccagagcaaggccgccctgaccgactggctgcgggctaaggccagcttcgtgatcgagggcctgaaggaggccgacaaggacgagttctgcagatgcgagctgaagctgcagaagtggtacggggacctgcggggaaagcccttcgccatcgaagccgagaacagcatcctggacatcagcggcttcagcaagcagtacaactgtgccttcatctggcagaaggacggcgtgaagaagctgaacctgtacctgatcatcaactacttcaagggcggcaagctgcggttcaagaagatcaaacctgaagccttcgaagccaacagattctacaccgtgatcaacaaaaagagcggcgagatcgtgcccatggaggtgaacttcaacttcgacgaccccaacctgatcatcctgcctctggcctttggcaagagacagggcagagaattcatctggaacgacctgctgtccctggaaaccggcagcctgaagctggccaacggaagagtgatcgagaagacactgtacaacagaagaacccggcaggatgagcctgccctgttcgtggccctgaccttcgagcggcgggaggtcctggactcctccaatatcaaaccaatgaacctgatcggcgtggcaagaggcgaaaacatccccgccgtgatcgccctgaccgaccccgagggctgcccactgagccggtttaaggatagcctgggaaacccaacccacatcctgagaatcggcgagagctataaggagaagcagcggaccatccaggccaagaaggaggtggagcagcggagagccggcggctacagccggaagtacgccagcaaagccaagaatctggcagacgatatggtgagaaacaccgctagagatctgctgtactacgccgtgacccaggatgccatgctgatcttcgccaacctgagccggggcttcggccggcagggcaagcggaccttcatggccgagagacagtacacacggatggaggactggctgaccgccaagctggcctacgagggcctgagcaagacctacctgtccaagacactggcccagtacacctccaagacatgcagcaactgtgggtttaccatcaccagcgccgactacgacagggtgctggagaagctgaagaagacagcaacaggctggatgaccacaattaacggcaaggagctgaaggtggagggccagattacctactacaacagatacaagagacagaacgtagtcaaggacctgtccgtcgagctggatagactgagcgaagaatctgtgaacaacgacatctcctcctggacaaagggcagaagcggagaagctctgagcctcctgaagaaaagattctcccatagacccgtgcaggagaagttcgtgtgcctgaactgcggcttcgagacacacgcagccgagcaagccgccctgaacatcgccagatcctggctgttcctgcggagccaggagtacaagaaataccagacaaacaagacaaccggcaacaccgataagagagccttcgtcgagacctggcagtccttttaccggaagaagcttaaggaggtgtggaaacctgccgtgcggtctggcggatctggcggaggctccaccagccccaagaaaaagagaaaagtctaagctgccttctgcggggcttgccttctggccatgcccttcttctctcccttgcacctgtacctcttggtctttgaataaagcctgagtaggaaggctagcaaaaaaaaaaaaaaaaaaaaaaaaaaaaaaaaaaaaaaaaaaaaaaaaaaaaaaaaaaaaaaaaaaaaaaaaaaaaaaaa

SEQ ID NO: 9238 - RNA, 8787 nt, synthetic construct
  source 1..8787: mol_type = other RNA
aggaaataagagagaaaagaagagtaagaagaaatataagagccaccatggcccctaagaagaagcgtaaagtgagccggatgaaccacgaccaggagttcgacccccctaaggtgtaccctcccgtccccgccgagaagagaaagcccatccgggtcctgagcctgttcgatggcatcgccaccggtctgctggtgctgaaggacctgggcatccaggtggataggtacattgcctccgaggtgtgcgaggactccatcaccgtgggaatggtgcgtcatcagggcaagatcatgtacgtgggcgacgtgcggagcgtgacacagaagcatatccaggagtggggccctttcgacctggtgatcggcggcagcccttgcaatgacctgagcatcgtgaacccagcccggaagggcctgtacgagggaaccggcagactgttcttcgagttttacagactgctgcacgacgcccggcctaaggaaggcgacgaccggcccttcttttggctgttcgagaatgtggtggccatgggagtcagcgacaagcgggatattagccggttcctggagagcaaccccgtgatgatcgatgccaaggaagtgagcgccgcccaccgggccagatacttctggggcaatctgcctggcatgaacagacccctggccagcaccgtgaacgacaagctggagctgcaggagtgcctggagcacggccggatcgccaagttcagcaaggtgagaaccatcaccacccgaagcaacagcatcaaacaaggcaaggaccagcactttcctgtgttcatgaacgagaaggaggacatcctgtggtgtaccgagatggagagagtgttcgggttcccagtccactacacagatgtcagcaacatgtctagactggccagacagagactgctgggaagaagctggtccgtccctgtgatcagacacctgttcgcccctctgaaggagtacttcgcctgcgtgagcagcggcaacagcaacgccaacagccggggccccagcttctctagcggcctggtgccactgtccctgagagggagccacatgggccccatggagatctacaaaaccgtgagcgcctggaagcggcagcctgtgcgcgtgctgagcctgtttcggaatatcgataaagtcctgaaaagcctgggattcctggagagcggctctggctccggcggtggcaccctgaagtacgtggaggatgtgacaaacgtggtcagacgggatgtggagaagtggggccccttcgatctggtgtacggcagcacccaacccctgggcagctcttgtgaccggtgccctggctggtacatgtttcagttccaccggatcctgcagtacgccctgccgagacaggagtcccagcggccattcttttggattttcatggacaacttgctgctgaccgaggatgaccaggaaactaccactcggttcctgcagaccgaagccgtgaccctgcaggacgtgagaggccgggactaccagaacgccatgcgggtgtggtccaacatccctggactgaaaagcaagcacgcacctctgacccctaaagaagaggagtacctgcaggcccaggtgcggagcagaagcaagctggacgcccctaaggtggatctgctggtgaagaattgcctcctgcccctgagagagtacttcaagtatttcagccagaatagtctgcccctgggaggcagcggcggcggcctgcagggcctgctgaccttcagggacgtggccatcgagttcagccaggaggagtggggctgcctgagccacacccagagggagctgtacagggacgtgatgctggagaactacggccacctgctgttcagcggcctgatcgccagcaagcccgacctggtgagctgcctggagcagaagaaggagccctgggacctgaagaggaagaagaccgtggccatccaccccgtgtacgagctgaagggcggcccaagcagcggcgcccctcctcccagcggcggcaggcggcccaagcagcggcgcccctcctcccagcggcggcagcccagccggctccccaacctctaccgaggagggcacctctgagtccgccacccccgagagcggccctggcacctccaccgagcccagcgagggcagcgcacccggcagccctgccggcagccccacctccacagaggagggaaccagcaccgagcccagcgaaggcagcgccccaggcaccagcaccgagcctagtgagcaggagattaaacggatcaacaagatcagaagaagacttgtgaaagacagcaacaccaagaaggccggcaagacaggccccatgaaaaccctgctggttagagtgatgacacccgatctgagagagcggctggaaaacctgagaaagaagcctgaaaatatcccccagcccatcagcaatacatctagagccaacctgaataagctgctgaccgattacaccgaaatgaagaaggcgatcctgcatgtgtactgggaagagttccagaaggaccctgtgggcctgatgagccgggtggcccagcctgccagcaagaagatcgatcagaacaagctgaaacctgagatggacgagaagggcaacctgaccaccgccggctttgcctgctctcagtgtggccagcccctgttcgtgtacaagctggagcaggtgtctgagaagggcaaggcttacaccaactacttcggacggtgcaatgtggccgagcacgaaaagctgatcctgctggcccagctgaagcccgagaaggatagcgacgaagccgtgacatatagcctgggaaagtttgggcagagggccctggatttctacagcattcatgtgaccaaggagtccacccaccccgtgaagcccctggcccagatcgccggaaacagatacgcctccggacctgtgggaaaggccctgagcgacgcatgtatgggcacaatcgcctccttcctgtctaagtaccaggacatcatcatcgaacaccagaaggtggtgaagggcaaccagaagagactggagagcctgcgggagctggccggcaaggaaaacctggaataccctagcgtgaccctgccacctcagcctcacaccaaggagggcgttgatgcctacaacgaagtgatcgcccgggtgcgaatgtgggtgaacctgaacctgtggcagaagctgaagctaagcagagatgatgccaagcctctgctgagactgaagggattcccttcctttcctctggtcgagagacaggccaacgaagtggactggtgggacatggtgtgtaacgtgaagaagctgatcaacgagaaaaaggaggatggcaaggtgttttggcagaatctggctggctacaagagacaggaagccctgagaccatacctgagcagcgaggaagatcggaagaagggaaagaaattcgctcggtaccagctgggcgacctgctgctgcacctggaaaagaagcacggcgaggactggggaaaggtgtacgacgaggcctgggagcggattgacaagaaagtggaaggcctgagcaagcacatcaagctggaagaggaacggagaagcgaggacgcccagagcaaggccgccctgaccgactggctgcgggctaaggccagcttcgtgatcgagggcctgaaggaggccgacaaggacgagttctgcagatgcgagctgaagctgcagaagtggtacggggacctgcggggaaagcccttcgccatcgaagccgagaacagcatcctggacatcagcggcttcagcaagcagtacaactgtgccttcatctggcagaaggacggcgtgaagaagctgaacctgtacctgatcatcaactacttcaagggcggcaagctgcggttcaagaagatcaaacctgaagccttcgaagccaacagattctacaccgtgatcaacaaaaagagcggcgagatcgtgcccatggaggtgaacttcaacttcgacgaccccaacctgatcatcctgcctctggcctttggcaagagacagggcagagaattcatctggaacgacctgctgtccctggaaaccggcagcctgaagctggccaacggaagagtgatcgagaagacactgtacaacagaagaacccggcaggatgagcctgccctgttcgtggccctgaccttcgagcggcgggaggtcctggactcctccaatatcaaaccaatgaacctgatcggcgtggcaagaggcgaaaacatccccgccgtgatcgccctgaccgaccccgagggctgcccactgagccggtttaaggatagcctgggaaacccaacccacatcctgagaatcggcgagagctataaggagaagcagcggaccatccaggccaagaaggaggtggagcagcggagagccggcggctacagccggaagtacgccagcaaagccaagaatctggcagacgatatggtgagaaacaccgctagagatctgctgtactacgccgtgacccaggatgccatgctgatcttcgccaacctgagccggggcttcggccggcagggcaagcggaccttcatggccgagagacagtacacacggatggaggactggctgaccgccaagctggcctacgagggcctgagcaagacctacctgtccaagacactggcccagtacacctccaagacatgcagcaactgtgggtttaccatcaccagcgccgactacgacagggtgctggagaagctgaagaagacagcaacaggctggatgaccacaattaacggcaaggagctgaaggtggagggccagattacctactacaacagatacaagagacagaacgtagtcaaggacctgtccgtcgagctggatagactgagcgaagaatctgtgaacaacgacatctcctcctggacaaagggcagaagcggagaagctctgagcctcctgaagaaaagattctcccatagacccgtgcaggagaagttcgtgtgcctgaactgcggcttcgagacacacgcagccgagcaagccgccctgaacatcgccagatcctggctgttcctgcggagccaggagtacaagaaataccagacaaacaagacaaccggcaacaccgataagagagccttcgtcgagacctggcagtccttttaccggaagaagcttaaggaggtgtggaaacctgccgtgcggtctggcggatctggcggaggctccaccagccccaagaaaaagagaaaagtctaagctgccttctgcggggcttgccttctggccatgcccttcttctctcccttgcacctgtacctcttggtctttgaataaagcctgagtaggaaggctagcaaaaaaaaaaaaaaaaaaaaaaaaaaaaaaaaaaaaaaaaaaaaaaaaaaaaaaaaaaaaaaaaaaaaaaaaaaaaaaaagcccagccggctccccaacctctaccgaggagggcacctctgagtccgccacccccgagagcggccctggcacctccaccgagcccagcgagggcagcgcacccggcagccctgccggcagccccacctccacagaggagggaaccagcaccgagcccagcgaaggcagcgccccaggcaccagcaccgagcctagtgagcaggagattaaacggatcaacaagatcagaagaagacttgtgaaagacagcaacaccaagaaggccggcaagacaggccccatgaaaaccctgctggttagagtgatgacacccgatctgagagagcggctggaaaacctgagaaagaagcctgaaaatatcccccagcccatcagcaatacatctagagccaacctgaataagctgctgaccgattacaccgaaatgaagaaggcgatcctgcatgtgtactgggaagagttccagaaggaccctgtgggcctgatgagccgggtggcccagcctgccagcaagaagatcgatcagaacaagctgaaacctgagatggacgagaagggcaacctgaccaccgccggctttgcctgctctcagtgtggccagcccctgttcgtgtacaagctggagcaggtgtctgagaagggcaaggcttacaccaactacttcggacggtgcaatgtggccgagcacgaaaagctgatcctgctggcccagctgaagcccgagaaggatagcgacgaagccgtgacatatagcctgggaaagtttgggcagagggccctggatttctacagcattcatgtgaccaaggagtccacccaccccgtgaagcccctggcccagatcgccggaaacagatacgcctccggacctgtgggaaaggccctgagcgacgcatgtatgggcacaatcgcctccttcctgtctaagtaccaggacatcatcatcgaacaccagaaggtggtgaagggcaaccagaagagactggagagcctgcgggagctggccggcaaggaaaacctggaataccctagcgtgaccctgccacctcagcctcacaccaaggagggcgttgatgcctacaacgaagtgatcgcccgggtgcgaatgtgggtgaacctgaacctgtggcagaagctgaagctaagcagagatgatgccaagcctctgctgagactgaagggattcccttcctttcctctggtcgagagacaggccaacgaagtggactggtgggacatggtgtgtaacgtgaagaagctgatcaacgagaaaaaggaggatggcaaggtgttttggcagaatctggctggctacaagagacaggaagccctgagaccatacctgagcagcgaggaagatcggaagaagggaaagaaattcgctcggtaccagctgggcgacctgctgctgcacctggaaaagaagcacggcgaggactggggaaaggtgtacgacgaggcctgggagcggattgacaagaaagtggaaggcctgagcaagcacatcaagctggaagaggaacggagaagcgaggacgcccagagcaaggccgccctgaccgactggctgcgggctaaggccagcttcgtgatcgagggcctgaaggaggccgacaaggacgagttctgcagatgcgagctgaagctgcagaagtggtacggggacctgcggggaaagcccttcgccatcgaagccgagaacagcatcctggacatcagcggcttcagcaagcagtacaactgtgccttcatctggcagaaggacggcgtgaagaagctgaacctgtacctgatcatcaactacttcaagggcggcaagctgcggttcaagaagatcaaacctgaagccttcgaagccaacagattctacaccgtgatcaacaaaaagagcggcgagatcgtgcccatggaggtgaacttcaacttcgacgaccccaacctgatcatcctgcctctggcctttggcaagagacagggcagagaattcatctggaacgacctgctgtccctggaaaccggcagcctgaagctggccaacggaagagtgatcgagaagacactgtacaacagaagaacccggcaggatgagcctgccctgttcgtggccctgaccttcgagcggcgggaggtcctggactcctccaatatcaaaccaatgaacctgatcggcgtggcaagaggcgaaaacatccccgccgtgatcgccctgaccgaccccgagggctgcccactgagccggtttaaggatagcctgggaaacccaacccacatcctgagaatcggcgagagctataaggagaagcagcggaccatccaggccaagaaggaggtggagcagcggagagccggcggctacagccggaagtacgccagcaaagccaagaatctggcagacgatatggtgagaaacaccgctagagatctgctgtactacgccgtgacccaggatgccatgctgatcttcgccaacctgagccggggcttcggccggcagggcaagcggaccttcatggccgagagacagtacacacggatggaggactggctgaccgccaagctggcctacgagggcctgagcaagacctacctgtccaagacactggcccagtacacctccaagacatgcagcaactgtgggtttaccatcaccagcgccgactacgacagggtgctggagaagctgaagaagacagcaacaggctggatgaccacaattaacggcaaggagctgaaggtggagggccagattacctactacaacagatacaagagacagaacgtagtcaaggacctgtccgtcgagctggatagactgagcgaagaatctgtgaacaacgacatctcctcctggacaaagggcagaagcggagaagctctgagcctcctgaagaaaagattctcccatagacccgtgcaggagaagttcgtgtgcctgaactgcggcttcgagacacacgcagccgagcaagccgccctgaacatcgccagatcctggctgttcctgcggagccaggagtacaagaaataccagacaaacaagacaaccggcaacaccgataagagagccttcgtcgagacctggcagtccttttaccggaagaagcttaaggaggtgtggaaacctgccgtgcggtctggcggatctggcggaggctccaccagccccaagaaaaagagaaaagtctaagctgccttctgcggggcttgccttctggccatgcccttcttctctcccttgcacctgtacctcttggtctttgaataaagcctgagtaggaaggctagcaaaaaaaaaaaaaaaaaaaaaaaaaaaaaaaaaaaaaaaaaaaaaaaaaaaaaaaaaaaaaaaaaaaaaaaaaaaaaaaa

SEQ ID NO: 9239 - RNA, 8787 nt, synthetic construct
  source 1..8787: mol_type = other RNA
aggaaataagagagaaaagaagagtaagaagaaatataagagccaccatggcccctaagaagaagcgtaaagtgagccggatgaaccacgaccaggagttcgacccccctaaggtgtaccctcccgtccccgccgagaagagaaagcccatccgggtcctgagcctgttcgatggcatcgccaccggtctgctggtgctgaaggacctgggcatccaggtggataggtacattgcctccgaggtgtgcgaggactccatcaccgtgggaatggtgcgtcatcagggcaagatcatgtacgtgggcgacgtgcggagcgtgacacagaagcatatccaggagtggggccctttcgacctggtgatcggcggcagcccttgcaatgacctgagcatcgtgaacccagcccggaagggcctgtacgagggaaccggcagactgttcttcgagttttacagactgctgcacgacgcccggcctaaggaaggcgacgaccggcccttcttttggctgttcgagaatgtggtggccatgggagtcagcgacaagcgggatattagccggttcctggagagcaaccccgtgatgatcgatgccaaggaagtgagcgccgcccaccgggccagatacttctggggcaatctgcctggcatgaacagacccctggccagcaccgtgaacgacaagctggagctgcaggagtgcctggagcacggccggatcgccaagttcagcaaggtgagaaccatcaccacccgaagcaacagcatcaaacaaggcaaggaccagcactttcctgtgttcatgaacgagaaggaggacatcctgtggtgtaccgagatggagagagtgttcgggttcccagtccactacacagatgtcagcaacatgtctagactggccagacagagactgctgggaagaagctggtccgtccctgtgatcagacacctgttcgcccctctgaaggagtacttcgcctgcgtgagcagcggcaacagcaacgccaacagccggggccccagcttctctagcggcctggtgccactgtccctgagagggagccacatgggccccatggagatctacaaaaccgtgagcgcctggaagcggcagcctgtgcgcgtgctgagcctgtttcggaatatcgataaagtcctgaaaagcctgggattcctggagagcggctctggctccggcggtggcaccctgaagtacgtggaggatgtgacaaacgtggtcagacgggatgtggagaagtggggccccttcgatctggtgtacggcagcacccaacccctgggcagctcttgtgaccggtgccctggctggtacatgtttcagttccaccggatcctgcagtacgccctgccgagacaggagtcccagcggccattcttttggattttcatggacaacttgctgctgaccgaggatgaccaggaaactaccactcggttcctgcagaccgaagccgtgaccctgcaggacgtgagaggccgggactaccagaacgccatgcgggtgtggtccaacatccctggactgaaaagcaagcacgcacctctgacccctaaagaagaggagtacctgcaggcccaggtgcggagcagaagcaagctggacgcccctaaggtggatctgctggtgaagaattgcctcctgcccctgagagagtacttcaagtatttcagccagaatagtctgcccctgggaggcagcggcggcggcccccaggagcccgtgaccttcgaggacgtggccgtgctgttcacccccgaggagtggatgttcctggacagcgcccagaggagcctgtacagggacgtgatgctggagaactacaggaacgtggccagcgtgggcgaccagctgggcaagttcagcagcttcagccacctggagcagggcgaggagtggtggcccaccgagaggagggtgttccccggcagctgccccgagcccagcctgcccggcggcccaagcagcggcgcccctcctcccagcggcggcaggcggcccaagcagcggcgcccctcctcccagcggcggcagcccagccggctccccaacctctaccgaggagggcacctctgagtccgccacccccgagagcggccctggcacctccaccgagcccagcgagggcagcgcacccggcagccctgccggcagccccacctccacagaggagggaaccagcaccgagcccagcgaaggcagcgccccaggcaccagcaccgagcctagtgagcaggagattaaacggatcaacaagatcagaagaagacttgtgaaagacagcaacaccaagaaggccggcaagacaggccccatgaaaaccctgctggttagagtgatgacacccgatctgagagagcggctggaaaacctgagaaagaagcctgaaaatatcccccagcccatcagcaatacatctagagccaacctgaataagctgctgaccgattacaccgaaatgaagaaggcgatcctgcatgtgtactgggaagagttccagaaggaccctgtgggcctgatgagccgggtggcccagcctgccagcaagaagatcgatcagaacaagctgaaacctgagatggacgagaagggcaacctgaccaccgccggctttgcctgctctcagtgtggccagcccctgttcgtgtacaagctggagcaggtgtctgagaagggcaaggcttacaccaactacttcggacggtgcaatgtggccgagcacgaaaagctgatcctgctggcccagctgaagcccgagaaggatagcgacgaagccgtgacatatagcctgggaaagtttgggcagagggccctggatttctacagcattcatgtgaccaaggagtccacccaccccgtgaagcccctggcccagatcgccggaaacagatacgcctccggacctgtgggaaaggccctgagcgacgcatgtatgggcacaatcgcctccttcctgtctaagtaccaggacatcatcatcgaacaccagaaggtggtgaagggcaaccagaagagactggagagcctgcgggagctggccggcaaggaaaacctggaataccctagcgtgaccctgccacctcagcctcacaccaaggagggcgttgatgcctacaacgaagtgatcgcccgggtgcgaatgtgggtgaacctgaacctgtggcagaagctgaagctaagcagagatgatgccaagcctctgctgagactgaagggattcccttcctttcctctggtcgagagacaggccaacgaagtggactggtgggacatggtgtgtaacgtgaagaagctgatcaacgagaaaaaggaggatggcaaggtgttttggcagaatctggctggctacaagagacaggaagccctgagaccatacctgagcagcgaggaagatcggaagaagggaaagaaattcgctcggtaccagctgggcgacctgctgctgcacctggaaaagaagcacggcgaggactggggaaaggtgtacgacgaggcctgggagcggattgacaagaaagtggaaggcctgagcaagcacatcaagctggaagaggaacggagaagcgaggacgcccagagcaaggccgccctgaccgactggctgcgggctaaggccagcttcgtgatcgagggcctgaaggaggccgacaaggacgagttctgcagatgcgagctgaagctgcagaagtggtacggggacctgcggggaaagcccttcgccatcgaagccgagaacagcatcctggacatcagcggcttcagcaagcagtacaactgtgccttcatctggcagaaggacggcgtgaagaagctgaacctgtacctgatcatcaactacttcaagggcggcaagctgcggttcaagaagatcaaacctgaagccttcgaagccaacagattctacaccgtgatcaacaaaaagagcggcgagatcgtgcccatggaggtgaacttcaacttcgacgaccccaacctgatcatcctgcctctggcctttggcaagagacagggcagagaattcatctggaacgacctgctgtccctggaaaccggcagcctgaagctggccaacggaagagtgatcgagaagacactgtacaacagaagaacccggcaggatgagcctgccctgttcgtggccctgaccttcgagcggcgggaggtcctggactcctccaatatcaaaccaatgaacctgatcggcgtggcaagaggcgaaaacatccccgccgtgatcgccctgaccgaccccgagggctgcccactgagccggtttaaggatagcctgggaaacccaacccacatcctgagaatcggcgagagctataaggagaagcagcggaccatccaggccaagaaggaggtggagcagcggagagccggcggctacagccggaagtacgccagcaaagccaagaatctggcagacgatatggtgagaaacaccgctagagatctgctgtactacgccgtgacccaggatgccatgctgatcttcgccaacctgagccggggcttcggccggcagggcaagcggaccttcatggccgagagacagtacacacggatggaggactggctgaccgccaagctggcctacgagggcctgagcaagacctacctgtccaagacactggcccagtacacctccaagacatgcagcaactgtgggtttaccatcaccagcgccgactacgacagggtgctggagaagctgaagaagacagcaacaggctggatgaccacaattaacggcaaggagctgaaggtggagggccagattacctactacaacagatacaagagacagaacgtagtcaaggacctgtccgtcgagctggatagactgagcgaagaatctgtgaacaacgacatctcctcctggacaaagggcagaagcggagaagctctgagcctcctgaagaaaagattctcccatagacccgtgcaggagaagttcgtgtgcctgaactgcggcttcgagacacacgcagccgagcaagccgccctgaacatcgccagatcctggctgttcctgcggagccaggagtacaagaaataccagacaaacaagacaaccggcaacaccgataagagagccttcgtcgagacctggcagtccttttaccggaagaagcttaaggaggtgtggaaacctgccgtgcggtctggcggatctggcggaggctccaccagccccaagaaaaagagaaaagtctaagctgccttctgcggggcttgccttctggccatgcccttcttctctcccttgcacctgtacctcttggtctttgaataaagcctgagtaggaaggctagcaaaaaaaaaaaaaaaaaaaaaaaaaaaaaaaaaaaaaaaaaaaaaaaaaaaaaaaaaaaaaaaaaaaaaaaaaaaaaaaagcccagccggctccccaacctctaccgaggagggcacctctgagtccgccacccccgagagcggccctggcacctccaccgagcccagcgagggcagcgcacccggcagccctgccggcagccccacctccacagaggagggaaccagcaccgagcccagcgaaggcagcgccccaggcaccagcaccgagcctagtgagcaggagattaaacggatcaacaagatcagaagaagacttgtgaaagacagcaacaccaagaaggccggcaagacaggccccatgaaaaccctgctggttagagtgatgacacccgatctgagagagcggctggaaaacctgagaaagaagcctgaaaatatcccccagcccatcagcaatacatctagagccaacctgaataagctgctgaccgattacaccgaaatgaagaaggcgatcctgcatgtgtactgggaagagttccagaaggaccctgtgggcctgatgagccgggtggcccagcctgccagcaagaagatcgatcagaacaagctgaaacctgagatggacgagaagggcaacctgaccaccgccggctttgcctgctctcagtgtggccagcccctgttcgtgtacaagctggagcaggtgtctgagaagggcaaggcttacaccaactacttcggacggtgcaatgtggccgagcacgaaaagctgatcctgctggcccagctgaagcccgagaaggatagcgacgaagccgtgacatatagcctgggaaagtttgggcagagggccctggatttctacagcattcatgtgaccaaggagtccacccaccccgtgaagcccctggcccagatcgccggaaacagatacgcctccggacctgtgggaaaggccctgagcgacgcatgtatgggcacaatcgcctccttcctgtctaagtaccaggacatcatcatcgaacaccagaaggtggtgaagggcaaccagaagagactggagagcctgcgggagctggccggcaaggaaaacctggaataccctagcgtgaccctgccacctcagcctcacaccaaggagggcgttgatgcctacaacgaagtgatcgcccgggtgcgaatgtgggtgaacctgaacctgtggcagaagctgaagctaagcagagatgatgccaagcctctgctgagactgaagggattcccttcctttcctctggtcgagagacaggccaacgaagtggactggtgggacatggtgtgtaacgtgaagaagctgatcaacgagaaaaaggaggatggcaaggtgttttggcagaatctggctggctacaagagacaggaagccctgagaccatacctgagcagcgaggaagatcggaagaagggaaagaaattcgctcggtaccagctgggcgacctgctgctgcacctggaaaagaagcacggcgaggactggggaaaggtgtacgacgaggcctgggagcggattgacaagaaagtggaaggcctgagcaagcacatcaagctggaagaggaacggagaagcgaggacgcccagagcaaggccgccctgaccgactggctgcgggctaaggccagcttcgtgatcgagggcctgaaggaggccgacaaggacgagttctgcagatgcgagctgaagctgcagaagtggtacggggacctgcggggaaagcccttcgccatcgaagccgagaacagcatcctggacatcagcggcttcagcaagcagtacaactgtgccttcatctggcagaaggacggcgtgaagaagctgaacctgtacctgatcatcaactacttcaagggcggcaagctgcggttcaagaagatcaaacctgaagccttcgaagccaacagattctacaccgtgatcaacaaaaagagcggcgagatcgtgcccatggaggtgaacttcaacttcgacgaccccaacctgatcatcctgcctctggcctttggcaagagacagggcagagaattcatctggaacgacctgctgtccctggaaaccggcagcctgaagctggccaacggaagagtgatcgagaagacactgtacaacagaagaacccggcaggatgagcctgccctgttcgtggccctgaccttcgagcggcgggaggtcctggactcctccaatatcaaaccaatgaacctgatcggcgtggcaagaggcgaaaacatccccgccgtgatcgccctgaccgaccccgagggctgcccactgagccggtttaaggatagcctgggaaacccaacccacatcctgagaatcggcgagagctataaggagaagcagcggaccatccaggccaagaaggaggtggagcagcggagagccggcggctacagccggaagtacgccagcaaagccaagaatctggcagacgatatggtgagaaacaccgctagagatctgctgtactacgccgtgacccaggatgccatgctgatcttcgccaacctgagccggggcttcggccggcagggcaagcggaccttcatggccgagagacagtacacacggatggaggactggctgaccgccaagctggcctacgagggcctgagcaagacctacctgtccaagacactggcccagtacacctccaagacatgcagcaactgtgggtttaccatcaccagcgccgactacgacagggtgctggagaagctgaagaagacagcaacaggctggatgaccacaattaacggcaaggagctgaaggtggagggccagattacctactacaacagatacaagagacagaacgtagtcaaggacctgtccgtcgagctggatagactgagcgaagaatctgtgaacaacgacatctcctcctggacaaagggcagaagcggagaagctctgagcctcctgaagaaaagattctcccatagacccgtgcaggagaagttcgtgtgcctgaactgcggcttcgagacacacgcagccgagcaagccgccctgaacatcgccagatcctggctgttcctgcggagccaggagtacaagaaataccagacaaacaagacaaccggcaacaccgataagagagccttcgtcgagacctggcagtccttttaccggaagaagcttaaggaggtgtggaaacctgccgtgcggtctggcggatctggcggaggctccaccagccccaagaaaaagagaaaagtctaagctgccttctgcggggcttgccttctggccatgcccttcttctctcccttgcacctgtacctcttggtctttgaataaagcctgagtaggaaggctagcaaaaaaaaaaaaaaaaaaaaaaaaaaaaaaaaaaaaaaaaaaaaaaaaaaaaaaaaaaaaaaaaaaaaaaaaaaaaaaaa

SEQ ID NO: 9240 - RNA, 8787 nt, synthetic construct
  source 1..8787: mol_type = other RNA
aggaaataagagagaaaagaagagtaagaagaaatataagagccaccatggcccctaagaagaagcgtaaagtgagccggatgaaccacgaccaggagttcgacccccctaaggtgtaccctcccgtccccgccgagaagagaaagcccatccgggtcctgagcctgttcgatggcatcgccaccggtctgctggtgctgaaggacctgggcatccaggtggataggtacattgcctccgaggtgtgcgaggactccatcaccgtgggaatggtgcgtcatcagggcaagatcatgtacgtgggcgacgtgcggagcgtgacacagaagcatatccaggagtggggccctttcgacctggtgatcggcggcagcccttgcaatgacctgagcatcgtgaacccagcccggaagggcctgtacgagggaaccggcagactgttcttcgagttttacagactgctgcacgacgcccggcctaaggaaggcgacgaccggcccttcttttggctgttcgagaatgtggtggccatgggagtcagcgacaagcgggatattagccggttcctggagagcaaccccgtgatgatcgatgccaaggaagtgagcgccgcccaccgggccagatacttctggggcaatctgcctggcatgaacagacccctggccagcaccgtgaacgacaagctggagctgcaggagtgcctggagcacggccggatcgccaagttcagcaaggtgagaaccatcaccacccgaagcaacagcatcaaacaaggcaaggaccagcactttcctgtgttcatgaacgagaaggaggacatcctgtggtgtaccgagatggagagagtgttcgggttcccagtccactacacagatgtcagcaacatgtctagactggccagacagagactgctgggaagaagctggtccgtccctgtgatcagacacctgttcgcccctctgaaggagtacttcgcctgcgtgagcagcggcaacagcaacgccaacagccggggccccagcttctctagcggcctggtgccactgtccctgagagggagccacatgggccccatggagatctacaaaaccgtgagcgcctggaagcggcagcctgtgcgcgtgctgagcctgtttcggaatatcgataaagtcctgaaaagcctgggattcctggagagcggctctggctccggcggtggcaccctgaagtacgtggaggatgtgacaaacgtggtcagacgggatgtggagaagtggggccccttcgatctggtgtacggcagcacccaacccctgggcagctcttgtgaccggtgccctggctggtacatgtttcagttccaccggatcctgcagtacgccctgccgagacaggagtcccagcggccattcttttggattttcatggacaacttgctgctgaccgaggatgaccaggaaactaccactcggttcctgcagaccgaagccgtgaccctgcaggacgtgagaggccgggactaccagaacgccatgcgggtgtggtccaacatccctggactgaaaagcaagcacgcacctctgacccctaaagaagaggagtacctgcaggcccaggtgcggagcagaagcaagctggacgcccctaaggtggatctgctggtgaagaattgcctcctgcccctgagagagtacttcaagtatttcagccagaatagtctgcccctgggaggcagcggcggcggcatgctgagcttctgggacgtggccatcgagttcagccccgaggagagggagtgcctggaccccgcccagtggagcctgtacagggacgtgatgctggagaactacagcaacctgctgttcctgggcctggccgtgcccaagccccacctggtgaccttcctggagcagaggcaggagagcagcggcgtgaagaggcaggccgccgccaccgtgcaccccggcaggatccccaacgactacaacggcggcccaagcagcggcgcccctcctcccagcggcggcaggcggcccaagcagcggcgcccctcctcccagcggcggcagcccagccggctccccaacctctaccgaggagggcacctctgagtccgccacccccgagagcggccctggcacctccaccgagcccagcgagggcagcgcacccggcagccctgccggcagccccacctccacagaggagggaaccagcaccgagcccagcgaaggcagcgccccaggcaccagcaccgagcctagtgagcaggagattaaacggatcaacaagatcagaagaagacttgtgaaagacagcaacaccaagaaggccggcaagacaggccccatgaaaaccctgctggttagagtgatgacacccgatctgagagagcggctggaaaacctgagaaagaagcctgaaaatatcccccagcccatcagcaatacatctagagccaacctgaataagctgctgaccgattacaccgaaatgaagaaggcgatcctgcatgtgtactgggaagagttccagaaggaccctgtgggcctgatgagccgggtggcccagcctgccagcaagaagatcgatcagaacaagctgaaacctgagatggacgagaagggcaacctgaccaccgccggctttgcctgctctcagtgtggccagcccctgttcgtgtacaagctggagcaggtgtctgagaagggcaaggcttacaccaactacttcggacggtgcaatgtggccgagcacgaaaagctgatcctgctggcccagctgaagcccgagaaggatagcgacgaagccgtgacatatagcctgggaaagtttgggcagagggccctggatttctacagcattcatgtgaccaaggagtccacccaccccgtgaagcccctggcccagatcgccggaaacagatacgcctccggacctgtgggaaaggccctgagcgacgcatgtatgggcacaatcgcctccttcctgtctaagtaccaggacatcatcatcgaacaccagaaggtggtgaagggcaaccagaagagactggagagcctgcgggagctggccggcaaggaaaacctggaataccctagcgtgaccctgccacctcagcctcacaccaaggagggcgttgatgcctacaacgaagtgatcgcccgggtgcgaatgtgggtgaacctgaacctgtggcagaagctgaagctaagcagagatgatgccaagcctctgctgagactgaagggattcccttcctttcctctggtcgagagacaggccaacgaagtggactggtgggacatggtgtgtaacgtgaagaagctgatcaacgagaaaaaggaggatggcaaggtgttttggcagaatctggctggctacaagagacaggaagccctgagaccatacctgagcagcgaggaagatcggaagaagggaaagaaattcgctcggtaccagctgggcgacctgctgctgcacctggaaaagaagcacggcgaggactggggaaaggtgtacgacgaggcctgggagcggattgacaagaaagtggaaggcctgagcaagcacatcaagctggaagaggaacggagaagcgaggacgcccagagcaaggccgccctgaccgactggctgcgggctaaggccagcttcgtgatcgagggcctgaaggaggccgacaaggacgagttctgcagatgcgagctgaagctgcagaagtggtacggggacctgcggggaaagcccttcgccatcgaagccgagaacagcatcctggacatcagcggcttcagcaagcagtacaactgtgccttcatctggcagaaggacggcgtgaagaagctgaacctgtacctgatcatcaactacttcaagggcggcaagctgcggttcaagaagatcaaacctgaagccttcgaagccaacagattctacaccgtgatcaacaaaaagagcggcgagatcgtgcccatggaggtgaacttcaacttcgacgaccccaacctgatcatcctgcctctggcctttggcaagagacagggcagagaattcatctggaacgacctgctgtccctggaaaccggcagcctgaagctggccaacggaagagtgatcgagaagacactgtacaacagaagaacccggcaggatgagcctgccctgttcgtggccctgaccttcgagcggcgggaggtcctggactcctccaatatcaaaccaatgaacctgatcggcgtggcaagaggcgaaaacatccccgccgtgatcgccctgaccgaccccgagggctgcccactgagccggtttaaggatagcctgggaaacccaacccacatcctgagaatcggcgagagctataaggagaagcagcggaccatccaggccaagaaggaggtggagcagcggagagccggcggctacagccggaagtacgccagcaaagccaagaatctggcagacgatatggtgagaaacaccgctagagatctgctgtactacgccgtgacccaggatgccatgctgatcttcgccaacctgagccggggcttcggccggcagggcaagcggaccttcatggccgagagacagtacacacggatggaggactggctgaccgccaagctggcctacgagggcctgagcaagacctacctgtccaagacactggcccagtacacctccaagacatgcagcaactgtgggtttaccatcaccagcgccgactacgacagggtgctggagaagctgaagaagacagcaacaggctggatgaccacaattaacggcaaggagctgaaggtggagggccagattacctactacaacagatacaagagacagaacgtagtcaaggacctgtccgtcgagctggatagactgagcgaagaatctgtgaacaacgacatctcctcctggacaaagggcagaagcggagaagctctgagcctcctgaagaaaagattctcccatagacccgtgcaggagaagttcgtgtgcctgaactgcggcttcgagacacacgcagccgagcaagccgccctgaacatcgccagatcctggctgttcctgcggagccaggagtacaagaaataccagacaaacaagacaaccggcaacaccgataagagagccttcgtcgagacctggcagtccttttaccggaagaagcttaaggaggtgtggaaacctgccgtgcggtctggcggatctggcggaggctccaccagccccaagaaaaagagaaaagtctaagctgccttctgcggggcttgccttctggccatgcccttcttctctcccttgcacctgtacctcttggtctttgaataaagcctgagtaggaaggctagcaaaaaaaaaaaaaaaaaaaaaaaaaaaaaaaaaaaaaaaaaaaaaaaaaaaaaaaaaaaaaaaaaaaaaaaaaaaaaaaagcccagccggctccccaacctctaccgaggagggcacctctgagtccgccacccccgagagcggccctggcacctccaccgagcccagcgagggcagcgcacccggcagccctgccggcagccccacctccacagaggagggaaccagcaccgagcccagcgaaggcagcgccccaggcaccagcaccgagcctagtgagcaggagattaaacggatcaacaagatcagaagaagacttgtgaaagacagcaacaccaagaaggccggcaagacaggccccatgaaaaccctgctggttagagtgatgacacccgatctgagagagcggctggaaaacctgagaaagaagcctgaaaatatcccccagcccatcagcaatacatctagagccaacctgaataagctgctgaccgattacaccgaaatgaagaaggcgatcctgcatgtgtactgggaagagttccagaaggaccctgtgggcctgatgagccgggtggcccagcctgccagcaagaagatcgatcagaacaagctgaaacctgagatggacgagaagggcaacctgaccaccgccggctttgcctgctctcagtgtggccagcccctgttcgtgtacaagctggagcaggtgtctgagaagggcaaggcttacaccaactacttcggacggtgcaatgtggccgagcacgaaaagctgatcctgctggcccagctgaagcccgagaaggatagcgacgaagccgtgacatatagcctgggaaagtttgggcagagggccctggatttctacagcattcatgtgaccaaggagtccacccaccccgtgaagcccctggcccagatcgccggaaacagatacgcctccggacctgtgggaaaggccctgagcgacgcatgtatgggcacaatcgcctccttcctgtctaagtaccaggacatcatcatcgaacaccagaaggtggtgaagggcaaccagaagagactggagagcctgcgggagctggccggcaaggaaaacctggaataccctagcgtgaccctgccacctcagcctcacaccaaggagggcgttgatgcctacaacgaagtgatcgcccgggtgcgaatgtgggtgaacctgaacctgtggcagaagctgaagctaagcagagatgatgccaagcctctgctgagactgaagggattcccttcctttcctctggtcgagagacaggccaacgaagtggactggtgggacatggtgtgtaacgtgaagaagctgatcaacgagaaaaaggaggatggcaaggtgttttggcagaatctggctggctacaagagacaggaagccctgagaccatacctgagcagcgaggaagatcggaagaagggaaagaaattcgctcggtaccagctgggcgacctgctgctgcacctggaaaagaagcacggcgaggactggggaaaggtgtacgacgaggcctgggagcggattgacaagaaagtggaaggcctgagcaagcacatcaagctggaagaggaacggagaagcgaggacgcccagagcaaggccgccctgaccgactggctgcgggctaaggccagcttcgtgatcgagggcctgaaggaggccgacaaggacgagttctgcagatgcgagctgaagctgcagaagtggtacggggacctgcggggaaagcccttcgccatcgaagccgagaacagcatcctggacatcagcggcttcagcaagcagtacaactgtgccttcatctggcagaaggacggcgtgaagaagctgaacctgtacctgatcatcaactacttcaagggcggcaagctgcggttcaagaagatcaaacctgaagccttcgaagccaacagattctacaccgtgatcaacaaaaagagcggcgagatcgtgcccatggaggtgaacttcaacttcgacgaccccaacctgatcatcctgcctctggcctttggcaagagacagggcagagaattcatctggaacgacctgctgtccctggaaaccggcagcctgaagctggccaacggaagagtgatcgagaagacactgtacaacagaagaacccggcaggatgagcctgccctgttcgtggccctgaccttcgagcggcgggaggtcctggactcctccaatatcaaaccaatgaacctgatcggcgtggcaagaggcgaaaacatccccgccgtgatcgccctgaccgaccccgagggctgcccactgagccggtttaaggatagcctgggaaacccaacccacatcctgagaatcggcgagagctataaggagaagcagcggaccatccaggccaagaaggaggtggagcagcggagagccggcggctacagccggaagtacgccagcaaagccaagaatctggcagacgatatggtgagaaacaccgctagagatctgctgtactacgccgtgacccaggatgccatgctgatcttcgccaacctgagccggggcttcggccggcagggcaagcggaccttcatggccgagagacagtacacacggatggaggactggctgaccgccaagctggcctacgagggcctgagcaagacctacctgtccaagacactggcccagtacacctccaagacatgcagcaactgtgggtttaccatcaccagcgccgactacgacagggtgctggagaagctgaagaagacagcaacaggctggatgaccacaattaacggcaaggagctgaaggtggagggccagattacctactacaacagatacaagagacagaacgtagtcaaggacctgtccgtcgagctggatagactgagcgaagaatctgtgaacaacgacatctcctcctggacaaagggcagaagcggagaagctctgagcctcctgaagaaaagattctcccatagacccgtgcaggagaagttcgtgtgcctgaactgcggcttcgagacacacgcagccgagcaagccgccctgaacatcgccagatcctggctgttcctgcggagccaggagtacaagaaataccagacaaacaagacaaccggcaacaccgataagagagccttcgtcgagacctggcagtccttttaccggaagaagcttaaggaggtgtggaaacctgccgtgcggtctggcggatctggcggaggctccaccagccccaagaaaaagagaaaagtctaagctgccttctgcggggcttgccttctggccatgcccttcttctctcccttgcacctgtacctcttggtctttgaataaagcctgagtaggaaggctagcaaaaaaaaaaaaaaaaaaaaaaaaaaaaaaaaaaaaaaaaaaaaaaaaaaaaaaaaaaaaaaaaaaaaaaaaaaaaaaaa

SEQ ID NO: 9241 - RNA, 8787 nt, synthetic construct
  source 1..8787: mol_type = other RNA
aggaaataagagagaaaagaagagtaagaagaaatataagagccaccatggcccctaagaagaagcgtaaagtgagccggatgaaccacgaccaggagttcgacccccctaaggtgtaccctcccgtccccgccgagaagagaaagcccatccgggtcctgagcctgttcgatggcatcgccaccggtctgctggtgctgaaggacctgggcatccaggtggataggtacattgcctccgaggtgtgcgaggactccatcaccgtgggaatggtgcgtcatcagggcaagatcatgtacgtgggcgacgtgcggagcgtgacacagaagcatatccaggagtggggccctttcgacctggtgatcggcggcagcccttgcaatgacctgagcatcgtgaacccagcccggaagggcctgtacgagggaaccggcagactgttcttcgagttttacagactgctgcacgacgcccggcctaaggaaggcgacgaccggcccttcttttggctgttcgagaatgtggtggccatgggagtcagcgacaagcgggatattagccggttcctggagagcaaccccgtgatgatcgatgccaaggaagtgagcgccgcccaccgggccagatacttctggggcaatctgcctggcatgaacagacccctggccagcaccgtgaacgacaagctggagctgcaggagtgcctggagcacggccggatcgccaagttcagcaaggtgagaaccatcaccacccgaagcaacagcatcaaacaaggcaaggaccagcactttcctgtgttcatgaacgagaaggaggacatcctgtggtgtaccgagatggagagagtgttcgggttcccagtccactacacagatgtcagcaacatgtctagactggccagacagagactgctgggaagaagctggtccgtccctgtgatcagacacctgttcgcccctctgaaggagtacttcgcctgcgtgagcagcggcaacagcaacgccaacagccggggccccagcttctctagcggcctggtgccactgtccctgagagggagccacatgggccccatggagatctacaaaaccgtgagcgcctggaagcggcagcctgtgcgcgtgctgagcctgtttcggaatatcgataaagtcctgaaaagcctgggattcctggagagcggctctggctccggcggtggcaccctgaagtacgtggaggatgtgacaaacgtggtcagacgggatgtggagaagtggggccccttcgatctggtgtacggcagcacccaacccctgggcagctcttgtgaccggtgccctggctggtacatgtttcagttccaccggatcctgcagtacgccctgccgagacaggagtcccagcggccattcttttggattttcatggacaacttgctgctgaccgaggatgaccaggaaactaccactcggttcctgcagaccgaagccgtgaccctgcaggacgtgagaggccgggactaccagaacgccatgcgggtgtggtccaacatccctggactgaaaagcaagcacgcacctctgacccctaaagaagaggagtacctgcaggcccaggtgcggagcagaagcaagctggacgcccctaaggtggatctgctggtgaagaattgcctcctgcccctgagagagtacttcaagtatttcagccagaatagtctgcccctgggaggcagcggcggcggcgccctgggcagcgtgaccttcagggacgtggccgtgttcttcagccaggacgagtggctgcacctggacagcgcccagaagaccctgtaccaggaggtgatgctggagaactacagcaccctggtgagcctgggcatccccttcagcatgcccaaggtgatctgccagctgcagcagggcgaggacccctgcatggtggagggcgaggccctgagggacccctgcctggacttcaagacctggggcggcccaagcagcggcgcccctcctcccagcggcggcaggcggcccaagcagcggcgcccctcctcccagcggcggcagcccagccggctccccaacctctaccgaggagggcacctctgagtccgccacccccgagagcggccctggcacctccaccgagcccagcgagggcagcgcacccggcagccctgccggcagccccacctccacagaggagggaaccagcaccgagcccagcgaaggcagcgccccaggcaccagcaccgagcctagtgagcaggagattaaacggatcaacaagatcagaagaagacttgtgaaagacagcaacaccaagaaggccggcaagacaggccccatgaaaaccctgctggttagagtgatgacacccgatctgagagagcggctggaaaacctgagaaagaagcctgaaaatatcccccagcccatcagcaatacatctagagccaacctgaataagctgctgaccgattacaccgaaatgaagaaggcgatcctgcatgtgtactgggaagagttccagaaggaccctgtgggcctgatgagccgggtggcccagcctgccagcaagaagatcgatcagaacaagctgaaacctgagatggacgagaagggcaacctgaccaccgccggctttgcctgctctcagtgtggccagcccctgttcgtgtacaagctggagcaggtgtctgagaagggcaaggcttacaccaactacttcggacggtgcaatgtggccgagcacgaaaagctgatcctgctggcccagctgaagcccgagaaggatagcgacgaagccgtgacatatagcctgggaaagtttgggcagagggccctggatttctacagcattcatgtgaccaaggagtccacccaccccgtgaagcccctggcccagatcgccggaaacagatacgcctccggacctgtgggaaaggccctgagcgacgcatgtatgggcacaatcgcctccttcctgtctaagtaccaggacatcatcatcgaacaccagaaggtggtgaagggcaaccagaagagactggagagcctgcgggagctggccggcaaggaaaacctggaataccctagcgtgaccctgccacctcagcctcacaccaaggagggcgttgatgcctacaacgaagtgatcgcccgggtgcgaatgtgggtgaacctgaacctgtggcagaagctgaagctaagcagagatgatgccaagcctctgctgagactgaagggattcccttcctttcctctggtcgagagacaggccaacgaagtggactggtgggacatggtgtgtaacgtgaagaagctgatcaacgagaaaaaggaggatggcaaggtgttttggcagaatctggctggctacaagagacaggaagccctgagaccatacctgagcagcgaggaagatcggaagaagggaaagaaattcgctcggtaccagctgggcgacctgctgctgcacctggaaaagaagcacggcgaggactggggaaaggtgtacgacgaggcctgggagcggattgacaagaaagtggaaggcctgagcaagcacatcaagctggaagaggaacggagaagcgaggacgcccagagcaaggccgccctgaccgactggctgcgggctaaggccagcttcgtgatcgagggcctgaaggaggccgacaaggacgagttctgcagatgcgagctgaagctgcagaagtggtacggggacctgcggggaaagcccttcgccatcgaagccgagaacagcatcctggacatcagcggcttcagcaagcagtacaactgtgccttcatctggcagaaggacggcgtgaagaagctgaacctgtacctgatcatcaactacttcaagggcggcaagctgcggttcaagaagatcaaacctgaagccttcgaagccaacagattctacaccgtgatcaacaaaaagagcggcgagatcgtgcccatggaggtgaacttcaacttcgacgaccccaacctgatcatcctgcctctggcctttggcaagagacagggcagagaattcatctggaacgacctgctgtccctggaaaccggcagcctgaagctggccaacggaagagtgatcgagaagacactgtacaacagaagaacccggcaggatgagcctgccctgttcgtggccctgaccttcgagcggcgggaggtcctggactcctccaatatcaaaccaatgaacctgatcggcgtggcaagaggcgaaaacatccccgccgtgatcgccctgaccgaccccgagggctgcccactgagccggtttaaggatagcctgggaaacccaacccacatcctgagaatcggcgagagctataaggagaagcagcggaccatccaggccaagaaggaggtggagcagcggagagccggcggctacagccggaagtacgccagcaaagccaagaatctggcagacgatatggtgagaaacaccgctagagatctgctgtactacgccgtgacccaggatgccatgctgatcttcgccaacctgagccggggcttcggccggcagggcaagcggaccttcatggccgagagacagtacacacggatggaggactggctgaccgccaagctggcctacgagggcctgagcaagacctacctgtccaagacactggcccagtacacctccaagacatgcagcaactgtgggtttaccatcaccagcgccgactacgacagggtgctggagaagctgaagaagacagcaacaggctggatgaccacaattaacggcaaggagctgaaggtggagggccagattacctactacaacagatacaagagacagaacgtagtcaaggacctgtccgtcgagctggatagactgagcgaagaatctgtgaacaacgacatctcctcctggacaaagggcagaagcggagaagctctgagcctcctgaagaaaagattctcccatagacccgtgcaggagaagttcgtgtgcctgaactgcggcttcgagacacacgcagccgagcaagccgccctgaacatcgccagatcctggctgttcctgcggagccaggagtacaagaaataccagacaaacaagacaaccggcaacaccgataagagagccttcgtcgagacctggcagtccttttaccggaagaagcttaaggaggtgtggaaacctgccgtgcggtctggcggatctggcggaggctccaccagccccaagaaaaagagaaaagtctaagctgccttctgcggggcttgccttctggccatgcccttcttctctcccttgcacctgtacctcttggtctttgaataaagcctgagtaggaaggctagcaaaaaaaaaaaaaaaaaaaaaaaaaaaaaaaaaaaaaaaaaaaaaaaaaaaaaaaaaaaaaaaaaaaaaaaaaaaaaaaagcccagccggctccccaacctctaccgaggagggcacctctgagtccgccacccccgagagcggccctggcacctccaccgagcccagcgagggcagcgcacccggcagccctgccggcagccccacctccacagaggagggaaccagcaccgagcccagcgaaggcagcgccccaggcaccagcaccgagcctagtgagcaggagattaaacggatcaacaagatcagaagaagacttgtgaaagacagcaacaccaagaaggccggcaagacaggccccatgaaaaccctgctggttagagtgatgacacccgatctgagagagcggctggaaaacctgagaaagaagcctgaaaatatcccccagcccatcagcaatacatctagagccaacctgaataagctgctgaccgattacaccgaaatgaagaaggcgatcctgcatgtgtactgggaagagttccagaaggaccctgtgggcctgatgagccgggtggcccagcctgccagcaagaagatcgatcagaacaagctgaaacctgagatggacgagaagggcaacctgaccaccgccggctttgcctgctctcagtgtggccagcccctgttcgtgtacaagctggagcaggtgtctgagaagggcaaggcttacaccaactacttcggacggtgcaatgtggccgagcacgaaaagctgatcctgctggcccagctgaagcccgagaaggatagcgacgaagccgtgacatatagcctgggaaagtttgggcagagggccctggatttctacagcattcatgtgaccaaggagtccacccaccccgtgaagcccctggcccagatcgccggaaacagatacgcctccggacctgtgggaaaggccctgagcgacgcatgtatgggcacaatcgcctccttcctgtctaagtaccaggacatcatcatcgaacaccagaaggtggtgaagggcaaccagaagagactggagagcctgcgggagctggccggcaaggaaaacctggaataccctagcgtgaccctgccacctcagcctcacaccaaggagggcgttgatgcctacaacgaagtgatcgcccgggtgcgaatgtgggtgaacctgaacctgtggcagaagctgaagctaagcagagatgatgccaagcctctgctgagactgaagggattcccttcctttcctctggtcgagagacaggccaacgaagtggactggtgggacatggtgtgtaacgtgaagaagctgatcaacgagaaaaaggaggatggcaaggtgttttggcagaatctggctggctacaagagacaggaagccctgagaccatacctgagcagcgaggaagatcggaagaagggaaagaaattcgctcggtaccagctgggcgacctgctgctgcacctggaaaagaagcacggcgaggactggggaaaggtgtacgacgaggcctgggagcggattgacaagaaagtggaaggcctgagcaagcacatcaagctggaagaggaacggagaagcgaggacgcccagagcaaggccgccctgaccgactggctgcgggctaaggccagcttcgtgatcgagggcctgaaggaggccgacaaggacgagttctgcagatgcgagctgaagctgcagaagtggtacggggacctgcggggaaagcccttcgccatcgaagccgagaacagcatcctggacatcagcggcttcagcaagcagtacaactgtgccttcatctggcagaaggacggcgtgaagaagctgaacctgtacctgatcatcaactacttcaagggcggcaagctgcggttcaagaagatcaaacctgaagccttcgaagccaacagattctacaccgtgatcaacaaaaagagcggcgagatcgtgcccatggaggtgaacttcaacttcgacgaccccaacctgatcatcctgcctctggcctttggcaagagacagggcagagaattcatctggaacgacctgctgtccctggaaaccggcagcctgaagctggccaacggaagagtgatcgagaagacactgtacaacagaagaacccggcaggatgagcctgccctgttcgtggccctgaccttcgagcggcgggaggtcctggactcctccaatatcaaaccaatgaacctgatcggcgtggcaagaggcgaaaacatccccgccgtgatcgccctgaccgaccccgagggctgcccactgagccggtttaaggatagcctgggaaacccaacccacatcctgagaatcggcgagagctataaggagaagcagcggaccatccaggccaagaaggaggtggagcagcggagagccggcggctacagccggaagtacgccagcaaagccaagaatctggcagacgatatggtgagaaacaccgctagagatctgctgtactacgccgtgacccaggatgccatgctgatcttcgccaacctgagccggggcttcggccggcagggcaagcggaccttcatggccgagagacagtacacacggatggaggactggctgaccgccaagctggcctacgagggcctgagcaagacctacctgtccaagacactggcccagtacacctccaagacatgcagcaactgtgggtttaccatcaccagcgccgactacgacagggtgctggagaagctgaagaagacagcaacaggctggatgaccacaattaacggcaaggagctgaaggtggagggccagattacctactacaacagatacaagagacagaacgtagtcaaggacctgtccgtcgagctggatagactgagcgaagaatctgtgaacaacgacatctcctcctggacaaagggcagaagcggagaagctctgagcctcctgaagaaaagattctcccatagacccgtgcaggagaagttcgtgtgcctgaactgcggcttcgagacacacgcagccgagcaagccgccctgaacatcgccagatcctggctgttcctgcggagccaggagtacaagaaataccagacaaacaagacaaccggcaacaccgataagagagccttcgtcgagacctggcagtccttttaccggaagaagcttaaggaggtgtggaaacctgccgtgcggtctggcggatctggcggaggctccaccagccccaagaaaaagagaaaagtctaagctgccttctgcggggcttgccttctggccatgcccttcttctctcccttgcacctgtacctcttggtctttgaataaagcctgagtaggaaggctagcaaaaaaaaaaaaaaaaaaaaaaaaaaaaaaaaaaaaaaaaaaaaaaaaaaaaaaaaaaaaaaaaaaaaaaaaaaaaaaaa

SEQ ID NO: 9242 - RNA, 8787 nt, synthetic construct
  source 1..8787: mol_type = other RNA
aggaaataagagagaaaagaagagtaagaagaaatataagagccaccatggcccctaagaagaagcgtaaagtgagccggatgaaccacgaccaggagttcgacccccctaaggtgtaccctcccgtccccgccgagaagagaaagcccatccgggtcctgagcctgttcgatggcatcgccaccggtctgctggtgctgaaggacctgggcatccaggtggataggtacattgcctccgaggtgtgcgaggactccatcaccgtgggaatggtgcgtcatcagggcaagatcatgtacgtgggcgacgtgcggagcgtgacacagaagcatatccaggagtggggccctttcgacctggtgatcggcggcagcccttgcaatgacctgagcatcgtgaacccagcccggaagggcctgtacgagggaaccggcagactgttcttcgagttttacagactgctgcacgacgcccggcctaaggaaggcgacgaccggcccttcttttggctgttcgagaatgtggtggccatgggagtcagcgacaagcgggatattagccggttcctggagagcaaccccgtgatgatcgatgccaaggaagtgagcgccgcccaccgggccagatacttctggggcaatctgcctggcatgaacagacccctggccagcaccgtgaacgacaagctggagctgcaggagtgcctggagcacggccggatcgccaagttcagcaaggtgagaaccatcaccacccgaagcaacagcatcaaacaaggcaaggaccagcactttcctgtgttcatgaacgagaaggaggacatcctgtggtgtaccgagatggagagagtgttcgggttcccagtccactacacagatgtcagcaacatgtctagactggccagacagagactgctgggaagaagctggtccgtccctgtgatcagacacctgttcgcccctctgaaggagtacttcgcctgcgtgagcagcggcaacagcaacgccaacagccggggccccagcttctctagcggcctggtgccactgtccctgagagggagccacatgggccccatggagatctacaaaaccgtgagcgcctggaagcggcagcctgtgcgcgtgctgagcctgtttcggaatatcgataaagtcctgaaaagcctgggattcctggagagcggctctggctccggcggtggcaccctgaagtacgtggaggatgtgacaaacgtggtcagacgggatgtggagaagtggggccccttcgatctggtgtacggcagcacccaacccctgggcagctcttgtgaccggtgccctggctggtacatgtttcagttccaccggatcctgcagtacgccctgccgagacaggagtcccagcggccattcttttggattttcatggacaacttgctgctgaccgaggatgaccaggaaactaccactcggttcctgcagaccgaagccgtgaccctgcaggacgtgagaggccgggactaccagaacgccatgcgggtgtggtccaacatccctggactgaaaagcaagcacgcacctctgacccctaaagaagaggagtacctgcaggcccaggtgcggagcagaagcaagctggacgcccctaaggtggatctgctggtgaagaattgcctcctgcccctgagagagtacttcaagtatttcagccagaatagtctgcccctgggaggcagcggcggcggcagcgagaccggcaacgccgtgacctacgacgacgtgcacatcagcttcaccagcaaggagtgggccctgctggaccccagccagaagagcctgtacaaggacgtgatgctggagatctacagccacctgaccgccatcggctacaagtgggaggcccacgacagcgaggaccacggccagaggttcaggaggcagaggaggcacaagaggagccacaccgaggtgaagacctacaagtgcagcggcggcccaagcagcggcgcccctcctcccagcggcggcaggcggcccaagcagcggcgcccctcctcccagcggcggcagcccagccggctccccaacctctaccgaggagggcacctctgagtccgccacccccgagagcggccctggcacctccaccgagcccagcgagggcagcgcacccggcagccctgccggcagccccacctccacagaggagggaaccagcaccgagcccagcgaaggcagcgccccaggcaccagcaccgagcctagtgagcaggagattaaacggatcaacaagatcagaagaagacttgtgaaagacagcaacaccaagaaggccggcaagacaggccccatgaaaaccctgctggttagagtgatgacacccgatctgagagagcggctggaaaacctgagaaagaagcctgaaaatatcccccagcccatcagcaatacatctagagccaacctgaataagctgctgaccgattacaccgaaatgaagaaggcgatcctgcatgtgtactgggaagagttccagaaggaccctgtgggcctgatgagccgggtggcccagcctgccagcaagaagatcgatcagaacaagctgaaacctgagatggacgagaagggcaacctgaccaccgccggctttgcctgctctcagtgtggccagcccctgttcgtgtacaagctggagcaggtgtctgagaagggcaaggcttacaccaactacttcggacggtgcaatgtggccgagcacgaaaagctgatcctgctggcccagctgaagcccgagaaggatagcgacgaagccgtgacatatagcctgggaaagtttgggcagagggccctggatttctacagcattcatgtgaccaaggagtccacccaccccgtgaagcccctggcccagatcgccggaaacagatacgcctccggacctgtgggaaaggccctgagcgacgcatgtatgggcacaatcgcctccttcctgtctaagtaccaggacatcatcatcgaacaccagaaggtggtgaagggcaaccagaagagactggagagcctgcgggagctggccggcaaggaaaacctggaataccctagcgtgaccctgccacctcagcctcacaccaaggagggcgttgatgcctacaacgaagtgatcgcccgggtgcgaatgtgggtgaacctgaacctgtggcagaagctgaagctaagcagagatgatgccaagcctctgctgagactgaagggattcccttcctttcctctggtcgagagacaggccaacgaagtggactggtgggacatggtgtgtaacgtgaagaagctgatcaacgagaaaaaggaggatggcaaggtgttttggcagaatctggctggctacaagagacaggaagccctgagaccatacctgagcagcgaggaagatcggaagaagggaaagaaattcgctcggtaccagctgggcgacctgctgctgcacctggaaaagaagcacggcgaggactggggaaaggtgtacgacgaggcctgggagcggattgacaagaaagtggaaggcctgagcaagcacatcaagctggaagaggaacggagaagcgaggacgcccagagcaaggccgccctgaccgactggctgcgggctaaggccagcttcgtgatcgagggcctgaaggaggccgacaaggacgagttctgcagatgcgagctgaagctgcagaagtggtacggggacctgcggggaaagcccttcgccatcgaagccgagaacagcatcctggacatcagcggcttcagcaagcagtacaactgtgccttcatctggcagaaggacggcgtgaagaagctgaacctgtacctgatcatcaactacttcaagggcggcaagctgcggttcaagaagatcaaacctgaagccttcgaagccaacagattctacaccgtgatcaacaaaaagagcggcgagatcgtgcccatggaggtgaacttcaacttcgacgaccccaacctgatcatcctgcctctggcctttggcaagagacagggcagagaattcatctggaacgacctgctgtccctggaaaccggcagcctgaagctggccaacggaagagtgatcgagaagacactgtacaacagaagaacccggcaggatgagcctgccctgttcgtggccctgaccttcgagcggcgggaggtcctggactcctccaatatcaaaccaatgaacctgatcggcgtggcaagaggcgaaaacatccccgccgtgatcgccctgaccgaccccgagggctgcccactgagccggtttaaggatagcctgggaaacccaacccacatcctgagaatcggcgagagctataaggagaagcagcggaccatccaggccaagaaggaggtggagcagcggagagccggcggctacagccggaagtacgccagcaaagccaagaatctggcagacgatatggtgagaaacaccgctagagatctgctgtactacgccgtgacccaggatgccatgctgatcttcgccaacctgagccggggcttcggccggcagggcaagcggaccttcatggccgagagacagtacacacggatggaggactggctgaccgccaagctggcctacgagggcctgagcaagacctacctgtccaagacactggcccagtacacctccaagacatgcagcaactgtgggtttaccatcaccagcgccgactacgacagggtgctggagaagctgaagaagacagcaacaggctggatgaccacaattaacggcaaggagctgaaggtggagggccagattacctactacaacagatacaagagacagaacgtagtcaaggacctgtccgtcgagctggatagactgagcgaagaatctgtgaacaacgacatctcctcctggacaaagggcagaagcggagaagctctgagcctcctgaagaaaagattctcccatagacccgtgcaggagaagttcgtgtgcctgaactgcggcttcgagacacacgcagccgagcaagccgccctgaacatcgccagatcctggctgttcctgcggagccaggagtacaagaaataccagacaaacaagacaaccggcaacaccgataagagagccttcgtcgagacctggcagtccttttaccggaagaagcttaaggaggtgtggaaacctgccgtgcggtctggcggatctggcggaggctccaccagccccaagaaaaagagaaaagtctaagctgccttctgcggggcttgccttctggccatgcccttcttctctcccttgcacctgtacctcttggtctttgaataaagcctgagtaggaaggctagcaaaaaaaaaaaaaaaaaaaaaaaaaaaaaaaaaaaaaaaaaaaaaaaaaaaaaaaaaaaaaaaaaaaaaaaaaaaaaaaagcccagccggctccccaacctctaccgaggagggcacctctgagtccgccacccccgagagcggccctggcacctccaccgagcccagcgagggcagcgcacccggcagccctgccggcagccccacctccacagaggagggaaccagcaccgagcccagcgaaggcagcgccccaggcaccagcaccgagcctagtgagcaggagattaaacggatcaacaagatcagaagaagacttgtgaaagacagcaacaccaagaaggccggcaagacaggccccatgaaaaccctgctggttagagtgatgacacccgatctgagagagcggctggaaaacctgagaaagaagcctgaaaatatcccccagcccatcagcaatacatctagagccaacctgaataagctgctgaccgattacaccgaaatgaagaaggcgatcctgcatgtgtactgggaagagttccagaaggaccctgtgggcctgatgagccgggtggcccagcctgccagcaagaagatcgatcagaacaagctgaaacctgagatggacgagaagggcaacctgaccaccgccggctttgcctgctctcagtgtggccagcccctgttcgtgtacaagctggagcaggtgtctgagaagggcaaggcttacaccaactacttcggacggtgcaatgtggccgagcacgaaaagctgatcctgctggcccagctgaagcccgagaaggatagcgacgaagccgtgacatatagcctgggaaagtttgggcagagggccctggatttctacagcattcatgtgaccaaggagtccacccaccccgtgaagcccctggcccagatcgccggaaacagatacgcctccggacctgtgggaaaggccctgagcgacgcatgtatgggcacaatcgcctccttcctgtctaagtaccaggacatcatcatcgaacaccagaaggtggtgaagggcaaccagaagagactggagagcctgcgggagctggccggcaaggaaaacctggaataccctagcgtgaccctgccacctcagcctcacaccaaggagggcgttgatgcctacaacgaagtgatcgcccgggtgcgaatgtgggtgaacctgaacctgtggcagaagctgaagctaagcagagatgatgccaagcctctgctgagactgaagggattcccttcctttcctctggtcgagagacaggccaacgaagtggactggtgggacatggtgtgtaacgtgaagaagctgatcaacgagaaaaaggaggatggcaaggtgttttggcagaatctggctggctacaagagacaggaagccctgagaccatacctgagcagcgaggaagatcggaagaagggaaagaaattcgctcggtaccagctgggcgacctgctgctgcacctggaaaagaagcacggcgaggactggggaaaggtgtacgacgaggcctgggagcggattgacaagaaagtggaaggcctgagcaagcacatcaagctggaagaggaacggagaagcgaggacgcccagagcaaggccgccctgaccgactggctgcgggctaaggccagcttcgtgatcgagggcctgaaggaggccgacaaggacgagttctgcagatgcgagctgaagctgcagaagtggtacggggacctgcggggaaagcccttcgccatcgaagccgagaacagcatcctggacatcagcggcttcagcaagcagtacaactgtgccttcatctggcagaaggacggcgtgaagaagctgaacctgtacctgatcatcaactacttcaagggcggcaagctgcggttcaagaagatcaaacctgaagccttcgaagccaacagattctacaccgtgatcaacaaaaagagcggcgagatcgtgcccatggaggtgaacttcaacttcgacgaccccaacctgatcatcctgcctctggcctttggcaagagacagggcagagaattcatctggaacgacctgctgtccctggaaaccggcagcctgaagctggccaacggaagagtgatcgagaagacactgtacaacagaagaacccggcaggatgagcctgccctgttcgtggccctgaccttcgagcggcgggaggtcctggactcctccaatatcaaaccaatgaacctgatcggcgtggcaagaggcgaaaacatccccgccgtgatcgccctgaccgaccccgagggctgcccactgagccggtttaaggatagcctgggaaacccaacccacatcctgagaatcggcgagagctataaggagaagcagcggaccatccaggccaagaaggaggtggagcagcggagagccggcggctacagccggaagtacgccagcaaagccaagaatctggcagacgatatggtgagaaacaccgctagagatctgctgtactacgccgtgacccaggatgccatgctgatcttcgccaacctgagccggggcttcggccggcagggcaagcggaccttcatggccgagagacagtacacacggatggaggactggctgaccgccaagctggcctacgagggcctgagcaagacctacctgtccaagacactggcccagtacacctccaagacatgcagcaactgtgggtttaccatcaccagcgccgactacgacagggtgctggagaagctgaagaagacagcaacaggctggatgaccacaattaacggcaaggagctgaaggtggagggccagattacctactacaacagatacaagagacagaacgtagtcaaggacctgtccgtcgagctggatagactgagcgaagaatctgtgaacaacgacatctcctcctggacaaagggcagaagcggagaagctctgagcctcctgaagaaaagattctcccatagacccgtgcaggagaagttcgtgtgcctgaactgcggcttcgagacacacgcagccgagcaagccgccctgaacatcgccagatcctggctgttcctgcggagccaggagtacaagaaataccagacaaacaagacaaccggcaacaccgataagagagccttcgtcgagacctggcagtccttttaccggaagaagcttaaggaggtgtggaaacctgccgtgcggtctggcggatctggcggaggctccaccagccccaagaaaaagagaaaagtctaagctgccttctgcggggcttgccttctggccatgcccttcttctctcccttgcacctgtacctcttggtctttgaataaagcctgagtaggaaggctagcaaaaaaaaaaaaaaaaaaaaaaaaaaaaaaaaaaaaaaaaaaaaaaaaaaaaaaaaaaaaaaaaaaaaaaaaaaaaaaaa

SEQ ID NO: 9243 - RNA, 8787 nt, synthetic construct
  source 1..8787: mol_type = other RNA
aggaaataagagagaaaagaagagtaagaagaaatataagagccaccatggcccctaagaagaagcgtaaagtgagccggatgaaccacgaccaggagttcgacccccctaaggtgtaccctcccgtccccgccgagaagagaaagcccatccgggtcctgagcctgttcgatggcatcgccaccggtctgctggtgctgaaggacctgggcatccaggtggataggtacattgcctccgaggtgtgcgaggactccatcaccgtgggaatggtgcgtcatcagggcaagatcatgtacgtgggcgacgtgcggagcgtgacacagaagcatatccaggagtggggccctttcgacctggtgatcggcggcagcccttgcaatgacctgagcatcgtgaacccagcccggaagggcctgtacgagggaaccggcagactgttcttcgagttttacagactgctgcacgacgcccggcctaaggaaggcgacgaccggcccttcttttggctgttcgagaatgtggtggccatgggagtcagcgacaagcgggatattagccggttcctggagagcaaccccgtgatgatcgatgccaaggaagtgagcgccgcccaccgggccagatacttctggggcaatctgcctggcatgaacagacccctggccagcaccgtgaacgacaagctggagctgcaggagtgcctggagcacggccggatcgccaagttcagcaaggtgagaaccatcaccacccgaagcaacagcatcaaacaaggcaaggaccagcactttcctgtgttcatgaacgagaaggaggacatcctgtggtgtaccgagatggagagagtgttcgggttcccagtccactacacagatgtcagcaacatgtctagactggccagacagagactgctgggaagaagctggtccgtccctgtgatcagacacctgttcgcccctctgaaggagtacttcgcctgcgtgagcagcggcaacagcaacgccaacagccggggccccagcttctctagcggcctggtgccactgtccctgagagggagccacatgggccccatggagatctacaaaaccgtgagcgcctggaagcggcagcctgtgcgcgtgctgagcctgtttcggaatatcgataaagtcctgaaaagcctgggattcctggagagcggctctggctccggcggtggcaccctgaagtacgtggaggatgtgacaaacgtggtcagacgggatgtggagaagtggggccccttcgatctggtgtacggcagcacccaacccctgggcagctcttgtgaccggtgccctggctggtacatgtttcagttccaccggatcctgcagtacgccctgccgagacaggagtcccagcggccattcttttggattttcatggacaacttgctgctgaccgaggatgaccaggaaactaccactcggttcctgcagaccgaagccgtgaccctgcaggacgtgagaggccgggactaccagaacgccatgcgggtgtggtccaacatccctggactgaaaagcaagcacgcacctctgacccctaaagaagaggagtacctgcaggcccaggtgcggagcagaagcaagctggacgcccctaaggtggatctgctggtgaagaattgcctcctgcccctgagagagtacttcaagtatttcagccagaatagtctgcccctgggaggcagcggcggcggcgtgtgcggcagcgtgaccttcaaggacgtggccgtggacttcagccaggaggagtgggcctgcctggacgccacccagaaggtgctgtacagggacatgatgctggagacctacagcaacctggtggccgtggtgggccactgcatcagcaagcccgacctgatcgtgctgctggagcaggagaaggagccctggatgaccgtgaaggaggagaccgacaggcccagccccgacctggaggccggcggcccaagcagcggcgcccctcctcccagcggcggcaggcggcccaagcagcggcgcccctcctcccagcggcggcagcccagccggctccccaacctctaccgaggagggcacctctgagtccgccacccccgagagcggccctggcacctccaccgagcccagcgagggcagcgcacccggcagccctgccggcagccccacctccacagaggagggaaccagcaccgagcccagcgaaggcagcgccccaggcaccagcaccgagcctagtgagcaggagattaaacggatcaacaagatcagaagaagacttgtgaaagacagcaacaccaagaaggccggcaagacaggccccatgaaaaccctgctggttagagtgatgacacccgatctgagagagcggctggaaaacctgagaaagaagcctgaaaatatcccccagcccatcagcaatacatctagagccaacctgaataagctgctgaccgattacaccgaaatgaagaaggcgatcctgcatgtgtactgggaagagttccagaaggaccctgtgggcctgatgagccgggtggcccagcctgccagcaagaagatcgatcagaacaagctgaaacctgagatggacgagaagggcaacctgaccaccgccggctttgcctgctctcagtgtggccagcccctgttcgtgtacaagctggagcaggtgtctgagaagggcaaggcttacaccaactacttcggacggtgcaatgtggccgagcacgaaaagctgatcctgctggcccagctgaagcccgagaaggatagcgacgaagccgtgacatatagcctgggaaagtttgggcagagggccctggatttctacagcattcatgtgaccaaggagtccacccaccccgtgaagcccctggcccagatcgccggaaacagatacgcctccggacctgtgggaaaggccctgagcgacgcatgtatgggcacaatcgcctccttcctgtctaagtaccaggacatcatcatcgaacaccagaaggtggtgaagggcaaccagaagagactggagagcctgcgggagctggccggcaaggaaaacctggaataccctagcgtgaccctgccacctcagcctcacaccaaggagggcgttgatgcctacaacgaagtgatcgcccgggtgcgaatgtgggtgaacctgaacctgtggcagaagctgaagctaagcagagatgatgccaagcctctgctgagactgaagggattcccttcctttcctctggtcgagagacaggccaacgaagtggactggtgggacatggtgtgtaacgtgaagaagctgatcaacgagaaaaaggaggatggcaaggtgttttggcagaatctggctggctacaagagacaggaagccctgagaccatacctgagcagcgaggaagatcggaagaagggaaagaaattcgctcggtaccagctgggcgacctgctgctgcacctggaaaagaagcacggcgaggactggggaaaggtgtacgacgaggcctgggagcggattgacaagaaagtggaaggcctgagcaagcacatcaagctggaagaggaacggagaagcgaggacgcccagagcaaggccgccctgaccgactggctgcgggctaaggccagcttcgtgatcgagggcctgaaggaggccgacaaggacgagttctgcagatgcgagctgaagctgcagaagtggtacggggacctgcggggaaagcccttcgccatcgaagccgagaacagcatcctggacatcagcggcttcagcaagcagtacaactgtgccttcatctggcagaaggacggcgtgaagaagctgaacctgtacctgatcatcaactacttcaagggcggcaagctgcggttcaagaagatcaaacctgaagccttcgaagccaacagattctacaccgtgatcaacaaaaagagcggcgagatcgtgcccatggaggtgaacttcaacttcgacgaccccaacctgatcatcctgcctctggcctttggcaagagacagggcagagaattcatctggaacgacctgctgtccctggaaaccggcagcctgaagctggccaacggaagagtgatcgagaagacactgtacaacagaagaacccggcaggatgagcctgccctgttcgtggccctgaccttcgagcggcgggaggtcctggactcctccaatatcaaaccaatgaacctgatcggcgtggcaagaggcgaaaacatccccgccgtgatcgccctgaccgaccccgagggctgcccactgagccggtttaaggatagcctgggaaacccaacccacatcctgagaatcggcgagagctataaggagaagcagcggaccatccaggccaagaaggaggtggagcagcggagagccggcggctacagccggaagtacgccagcaaagccaagaatctggcagacgatatggtgagaaacaccgctagagatctgctgtactacgccgtgacccaggatgccatgctgatcttcgccaacctgagccggggcttcggccggcagggcaagcggaccttcatggccgagagacagtacacacggatggaggactggctgaccgccaagctggcctacgagggcctgagcaagacctacctgtccaagacactggcccagtacacctccaagacatgcagcaactgtgggtttaccatcaccagcgccgactacgacagggtgctggagaagctgaagaagacagcaacaggctggatgaccacaattaacggcaaggagctgaaggtggagggccagattacctactacaacagatacaagagacagaacgtagtcaaggacctgtccgtcgagctggatagactgagcgaagaatctgtgaacaacgacatctcctcctggacaaagggcagaagcggagaagctctgagcctcctgaagaaaagattctcccatagacccgtgcaggagaagttcgtgtgcctgaactgcggcttcgagacacacgcagccgagcaagccgccctgaacatcgccagatcctggctgttcctgcggagccaggagtacaagaaataccagacaaacaagacaaccggcaacaccgataagagagccttcgtcgagacctggcagtccttttaccggaagaagcttaaggaggtgtggaaacctgccgtgcggtctggcggatctggcggaggctccaccagccccaagaaaaagagaaaagtctaagctgccttctgcggggcttgccttctggccatgcccttcttctctcccttgcacctgtacctcttggtctttgaataaagcctgagtaggaaggctagcaaaaaaaaaaaaaaaaaaaaaaaaaaaaaaaaaaaaaaaaaaaaaaaaaaaaaaaaaaaaaaaaaaaaaaaaaaaaaaaagcccagccggctccccaacctctaccgaggagggcacctctgagtccgccacccccgagagcggccctggcacctccaccgagcccagcgagggcagcgcacccggcagccctgccggcagccccacctccacagaggagggaaccagcaccgagcccagcgaaggcagcgccccaggcaccagcaccgagcctagtgagcaggagattaaacggatcaacaagatcagaagaagacttgtgaaagacagcaacaccaagaaggccggcaagacaggccccatgaaaaccctgctggttagagtgatgacacccgatctgagagagcggctggaaaacctgagaaagaagcctgaaaatatcccccagcccatcagcaatacatctagagccaacctgaataagctgctgaccgattacaccgaaatgaagaaggcgatcctgcatgtgtactgggaagagttccagaaggaccctgtgggcctgatgagccgggtggcccagcctgccagcaagaagatcgatcagaacaagctgaaacctgagatggacgagaagggcaacctgaccaccgccggctttgcctgctctcagtgtggccagcccctgttcgtgtacaagctggagcaggtgtctgagaagggcaaggcttacaccaactacttcggacggtgcaatgtggccgagcacgaaaagctgatcctgctggcccagctgaagcccgagaaggatagcgacgaagccgtgacatatagcctgggaaagtttgggcagagggccctggatttctacagcattcatgtgaccaaggagtccacccaccccgtgaagcccctggcccagatcgccggaaacagatacgcctccggacctgtgggaaaggccctgagcgacgcatgtatgggcacaatcgcctccttcctgtctaagtaccaggacatcatcatcgaacaccagaaggtggtgaagggcaaccagaagagactggagagcctgcgggagctggccggcaaggaaaacctggaataccctagcgtgaccctgccacctcagcctcacaccaaggagggcgttgatgcctacaacgaagtgatcgcccgggtgcgaatgtgggtgaacctgaacctgtggcagaagctgaagctaagcagagatgatgccaagcctctgctgagactgaagggattcccttcctttcctctggtcgagagacaggccaacgaagtggactggtgggacatggtgtgtaacgtgaagaagctgatcaacgagaaaaaggaggatggcaaggtgttttggcagaatctggctggctacaagagacaggaagccctgagaccatacctgagcagcgaggaagatcggaagaagggaaagaaattcgctcggtaccagctgggcgacctgctgctgcacctggaaaagaagcacggcgaggactggggaaaggtgtacgacgaggcctgggagcggattgacaagaaagtggaaggcctgagcaagcacatcaagctggaagaggaacggagaagcgaggacgcccagagcaaggccgccctgaccgactggctgcgggctaaggccagcttcgtgatcgagggcctgaaggaggccgacaaggacgagttctgcagatgcgagctgaagctgcagaagtggtacggggacctgcggggaaagcccttcgccatcgaagccgagaacagcatcctggacatcagcggcttcagcaagcagtacaactgtgccttcatctggcagaaggacggcgtgaagaagctgaacctgtacctgatcatcaactacttcaagggcggcaagctgcggttcaagaagatcaaacctgaagccttcgaagccaacagattctacaccgtgatcaacaaaaagagcggcgagatcgtgcccatggaggtgaacttcaacttcgacgaccccaacctgatcatcctgcctctggcctttggcaagagacagggcagagaattcatctggaacgacctgctgtccctggaaaccggcagcctgaagctggccaacggaagagtgatcgagaagacactgtacaacagaagaacccggcaggatgagcctgccctgttcgtggccctgaccttcgagcggcgggaggtcctggactcctccaatatcaaaccaatgaacctgatcggcgtggcaagaggcgaaaacatccccgccgtgatcgccctgaccgaccccgagggctgcccactgagccggtttaaggatagcctgggaaacccaacccacatcctgagaatcggcgagagctataaggagaagcagcggaccatccaggccaagaaggaggtggagcagcggagagccggcggctacagccggaagtacgccagcaaagccaagaatctggcagacgatatggtgagaaacaccgctagagatctgctgtactacgccgtgacccaggatgccatgctgatcttcgccaacctgagccggggcttcggccggcagggcaagcggaccttcatggccgagagacagtacacacggatggaggactggctgaccgccaagctggcctacgagggcctgagcaagacctacctgtccaagacactggcccagtacacctccaagacatgcagcaactgtgggtttaccatcaccagcgccgactacgacagggtgctggagaagctgaagaagacagcaacaggctggatgaccacaattaacggcaaggagctgaaggtggagggccagattacctactacaacagatacaagagacagaacgtagtcaaggacctgtccgtcgagctggatagactgagcgaagaatctgtgaacaacgacatctcctcctggacaaagggcagaagcggagaagctctgagcctcctgaagaaaagattctcccatagacccgtgcaggagaagttcgtgtgcctgaactgcggcttcgagacacacgcagccgagcaagccgccctgaacatcgccagatcctggctgttcctgcggagccaggagtacaagaaataccagacaaacaagacaaccggcaacaccgataagagagccttcgtcgagacctggcagtccttttaccggaagaagcttaaggaggtgtggaaacctgccgtgcggtctggcggatctggcggaggctccaccagccccaagaaaaagagaaaagtctaagctgccttctgcggggcttgccttctggccatgcccttcttctctcccttgcacctgtacctcttggtctttgaataaagcctgagtaggaaggctagcaaaaaaaaaaaaaaaaaaaaaaaaaaaaaaaaaaaaaaaaaaaaaaaaaaaaaaaaaaaaaaaaaaaaaaaaaaaaaaaa

SEQ ID NO: 9244 - RNA, 8787 nt, synthetic construct
  source 1..8787: mol_type = other RNA
aggaaataagagagaaaagaagagtaagaagaaatataagagccaccatggcccctaagaagaagcgtaaagtgagccggatgaaccacgaccaggagttcgacccccctaaggtgtaccctcccgtccccgccgagaagagaaagcccatccgggtcctgagcctgttcgatggcatcgccaccggtctgctggtgctgaaggacctgggcatccaggtggataggtacattgcctccgaggtgtgcgaggactccatcaccgtgggaatggtgcgtcatcagggcaagatcatgtacgtgggcgacgtgcggagcgtgacacagaagcatatccaggagtggggccctttcgacctggtgatcggcggcagcccttgcaatgacctgagcatcgtgaacccagcccggaagggcctgtacgagggaaccggcagactgttcttcgagttttacagactgctgcacgacgcccggcctaaggaaggcgacgaccggcccttcttttggctgttcgagaatgtggtggccatgggagtcagcgacaagcgggatattagccggttcctggagagcaaccccgtgatgatcgatgccaaggaagtgagcgccgcccaccgggccagatacttctggggcaatctgcctggcatgaacagacccctggccagcaccgtgaacgacaagctggagctgcaggagtgcctggagcacggccggatcgccaagttcagcaaggtgagaaccatcaccacccgaagcaacagcatcaaacaaggcaaggaccagcactttcctgtgttcatgaacgagaaggaggacatcctgtggtgtaccgagatggagagagtgttcgggttcccagtccactacacagatgtcagcaacatgtctagactggccagacagagactgctgggaagaagctggtccgtccctgtgatcagacacctgttcgcccctctgaaggagtacttcgcctgcgtgagcagcggcaacagcaacgccaacagccggggccccagcttctctagcggcctggtgccactgtccctgagagggagccacatgggccccatggagatctacaaaaccgtgagcgcctggaagcggcagcctgtgcgcgtgctgagcctgtttcggaatatcgataaagtcctgaaaagcctgggattcctggagagcggctctggctccggcggtggcaccctgaagtacgtggaggatgtgacaaacgtggtcagacgggatgtggagaagtggggccccttcgatctggtgtacggcagcacccaacccctgggcagctcttgtgaccggtgccctggctggtacatgtttcagttccaccggatcctgcagtacgccctgccgagacaggagtcccagcggccattcttttggattttcatggacaacttgctgctgaccgaggatgaccaggaaactaccactcggttcctgcagaccgaagccgtgaccctgcaggacgtgagaggccgggactaccagaacgccatgcgggtgtggtccaacatccctggactgaaaagcaagcacgcacctctgacccctaaagaagaggagtacctgcaggcccaggtgcggagcagaagcaagctggacgcccctaaggtggatctgctggtgaagaattgcctcctgcccctgagagagtacttcaagtatttcagccagaatagtctgcccctgggaggcagcggcggcggcgcccaccacctggtgatgttcagggacgtggccgtggacttcagccaggaggagtgggagtgcctgaacagctaccagaggaacctgtacagggacgtgatcctggagaactacagcaacctggtgagcgtgggctgcagcatcagcaagcccgacgtgatcaccctgctggagcagggcaaggagccctggatggtggtgagggacgagaggaggaggaggagcctggacctggagagcaggggcggcccaagcagcggcgcccctcctcccagcggcggcaggcggcccaagcagcggcgcccctcctcccagcggcggcagcccagccggctccccaacctctaccgaggagggcacctctgagtccgccacccccgagagcggccctggcacctccaccgagcccagcgagggcagcgcacccggcagccctgccggcagccccacctccacagaggagggaaccagcaccgagcccagcgaaggcagcgccccaggcaccagcaccgagcctagtgagcaggagattaaacggatcaacaagatcagaagaagacttgtgaaagacagcaacaccaagaaggccggcaagacaggccccatgaaaaccctgctggttagagtgatgacacccgatctgagagagcggctggaaaacctgagaaagaagcctgaaaatatcccccagcccatcagcaatacatctagagccaacctgaataagctgctgaccgattacaccgaaatgaagaaggcgatcctgcatgtgtactgggaagagttccagaaggaccctgtgggcctgatgagccgggtggcccagcctgccagcaagaagatcgatcagaacaagctgaaacctgagatggacgagaagggcaacctgaccaccgccggctttgcctgctctcagtgtggccagcccctgttcgtgtacaagctggagcaggtgtctgagaagggcaaggcttacaccaactacttcggacggtgcaatgtggccgagcacgaaaagctgatcctgctggcccagctgaagcccgagaaggatagcgacgaagccgtgacatatagcctgggaaagtttgggcagagggccctggatttctacagcattcatgtgaccaaggagtccacccaccccgtgaagcccctggcccagatcgccggaaacagatacgcctccggacctgtgggaaaggccctgagcgacgcatgtatgggcacaatcgcctccttcctgtctaagtaccaggacatcatcatcgaacaccagaaggtggtgaagggcaaccagaagagactggagagcctgcgggagctggccggcaaggaaaacctggaataccctagcgtgaccctgccacctcagcctcacaccaaggagggcgttgatgcctacaacgaagtgatcgcccgggtgcgaatgtgggtgaacctgaacctgtggcagaagctgaagctaagcagagatgatgccaagcctctgctgagactgaagggattcccttcctttcctctggtcgagagacaggccaacgaagtggactggtgggacatggtgtgtaacgtgaagaagctgatcaacgagaaaaaggaggatggcaaggtgttttggcagaatctggctggctacaagagacaggaagccctgagaccatacctgagcagcgaggaagatcggaagaagggaaagaaattcgctcggtaccagctgggcgacctgctgctgcacctggaaaagaagcacggcgaggactggggaaaggtgtacgacgaggcctgggagcggattgacaagaaagtggaaggcctgagcaagcacatcaagctggaagaggaacggagaagcgaggacgcccagagcaaggccgccctgaccgactggctgcgggctaaggccagcttcgtgatcgagggcctgaaggaggccgacaaggacgagttctgcagatgcgagctgaagctgcagaagtggtacggggacctgcggggaaagcccttcgccatcgaagccgagaacagcatcctggacatcagcggcttcagcaagcagtacaactgtgccttcatctggcagaaggacggcgtgaagaagctgaacctgtacctgatcatcaactacttcaagggcggcaagctgcggttcaagaagatcaaacctgaagccttcgaagccaacagattctacaccgtgatcaacaaaaagagcggcgagatcgtgcccatggaggtgaacttcaacttcgacgaccccaacctgatcatcctgcctctggcctttggcaagagacagggcagagaattcatctggaacgacctgctgtccctggaaaccggcagcctgaagctggccaacggaagagtgatcgagaagacactgtacaacagaagaacccggcaggatgagcctgccctgttcgtggccctgaccttcgagcggcgggaggtcctggactcctccaatatcaaaccaatgaacctgatcggcgtggcaagaggcgaaaacatccccgccgtgatcgccctgaccgaccccgagggctgcccactgagccggtttaaggatagcctgggaaacccaacccacatcctgagaatcggcgagagctataaggagaagcagcggaccatccaggccaagaaggaggtggagcagcggagagccggcggctacagccggaagtacgccagcaaagccaagaatctggcagacgatatggtgagaaacaccgctagagatctgctgtactacgccgtgacccaggatgccatgctgatcttcgccaacctgagccggggcttcggccggcagggcaagcggaccttcatggccgagagacagtacacacggatggaggactggctgaccgccaagctggcctacgagggcctgagcaagacctacctgtccaagacactggcccagtacacctccaagacatgcagcaactgtgggtttaccatcaccagcgccgactacgacagggtgctggagaagctgaagaagacagcaacaggctggatgaccacaattaacggcaaggagctgaaggtggagggccagattacctactacaacagatacaagagacagaacgtagtcaaggacctgtccgtcgagctggatagactgagcgaagaatctgtgaacaacgacatctcctcctggacaaagggcagaagcggagaagctctgagcctcctgaagaaaagattctcccatagacccgtgcaggagaagttcgtgtgcctgaactgcggcttcgagacacacgcagccgagcaagccgccctgaacatcgccagatcctggctgttcctgcggagccaggagtacaagaaataccagacaaacaagacaaccggcaacaccgataagagagccttcgtcgagacctggcagtccttttaccggaagaagcttaaggaggtgtggaaacctgccgtgcggtctggcggatctggcggaggctccaccagccccaagaaaaagagaaaagtctaagctgccttctgcggggcttgccttctggccatgcccttcttctctcccttgcacctgtacctcttggtctttgaataaagcctgagtaggaaggctagcaaaaaaaaaaaaaaaaaaaaaaaaaaaaaaaaaaaaaaaaaaaaaaaaaaaaaaaaaaaaaaaaaaaaaaaaaaaaaaaagcccagccggctccccaacctctaccgaggagggcacctctgagtccgccacccccgagagcggccctggcacctccaccgagcccagcgagggcagcgcacccggcagccctgccggcagccccacctccacagaggagggaaccagcaccgagcccagcgaaggcagcgccccaggcaccagcaccgagcctagtgagcaggagattaaacggatcaacaagatcagaagaagacttgtgaaagacagcaacaccaagaaggccggcaagacaggccccatgaaaaccctgctggttagagtgatgacacccgatctgagagagcggctggaaaacctgagaaagaagcctgaaaatatcccccagcccatcagcaatacatctagagccaacctgaataagctgctgaccgattacaccgaaatgaagaaggcgatcctgcatgtgtactgggaagagttccagaaggaccctgtgggcctgatgagccgggtggcccagcctgccagcaagaagatcgatcagaacaagctgaaacctgagatggacgagaagggcaacctgaccaccgccggctttgcctgctctcagtgtggccagcccctgttcgtgtacaagctggagcaggtgtctgagaagggcaaggcttacaccaactacttcggacggtgcaatgtggccgagcacgaaaagctgatcctgctggcccagctgaagcccgagaaggatagcgacgaagccgtgacatatagcctgggaaagtttgggcagagggccctggatttctacagcattcatgtgaccaaggagtccacccaccccgtgaagcccctggcccagatcgccggaaacagatacgcctccggacctgtgggaaaggccctgagcgacgcatgtatgggcacaatcgcctccttcctgtctaagtaccaggacatcatcatcgaacaccagaaggtggtgaagggcaaccagaagagactggagagcctgcgggagctggccggcaaggaaaacctggaataccctagcgtgaccctgccacctcagcctcacaccaaggagggcgttgatgcctacaacgaagtgatcgcccgggtgcgaatgtgggtgaacctgaacctgtggcagaagctgaagctaagcagagatgatgccaagcctctgctgagactgaagggattcccttcctttcctctggtcgagagacaggccaacgaagtggactggtgggacatggtgtgtaacgtgaagaagctgatcaacgagaaaaaggaggatggcaaggtgttttggcagaatctggctggctacaagagacaggaagccctgagaccatacctgagcagcgaggaagatcggaagaagggaaagaaattcgctcggtaccagctgggcgacctgctgctgcacctggaaaagaagcacggcgaggactggggaaaggtgtacgacgaggcctgggagcggattgacaagaaagtggaaggcctgagcaagcacatcaagctggaagaggaacggagaagcgaggacgcccagagcaaggccgccctgaccgactggctgcgggctaaggccagcttcgtgatcgagggcctgaaggaggccgacaaggacgagttctgcagatgcgagctgaagctgcagaagtggtacggggacctgcggggaaagcccttcgccatcgaagccgagaacagcatcctggacatcagcggcttcagcaagcagtacaactgtgccttcatctggcagaaggacggcgtgaagaagctgaacctgtacctgatcatcaactacttcaagggcggcaagctgcggttcaagaagatcaaacctgaagccttcgaagccaacagattctacaccgtgatcaacaaaaagagcggcgagatcgtgcccatggaggtgaacttcaacttcgacgaccccaacctgatcatcctgcctctggcctttggcaagagacagggcagagaattcatctggaacgacctgctgtccctggaaaccggcagcctgaagctggccaacggaagagtgatcgagaagacactgtacaacagaagaacccggcaggatgagcctgccctgttcgtggccctgaccttcgagcggcgggaggtcctggactcctccaatatcaaaccaatgaacctgatcggcgtggcaagaggcgaaaacatccccgccgtgatcgccctgaccgaccccgagggctgcccactgagccggtttaaggatagcctgggaaacccaacccacatcctgagaatcggcgagagctataaggagaagcagcggaccatccaggccaagaaggaggtggagcagcggagagccggcggctacagccggaagtacgccagcaaagccaagaatctggcagacgatatggtgagaaacaccgctagagatctgctgtactacgccgtgacccaggatgccatgctgatcttcgccaacctgagccggggcttcggccggcagggcaagcggaccttcatggccgagagacagtacacacggatggaggactggctgaccgccaagctggcctacgagggcctgagcaagacctacctgtccaagacactggcccagtacacctccaagacatgcagcaactgtgggtttaccatcaccagcgccgactacgacagggtgctggagaagctgaagaagacagcaacaggctggatgaccacaattaacggcaaggagctgaaggtggagggccagattacctactacaacagatacaagagacagaacgtagtcaaggacctgtccgtcgagctggatagactgagcgaagaatctgtgaacaacgacatctcctcctggacaaagggcagaagcggagaagctctgagcctcctgaagaaaagattctcccatagacccgtgcaggagaagttcgtgtgcctgaactgcggcttcgagacacacgcagccgagcaagccgccctgaacatcgccagatcctggctgttcctgcggagccaggagtacaagaaataccagacaaacaagacaaccggcaacaccgataagagagccttcgtcgagacctggcagtccttttaccggaagaagcttaaggaggtgtggaaacctgccgtgcggtctggcggatctggcggaggctccaccagccccaagaaaaagagaaaagtctaagctgccttctgcggggcttgccttctggccatgcccttcttctctcccttgcacctgtacctcttggtctttgaataaagcctgagtaggaaggctagcaaaaaaaaaaaaaaaaaaaaaaaaaaaaaaaaaaaaaaaaaaaaaaaaaaaaaaaaaaaaaaaaaaaaaaaaaaaaaaaa

SEQ ID NO: 9245 - RNA, 8787 nt, synthetic construct
  source 1..8787: mol_type = other RNA
aggaaataagagagaaaagaagagtaagaagaaatataagagccaccatggcccctaagaagaagcgtaaagtgagccggatgaaccacgaccaggagttcgacccccctaaggtgtaccctcccgtccccgccgagaagagaaagcccatccgggtcctgagcctgttcgatggcatcgccaccggtctgctggtgctgaaggacctgggcatccaggtggataggtacattgcctccgaggtgtgcgaggactccatcaccgtgggaatggtgcgtcatcagggcaagatcatgtacgtgggcgacgtgcggagcgtgacacagaagcatatccaggagtggggccctttcgacctggtgatcggcggcagcccttgcaatgacctgagcatcgtgaacccagcccggaagggcctgtacgagggaaccggcagactgttcttcgagttttacagactgctgcacgacgcccggcctaaggaaggcgacgaccggcccttcttttggctgttcgagaatgtggtggccatgggagtcagcgacaagcgggatattagccggttcctggagagcaaccccgtgatgatcgatgccaaggaagtgagcgccgcccaccgggccagatacttctggggcaatctgcctggcatgaacagacccctggccagcaccgtgaacgacaagctggagctgcaggagtgcctggagcacggccggatcgccaagttcagcaaggtgagaaccatcaccacccgaagcaacagcatcaaacaaggcaaggaccagcactttcctgtgttcatgaacgagaaggaggacatcctgtggtgtaccgagatggagagagtgttcgggttcccagtccactacacagatgtcagcaacatgtctagactggccagacagagactgctgggaagaagctggtccgtccctgtgatcagacacctgttcgcccctctgaaggagtacttcgcctgcgtgagcagcggcaacagcaacgccaacagccggggccccagcttctctagcggcctggtgccactgtccctgagagggagccacatgggccccatggagatctacaaaaccgtgagcgcctggaagcggcagcctgtgcgcgtgctgagcctgtttcggaatatcgataaagtcctgaaaagcctgggattcctggagagcggctctggctccggcggtggcaccctgaagtacgtggaggatgtgacaaacgtggtcagacgggatgtggagaagtggggccccttcgatctggtgtacggcagcacccaacccctgggcagctcttgtgaccggtgccctggctggtacatgtttcagttccaccggatcctgcagtacgccctgccgagacaggagtcccagcggccattcttttggattttcatggacaacttgctgctgaccgaggatgaccaggaaactaccactcggttcctgcagaccgaagccgtgaccctgcaggacgtgagaggccgggactaccagaacgccatgcgggtgtggtccaacatccctggactgaaaagcaagcacgcacctctgacccctaaagaagaggagtacctgcaggcccaggtgcggagcagaagcaagctggacgcccctaaggtggatctgctggtgaagaattgcctcctgcccctgagagagtacttcaagtatttcagccagaatagtctgcccctgggaggcagcggcggcggcttccagggcagcctgagcttcgaggacgtgaccgtgggcttcagccaggaggagtggcagcacctggaccccgcccagaggaccctgtacagggacgtgatgctggagaactacagccacctggtggccgtgggctgctgcgtgcccaagcccgacgtgatcttcaggctggagcagggccagcagccctggctggtggaggaggagagcctggaccagatctggcccgaggtgtgcagggtgggcggcccaagcagcggcgcccctcctcccagcggcggcaggcggcccaagcagcggcgcccctcctcccagcggcggcagcccagccggctccccaacctctaccgaggagggcacctctgagtccgccacccccgagagcggccctggcacctccaccgagcccagcgagggcagcgcacccggcagccctgccggcagccccacctccacagaggagggaaccagcaccgagcccagcgaaggcagcgccccaggcaccagcaccgagcctagtgagcaggagattaaacggatcaacaagatcagaagaagacttgtgaaagacagcaacaccaagaaggccggcaagacaggccccatgaaaaccctgctggttagagtgatgacacccgatctgagagagcggctggaaaacctgagaaagaagcctgaaaatatcccccagcccatcagcaatacatctagagccaacctgaataagctgctgaccgattacaccgaaatgaagaaggcgatcctgcatgtgtactgggaagagttccagaaggaccctgtgggcctgatgagccgggtggcccagcctgccagcaagaagatcgatcagaacaagctgaaacctgagatggacgagaagggcaacctgaccaccgccggctttgcctgctctcagtgtggccagcccctgttcgtgtacaagctggagcaggtgtctgagaagggcaaggcttacaccaactacttcggacggtgcaatgtggccgagcacgaaaagctgatcctgctggcccagctgaagcccgagaaggatagcgacgaagccgtgacatatagcctgggaaagtttgggcagagggccctggatttctacagcattcatgtgaccaaggagtccacccaccccgtgaagcccctggcccagatcgccggaaacagatacgcctccggacctgtgggaaaggccctgagcgacgcatgtatgggcacaatcgcctccttcctgtctaagtaccaggacatcatcatcgaacaccagaaggtggtgaagggcaaccagaagagactggagagcctgcgggagctggccggcaaggaaaacctggaataccctagcgtgaccctgccacctcagcctcacaccaaggagggcgttgatgcctacaacgaagtgatcgcccgggtgcgaatgtgggtgaacctgaacctgtggcagaagctgaagctaagcagagatgatgccaagcctctgctgagactgaagggattcccttcctttcctctggtcgagagacaggccaacgaagtggactggtgggacatggtgtgtaacgtgaagaagctgatcaacgagaaaaaggaggatggcaaggtgttttggcagaatctggctggctacaagagacaggaagccctgagaccatacctgagcagcgaggaagatcggaagaagggaaagaaattcgctcggtaccagctgggcgacctgctgctgcacctggaaaagaagcacggcgaggactggggaaaggtgtacgacgaggcctgggagcggattgacaagaaagtggaaggcctgagcaagcacatcaagctggaagaggaacggagaagcgaggacgcccagagcaaggccgccctgaccgactggctgcgggctaaggccagcttcgtgatcgagggcctgaaggaggccgacaaggacgagttctgcagatgcgagctgaagctgcagaagtggtacggggacctgcggggaaagcccttcgccatcgaagccgagaacagcatcctggacatcagcggcttcagcaagcagtacaactgtgccttcatctggcagaaggacggcgtgaagaagctgaacctgtacctgatcatcaactacttcaagggcggcaagctgcggttcaagaagatcaaacctgaagccttcgaagccaacagattctacaccgtgatcaacaaaaagagcggcgagatcgtgcccatggaggtgaacttcaacttcgacgaccccaacctgatcatcctgcctctggcctttggcaagagacagggcagagaattcatctggaacgacctgctgtccctggaaaccggcagcctgaagctggccaacggaagagtgatcgagaagacactgtacaacagaagaacccggcaggatgagcctgccctgttcgtggccctgaccttcgagcggcgggaggtcctggactcctccaatatcaaaccaatgaacctgatcggcgtggcaagaggcgaaaacatccccgccgtgatcgccctgaccgaccccgagggctgcccactgagccggtttaaggatagcctgggaaacccaacccacatcctgagaatcggcgagagctataaggagaagcagcggaccatccaggccaagaaggaggtggagcagcggagagccggcggctacagccggaagtacgccagcaaagccaagaatctggcagacgatatggtgagaaacaccgctagagatctgctgtactacgccgtgacccaggatgccatgctgatcttcgccaacctgagccggggcttcggccggcagggcaagcggaccttcatggccgagagacagtacacacggatggaggactggctgaccgccaagctggcctacgagggcctgagcaagacctacctgtccaagacactggcccagtacacctccaagacatgcagcaactgtgggtttaccatcaccagcgccgactacgacagggtgctggagaagctgaagaagacagcaacaggctggatgaccacaattaacggcaaggagctgaaggtggagggccagattacctactacaacagatacaagagacagaacgtagtcaaggacctgtccgtcgagctggatagactgagcgaagaatctgtgaacaacgacatctcctcctggacaaagggcagaagcggagaagctctgagcctcctgaagaaaagattctcccatagacccgtgcaggagaagttcgtgtgcctgaactgcggcttcgagacacacgcagccgagcaagccgccctgaacatcgccagatcctggctgttcctgcggagccaggagtacaagaaataccagacaaacaagacaaccggcaacaccgataagagagccttcgtcgagacctggcagtccttttaccggaagaagcttaaggaggtgtggaaacctgccgtgcggtctggcggatctggcggaggctccaccagccccaagaaaaagagaaaagtctaagctgccttctgcggggcttgccttctggccatgcccttcttctctcccttgcacctgtacctcttggtctttgaataaagcctgagtaggaaggctagcaaaaaaaaaaaaaaaaaaaaaaaaaaaaaaaaaaaaaaaaaaaaaaaaaaaaaaaaaaaaaaaaaaaaaaaaaaaaaaaagcccagccggctccccaacctctaccgaggagggcacctctgagtccgccacccccgagagcggccctggcacctccaccgagcccagcgagggcagcgcacccggcagccctgccggcagccccacctccacagaggagggaaccagcaccgagcccagcgaaggcagcgccccaggcaccagcaccgagcctagtgagcaggagattaaacggatcaacaagatcagaagaagacttgtgaaagacagcaacaccaagaaggccggcaagacaggccccatgaaaaccctgctggttagagtgatgacacccgatctgagagagcggctggaaaacctgagaaagaagcctgaaaatatcccccagcccatcagcaatacatctagagccaacctgaataagctgctgaccgattacaccgaaatgaagaaggcgatcctgcatgtgtactgggaagagttccagaaggaccctgtgggcctgatgagccgggtggcccagcctgccagcaagaagatcgatcagaacaagctgaaacctgagatggacgagaagggcaacctgaccaccgccggctttgcctgctctcagtgtggccagcccctgttcgtgtacaagctggagcaggtgtctgagaagggcaaggcttacaccaactacttcggacggtgcaatgtggccgagcacgaaaagctgatcctgctggcccagctgaagcccgagaaggatagcgacgaagccgtgacatatagcctgggaaagtttgggcagagggccctggatttctacagcattcatgtgaccaaggagtccacccaccccgtgaagcccctggcccagatcgccggaaacagatacgcctccggacctgtgggaaaggccctgagcgacgcatgtatgggcacaatcgcctccttcctgtctaagtaccaggacatcatcatcgaacaccagaaggtggtgaagggcaaccagaagagactggagagcctgcgggagctggccggcaaggaaaacctggaataccctagcgtgaccctgccacctcagcctcacaccaaggagggcgttgatgcctacaacgaagtgatcgcccgggtgcgaatgtgggtgaacctgaacctgtggcagaagctgaagctaagcagagatgatgccaagcctctgctgagactgaagggattcccttcctttcctctggtcgagagacaggccaacgaagtggactggtgggacatggtgtgtaacgtgaagaagctgatcaacgagaaaaaggaggatggcaaggtgttttggcagaatctggctggctacaagagacaggaagccctgagaccatacctgagcagcgaggaagatcggaagaagggaaagaaattcgctcggtaccagctgggcgacctgctgctgcacctggaaaagaagcacggcgaggactggggaaaggtgtacgacgaggcctgggagcggattgacaagaaagtggaaggcctgagcaagcacatcaagctggaagaggaacggagaagcgaggacgcccagagcaaggccgccctgaccgactggctgcgggctaaggccagcttcgtgatcgagggcctgaaggaggccgacaaggacgagttctgcagatgcgagctgaagctgcagaagtggtacggggacctgcggggaaagcccttcgccatcgaagccgagaacagcatcctggacatcagcggcttcagcaagcagtacaactgtgccttcatctggcagaaggacggcgtgaagaagctgaacctgtacctgatcatcaactacttcaagggcggcaagctgcggttcaagaagatcaaacctgaagccttcgaagccaacagattctacaccgtgatcaacaaaaagagcggcgagatcgtgcccatggaggtgaacttcaacttcgacgaccccaacctgatcatcctgcctctggcctttggcaagagacagggcagagaattcatctggaacgacctgctgtccctggaaaccggcagcctgaagctggccaacggaagagtgatcgagaagacactgtacaacagaagaacccggcaggatgagcctgccctgttcgtggccctgaccttcgagcggcgggaggtcctggactcctccaatatcaaaccaatgaacctgatcggcgtggcaagaggcgaaaacatccccgccgtgatcgccctgaccgaccccgagggctgcccactgagccggtttaaggatagcctgggaaacccaacccacatcctgagaatcggcgagagctataaggagaagcagcggaccatccaggccaagaaggaggtggagcagcggagagccggcggctacagccggaagtacgccagcaaagccaagaatctggcagacgatatggtgagaaacaccgctagagatctgctgtactacgccgtgacccaggatgccatgctgatcttcgccaacctgagccggggcttcggccggcagggcaagcggaccttcatggccgagagacagtacacacggatggaggactggctgaccgccaagctggcctacgagggcctgagcaagacctacctgtccaagacactggcccagtacacctccaagacatgcagcaactgtgggtttaccatcaccagcgccgactacgacagggtgctggagaagctgaagaagacagcaacaggctggatgaccacaattaacggcaaggagctgaaggtggagggccagattacctactacaacagatacaagagacagaacgtagtcaaggacctgtccgtcgagctggatagactgagcgaagaatctgtgaacaacgacatctcctcctggacaaagggcagaagcggagaagctctgagcctcctgaagaaaagattctcccatagacccgtgcaggagaagttcgtgtgcctgaactgcggcttcgagacacacgcagccgagcaagccgccctgaacatcgccagatcctggctgttcctgcggagccaggagtacaagaaataccagacaaacaagacaaccggcaacaccgataagagagccttcgtcgagacctggcagtccttttaccggaagaagcttaaggaggtgtggaaacctgccgtgcggtctggcggatctggcggaggctccaccagccccaagaaaaagagaaaagtctaagctgccttctgcggggcttgccttctggccatgcccttcttctctcccttgcacctgtacctcttggtctttgaataaagcctgagtaggaaggctagcaaaaaaaaaaaaaaaaaaaaaaaaaaaaaaaaaaaaaaaaaaaaaaaaaaaaaaaaaaaaaaaaaaaaaaaaaaaaaaaa

SEQ ID NO: 9246 - RNA, 8787 nt, synthetic construct
  source 1..8787: mol_type = other RNA
aggaaataagagagaaaagaagagtaagaagaaatataagagccaccatggcccctaagaagaagcgtaaagtgagccggatgaaccacgaccaggagttcgacccccctaaggtgtaccctcccgtccccgccgagaagagaaagcccatccgggtcctgagcctgttcgatggcatcgccaccggtctgctggtgctgaaggacctgggcatccaggtggataggtacattgcctccgaggtgtgcgaggactccatcaccgtgggaatggtgcgtcatcagggcaagatcatgtacgtgggcgacgtgcggagcgtgacacagaagcatatccaggagtggggccctttcgacctggtgatcggcggcagcccttgcaatgacctgagcatcgtgaacccagcccggaagggcctgtacgagggaaccggcagactgttcttcgagttttacagactgctgcacgacgcccggcctaaggaaggcgacgaccggcccttcttttggctgttcgagaatgtggtggccatgggagtcagcgacaagcgggatattagccggttcctggagagcaaccccgtgatgatcgatgccaaggaagtgagcgccgcccaccgggccagatacttctggggcaatctgcctggcatgaacagacccctggccagcaccgtgaacgacaagctggagctgcaggagtgcctggagcacggccggatcgccaagttcagcaaggtgagaaccatcaccacccgaagcaacagcatcaaacaaggcaaggaccagcactttcctgtgttcatgaacgagaaggaggacatcctgtggtgtaccgagatggagagagtgttcgggttcccagtccactacacagatgtcagcaacatgtctagactggccagacagagactgctgggaagaagctggtccgtccctgtgatcagacacctgttcgcccctctgaaggagtacttcgcctgcgtgagcagcggcaacagcaacgccaacagccggggccccagcttctctagcggcctggtgccactgtccctgagagggagccacatgggccccatggagatctacaaaaccgtgagcgcctggaagcggcagcctgtgcgcgtgctgagcctgtttcggaatatcgataaagtcctgaaaagcctgggattcctggagagcggctctggctccggcggtggcaccctgaagtacgtggaggatgtgacaaacgtggtcagacgggatgtggagaagtggggccccttcgatctggtgtacggcagcacccaacccctgggcagctcttgtgaccggtgccctggctggtacatgtttcagttccaccggatcctgcagtacgccctgccgagacaggagtcccagcggccattcttttggattttcatggacaacttgctgctgaccgaggatgaccaggaaactaccactcggttcctgcagaccgaagccgtgaccctgcaggacgtgagaggccgggactaccagaacgccatgcgggtgtggtccaacatccctggactgaaaagcaagcacgcacctctgacccctaaagaagaggagtacctgcaggcccaggtgcggagcagaagcaagctggacgcccctaaggtggatctgctggtgaagaattgcctcctgcccctgagagagtacttcaagtatttcagccagaatagtctgcccctgggaggcagcggcggcggcgcccaggagagcgtgaccttcgaggacgtggccgtgaacttcaccaacagggagtggcagagcctgacctacgcccagaggcacctgtacaagcacgtgatgctggagaactacggcaacatggtgagcctgggcttccccttccccaagccccccctgatcagccacctggagaggggcgtggagccctgcgtgcaggacccccaggacagggagagcctgagctgcagctaccccgtgagcggcggcccaagcagcggcgcccctcctcccagcggcggcaggcggcccaagcagcggcgcccctcctcccagcggcggcagcccagccggctccccaacctctaccgaggagggcacctctgagtccgccacccccgagagcggccctggcacctccaccgagcccagcgagggcagcgcacccggcagccctgccggcagccccacctccacagaggagggaaccagcaccgagcccagcgaaggcagcgccccaggcaccagcaccgagcctagtgagcaggagattaaacggatcaacaagatcagaagaagacttgtgaaagacagcaacaccaagaaggccggcaagacaggccccatgaaaaccctgctggttagagtgatgacacccgatctgagagagcggctggaaaacctgagaaagaagcctgaaaatatcccccagcccatcagcaatacatctagagccaacctgaataagctgctgaccgattacaccgaaatgaagaaggcgatcctgcatgtgtactgggaagagttccagaaggaccctgtgggcctgatgagccgggtggcccagcctgccagcaagaagatcgatcagaacaagctgaaacctgagatggacgagaagggcaacctgaccaccgccggctttgcctgctctcagtgtggccagcccctgttcgtgtacaagctggagcaggtgtctgagaagggcaaggcttacaccaactacttcggacggtgcaatgtggccgagcacgaaaagctgatcctgctggcccagctgaagcccgagaaggatagcgacgaagccgtgacatatagcctgggaaagtttgggcagagggccctggatttctacagcattcatgtgaccaaggagtccacccaccccgtgaagcccctggcccagatcgccggaaacagatacgcctccggacctgtgggaaaggccctgagcgacgcatgtatgggcacaatcgcctccttcctgtctaagtaccaggacatcatcatcgaacaccagaaggtggtgaagggcaaccagaagagactggagagcctgcgggagctggccggcaaggaaaacctggaataccctagcgtgaccctgccacctcagcctcacaccaaggagggcgttgatgcctacaacgaagtgatcgcccgggtgcgaatgtgggtgaacctgaacctgtggcagaagctgaagctaagcagagatgatgccaagcctctgctgagactgaagggattcccttcctttcctctggtcgagagacaggccaacgaagtggactggtgggacatggtgtgtaacgtgaagaagctgatcaacgagaaaaaggaggatggcaaggtgttttggcagaatctggctggctacaagagacaggaagccctgagaccatacctgagcagcgaggaagatcggaagaagggaaagaaattcgctcggtaccagctgggcgacctgctgctgcacctggaaaagaagcacggcgaggactggggaaaggtgtacgacgaggcctgggagcggattgacaagaaagtggaaggcctgagcaagcacatcaagctggaagaggaacggagaagcgaggacgcccagagcaaggccgccctgaccgactggctgcgggctaaggccagcttcgtgatcgagggcctgaaggaggccgacaaggacgagttctgcagatgcgagctgaagctgcagaagtggtacggggacctgcggggaaagcccttcgccatcgaagccgagaacagcatcctggacatcagcggcttcagcaagcagtacaactgtgccttcatctggcagaaggacggcgtgaagaagctgaacctgtacctgatcatcaactacttcaagggcggcaagctgcggttcaagaagatcaaacctgaagccttcgaagccaacagattctacaccgtgatcaacaaaaagagcggcgagatcgtgcccatggaggtgaacttcaacttcgacgaccccaacctgatcatcctgcctctggcctttggcaagagacagggcagagaattcatctggaacgacctgctgtccctggaaaccggcagcctgaagctggccaacggaagagtgatcgagaagacactgtacaacagaagaacccggcaggatgagcctgccctgttcgtggccctgaccttcgagcggcgggaggtcctggactcctccaatatcaaaccaatgaacctgatcggcgtggcaagaggcgaaaacatccccgccgtgatcgccctgaccgaccccgagggctgcccactgagccggtttaaggatagcctgggaaacccaacccacatcctgagaatcggcgagagctataaggagaagcagcggaccatccaggccaagaaggaggtggagcagcggagagccggcggctacagccggaagtacgccagcaaagccaagaatctggcagacgatatggtgagaaacaccgctagagatctgctgtactacgccgtgacccaggatgccatgctgatcttcgccaacctgagccggggcttcggccggcagggcaagcggaccttcatggccgagagacagtacacacggatggaggactggctgaccgccaagctggcctacgagggcctgagcaagacctacctgtccaagacactggcccagtacacctccaagacatgcagcaactgtgggtttaccatcaccagcgccgactacgacagggtgctggagaagctgaagaagacagcaacaggctggatgaccacaattaacggcaaggagctgaaggtggagggccagattacctactacaacagatacaagagacagaacgtagtcaaggacctgtccgtcgagctggatagactgagcgaagaatctgtgaacaacgacatctcctcctggacaaagggcagaagcggagaagctctgagcctcctgaagaaaagattctcccatagacccgtgcaggagaagttcgtgtgcctgaactgcggcttcgagacacacgcagccgagcaagccgccctgaacatcgccagatcctggctgttcctgcggagccaggagtacaagaaataccagacaaacaagacaaccggcaacaccgataagagagccttcgtcgagacctggcagtccttttaccggaagaagcttaaggaggtgtggaaacctgccgtgcggtctggcggatctggcggaggctccaccagccccaagaaaaagagaaaagtctaagctgccttctgcggggcttgccttctggccatgcccttcttctctcccttgcacctgtacctcttggtctttgaataaagcctgagtaggaaggctagcaaaaaaaaaaaaaaaaaaaaaaaaaaaaaaaaaaaaaaaaaaaaaaaaaaaaaaaaaaaaaaaaaaaaaaaaaaaaaaaagcccagccggctccccaacctctaccgaggagggcacctctgagtccgccacccccgagagcggccctggcacctccaccgagcccagcgagggcagcgcacccggcagccctgccggcagccccacctccacagaggagggaaccagcaccgagcccagcgaaggcagcgccccaggcaccagcaccgagcctagtgagcaggagattaaacggatcaacaagatcagaagaagacttgtgaaagacagcaacaccaagaaggccggcaagacaggccccatgaaaaccctgctggttagagtgatgacacccgatctgagagagcggctggaaaacctgagaaagaagcctgaaaatatcccccagcccatcagcaatacatctagagccaacctgaataagctgctgaccgattacaccgaaatgaagaaggcgatcctgcatgtgtactgggaagagttccagaaggaccctgtgggcctgatgagccgggtggcccagcctgccagcaagaagatcgatcagaacaagctgaaacctgagatggacgagaagggcaacctgaccaccgccggctttgcctgctctcagtgtggccagcccctgttcgtgtacaagctggagcaggtgtctgagaagggcaaggcttacaccaactacttcggacggtgcaatgtggccgagcacgaaaagctgatcctgctggcccagctgaagcccgagaaggatagcgacgaagccgtgacatatagcctgggaaagtttgggcagagggccctggatttctacagcattcatgtgaccaaggagtccacccaccccgtgaagcccctggcccagatcgccggaaacagatacgcctccggacctgtgggaaaggccctgagcgacgcatgtatgggcacaatcgcctccttcctgtctaagtaccaggacatcatcatcgaacaccagaaggtggtgaagggcaaccagaagagactggagagcctgcgggagctggccggcaaggaaaacctggaataccctagcgtgaccctgccacctcagcctcacaccaaggagggcgttgatgcctacaacgaagtgatcgcccgggtgcgaatgtgggtgaacctgaacctgtggcagaagctgaagctaagcagagatgatgccaagcctctgctgagactgaagggattcccttcctttcctctggtcgagagacaggccaacgaagtggactggtgggacatggtgtgtaacgtgaagaagctgatcaacgagaaaaaggaggatggcaaggtgttttggcagaatctggctggctacaagagacaggaagccctgagaccatacctgagcagcgaggaagatcggaagaagggaaagaaattcgctcggtaccagctgggcgacctgctgctgcacctggaaaagaagcacggcgaggactggggaaaggtgtacgacgaggcctgggagcggattgacaagaaagtggaaggcctgagcaagcacatcaagctggaagaggaacggagaagcgaggacgcccagagcaaggccgccctgaccgactggctgcgggctaaggccagcttcgtgatcgagggcctgaaggaggccgacaaggacgagttctgcagatgcgagctgaagctgcagaagtggtacggggacctgcggggaaagcccttcgccatcgaagccgagaacagcatcctggacatcagcggcttcagcaagcagtacaactgtgccttcatctggcagaaggacggcgtgaagaagctgaacctgtacctgatcatcaactacttcaagggcggcaagctgcggttcaagaagatcaaacctgaagccttcgaagccaacagattctacaccgtgatcaacaaaaagagcggcgagatcgtgcccatggaggtgaacttcaacttcgacgaccccaacctgatcatcctgcctctggcctttggcaagagacagggcagagaattcatctggaacgacctgctgtccctggaaaccggcagcctgaagctggccaacggaagagtgatcgagaagacactgtacaacagaagaacccggcaggatgagcctgccctgttcgtggccctgaccttcgagcggcgggaggtcctggactcctccaatatcaaaccaatgaacctgatcggcgtggcaagaggcgaaaacatccccgccgtgatcgccctgaccgaccccgagggctgcccactgagccggtttaaggatagcctgggaaacccaacccacatcctgagaatcggcgagagctataaggagaagcagcggaccatccaggccaagaaggaggtggagcagcggagagccggcggctacagccggaagtacgccagcaaagccaagaatctggcagacgatatggtgagaaacaccgctagagatctgctgtactacgccgtgacccaggatgccatgctgatcttcgccaacctgagccggggcttcggccggcagggcaagcggaccttcatggccgagagacagtacacacggatggaggactggctgaccgccaagctggcctacgagggcctgagcaagacctacctgtccaagacactggcccagtacacctccaagacatgcagcaactgtgggtttaccatcaccagcgccgactacgacagggtgctggagaagctgaagaagacagcaacaggctggatgaccacaattaacggcaaggagctgaaggtggagggccagattacctactacaacagatacaagagacagaacgtagtcaaggacctgtccgtcgagctggatagactgagcgaagaatctgtgaacaacgacatctcctcctggacaaagggcagaagcggagaagctctgagcctcctgaagaaaagattctcccatagacccgtgcaggagaagttcgtgtgcctgaactgcggcttcgagacacacgcagccgagcaagccgccctgaacatcgccagatcctggctgttcctgcggagccaggagtacaagaaataccagacaaacaagacaaccggcaacaccgataagagagccttcgtcgagacctggcagtccttttaccggaagaagcttaaggaggtgtggaaacctgccgtgcggtctggcggatctggcggaggctccaccagccccaagaaaaagagaaaagtctaagctgccttctgcggggcttgccttctggccatgcccttcttctctcccttgcacctgtacctcttggtctttgaataaagcctgagtaggaaggctagcaaaaaaaaaaaaaaaaaaaaaaaaaaaaaaaaaaaaaaaaaaaaaaaaaaaaaaaaaaaaaaaaaaaaaaaaaaaaaaaa

SEQ ID NO: 9247 - RNA, 8787 nt, synthetic construct
  source 1..8787: mol_type = other RNA
aggaaataagagagaaaagaagagtaagaagaaatataagagccaccatggcccctaagaagaagcgtaaagtgagccggatgaaccacgaccaggagttcgacccccctaaggtgtaccctcccgtccccgccgagaagagaaagcccatccgggtcctgagcctgttcgatggcatcgccaccggtctgctggtgctgaaggacctgggcatccaggtggataggtacattgcctccgaggtgtgcgaggactccatcaccgtgggaatggtgcgtcatcagggcaagatcatgtacgtgggcgacgtgcggagcgtgacacagaagcatatccaggagtggggccctttcgacctggtgatcggcggcagcccttgcaatgacctgagcatcgtgaacccagcccggaagggcctgtacgagggaaccggcagactgttcttcgagttttacagactgctgcacgacgcccggcctaaggaaggcgacgaccggcccttcttttggctgttcgagaatgtggtggccatgggagtcagcgacaagcgggatattagccggttcctggagagcaaccccgtgatgatcgatgccaaggaagtgagcgccgcccaccgggccagatacttctggggcaatctgcctggcatgaacagacccctggccagcaccgtgaacgacaagctggagctgcaggagtgcctggagcacggccggatcgccaagttcagcaaggtgagaaccatcaccacccgaagcaacagcatcaaacaaggcaaggaccagcactttcctgtgttcatgaacgagaaggaggacatcctgtggtgtaccgagatggagagagtgttcgggttcccagtccactacacagatgtcagcaacatgtctagactggccagacagagactgctgggaagaagctggtccgtccctgtgatcagacacctgttcgcccctctgaaggagtacttcgcctgcgtgagcagcggcaacagcaacgccaacagccggggccccagcttctctagcggcctggtgccactgtccctgagagggagccacatgggccccatggagatctacaaaaccgtgagcgcctggaagcggcagcctgtgcgcgtgctgagcctgtttcggaatatcgataaagtcctgaaaagcctgggattcctggagagcggctctggctccggcggtggcaccctgaagtacgtggaggatgtgacaaacgtggtcagacgggatgtggagaagtggggccccttcgatctggtgtacggcagcacccaacccctgggcagctcttgtgaccggtgccctggctggtacatgtttcagttccaccggatcctgcagtacgccctgccgagacaggagtcccagcggccattcttttggattttcatggacaacttgctgctgaccgaggatgaccaggaaactaccactcggttcctgcagaccgaagccgtgaccctgcaggacgtgagaggccgggactaccagaacgccatgcgggtgtggtccaacatccctggactgaaaagcaagcacgcacctctgacccctaaagaagaggagtacctgcaggcccaggtgcggagcagaagcaagctggacgcccctaaggtggatctgctggtgaagaattgcctcctgcccctgagagagtacttcaagtatttcagccagaatagtctgcccctgggaggcagcggcggcggcttccaggagagcgtgaccttcaaggacgtggccgtggacttcacctgggaggagtggggctacctggacaccagccagaaggagctgtactgggaggtgatgctggagaactacaggaacctggtgagcctgggcctggccgacagcaacgtgaacatgatcagccagctggagagcggcgaggcccacggcatcagcgtggacagcgtgctgaggagctgctggcccgacggcgacaccaggggcggcccaagcagcggcgcccctcctcccagcggcggcaggcggcccaagcagcggcgcccctcctcccagcggcggcagcccagccggctccccaacctctaccgaggagggcacctctgagtccgccacccccgagagcggccctggcacctccaccgagcccagcgagggcagcgcacccggcagccctgccggcagccccacctccacagaggagggaaccagcaccgagcccagcgaaggcagcgccccaggcaccagcaccgagcctagtgagcaggagattaaacggatcaacaagatcagaagaagacttgtgaaagacagcaacaccaagaaggccggcaagacaggccccatgaaaaccctgctggttagagtgatgacacccgatctgagagagcggctggaaaacctgagaaagaagcctgaaaatatcccccagcccatcagcaatacatctagagccaacctgaataagctgctgaccgattacaccgaaatgaagaaggcgatcctgcatgtgtactgggaagagttccagaaggaccctgtgggcctgatgagccgggtggcccagcctgccagcaagaagatcgatcagaacaagctgaaacctgagatggacgagaagggcaacctgaccaccgccggctttgcctgctctcagtgtggccagcccctgttcgtgtacaagctggagcaggtgtctgagaagggcaaggcttacaccaactacttcggacggtgcaatgtggccgagcacgaaaagctgatcctgctggcccagctgaagcccgagaaggatagcgacgaagccgtgacatatagcctgggaaagtttgggcagagggccctggatttctacagcattcatgtgaccaaggagtccacccaccccgtgaagcccctggcccagatcgccggaaacagatacgcctccggacctgtgggaaaggccctgagcgacgcatgtatgggcacaatcgcctccttcctgtctaagtaccaggacatcatcatcgaacaccagaaggtggtgaagggcaaccagaagagactggagagcctgcgggagctggccggcaaggaaaacctggaataccctagcgtgaccctgccacctcagcctcacaccaaggagggcgttgatgcctacaacgaagtgatcgcccgggtgcgaatgtgggtgaacctgaacctgtggcagaagctgaagctaagcagagatgatgccaagcctctgctgagactgaagggattcccttcctttcctctggtcgagagacaggccaacgaagtggactggtgggacatggtgtgtaacgtgaagaagctgatcaacgagaaaaaggaggatggcaaggtgttttggcagaatctggctggctacaagagacaggaagccctgagaccatacctgagcagcgaggaagatcggaagaagggaaagaaattcgctcggtaccagctgggcgacctgctgctgcacctggaaaagaagcacggcgaggactggggaaaggtgtacgacgaggcctgggagcggattgacaagaaagtggaaggcctgagcaagcacatcaagctggaagaggaacggagaagcgaggacgcccagagcaaggccgccctgaccgactggctgcgggctaaggccagcttcgtgatcgagggcctgaaggaggccgacaaggacgagttctgcagatgcgagctgaagctgcagaagtggtacggggacctgcggggaaagcccttcgccatcgaagccgagaacagcatcctggacatcagcggcttcagcaagcagtacaactgtgccttcatctggcagaaggacggcgtgaagaagctgaacctgtacctgatcatcaactacttcaagggcggcaagctgcggttcaagaagatcaaacctgaagccttcgaagccaacagattctacaccgtgatcaacaaaaagagcggcgagatcgtgcccatggaggtgaacttcaacttcgacgaccccaacctgatcatcctgcctctggcctttggcaagagacagggcagagaattcatctggaacgacctgctgtccctggaaaccggcagcctgaagctggccaacggaagagtgatcgagaagacactgtacaacagaagaacccggcaggatgagcctgccctgttcgtggccctgaccttcgagcggcgggaggtcctggactcctccaatatcaaaccaatgaacctgatcggcgtggcaagaggcgaaaacatccccgccgtgatcgccctgaccgaccccgagggctgcccactgagccggtttaaggatagcctgggaaacccaacccacatcctgagaatcggcgagagctataaggagaagcagcggaccatccaggccaagaaggaggtggagcagcggagagccggcggctacagccggaagtacgccagcaaagccaagaatctggcagacgatatggtgagaaacaccgctagagatctgctgtactacgccgtgacccaggatgccatgctgatcttcgccaacctgagccggggcttcggccggcagggcaagcggaccttcatggccgagagacagtacacacggatggaggactggctgaccgccaagctggcctacgagggcctgagcaagacctacctgtccaagacactggcccagtacacctccaagacatgcagcaactgtgggtttaccatcaccagcgccgactacgacagggtgctggagaagctgaagaagacagcaacaggctggatgaccacaattaacggcaaggagctgaaggtggagggccagattacctactacaacagatacaagagacagaacgtagtcaaggacctgtccgtcgagctggatagactgagcgaagaatctgtgaacaacgacatctcctcctggacaaagggcagaagcggagaagctctgagcctcctgaagaaaagattctcccatagacccgtgcaggagaagttcgtgtgcctgaactgcggcttcgagacacacgcagccgagcaagccgccctgaacatcgccagatcctggctgttcctgcggagccaggagtacaagaaataccagacaaacaagacaaccggcaacaccgataagagagccttcgtcgagacctggcagtccttttaccggaagaagcttaaggaggtgtggaaacctgccgtgcggtctggcggatctggcggaggctccaccagccccaagaaaaagagaaaagtctaagctgccttctgcggggcttgccttctggccatgcccttcttctctcccttgcacctgtacctcttggtctttgaataaagcctgagtaggaaggctagcaaaaaaaaaaaaaaaaaaaaaaaaaaaaaaaaaaaaaaaaaaaaaaaaaaaaaaaaaaaaaaaaaaaaaaaaaaaaaaaagcccagccggctccccaacctctaccgaggagggcacctctgagtccgccacccccgagagcggccctggcacctccaccgagcccagcgagggcagcgcacccggcagccctgccggcagccccacctccacagaggagggaaccagcaccgagcccagcgaaggcagcgccccaggcaccagcaccgagcctagtgagcaggagattaaacggatcaacaagatcagaagaagacttgtgaaagacagcaacaccaagaaggccggcaagacaggccccatgaaaaccctgctggttagagtgatgacacccgatctgagagagcggctggaaaacctgagaaagaagcctgaaaatatcccccagcccatcagcaatacatctagagccaacctgaataagctgctgaccgattacaccgaaatgaagaaggcgatcctgcatgtgtactgggaagagttccagaaggaccctgtgggcctgatgagccgggtggcccagcctgccagcaagaagatcgatcagaacaagctgaaacctgagatggacgagaagggcaacctgaccaccgccggctttgcctgctctcagtgtggccagcccctgttcgtgtacaagctggagcaggtgtctgagaagggcaaggcttacaccaactacttcggacggtgcaatgtggccgagcacgaaaagctgatcctgctggcccagctgaagcccgagaaggatagcgacgaagccgtgacatatagcctgggaaagtttgggcagagggccctggatttctacagcattcatgtgaccaaggagtccacccaccccgtgaagcccctggcccagatcgccggaaacagatacgcctccggacctgtgggaaaggccctgagcgacgcatgtatgggcacaatcgcctccttcctgtctaagtaccaggacatcatcatcgaacaccagaaggtggtgaagggcaaccagaagagactggagagcctgcgggagctggccggcaaggaaaacctggaataccctagcgtgaccctgccacctcagcctcacaccaaggagggcgttgatgcctacaacgaagtgatcgcccgggtgcgaatgtgggtgaacctgaacctgtggcagaagctgaagctaagcagagatgatgccaagcctctgctgagactgaagggattcccttcctttcctctggtcgagagacaggccaacgaagtggactggtgggacatggtgtgtaacgtgaagaagctgatcaacgagaaaaaggaggatggcaaggtgttttggcagaatctggctggctacaagagacaggaagccctgagaccatacctgagcagcgaggaagatcggaagaagggaaagaaattcgctcggtaccagctgggcgacctgctgctgcacctggaaaagaagcacggcgaggactggggaaaggtgtacgacgaggcctgggagcggattgacaagaaagtggaaggcctgagcaagcacatcaagctggaagaggaacggagaagcgaggacgcccagagcaaggccgccctgaccgactggctgcgggctaaggccagcttcgtgatcgagggcctgaaggaggccgacaaggacgagttctgcagatgcgagctgaagctgcagaagtggtacggggacctgcggggaaagcccttcgccatcgaagccgagaacagcatcctggacatcagcggcttcagcaagcagtacaactgtgccttcatctggcagaaggacggcgtgaagaagctgaacctgtacctgatcatcaactacttcaagggcggcaagctgcggttcaagaagatcaaacctgaagccttcgaagccaacagattctacaccgtgatcaacaaaaagagcggcgagatcgtgcccatggaggtgaacttcaacttcgacgaccccaacctgatcatcctgcctctggcctttggcaagagacagggcagagaattcatctggaacgacctgctgtccctggaaaccggcagcctgaagctggccaacggaagagtgatcgagaagacactgtacaacagaagaacccggcaggatgagcctgccctgttcgtggccctgaccttcgagcggcgggaggtcctggactcctccaatatcaaaccaatgaacctgatcggcgtggcaagaggcgaaaacatccccgccgtgatcgccctgaccgaccccgagggctgcccactgagccggtttaaggatagcctgggaaacccaacccacatcctgagaatcggcgagagctataaggagaagcagcggaccatccaggccaagaaggaggtggagcagcggagagccggcggctacagccggaagtacgccagcaaagccaagaatctggcagacgatatggtgagaaacaccgctagagatctgctgtactacgccgtgacccaggatgccatgctgatcttcgccaacctgagccggggcttcggccggcagggcaagcggaccttcatggccgagagacagtacacacggatggaggactggctgaccgccaagctggcctacgagggcctgagcaagacctacctgtccaagacactggcccagtacacctccaagacatgcagcaactgtgggtttaccatcaccagcgccgactacgacagggtgctggagaagctgaagaagacagcaacaggctggatgaccacaattaacggcaaggagctgaaggtggagggccagattacctactacaacagatacaagagacagaacgtagtcaaggacctgtccgtcgagctggatagactgagcgaagaatctgtgaacaacgacatctcctcctggacaaagggcagaagcggagaagctctgagcctcctgaagaaaagattctcccatagacccgtgcaggagaagttcgtgtgcctgaactgcggcttcgagacacacgcagccgagcaagccgccctgaacatcgccagatcctggctgttcctgcggagccaggagtacaagaaataccagacaaacaagacaaccggcaacaccgataagagagccttcgtcgagacctggcagtccttttaccggaagaagcttaaggaggtgtggaaacctgccgtgcggtctggcggatctggcggaggctccaccagccccaagaaaaagagaaaagtctaagctgccttctgcggggcttgccttctggccatgcccttcttctctcccttgcacctgtacctcttggtctttgaataaagcctgagtaggaaggctagcaaaaaaaaaaaaaaaaaaaaaaaaaaaaaaaaaaaaaaaaaaaaaaaaaaaaaaaaaaaaaaaaaaaaaaaaaaaaaaaa

SEQ ID NO: 9248 - RNA, 8787 nt, synthetic construct
  source 1..8787: mol_type = other RNA
aggaaataagagagaaaagaagagtaagaagaaatataagagccaccatggcccctaagaagaagcgtaaagtgagccggatgaaccacgaccaggagttcgacccccctaaggtgtaccctcccgtccccgccgagaagagaaagcccatccgggtcctgagcctgttcgatggcatcgccaccggtctgctggtgctgaaggacctgggcatccaggtggataggtacattgcctccgaggtgtgcgaggactccatcaccgtgggaatggtgcgtcatcagggcaagatcatgtacgtgggcgacgtgcggagcgtgacacagaagcatatccaggagtggggccctttcgacctggtgatcggcggcagcccttgcaatgacctgagcatcgtgaacccagcccggaagggcctgtacgagggaaccggcagactgttcttcgagttttacagactgctgcacgacgcccggcctaaggaaggcgacgaccggcccttcttttggctgttcgagaatgtggtggccatgggagtcagcgacaagcgggatattagccggttcctggagagcaaccccgtgatgatcgatgccaaggaagtgagcgccgcccaccgggccagatacttctggggcaatctgcctggcatgaacagacccctggccagcaccgtgaacgacaagctggagctgcaggagtgcctggagcacggccggatcgccaagttcagcaaggtgagaaccatcaccacccgaagcaacagcatcaaacaaggcaaggaccagcactttcctgtgttcatgaacgagaaggaggacatcctgtggtgtaccgagatggagagagtgttcgggttcccagtccactacacagatgtcagcaacatgtctagactggccagacagagactgctgggaagaagctggtccgtccctgtgatcagacacctgttcgcccctctgaaggagtacttcgcctgcgtgagcagcggcaacagcaacgccaacagccggggccccagcttctctagcggcctggtgccactgtccctgagagggagccacatgggccccatggagatctacaaaaccgtgagcgcctggaagcggcagcctgtgcgcgtgctgagcctgtttcggaatatcgataaagtcctgaaaagcctgggattcctggagagcggctctggctccggcggtggcaccctgaagtacgtggaggatgtgacaaacgtggtcagacgggatgtggagaagtggggccccttcgatctggtgtacggcagcacccaacccctgggcagctcttgtgaccggtgccctggctggtacatgtttcagttccaccggatcctgcagtacgccctgccgagacaggagtcccagcggccattcttttggattttcatggacaacttgctgctgaccgaggatgaccaggaaactaccactcggttcctgcagaccgaagccgtgaccctgcaggacgtgagaggccgggactaccagaacgccatgcgggtgtggtccaacatccctggactgaaaagcaagcacgcacctctgacccctaaagaagaggagtacctgcaggcccaggtgcggagcagaagcaagctggacgcccctaaggtggatctgctggtgaagaattgcctcctgcccctgagagagtacttcaagtatttcagccagaatagtctgcccctgggaggcagcggcggcggcatggagagcgtgagcttcgaggacgtggccgtgaagttcacccaggaggagtgggccgtgctggaccccagccagaagaagctgtacaaggacgtgatgcaggagaccctgaagaacctggccagcatcggcaacaagagcggcaagcagaaggtgatcaacgagtacggcaagctgtggaggaagctgagcagccacctggccggcaagttcagcgactacaacgagaaccaccagtgcgccggcggcccaagcagcggcgcccctcctcccagcggcggcaggcggcccaagcagcggcgcccctcctcccagcggcggcagcccagccggctccccaacctctaccgaggagggcacctctgagtccgccacccccgagagcggccctggcacctccaccgagcccagcgagggcagcgcacccggcagccctgccggcagccccacctccacagaggagggaaccagcaccgagcccagcgaaggcagcgccccaggcaccagcaccgagcctagtgagcaggagattaaacggatcaacaagatcagaagaagacttgtgaaagacagcaacaccaagaaggccggcaagacaggccccatgaaaaccctgctggttagagtgatgacacccgatctgagagagcggctggaaaacctgagaaagaagcctgaaaatatcccccagcccatcagcaatacatctagagccaacctgaataagctgctgaccgattacaccgaaatgaagaaggcgatcctgcatgtgtactgggaagagttccagaaggaccctgtgggcctgatgagccgggtggcccagcctgccagcaagaagatcgatcagaacaagctgaaacctgagatggacgagaagggcaacctgaccaccgccggctttgcctgctctcagtgtggccagcccctgttcgtgtacaagctggagcaggtgtctgagaagggcaaggcttacaccaactacttcggacggtgcaatgtggccgagcacgaaaagctgatcctgctggcccagctgaagcccgagaaggatagcgacgaagccgtgacatatagcctgggaaagtttgggcagagggccctggatttctacagcattcatgtgaccaaggagtccacccaccccgtgaagcccctggcccagatcgccggaaacagatacgcctccggacctgtgggaaaggccctgagcgacgcatgtatgggcacaatcgcctccttcctgtctaagtaccaggacatcatcatcgaacaccagaaggtggtgaagggcaaccagaagagactggagagcctgcgggagctggccggcaaggaaaacctggaataccctagcgtgaccctgccacctcagcctcacaccaaggagggcgttgatgcctacaacgaagtgatcgcccgggtgcgaatgtgggtgaacctgaacctgtggcagaagctgaagctaagcagagatgatgccaagcctctgctgagactgaagggattcccttcctttcctctggtcgagagacaggccaacgaagtggactggtgggacatggtgtgtaacgtgaagaagctgatcaacgagaaaaaggaggatggcaaggtgttttggcagaatctggctggctacaagagacaggaagccctgagaccatacctgagcagcgaggaagatcggaagaagggaaagaaattcgctcggtaccagctgggcgacctgctgctgcacctggaaaagaagcacggcgaggactggggaaaggtgtacgacgaggcctgggagcggattgacaagaaagtggaaggcctgagcaagcacatcaagctggaagaggaacggagaagcgaggacgcccagagcaaggccgccctgaccgactggctgcgggctaaggccagcttcgtgatcgagggcctgaaggaggccgacaaggacgagttctgcagatgcgagctgaagctgcagaagtggtacggggacctgcggggaaagcccttcgccatcgaagccgagaacagcatcctggacatcagcggcttcagcaagcagtacaactgtgccttcatctggcagaaggacggcgtgaagaagctgaacctgtacctgatcatcaactacttcaagggcggcaagctgcggttcaagaagatcaaacctgaagccttcgaagccaacagattctacaccgtgatcaacaaaaagagcggcgagatcgtgcccatggaggtgaacttcaacttcgacgaccccaacctgatcatcctgcctctggcctttggcaagagacagggcagagaattcatctggaacgacctgctgtccctggaaaccggcagcctgaagctggccaacggaagagtgatcgagaagacactgtacaacagaagaacccggcaggatgagcctgccctgttcgtggccctgaccttcgagcggcgggaggtcctggactcctccaatatcaaaccaatgaacctgatcggcgtggcaagaggcgaaaacatccccgccgtgatcgccctgaccgaccccgagggctgcccactgagccggtttaaggatagcctgggaaacccaacccacatcctgagaatcggcgagagctataaggagaagcagcggaccatccaggccaagaaggaggtggagcagcggagagccggcggctacagccggaagtacgccagcaaagccaagaatctggcagacgatatggtgagaaacaccgctagagatctgctgtactacgccgtgacccaggatgccatgctgatcttcgccaacctgagccggggcttcggccggcagggcaagcggaccttcatggccgagagacagtacacacggatggaggactggctgaccgccaagctggcctacgagggcctgagcaagacctacctgtccaagacactggcccagtacacctccaagacatgcagcaactgtgggtttaccatcaccagcgccgactacgacagggtgctggagaagctgaagaagacagcaacaggctggatgaccacaattaacggcaaggagctgaaggtggagggccagattacctactacaacagatacaagagacagaacgtagtcaaggacctgtccgtcgagctggatagactgagcgaagaatctgtgaacaacgacatctcctcctggacaaagggcagaagcggagaagctctgagcctcctgaagaaaagattctcccatagacccgtgcaggagaagttcgtgtgcctgaactgcggcttcgagacacacgcagccgagcaagccgccctgaacatcgccagatcctggctgttcctgcggagccaggagtacaagaaataccagacaaacaagacaaccggcaacaccgataagagagccttcgtcgagacctggcagtccttttaccggaagaagcttaaggaggtgtggaaacctgccgtgcggtctggcggatctggcggaggctccaccagccccaagaaaaagagaaaagtctaagctgccttctgcggggcttgccttctggccatgcccttcttctctcccttgcacctgtacctcttggtctttgaataaagcctgagtaggaaggctagcaaaaaaaaaaaaaaaaaaaaaaaaaaaaaaaaaaaaaaaaaaaaaaaaaaaaaaaaaaaaaaaaaaaaaaaaaaaaaaaagcccagccggctccccaacctctaccgaggagggcacctctgagtccgccacccccgagagcggccctggcacctccaccgagcccagcgagggcagcgcacccggcagccctgccggcagccccacctccacagaggagggaaccagcaccgagcccagcgaaggcagcgccccaggcaccagcaccgagcctagtgagcaggagattaaacggatcaacaagatcagaagaagacttgtgaaagacagcaacaccaagaaggccggcaagacaggccccatgaaaaccctgctggttagagtgatgacacccgatctgagagagcggctggaaaacctgagaaagaagcctgaaaatatcccccagcccatcagcaatacatctagagccaacctgaataagctgctgaccgattacaccgaaatgaagaaggcgatcctgcatgtgtactgggaagagttccagaaggaccctgtgggcctgatgagccgggtggcccagcctgccagcaagaagatcgatcagaacaagctgaaacctgagatggacgagaagggcaacctgaccaccgccggctttgcctgctctcagtgtggccagcccctgttcgtgtacaagctggagcaggtgtctgagaagggcaaggcttacaccaactacttcggacggtgcaatgtggccgagcacgaaaagctgatcctgctggcccagctgaagcccgagaaggatagcgacgaagccgtgacatatagcctgggaaagtttgggcagagggccctggatttctacagcattcatgtgaccaaggagtccacccaccccgtgaagcccctggcccagatcgccggaaacagatacgcctccggacctgtgggaaaggccctgagcgacgcatgtatgggcacaatcgcctccttcctgtctaagtaccaggacatcatcatcgaacaccagaaggtggtgaagggcaaccagaagagactggagagcctgcgggagctggccggcaaggaaaacctggaataccctagcgtgaccctgccacctcagcctcacaccaaggagggcgttgatgcctacaacgaagtgatcgcccgggtgcgaatgtgggtgaacctgaacctgtggcagaagctgaagctaagcagagatgatgccaagcctctgctgagactgaagggattcccttcctttcctctggtcgagagacaggccaacgaagtggactggtgggacatggtgtgtaacgtgaagaagctgatcaacgagaaaaaggaggatggcaaggtgttttggcagaatctggctggctacaagagacaggaagccctgagaccatacctgagcagcgaggaagatcggaagaagggaaagaaattcgctcggtaccagctgggcgacctgctgctgcacctggaaaagaagcacggcgaggactggggaaaggtgtacgacgaggcctgggagcggattgacaagaaagtggaaggcctgagcaagcacatcaagctggaagaggaacggagaagcgaggacgcccagagcaaggccgccctgaccgactggctgcgggctaaggccagcttcgtgatcgagggcctgaaggaggccgacaaggacgagttctgcagatgcgagctgaagctgcagaagtggtacggggacctgcggggaaagcccttcgccatcgaagccgagaacagcatcctggacatcagcggcttcagcaagcagtacaactgtgccttcatctggcagaaggacggcgtgaagaagctgaacctgtacctgatcatcaactacttcaagggcggcaagctgcggttcaagaagatcaaacctgaagccttcgaagccaacagattctacaccgtgatcaacaaaaagagcggcgagatcgtgcccatggaggtgaacttcaacttcgacgaccccaacctgatcatcctgcctctggcctttggcaagagacagggcagagaattcatctggaacgacctgctgtccctggaaaccggcagcctgaagctggccaacggaagagtgatcgagaagacactgtacaacagaagaacccggcaggatgagcctgccctgttcgtggccctgaccttcgagcggcgggaggtcctggactcctccaatatcaaaccaatgaacctgatcggcgtggcaagaggcgaaaacatccccgccgtgatcgccctgaccgaccccgagggctgcccactgagccggtttaaggatagcctgggaaacccaacccacatcctgagaatcggcgagagctataaggagaagcagcggaccatccaggccaagaaggaggtggagcagcggagagccggcggctacagccggaagtacgccagcaaagccaagaatctggcagacgatatggtgagaaacaccgctagagatctgctgtactacgccgtgacccaggatgccatgctgatcttcgccaacctgagccggggcttcggccggcagggcaagcggaccttcatggccgagagacagtacacacggatggaggactggctgaccgccaagctggcctacgagggcctgagcaagacctacctgtccaagacactggcccagtacacctccaagacatgcagcaactgtgggtttaccatcaccagcgccgactacgacagggtgctggagaagctgaagaagacagcaacaggctggatgaccacaattaacggcaaggagctgaaggtggagggccagattacctactacaacagatacaagagacagaacgtagtcaaggacctgtccgtcgagctggatagactgagcgaagaatctgtgaacaacgacatctcctcctggacaaagggcagaagcggagaagctctgagcctcctgaagaaaagattctcccatagacccgtgcaggagaagttcgtgtgcctgaactgcggcttcgagacacacgcagccgagcaagccgccctgaacatcgccagatcctggctgttcctgcggagccaggagtacaagaaataccagacaaacaagacaaccggcaacaccgataagagagccttcgtcgagacctggcagtccttttaccggaagaagcttaaggaggtgtggaaacctgccgtgcggtctggcggatctggcggaggctccaccagccccaagaaaaagagaaaagtctaagctgccttctgcggggcttgccttctggccatgcccttcttctctcccttgcacctgtacctcttggtctttgaataaagcctgagtaggaaggctagcaaaaaaaaaaaaaaaaaaaaaaaaaaaaaaaaaaaaaaaaaaaaaaaaaaaaaaaaaaaaaaaaaaaaaaaaaaaaaaaa

SEQ ID NO: 9249 - RNA, 8787 nt, synthetic construct
  source 1..8787: mol_type = other RNA
aggaaataagagagaaaagaagagtaagaagaaatataagagccaccatggcccctaagaagaagcgtaaagtgagccggatgaaccacgaccaggagttcgacccccctaaggtgtaccctcccgtccccgccgagaagagaaagcccatccgggtcctgagcctgttcgatggcatcgccaccggtctgctggtgctgaaggacctgggcatccaggtggataggtacattgcctccgaggtgtgcgaggactccatcaccgtgggaatggtgcgtcatcagggcaagatcatgtacgtgggcgacgtgcggagcgtgacacagaagcatatccaggagtggggccctttcgacctggtgatcggcggcagcccttgcaatgacctgagcatcgtgaacccagcccggaagggcctgtacgagggaaccggcagactgttcttcgagttttacagactgctgcacgacgcccggcctaaggaaggcgacgaccggcccttcttttggctgttcgagaatgtggtggccatgggagtcagcgacaagcgggatattagccggttcctggagagcaaccccgtgatgatcgatgccaaggaagtgagcgccgcccaccgggccagatacttctggggcaatctgcctggcatgaacagacccctggccagcaccgtgaacgacaagctggagctgcaggagtgcctggagcacggccggatcgccaagttcagcaaggtgagaaccatcaccacccgaagcaacagcatcaaacaaggcaaggaccagcactttcctgtgttcatgaacgagaaggaggacatcctgtggtgtaccgagatggagagagtgttcgggttcccagtccactacacagatgtcagcaacatgtctagactggccagacagagactgctgggaagaagctggtccgtccctgtgatcagacacctgttcgcccctctgaaggagtacttcgcctgcgtgagcagcggcaacagcaacgccaacagccggggccccagcttctctagcggcctggtgccactgtccctgagagggagccacatgggccccatggagatctacaaaaccgtgagcgcctggaagcggcagcctgtgcgcgtgctgagcctgtttcggaatatcgataaagtcctgaaaagcctgggattcctggagagcggctctggctccggcggtggcaccctgaagtacgtggaggatgtgacaaacgtggtcagacgggatgtggagaagtggggccccttcgatctggtgtacggcagcacccaacccctgggcagctcttgtgaccggtgccctggctggtacatgtttcagttccaccggatcctgcagtacgccctgccgagacaggagtcccagcggccattcttttggattttcatggacaacttgctgctgaccgaggatgaccaggaaactaccactcggttcctgcagaccgaagccgtgaccctgcaggacgtgagaggccgggactaccagaacgccatgcgggtgtggtccaacatccctggactgaaaagcaagcacgcacctctgacccctaaagaagaggagtacctgcaggcccaggtgcggagcagaagcaagctggacgcccctaaggtggatctgctggtgaagaattgcctcctgcccctgagagagtacttcaagtatttcagccagaatagtctgcccctgggaggcagcggcggcggcagccaggagcccgtgaccttcgaggacgtggccgtgtacttcacccagaaccagtgggccagcctggaccccatgcagagggccctgtacctggaggtgatgctggagaactacgccaacatcaccagcctggccgccctgcccttccccaagcccgacctgatcctgcagctggagcagggcgaggccccctggggcctggacccctggacccccctggagagggaggccctgggcggcgtgggcggcccaagcagcggcgcccctcctcccagcggcggcaggcggcccaagcagcggcgcccctcctcccagcggcggcagcccagccggctccccaacctctaccgaggagggcacctctgagtccgccacccccgagagcggccctggcacctccaccgagcccagcgagggcagcgcacccggcagccctgccggcagccccacctccacagaggagggaaccagcaccgagcccagcgaaggcagcgccccaggcaccagcaccgagcctagtgagcaggagattaaacggatcaacaagatcagaagaagacttgtgaaagacagcaacaccaagaaggccggcaagacaggccccatgaaaaccctgctggttagagtgatgacacccgatctgagagagcggctggaaaacctgagaaagaagcctgaaaatatcccccagcccatcagcaatacatctagagccaacctgaataagctgctgaccgattacaccgaaatgaagaaggcgatcctgcatgtgtactgggaagagttccagaaggaccctgtgggcctgatgagccgggtggcccagcctgccagcaagaagatcgatcagaacaagctgaaacctgagatggacgagaagggcaacctgaccaccgccggctttgcctgctctcagtgtggccagcccctgttcgtgtacaagctggagcaggtgtctgagaagggcaaggcttacaccaactacttcggacggtgcaatgtggccgagcacgaaaagctgatcctgctggcccagctgaagcccgagaaggatagcgacgaagccgtgacatatagcctgggaaagtttgggcagagggccctggatttctacagcattcatgtgaccaaggagtccacccaccccgtgaagcccctggcccagatcgccggaaacagatacgcctccggacctgtgggaaaggccctgagcgacgcatgtatgggcacaatcgcctccttcctgtctaagtaccaggacatcatcatcgaacaccagaaggtggtgaagggcaaccagaagagactggagagcctgcgggagctggccggcaaggaaaacctggaataccctagcgtgaccctgccacctcagcctcacaccaaggagggcgttgatgcctacaacgaagtgatcgcccgggtgcgaatgtgggtgaacctgaacctgtggcagaagctgaagctaagcagagatgatgccaagcctctgctgagactgaagggattcccttcctttcctctggtcgagagacaggccaacgaagtggactggtgggacatggtgtgtaacgtgaagaagctgatcaacgagaaaaaggaggatggcaaggtgttttggcagaatctggctggctacaagagacaggaagccctgagaccatacctgagcagcgaggaagatcggaagaagggaaagaaattcgctcggtaccagctgggcgacctgctgctgcacctggaaaagaagcacggcgaggactggggaaaggtgtacgacgaggcctgggagcggattgacaagaaagtggaaggcctgagcaagcacatcaagctggaagaggaacggagaagcgaggacgcccagagcaaggccgccctgaccgactggctgcgggctaaggccagcttcgtgatcgagggcctgaaggaggccgacaaggacgagttctgcagatgcgagctgaagctgcagaagtggtacggggacctgcggggaaagcccttcgccatcgaagccgagaacagcatcctggacatcagcggcttcagcaagcagtacaactgtgccttcatctggcagaaggacggcgtgaagaagctgaacctgtacctgatcatcaactacttcaagggcggcaagctgcggttcaagaagatcaaacctgaagccttcgaagccaacagattctacaccgtgatcaacaaaaagagcggcgagatcgtgcccatggaggtgaacttcaacttcgacgaccccaacctgatcatcctgcctctggcctttggcaagagacagggcagagaattcatctggaacgacctgctgtccctggaaaccggcagcctgaagctggccaacggaagagtgatcgagaagacactgtacaacagaagaacccggcaggatgagcctgccctgttcgtggccctgaccttcgagcggcgggaggtcctggactcctccaatatcaaaccaatgaacctgatcggcgtggcaagaggcgaaaacatccccgccgtgatcgccctgaccgaccccgagggctgcccactgagccggtttaaggatagcctgggaaacccaacccacatcctgagaatcggcgagagctataaggagaagcagcggaccatccaggccaagaaggaggtggagcagcggagagccggcggctacagccggaagtacgccagcaaagccaagaatctggcagacgatatggtgagaaacaccgctagagatctgctgtactacgccgtgacccaggatgccatgctgatcttcgccaacctgagccggggcttcggccggcagggcaagcggaccttcatggccgagagacagtacacacggatggaggactggctgaccgccaagctggcctacgagggcctgagcaagacctacctgtccaagacactggcccagtacacctccaagacatgcagcaactgtgggtttaccatcaccagcgccgactacgacagggtgctggagaagctgaagaagacagcaacaggctggatgaccacaattaacggcaaggagctgaaggtggagggccagattacctactacaacagatacaagagacagaacgtagtcaaggacctgtccgtcgagctggatagactgagcgaagaatctgtgaacaacgacatctcctcctggacaaagggcagaagcggagaagctctgagcctcctgaagaaaagattctcccatagacccgtgcaggagaagttcgtgtgcctgaactgcggcttcgagacacacgcagccgagcaagccgccctgaacatcgccagatcctggctgttcctgcggagccaggagtacaagaaataccagacaaacaagacaaccggcaacaccgataagagagccttcgtcgagacctggcagtccttttaccggaagaagcttaaggaggtgtggaaacctgccgtgcggtctggcggatctggcggaggctccaccagccccaagaaaaagagaaaagtctaagctgccttctgcggggcttgccttctggccatgcccttcttctctcccttgcacctgtacctcttggtctttgaataaagcctgagtaggaaggctagcaaaaaaaaaaaaaaaaaaaaaaaaaaaaaaaaaaaaaaaaaaaaaaaaaaaaaaaaaaaaaaaaaaaaaaaaaaaaaaaagcccagccggctccccaacctctaccgaggagggcacctctgagtccgccacccccgagagcggccctggcacctccaccgagcccagcgagggcagcgcacccggcagccctgccggcagccccacctccacagaggagggaaccagcaccgagcccagcgaaggcagcgccccaggcaccagcaccgagcctagtgagcaggagattaaacggatcaacaagatcagaagaagacttgtgaaagacagcaacaccaagaaggccggcaagacaggccccatgaaaaccctgctggttagagtgatgacacccgatctgagagagcggctggaaaacctgagaaagaagcctgaaaatatcccccagcccatcagcaatacatctagagccaacctgaataagctgctgaccgattacaccgaaatgaagaaggcgatcctgcatgtgtactgggaagagttccagaaggaccctgtgggcctgatgagccgggtggcccagcctgccagcaagaagatcgatcagaacaagctgaaacctgagatggacgagaagggcaacctgaccaccgccggctttgcctgctctcagtgtggccagcccctgttcgtgtacaagctggagcaggtgtctgagaagggcaaggcttacaccaactacttcggacggtgcaatgtggccgagcacgaaaagctgatcctgctggcccagctgaagcccgagaaggatagcgacgaagccgtgacatatagcctgggaaagtttgggcagagggccctggatttctacagcattcatgtgaccaaggagtccacccaccccgtgaagcccctggcccagatcgccggaaacagatacgcctccggacctgtgggaaaggccctgagcgacgcatgtatgggcacaatcgcctccttcctgtctaagtaccaggacatcatcatcgaacaccagaaggtggtgaagggcaaccagaagagactggagagcctgcgggagctggccggcaaggaaaacctggaataccctagcgtgaccctgccacctcagcctcacaccaaggagggcgttgatgcctacaacgaagtgatcgcccgggtgcgaatgtgggtgaacctgaacctgtggcagaagctgaagctaagcagagatgatgccaagcctctgctgagactgaagggattcccttcctttcctctggtcgagagacaggccaacgaagtggactggtgggacatggtgtgtaacgtgaagaagctgatcaacgagaaaaaggaggatggcaaggtgttttggcagaatctggctggctacaagagacaggaagccctgagaccatacctgagcagcgaggaagatcggaagaagggaaagaaattcgctcggtaccagctgggcgacctgctgctgcacctggaaaagaagcacggcgaggactggggaaaggtgtacgacgaggcctgggagcggattgacaagaaagtggaaggcctgagcaagcacatcaagctggaagaggaacggagaagcgaggacgcccagagcaaggccgccctgaccgactggctgcgggctaaggccagcttcgtgatcgagggcctgaaggaggccgacaaggacgagttctgcagatgcgagctgaagctgcagaagtggtacggggacctgcggggaaagcccttcgccatcgaagccgagaacagcatcctggacatcagcggcttcagcaagcagtacaactgtgccttcatctggcagaaggacggcgtgaagaagctgaacctgtacctgatcatcaactacttcaagggcggcaagctgcggttcaagaagatcaaacctgaagccttcgaagccaacagattctacaccgtgatcaacaaaaagagcggcgagatcgtgcccatggaggtgaacttcaacttcgacgaccccaacctgatcatcctgcctctggcctttggcaagagacagggcagagaattcatctggaacgacctgctgtccctggaaaccggcagcctgaagctggccaacggaagagtgatcgagaagacactgtacaacagaagaacccggcaggatgagcctgccctgttcgtggccctgaccttcgagcggcgggaggtcctggactcctccaatatcaaaccaatgaacctgatcggcgtggcaagaggcgaaaacatccccgccgtgatcgccctgaccgaccccgagggctgcccactgagccggtttaaggatagcctgggaaacccaacccacatcctgagaatcggcgagagctataaggagaagcagcggaccatccaggccaagaaggaggtggagcagcggagagccggcggctacagccggaagtacgccagcaaagccaagaatctggcagacgatatggtgagaaacaccgctagagatctgctgtactacgccgtgacccaggatgccatgctgatcttcgccaacctgagccggggcttcggccggcagggcaagcggaccttcatggccgagagacagtacacacggatggaggactggctgaccgccaagctggcctacgagggcctgagcaagacctacctgtccaagacactggcccagtacacctccaagacatgcagcaactgtgggtttaccatcaccagcgccgactacgacagggtgctggagaagctgaagaagacagcaacaggctggatgaccacaattaacggcaaggagctgaaggtggagggccagattacctactacaacagatacaagagacagaacgtagtcaaggacctgtccgtcgagctggatagactgagcgaagaatctgtgaacaacgacatctcctcctggacaaagggcagaagcggagaagctctgagcctcctgaagaaaagattctcccatagacccgtgcaggagaagttcgtgtgcctgaactgcggcttcgagacacacgcagccgagcaagccgccctgaacatcgccagatcctggctgttcctgcggagccaggagtacaagaaataccagacaaacaagacaaccggcaacaccgataagagagccttcgtcgagacctggcagtccttttaccggaagaagcttaaggaggtgtggaaacctgccgtgcggtctggcggatctggcggaggctccaccagccccaagaaaaagagaaaagtctaagctgccttctgcggggcttgccttctggccatgcccttcttctctcccttgcacctgtacctcttggtctttgaataaagcctgagtaggaaggctagcaaaaaaaaaaaaaaaaaaaaaaaaaaaaaaaaaaaaaaaaaaaaaaaaaaaaaaaaaaaaaaaaaaaaaaaaaaaaaaaa

SEQ ID NO: 9250 - RNA, 8787 nt, synthetic construct
  source 1..8787: mol_type = other RNA
aggaaataagagagaaaagaagagtaagaagaaatataagagccaccatggcccctaagaagaagcgtaaagtgagccggatgaaccacgaccaggagttcgacccccctaaggtgtaccctcccgtccccgccgagaagagaaagcccatccgggtcctgagcctgttcgatggcatcgccaccggtctgctggtgctgaaggacctgggcatccaggtggataggtacattgcctccgaggtgtgcgaggactccatcaccgtgggaatggtgcgtcatcagggcaagatcatgtacgtgggcgacgtgcggagcgtgacacagaagcatatccaggagtggggccctttcgacctggtgatcggcggcagcccttgcaatgacctgagcatcgtgaacccagcccggaagggcctgtacgagggaaccggcagactgttcttcgagttttacagactgctgcacgacgcccggcctaaggaaggcgacgaccggcccttcttttggctgttcgagaatgtggtggccatgggagtcagcgacaagcgggatattagccggttcctggagagcaaccccgtgatgatcgatgccaaggaagtgagcgccgcccaccgggccagatacttctggggcaatctgcctggcatgaacagacccctggccagcaccgtgaacgacaagctggagctgcaggagtgcctggagcacggccggatcgccaagttcagcaaggtgagaaccatcaccacccgaagcaacagcatcaaacaaggcaaggaccagcactttcctgtgttcatgaacgagaaggaggacatcctgtggtgtaccgagatggagagagtgttcgggttcccagtccactacacagatgtcagcaacatgtctagactggccagacagagactgctgggaagaagctggtccgtccctgtgatcagacacctgttcgcccctctgaaggagtacttcgcctgcgtgagcagcggcaacagcaacgccaacagccggggccccagcttctctagcggcctggtgccactgtccctgagagggagccacatgggccccatggagatctacaaaaccgtgagcgcctggaagcggcagcctgtgcgcgtgctgagcctgtttcggaatatcgataaagtcctgaaaagcctgggattcctggagagcggctctggctccggcggtggcaccctgaagtacgtggaggatgtgacaaacgtggtcagacgggatgtggagaagtggggccccttcgatctggtgtacggcagcacccaacccctgggcagctcttgtgaccggtgccctggctggtacatgtttcagttccaccggatcctgcagtacgccctgccgagacaggagtcccagcggccattcttttggattttcatggacaacttgctgctgaccgaggatgaccaggaaactaccactcggttcctgcagaccgaagccgtgaccctgcaggacgtgagaggccgggactaccagaacgccatgcgggtgtggtccaacatccctggactgaaaagcaagcacgcacctctgacccctaaagaagaggagtacctgcaggcccaggtgcggagcagaagcaagctggacgcccctaaggtggatctgctggtgaagaattgcctcctgcccctgagagagtacttcaagtatttcagccagaatagtctgcccctgggaggcagcggcggcggcgaggagctgcccgtggtgttcgaggacgtggccgtgtacttcaccagggaggagtgggccatgctggacaagaggcagaaggagctgtacagggacgtgatgaggatgaactacgagctgctggccagcctgggccccgccgccgccaagcccgagctgatcagcaagctggagaggagggccgccccctggatcaaggaccccaacggccccaagtggggcaagggcaggccccccggcaagggcggcccaagcagcggcgcccctcctcccagcggcggcaggcggcccaagcagcggcgcccctcctcccagcggcggcagcccagccggctccccaacctctaccgaggagggcacctctgagtccgccacccccgagagcggccctggcacctccaccgagcccagcgagggcagcgcacccggcagccctgccggcagccccacctccacagaggagggaaccagcaccgagcccagcgaaggcagcgccccaggcaccagcaccgagcctagtgagcaggagattaaacggatcaacaagatcagaagaagacttgtgaaagacagcaacaccaagaaggccggcaagacaggccccatgaaaaccctgctggttagagtgatgacacccgatctgagagagcggctggaaaacctgagaaagaagcctgaaaatatcccccagcccatcagcaatacatctagagccaacctgaataagctgctgaccgattacaccgaaatgaagaaggcgatcctgcatgtgtactgggaagagttccagaaggaccctgtgggcctgatgagccgggtggcccagcctgccagcaagaagatcgatcagaacaagctgaaacctgagatggacgagaagggcaacctgaccaccgccggctttgcctgctctcagtgtggccagcccctgttcgtgtacaagctggagcaggtgtctgagaagggcaaggcttacaccaactacttcggacggtgcaatgtggccgagcacgaaaagctgatcctgctggcccagctgaagcccgagaaggatagcgacgaagccgtgacatatagcctgggaaagtttgggcagagggccctggatttctacagcattcatgtgaccaaggagtccacccaccccgtgaagcccctggcccagatcgccggaaacagatacgcctccggacctgtgggaaaggccctgagcgacgcatgtatgggcacaatcgcctccttcctgtctaagtaccaggacatcatcatcgaacaccagaaggtggtgaagggcaaccagaagagactggagagcctgcgggagctggccggcaaggaaaacctggaataccctagcgtgaccctgccacctcagcctcacaccaaggagggcgttgatgcctacaacgaagtgatcgcccgggtgcgaatgtgggtgaacctgaacctgtggcagaagctgaagctaagcagagatgatgccaagcctctgctgagactgaagggattcccttcctttcctctggtcgagagacaggccaacgaagtggactggtgggacatggtgtgtaacgtgaagaagctgatcaacgagaaaaaggaggatggcaaggtgttttggcagaatctggctggctacaagagacaggaagccctgagaccatacctgagcagcgaggaagatcggaagaagggaaagaaattcgctcggtaccagctgggcgacctgctgctgcacctggaaaagaagcacggcgaggactggggaaaggtgtacgacgaggcctgggagcggattgacaagaaagtggaaggcctgagcaagcacatcaagctggaagaggaacggagaagcgaggacgcccagagcaaggccgccctgaccgactggctgcgggctaaggccagcttcgtgatcgagggcctgaaggaggccgacaaggacgagttctgcagatgcgagctgaagctgcagaagtggtacggggacctgcggggaaagcccttcgccatcgaagccgagaacagcatcctggacatcagcggcttcagcaagcagtacaactgtgccttcatctggcagaaggacggcgtgaagaagctgaacctgtacctgatcatcaactacttcaagggcggcaagctgcggttcaagaagatcaaacctgaagccttcgaagccaacagattctacaccgtgatcaacaaaaagagcggcgagatcgtgcccatggaggtgaacttcaacttcgacgaccccaacctgatcatcctgcctctggcctttggcaagagacagggcagagaattcatctggaacgacctgctgtccctggaaaccggcagcctgaagctggccaacggaagagtgatcgagaagacactgtacaacagaagaacccggcaggatgagcctgccctgttcgtggccctgaccttcgagcggcgggaggtcctggactcctccaatatcaaaccaatgaacctgatcggcgtggcaagaggcgaaaacatccccgccgtgatcgccctgaccgaccccgagggctgcccactgagccggtttaaggatagcctgggaaacccaacccacatcctgagaatcggcgagagctataaggagaagcagcggaccatccaggccaagaaggaggtggagcagcggagagccggcggctacagccggaagtacgccagcaaagccaagaatctggcagacgatatggtgagaaacaccgctagagatctgctgtactacgccgtgacccaggatgccatgctgatcttcgccaacctgagccggggcttcggccggcagggcaagcggaccttcatggccgagagacagtacacacggatggaggactggctgaccgccaagctggcctacgagggcctgagcaagacctacctgtccaagacactggcccagtacacctccaagacatgcagcaactgtgggtttaccatcaccagcgccgactacgacagggtgctggagaagctgaagaagacagcaacaggctggatgaccacaattaacggcaaggagctgaaggtggagggccagattacctactacaacagatacaagagacagaacgtagtcaaggacctgtccgtcgagctggatagactgagcgaagaatctgtgaacaacgacatctcctcctggacaaagggcagaagcggagaagctctgagcctcctgaagaaaagattctcccatagacccgtgcaggagaagttcgtgtgcctgaactgcggcttcgagacacacgcagccgagcaagccgccctgaacatcgccagatcctggctgttcctgcggagccaggagtacaagaaataccagacaaacaagacaaccggcaacaccgataagagagccttcgtcgagacctggcagtccttttaccggaagaagcttaaggaggtgtggaaacctgccgtgcggtctggcggatctggcggaggctccaccagccccaagaaaaagagaaaagtctaagctgccttctgcggggcttgccttctggccatgcccttcttctctcccttgcacctgtacctcttggtctttgaataaagcctgagtaggaaggctagcaaaaaaaaaaaaaaaaaaaaaaaaaaaaaaaaaaaaaaaaaaaaaaaaaaaaaaaaaaaaaaaaaaaaaaaaaaaaaaaagcccagccggctccccaacctctaccgaggagggcacctctgagtccgccacccccgagagcggccctggcacctccaccgagcccagcgagggcagcgcacccggcagccctgccggcagccccacctccacagaggagggaaccagcaccgagcccagcgaaggcagcgccccaggcaccagcaccgagcctagtgagcaggagattaaacggatcaacaagatcagaagaagacttgtgaaagacagcaacaccaagaaggccggcaagacaggccccatgaaaaccctgctggttagagtgatgacacccgatctgagagagcggctggaaaacctgagaaagaagcctgaaaatatcccccagcccatcagcaatacatctagagccaacctgaataagctgctgaccgattacaccgaaatgaagaaggcgatcctgcatgtgtactgggaagagttccagaaggaccctgtgggcctgatgagccgggtggcccagcctgccagcaagaagatcgatcagaacaagctgaaacctgagatggacgagaagggcaacctgaccaccgccggctttgcctgctctcagtgtggccagcccctgttcgtgtacaagctggagcaggtgtctgagaagggcaaggcttacaccaactacttcggacggtgcaatgtggccgagcacgaaaagctgatcctgctggcccagctgaagcccgagaaggatagcgacgaagccgtgacatatagcctgggaaagtttgggcagagggccctggatttctacagcattcatgtgaccaaggagtccacccaccccgtgaagcccctggcccagatcgccggaaacagatacgcctccggacctgtgggaaaggccctgagcgacgcatgtatgggcacaatcgcctccttcctgtctaagtaccaggacatcatcatcgaacaccagaaggtggtgaagggcaaccagaagagactggagagcctgcgggagctggccggcaaggaaaacctggaataccctagcgtgaccctgccacctcagcctcacaccaaggagggcgttgatgcctacaacgaagtgatcgcccgggtgcgaatgtgggtgaacctgaacctgtggcagaagctgaagctaagcagagatgatgccaagcctctgctgagactgaagggattcccttcctttcctctggtcgagagacaggccaacgaagtggactggtgggacatggtgtgtaacgtgaagaagctgatcaacgagaaaaaggaggatggcaaggtgttttggcagaatctggctggctacaagagacaggaagccctgagaccatacctgagcagcgaggaagatcggaagaagggaaagaaattcgctcggtaccagctgggcgacctgctgctgcacctggaaaagaagcacggcgaggactggggaaaggtgtacgacgaggcctgggagcggattgacaagaaagtggaaggcctgagcaagcacatcaagctggaagaggaacggagaagcgaggacgcccagagcaaggccgccctgaccgactggctgcgggctaaggccagcttcgtgatcgagggcctgaaggaggccgacaaggacgagttctgcagatgcgagctgaagctgcagaagtggtacggggacctgcggggaaagcccttcgccatcgaagccgagaacagcatcctggacatcagcggcttcagcaagcagtacaactgtgccttcatctggcagaaggacggcgtgaagaagctgaacctgtacctgatcatcaactacttcaagggcggcaagctgcggttcaagaagatcaaacctgaagccttcgaagccaacagattctacaccgtgatcaacaaaaagagcggcgagatcgtgcccatggaggtgaacttcaacttcgacgaccccaacctgatcatcctgcctctggcctttggcaagagacagggcagagaattcatctggaacgacctgctgtccctggaaaccggcagcctgaagctggccaacggaagagtgatcgagaagacactgtacaacagaagaacccggcaggatgagcctgccctgttcgtggccctgaccttcgagcggcgggaggtcctggactcctccaatatcaaaccaatgaacctgatcggcgtggcaagaggcgaaaacatccccgccgtgatcgccctgaccgaccccgagggctgcccactgagccggtttaaggatagcctgggaaacccaacccacatcctgagaatcggcgagagctataaggagaagcagcggaccatccaggccaagaaggaggtggagcagcggagagccggcggctacagccggaagtacgccagcaaagccaagaatctggcagacgatatggtgagaaacaccgctagagatctgctgtactacgccgtgacccaggatgccatgctgatcttcgccaacctgagccggggcttcggccggcagggcaagcggaccttcatggccgagagacagtacacacggatggaggactggctgaccgccaagctggcctacgagggcctgagcaagacctacctgtccaagacactggcccagtacacctccaagacatgcagcaactgtgggtttaccatcaccagcgccgactacgacagggtgctggagaagctgaagaagacagcaacaggctggatgaccacaattaacggcaaggagctgaaggtggagggccagattacctactacaacagatacaagagacagaacgtagtcaaggacctgtccgtcgagctggatagactgagcgaagaatctgtgaacaacgacatctcctcctggacaaagggcagaagcggagaagctctgagcctcctgaagaaaagattctcccatagacccgtgcaggagaagttcgtgtgcctgaactgcggcttcgagacacacgcagccgagcaagccgccctgaacatcgccagatcctggctgttcctgcggagccaggagtacaagaaataccagacaaacaagacaaccggcaacaccgataagagagccttcgtcgagacctggcagtccttttaccggaagaagcttaaggaggtgtggaaacctgccgtgcggtctggcggatctggcggaggctccaccagccccaagaaaaagagaaaagtctaagctgccttctgcggggcttgccttctggccatgcccttcttctctcccttgcacctgtacctcttggtctttgaataaagcctgagtaggaaggctagcaaaaaaaaaaaaaaaaaaaaaaaaaaaaaaaaaaaaaaaaaaaaaaaaaaaaaaaaaaaaaaaaaaaaaaaaaaaaaaaa

SEQ ID NO: 9251 - RNA, 8787 nt, synthetic construct
  source 1..8787: mol_type = other RNA
aggaaataagagagaaaagaagagtaagaagaaatataagagccaccatggcccctaagaagaagcgtaaagtgagccggatgaaccacgaccaggagttcgacccccctaaggtgtaccctcccgtccccgccgagaagagaaagcccatccgggtcctgagcctgttcgatggcatcgccaccggtctgctggtgctgaaggacctgggcatccaggtggataggtacattgcctccgaggtgtgcgaggactccatcaccgtgggaatggtgcgtcatcagggcaagatcatgtacgtgggcgacgtgcggagcgtgacacagaagcatatccaggagtggggccctttcgacctggtgatcggcggcagcccttgcaatgacctgagcatcgtgaacccagcccggaagggcctgtacgagggaaccggcagactgttcttcgagttttacagactgctgcacgacgcccggcctaaggaaggcgacgaccggcccttcttttggctgttcgagaatgtggtggccatgggagtcagcgacaagcgggatattagccggttcctggagagcaaccccgtgatgatcgatgccaaggaagtgagcgccgcccaccgggccagatacttctggggcaatctgcctggcatgaacagacccctggccagcaccgtgaacgacaagctggagctgcaggagtgcctggagcacggccggatcgccaagttcagcaaggtgagaaccatcaccacccgaagcaacagcatcaaacaaggcaaggaccagcactttcctgtgttcatgaacgagaaggaggacatcctgtggtgtaccgagatggagagagtgttcgggttcccagtccactacacagatgtcagcaacatgtctagactggccagacagagactgctgggaagaagctggtccgtccctgtgatcagacacctgttcgcccctctgaaggagtacttcgcctgcgtgagcagcggcaacagcaacgccaacagccggggccccagcttctctagcggcctggtgccactgtccctgagagggagccacatgggccccatggagatctacaaaaccgtgagcgcctggaagcggcagcctgtgcgcgtgctgagcctgtttcggaatatcgataaagtcctgaaaagcctgggattcctggagagcggctctggctccggcggtggcaccctgaagtacgtggaggatgtgacaaacgtggtcagacgggatgtggagaagtggggccccttcgatctggtgtacggcagcacccaacccctgggcagctcttgtgaccggtgccctggctggtacatgtttcagttccaccggatcctgcagtacgccctgccgagacaggagtcccagcggccattcttttggattttcatggacaacttgctgctgaccgaggatgaccaggaaactaccactcggttcctgcagaccgaagccgtgaccctgcaggacgtgagaggccgggactaccagaacgccatgcgggtgtggtccaacatccctggactgaaaagcaagcacgcacctctgacccctaaagaagaggagtacctgcaggcccaggtgcggagcagaagcaagctggacgcccctaaggtggatctgctggtgaagaattgcctcctgcccctgagagagtacttcaagtatttcagccagaatagtctgcccctgggaggcagcggcggcggcgcccagggccccgtgaccttcgaggacgtggccgtgtacttcagcgccgaggagtggcaggagctggccggctggcagagggagctgtacagggacgtgatgatggacacctacgagctggtggccagcctgggccccgccggcctgaagcccgaggtggtgagcaagctggagaggggcgaggagccccaccagcccgccaggagcagggagagccccagggcccccctgcccgtgctgctgggcggcccaagcagcggcgcccctcctcccagcggcggcaggcggcccaagcagcggcgcccctcctcccagcggcggcagcccagccggctccccaacctctaccgaggagggcacctctgagtccgccacccccgagagcggccctggcacctccaccgagcccagcgagggcagcgcacccggcagccctgccggcagccccacctccacagaggagggaaccagcaccgagcccagcgaaggcagcgccccaggcaccagcaccgagcctagtgagcaggagattaaacggatcaacaagatcagaagaagacttgtgaaagacagcaacaccaagaaggccggcaagacaggccccatgaaaaccctgctggttagagtgatgacacccgatctgagagagcggctggaaaacctgagaaagaagcctgaaaatatcccccagcccatcagcaatacatctagagccaacctgaataagctgctgaccgattacaccgaaatgaagaaggcgatcctgcatgtgtactgggaagagttccagaaggaccctgtgggcctgatgagccgggtggcccagcctgccagcaagaagatcgatcagaacaagctgaaacctgagatggacgagaagggcaacctgaccaccgccggctttgcctgctctcagtgtggccagcccctgttcgtgtacaagctggagcaggtgtctgagaagggcaaggcttacaccaactacttcggacggtgcaatgtggccgagcacgaaaagctgatcctgctggcccagctgaagcccgagaaggatagcgacgaagccgtgacatatagcctgggaaagtttgggcagagggccctggatttctacagcattcatgtgaccaaggagtccacccaccccgtgaagcccctggcccagatcgccggaaacagatacgcctccggacctgtgggaaaggccctgagcgacgcatgtatgggcacaatcgcctccttcctgtctaagtaccaggacatcatcatcgaacaccagaaggtggtgaagggcaaccagaagagactggagagcctgcgggagctggccggcaaggaaaacctggaataccctagcgtgaccctgccacctcagcctcacaccaaggagggcgttgatgcctacaacgaagtgatcgcccgggtgcgaatgtgggtgaacctgaacctgtggcagaagctgaagctaagcagagatgatgccaagcctctgctgagactgaagggattcccttcctttcctctggtcgagagacaggccaacgaagtggactggtgggacatggtgtgtaacgtgaagaagctgatcaacgagaaaaaggaggatggcaaggtgttttggcagaatctggctggctacaagagacaggaagccctgagaccatacctgagcagcgaggaagatcggaagaagggaaagaaattcgctcggtaccagctgggcgacctgctgctgcacctggaaaagaagcacggcgaggactggggaaaggtgtacgacgaggcctgggagcggattgacaagaaagtggaaggcctgagcaagcacatcaagctggaagaggaacggagaagcgaggacgcccagagcaaggccgccctgaccgactggctgcgggctaaggccagcttcgtgatcgagggcctgaaggaggccgacaaggacgagttctgcagatgcgagctgaagctgcagaagtggtacggggacctgcggggaaagcccttcgccatcgaagccgagaacagcatcctggacatcagcggcttcagcaagcagtacaactgtgccttcatctggcagaaggacggcgtgaagaagctgaacctgtacctgatcatcaactacttcaagggcggcaagctgcggttcaagaagatcaaacctgaagccttcgaagccaacagattctacaccgtgatcaacaaaaagagcggcgagatcgtgcccatggaggtgaacttcaacttcgacgaccccaacctgatcatcctgcctctggcctttggcaagagacagggcagagaattcatctggaacgacctgctgtccctggaaaccggcagcctgaagctggccaacggaagagtgatcgagaagacactgtacaacagaagaacccggcaggatgagcctgccctgttcgtggccctgaccttcgagcggcgggaggtcctggactcctccaatatcaaaccaatgaacctgatcggcgtggcaagaggcgaaaacatccccgccgtgatcgccctgaccgaccccgagggctgcccactgagccggtttaaggatagcctgggaaacccaacccacatcctgagaatcggcgagagctataaggagaagcagcggaccatccaggccaagaaggaggtggagcagcggagagccggcggctacagccggaagtacgccagcaaagccaagaatctggcagacgatatggtgagaaacaccgctagagatctgctgtactacgccgtgacccaggatgccatgctgatcttcgccaacctgagccggggcttcggccggcagggcaagcggaccttcatggccgagagacagtacacacggatggaggactggctgaccgccaagctggcctacgagggcctgagcaagacctacctgtccaagacactggcccagtacacctccaagacatgcagcaactgtgggtttaccatcaccagcgccgactacgacagggtgctggagaagctgaagaagacagcaacaggctggatgaccacaattaacggcaaggagctgaaggtggagggccagattacctactacaacagatacaagagacagaacgtagtcaaggacctgtccgtcgagctggatagactgagcgaagaatctgtgaacaacgacatctcctcctggacaaagggcagaagcggagaagctctgagcctcctgaagaaaagattctcccatagacccgtgcaggagaagttcgtgtgcctgaactgcggcttcgagacacacgcagccgagcaagccgccctgaacatcgccagatcctggctgttcctgcggagccaggagtacaagaaataccagacaaacaagacaaccggcaacaccgataagagagccttcgtcgagacctggcagtccttttaccggaagaagcttaaggaggtgtggaaacctgccgtgcggtctggcggatctggcggaggctccaccagccccaagaaaaagagaaaagtctaagctgccttctgcggggcttgccttctggccatgcccttcttctctcccttgcacctgtacctcttggtctttgaataaagcctgagtaggaaggctagcaaaaaaaaaaaaaaaaaaaaaaaaaaaaaaaaaaaaaaaaaaaaaaaaaaaaaaaaaaaaaaaaaaaaaaaaaaaaaaaagcccagccggctccccaacctctaccgaggagggcacctctgagtccgccacccccgagagcggccctggcacctccaccgagcccagcgagggcagcgcacccggcagccctgccggcagccccacctccacagaggagggaaccagcaccgagcccagcgaaggcagcgccccaggcaccagcaccgagcctagtgagcaggagattaaacggatcaacaagatcagaagaagacttgtgaaagacagcaacaccaagaaggccggcaagacaggccccatgaaaaccctgctggttagagtgatgacacccgatctgagagagcggctggaaaacctgagaaagaagcctgaaaatatcccccagcccatcagcaatacatctagagccaacctgaataagctgctgaccgattacaccgaaatgaagaaggcgatcctgcatgtgtactgggaagagttccagaaggaccctgtgggcctgatgagccgggtggcccagcctgccagcaagaagatcgatcagaacaagctgaaacctgagatggacgagaagggcaacctgaccaccgccggctttgcctgctctcagtgtggccagcccctgttcgtgtacaagctggagcaggtgtctgagaagggcaaggcttacaccaactacttcggacggtgcaatgtggccgagcacgaaaagctgatcctgctggcccagctgaagcccgagaaggatagcgacgaagccgtgacatatagcctgggaaagtttgggcagagggccctggatttctacagcattcatgtgaccaaggagtccacccaccccgtgaagcccctggcccagatcgccggaaacagatacgcctccggacctgtgggaaaggccctgagcgacgcatgtatgggcacaatcgcctccttcctgtctaagtaccaggacatcatcatcgaacaccagaaggtggtgaagggcaaccagaagagactggagagcctgcgggagctggccggcaaggaaaacctggaataccctagcgtgaccctgccacctcagcctcacaccaaggagggcgttgatgcctacaacgaagtgatcgcccgggtgcgaatgtgggtgaacctgaacctgtggcagaagctgaagctaagcagagatgatgccaagcctctgctgagactgaagggattcccttcctttcctctggtcgagagacaggccaacgaagtggactggtgggacatggtgtgtaacgtgaagaagctgatcaacgagaaaaaggaggatggcaaggtgttttggcagaatctggctggctacaagagacaggaagccctgagaccatacctgagcagcgaggaagatcggaagaagggaaagaaattcgctcggtaccagctgggcgacctgctgctgcacctggaaaagaagcacggcgaggactggggaaaggtgtacgacgaggcctgggagcggattgacaagaaagtggaaggcctgagcaagcacatcaagctggaagaggaacggagaagcgaggacgcccagagcaaggccgccctgaccgactggctgcgggctaaggccagcttcgtgatcgagggcctgaaggaggccgacaaggacgagttctgcagatgcgagctgaagctgcagaagtggtacggggacctgcggggaaagcccttcgccatcgaagccgagaacagcatcctggacatcagcggcttcagcaagcagtacaactgtgccttcatctggcagaaggacggcgtgaagaagctgaacctgtacctgatcatcaactacttcaagggcggcaagctgcggttcaagaagatcaaacctgaagccttcgaagccaacagattctacaccgtgatcaacaaaaagagcggcgagatcgtgcccatggaggtgaacttcaacttcgacgaccccaacctgatcatcctgcctctggcctttggcaagagacagggcagagaattcatctggaacgacctgctgtccctggaaaccggcagcctgaagctggccaacggaagagtgatcgagaagacactgtacaacagaagaacccggcaggatgagcctgccctgttcgtggccctgaccttcgagcggcgggaggtcctggactcctccaatatcaaaccaatgaacctgatcggcgtggcaagaggcgaaaacatccccgccgtgatcgccctgaccgaccccgagggctgcccactgagccggtttaaggatagcctgggaaacccaacccacatcctgagaatcggcgagagctataaggagaagcagcggaccatccaggccaagaaggaggtggagcagcggagagccggcggctacagccggaagtacgccagcaaagccaagaatctggcagacgatatggtgagaaacaccgctagagatctgctgtactacgccgtgacccaggatgccatgctgatcttcgccaacctgagccggggcttcggccggcagggcaagcggaccttcatggccgagagacagtacacacggatggaggactggctgaccgccaagctggcctacgagggcctgagcaagacctacctgtccaagacactggcccagtacacctccaagacatgcagcaactgtgggtttaccatcaccagcgccgactacgacagggtgctggagaagctgaagaagacagcaacaggctggatgaccacaattaacggcaaggagctgaaggtggagggccagattacctactacaacagatacaagagacagaacgtagtcaaggacctgtccgtcgagctggatagactgagcgaagaatctgtgaacaacgacatctcctcctggacaaagggcagaagcggagaagctctgagcctcctgaagaaaagattctcccatagacccgtgcaggagaagttcgtgtgcctgaactgcggcttcgagacacacgcagccgagcaagccgccctgaacatcgccagatcctggctgttcctgcggagccaggagtacaagaaataccagacaaacaagacaaccggcaacaccgataagagagccttcgtcgagacctggcagtccttttaccggaagaagcttaaggaggtgtggaaacctgccgtgcggtctggcggatctggcggaggctccaccagccccaagaaaaagagaaaagtctaagctgccttctgcggggcttgccttctggccatgcccttcttctctcccttgcacctgtacctcttggtctttgaataaagcctgagtaggaaggctagcaaaaaaaaaaaaaaaaaaaaaaaaaaaaaaaaaaaaaaaaaaaaaaaaaaaaaaaaaaaaaaaaaaaaaaaaaaaaaaaa

SEQ ID NO: 9252 - RNA, 8787 nt, synthetic construct
  source 1..8787: mol_type = other RNA
aggaaataagagagaaaagaagagtaagaagaaatataagagccaccatggcccctaagaagaagcgtaaagtgagccggatgaaccacgaccaggagttcgacccccctaaggtgtaccctcccgtccccgccgagaagagaaagcccatccgggtcctgagcctgttcgatggcatcgccaccggtctgctggtgctgaaggacctgggcatccaggtggataggtacattgcctccgaggtgtgcgaggactccatcaccgtgggaatggtgcgtcatcagggcaagatcatgtacgtgggcgacgtgcggagcgtgacacagaagcatatccaggagtggggccctttcgacctggtgatcggcggcagcccttgcaatgacctgagcatcgtgaacccagcccggaagggcctgtacgagggaaccggcagactgttcttcgagttttacagactgctgcacgacgcccggcctaaggaaggcgacgaccggcccttcttttggctgttcgagaatgtggtggccatgggagtcagcgacaagcgggatattagccggttcctggagagcaaccccgtgatgatcgatgccaaggaagtgagcgccgcccaccgggccagatacttctggggcaatctgcctggcatgaacagacccctggccagcaccgtgaacgacaagctggagctgcaggagtgcctggagcacggccggatcgccaagttcagcaaggtgagaaccatcaccacccgaagcaacagcatcaaacaaggcaaggaccagcactttcctgtgttcatgaacgagaaggaggacatcctgtggtgtaccgagatggagagagtgttcgggttcccagtccactacacagatgtcagcaacatgtctagactggccagacagagactgctgggaagaagctggtccgtccctgtgatcagacacctgttcgcccctctgaaggagtacttcgcctgcgtgagcagcggcaacagcaacgccaacagccggggccccagcttctctagcggcctggtgccactgtccctgagagggagccacatgggccccatggagatctacaaaaccgtgagcgcctggaagcggcagcctgtgcgcgtgctgagcctgtttcggaatatcgataaagtcctgaaaagcctgggattcctggagagcggctctggctccggcggtggcaccctgaagtacgtggaggatgtgacaaacgtggtcagacgggatgtggagaagtggggccccttcgatctggtgtacggcagcacccaacccctgggcagctcttgtgaccggtgccctggctggtacatgtttcagttccaccggatcctgcagtacgccctgccgagacaggagtcccagcggccattcttttggattttcatggacaacttgctgctgaccgaggatgaccaggaaactaccactcggttcctgcagaccgaagccgtgaccctgcaggacgtgagaggccgggactaccagaacgccatgcgggtgtggtccaacatccctggactgaaaagcaagcacgcacctctgacccctaaagaagaggagtacctgcaggcccaggtgcggagcagaagcaagctggacgcccctaaggtggatctgctggtgaagaattgcctcctgcccctgagagagtacttcaagtatttcagccagaatagtctgcccctgggaggcagcggcggcggcaagaccgcccccgtgaccttcgacgacgtggccgtgtacttcagcgccgaggagtgggaggagctggccgagtggcagaaggagctgtacaaggacgtgatgagggacaactacgaggccctgatcagcctgggccacgccgccgccaagcccgacatcatccagctgctggagcacggcgaggagccctgcgtgaagggccacaaggacagcggcaacggcaaggccttcaacttcatcagcggcggcccaagcagcggcgcccctcctcccagcggcggcaggcggcccaagcagcggcgcccctcctcccagcggcggcagcccagccggctccccaacctctaccgaggagggcacctctgagtccgccacccccgagagcggccctggcacctccaccgagcccagcgagggcagcgcacccggcagccctgccggcagccccacctccacagaggagggaaccagcaccgagcccagcgaaggcagcgccccaggcaccagcaccgagcctagtgagcaggagattaaacggatcaacaagatcagaagaagacttgtgaaagacagcaacaccaagaaggccggcaagacaggccccatgaaaaccctgctggttagagtgatgacacccgatctgagagagcggctggaaaacctgagaaagaagcctgaaaatatcccccagcccatcagcaatacatctagagccaacctgaataagctgctgaccgattacaccgaaatgaagaaggcgatcctgcatgtgtactgggaagagttccagaaggaccctgtgggcctgatgagccgggtggcccagcctgccagcaagaagatcgatcagaacaagctgaaacctgagatggacgagaagggcaacctgaccaccgccggctttgcctgctctcagtgtggccagcccctgttcgtgtacaagctggagcaggtgtctgagaagggcaaggcttacaccaactacttcggacggtgcaatgtggccgagcacgaaaagctgatcctgctggcccagctgaagcccgagaaggatagcgacgaagccgtgacatatagcctgggaaagtttgggcagagggccctggatttctacagcattcatgtgaccaaggagtccacccaccccgtgaagcccctggcccagatcgccggaaacagatacgcctccggacctgtgggaaaggccctgagcgacgcatgtatgggcacaatcgcctccttcctgtctaagtaccaggacatcatcatcgaacaccagaaggtggtgaagggcaaccagaagagactggagagcctgcgggagctggccggcaaggaaaacctggaataccctagcgtgaccctgccacctcagcctcacaccaaggagggcgttgatgcctacaacgaagtgatcgcccgggtgcgaatgtgggtgaacctgaacctgtggcagaagctgaagctaagcagagatgatgccaagcctctgctgagactgaagggattcccttcctttcctctggtcgagagacaggccaacgaagtggactggtgggacatggtgtgtaacgtgaagaagctgatcaacgagaaaaaggaggatggcaaggtgttttggcagaatctggctggctacaagagacaggaagccctgagaccatacctgagcagcgaggaagatcggaagaagggaaagaaattcgctcggtaccagctgggcgacctgctgctgcacctggaaaagaagcacggcgaggactggggaaaggtgtacgacgaggcctgggagcggattgacaagaaagtggaaggcctgagcaagcacatcaagctggaagaggaacggagaagcgaggacgcccagagcaaggccgccctgaccgactggctgcgggctaaggccagcttcgtgatcgagggcctgaaggaggccgacaaggacgagttctgcagatgcgagctgaagctgcagaagtggtacggggacctgcggggaaagcccttcgccatcgaagccgagaacagcatcctggacatcagcggcttcagcaagcagtacaactgtgccttcatctggcagaaggacggcgtgaagaagctgaacctgtacctgatcatcaactacttcaagggcggcaagctgcggttcaagaagatcaaacctgaagccttcgaagccaacagattctacaccgtgatcaacaaaaagagcggcgagatcgtgcccatggaggtgaacttcaacttcgacgaccccaacctgatcatcctgcctctggcctttggcaagagacagggcagagaattcatctggaacgacctgctgtccctggaaaccggcagcctgaagctggccaacggaagagtgatcgagaagacactgtacaacagaagaacccggcaggatgagcctgccctgttcgtggccctgaccttcgagcggcgggaggtcctggactcctccaatatcaaaccaatgaacctgatcggcgtggcaagaggcgaaaacatccccgccgtgatcgccctgaccgaccccgagggctgcccactgagccggtttaaggatagcctgggaaacccaacccacatcctgagaatcggcgagagctataaggagaagcagcggaccatccaggccaagaaggaggtggagcagcggagagccggcggctacagccggaagtacgccagcaaagccaagaatctggcagacgatatggtgagaaacaccgctagagatctgctgtactacgccgtgacccaggatgccatgctgatcttcgccaacctgagccggggcttcggccggcagggcaagcggaccttcatggccgagagacagtacacacggatggaggactggctgaccgccaagctggcctacgagggcctgagcaagacctacctgtccaagacactggcccagtacacctccaagacatgcagcaactgtgggtttaccatcaccagcgccgactacgacagggtgctggagaagctgaagaagacagcaacaggctggatgaccacaattaacggcaaggagctgaaggtggagggccagattacctactacaacagatacaagagacagaacgtagtcaaggacctgtccgtcgagctggatagactgagcgaagaatctgtgaacaacgacatctcctcctggacaaagggcagaagcggagaagctctgagcctcctgaagaaaagattctcccatagacccgtgcaggagaagttcgtgtgcctgaactgcggcttcgagacacacgcagccgagcaagccgccctgaacatcgccagatcctggctgttcctgcggagccaggagtacaagaaataccagacaaacaagacaaccggcaacaccgataagagagccttcgtcgagacctggcagtccttttaccggaagaagcttaaggaggtgtggaaacctgccgtgcggtctggcggatctggcggaggctccaccagccccaagaaaaagagaaaagtctaagctgccttctgcggggcttgccttctggccatgcccttcttctctcccttgcacctgtacctcttggtctttgaataaagcctgagtaggaaggctagcaaaaaaaaaaaaaaaaaaaaaaaaaaaaaaaaaaaaaaaaaaaaaaaaaaaaaaaaaaaaaaaaaaaaaaaaaaaaaaaagcccagccggctccccaacctctaccgaggagggcacctctgagtccgccacccccgagagcggccctggcacctccaccgagcccagcgagggcagcgcacccggcagccctgccggcagccccacctccacagaggagggaaccagcaccgagcccagcgaaggcagcgccccaggcaccagcaccgagcctagtgagcaggagattaaacggatcaacaagatcagaagaagacttgtgaaagacagcaacaccaagaaggccggcaagacaggccccatgaaaaccctgctggttagagtgatgacacccgatctgagagagcggctggaaaacctgagaaagaagcctgaaaatatcccccagcccatcagcaatacatctagagccaacctgaataagctgctgaccgattacaccgaaatgaagaaggcgatcctgcatgtgtactgggaagagttccagaaggaccctgtgggcctgatgagccgggtggcccagcctgccagcaagaagatcgatcagaacaagctgaaacctgagatggacgagaagggcaacctgaccaccgccggctttgcctgctctcagtgtggccagcccctgttcgtgtacaagctggagcaggtgtctgagaagggcaaggcttacaccaactacttcggacggtgcaatgtggccgagcacgaaaagctgatcctgctggcccagctgaagcccgagaaggatagcgacgaagccgtgacatatagcctgggaaagtttgggcagagggccctggatttctacagcattcatgtgaccaaggagtccacccaccccgtgaagcccctggcccagatcgccggaaacagatacgcctccggacctgtgggaaaggccctgagcgacgcatgtatgggcacaatcgcctccttcctgtctaagtaccaggacatcatcatcgaacaccagaaggtggtgaagggcaaccagaagagactggagagcctgcgggagctggccggcaaggaaaacctggaataccctagcgtgaccctgccacctcagcctcacaccaaggagggcgttgatgcctacaacgaagtgatcgcccgggtgcgaatgtgggtgaacctgaacctgtggcagaagctgaagctaagcagagatgatgccaagcctctgctgagactgaagggattcccttcctttcctctggtcgagagacaggccaacgaagtggactggtgggacatggtgtgtaacgtgaagaagctgatcaacgagaaaaaggaggatggcaaggtgttttggcagaatctggctggctacaagagacaggaagccctgagaccatacctgagcagcgaggaagatcggaagaagggaaagaaattcgctcggtaccagctgggcgacctgctgctgcacctggaaaagaagcacggcgaggactggggaaaggtgtacgacgaggcctgggagcggattgacaagaaagtggaaggcctgagcaagcacatcaagctggaagaggaacggagaagcgaggacgcccagagcaaggccgccctgaccgactggctgcgggctaaggccagcttcgtgatcgagggcctgaaggaggccgacaaggacgagttctgcagatgcgagctgaagctgcagaagtggtacggggacctgcggggaaagcccttcgccatcgaagccgagaacagcatcctggacatcagcggcttcagcaagcagtacaactgtgccttcatctggcagaaggacggcgtgaagaagctgaacctgtacctgatcatcaactacttcaagggcggcaagctgcggttcaagaagatcaaacctgaagccttcgaagccaacagattctacaccgtgatcaacaaaaagagcggcgagatcgtgcccatggaggtgaacttcaacttcgacgaccccaacctgatcatcctgcctctggcctttggcaagagacagggcagagaattcatctggaacgacctgctgtccctggaaaccggcagcctgaagctggccaacggaagagtgatcgagaagacactgtacaacagaagaacccggcaggatgagcctgccctgttcgtggccctgaccttcgagcggcgggaggtcctggactcctccaatatcaaaccaatgaacctgatcggcgtggcaagaggcgaaaacatccccgccgtgatcgccctgaccgaccccgagggctgcccactgagccggtttaaggatagcctgggaaacccaacccacatcctgagaatcggcgagagctataaggagaagcagcggaccatccaggccaagaaggaggtggagcagcggagagccggcggctacagccggaagtacgccagcaaagccaagaatctggcagacgatatggtgagaaacaccgctagagatctgctgtactacgccgtgacccaggatgccatgctgatcttcgccaacctgagccggggcttcggccggcagggcaagcggaccttcatggccgagagacagtacacacggatggaggactggctgaccgccaagctggcctacgagggcctgagcaagacctacctgtccaagacactggcccagtacacctccaagacatgcagcaactgtgggtttaccatcaccagcgccgactacgacagggtgctggagaagctgaagaagacagcaacaggctggatgaccacaattaacggcaaggagctgaaggtggagggccagattacctactacaacagatacaagagacagaacgtagtcaaggacctgtccgtcgagctggatagactgagcgaagaatctgtgaacaacgacatctcctcctggacaaagggcagaagcggagaagctctgagcctcctgaagaaaagattctcccatagacccgtgcaggagaagttcgtgtgcctgaactgcggcttcgagacacacgcagccgagcaagccgccctgaacatcgccagatcctggctgttcctgcggagccaggagtacaagaaataccagacaaacaagacaaccggcaacaccgataagagagccttcgtcgagacctggcagtccttttaccggaagaagcttaaggaggtgtggaaacctgccgtgcggtctggcggatctggcggaggctccaccagccccaagaaaaagagaaaagtctaagctgccttctgcggggcttgccttctggccatgcccttcttctctcccttgcacctgtacctcttggtctttgaataaagcctgagtaggaaggctagcaaaaaaaaaaaaaaaaaaaaaaaaaaaaaaaaaaaaaaaaaaaaaaaaaaaaaaaaaaaaaaaaaaaaaaaaaaaaaaaa

SEQ ID NO: 9253 - RNA, 8787 nt, synthetic construct
  source 1..8787: mol_type = other RNA
aggaaataagagagaaaagaagagtaagaagaaatataagagccaccatggcccctaagaagaagcgtaaagtgagccggatgaaccacgaccaggagttcgacccccctaaggtgtaccctcccgtccccgccgagaagagaaagcccatccgggtcctgagcctgttcgatggcatcgccaccggtctgctggtgctgaaggacctgggcatccaggtggataggtacattgcctccgaggtgtgcgaggactccatcaccgtgggaatggtgcgtcatcagggcaagatcatgtacgtgggcgacgtgcggagcgtgacacagaagcatatccaggagtggggccctttcgacctggtgatcggcggcagcccttgcaatgacctgagcatcgtgaacccagcccggaagggcctgtacgagggaaccggcagactgttcttcgagttttacagactgctgcacgacgcccggcctaaggaaggcgacgaccggcccttcttttggctgttcgagaatgtggtggccatgggagtcagcgacaagcgggatattagccggttcctggagagcaaccccgtgatgatcgatgccaaggaagtgagcgccgcccaccgggccagatacttctggggcaatctgcctggcatgaacagacccctggccagcaccgtgaacgacaagctggagctgcaggagtgcctggagcacggccggatcgccaagttcagcaaggtgagaaccatcaccacccgaagcaacagcatcaaacaaggcaaggaccagcactttcctgtgttcatgaacgagaaggaggacatcctgtggtgtaccgagatggagagagtgttcgggttcccagtccactacacagatgtcagcaacatgtctagactggccagacagagactgctgggaagaagctggtccgtccctgtgatcagacacctgttcgcccctctgaaggagtacttcgcctgcgtgagcagcggcaacagcaacgccaacagccggggccccagcttctctagcggcctggtgccactgtccctgagagggagccacatgggccccatggagatctacaaaaccgtgagcgcctggaagcggcagcctgtgcgcgtgctgagcctgtttcggaatatcgataaagtcctgaaaagcctgggattcctggagagcggctctggctccggcggtggcaccctgaagtacgtggaggatgtgacaaacgtggtcagacgggatgtggagaagtggggccccttcgatctggtgtacggcagcacccaacccctgggcagctcttgtgaccggtgccctggctggtacatgtttcagttccaccggatcctgcagtacgccctgccgagacaggagtcccagcggccattcttttggattttcatggacaacttgctgctgaccgaggatgaccaggaaactaccactcggttcctgcagaccgaagccgtgaccctgcaggacgtgagaggccgggactaccagaacgccatgcgggtgtggtccaacatccctggactgaaaagcaagcacgcacctctgacccctaaagaagaggagtacctgcaggcccaggtgcggagcagaagcaagctggacgcccctaaggtggatctgctggtgaagaattgcctcctgcccctgagagagtacttcaagtatttcagccagaatagtctgcccctgggaggcagcggcggcggcatggccgtggacctgctgagcgcccaggagagggtgaccttcagggacgtggccgtgttcttcagccaggacgagtggctgcacctggacagcgcccagagggccctgtacagggaggtgatgctggagaactacagcatcctggtgagcctgggcatccccttcagcatgcccaagctgatccaccagctgcagcagggcgaggacccctgcatggtggagagggaggtgcccagcgacaccggcggcccaagcagcggcgcccctcctcccagcggcggcaggcggcccaagcagcggcgcccctcctcccagcggcggcagcccagccggctccccaacctctaccgaggagggcacctctgagtccgccacccccgagagcggccctggcacctccaccgagcccagcgagggcagcgcacccggcagccctgccggcagccccacctccacagaggagggaaccagcaccgagcccagcgaaggcagcgccccaggcaccagcaccgagcctagtgagcaggagattaaacggatcaacaagatcagaagaagacttgtgaaagacagcaacaccaagaaggccggcaagacaggccccatgaaaaccctgctggttagagtgatgacacccgatctgagagagcggctggaaaacctgagaaagaagcctgaaaatatcccccagcccatcagcaatacatctagagccaacctgaataagctgctgaccgattacaccgaaatgaagaaggcgatcctgcatgtgtactgggaagagttccagaaggaccctgtgggcctgatgagccgggtggcccagcctgccagcaagaagatcgatcagaacaagctgaaacctgagatggacgagaagggcaacctgaccaccgccggctttgcctgctctcagtgtggccagcccctgttcgtgtacaagctggagcaggtgtctgagaagggcaaggcttacaccaactacttcggacggtgcaatgtggccgagcacgaaaagctgatcctgctggcccagctgaagcccgagaaggatagcgacgaagccgtgacatatagcctgggaaagtttgggcagagggccctggatttctacagcattcatgtgaccaaggagtccacccaccccgtgaagcccctggcccagatcgccggaaacagatacgcctccggacctgtgggaaaggccctgagcgacgcatgtatgggcacaatcgcctccttcctgtctaagtaccaggacatcatcatcgaacaccagaaggtggtgaagggcaaccagaagagactggagagcctgcgggagctggccggcaaggaaaacctggaataccctagcgtgaccctgccacctcagcctcacaccaaggagggcgttgatgcctacaacgaagtgatcgcccgggtgcgaatgtgggtgaacctgaacctgtggcagaagctgaagctaagcagagatgatgccaagcctctgctgagactgaagggattcccttcctttcctctggtcgagagacaggccaacgaagtggactggtgggacatggtgtgtaacgtgaagaagctgatcaacgagaaaaaggaggatggcaaggtgttttggcagaatctggctggctacaagagacaggaagccctgagaccatacctgagcagcgaggaagatcggaagaagggaaagaaattcgctcggtaccagctgggcgacctgctgctgcacctggaaaagaagcacggcgaggactggggaaaggtgtacgacgaggcctgggagcggattgacaagaaagtggaaggcctgagcaagcacatcaagctggaagaggaacggagaagcgaggacgcccagagcaaggccgccctgaccgactggctgcgggctaaggccagcttcgtgatcgagggcctgaaggaggccgacaaggacgagttctgcagatgcgagctgaagctgcagaagtggtacggggacctgcggggaaagcccttcgccatcgaagccgagaacagcatcctggacatcagcggcttcagcaagcagtacaactgtgccttcatctggcagaaggacggcgtgaagaagctgaacctgtacctgatcatcaactacttcaagggcggcaagctgcggttcaagaagatcaaacctgaagccttcgaagccaacagattctacaccgtgatcaacaaaaagagcggcgagatcgtgcccatggaggtgaacttcaacttcgacgaccccaacctgatcatcctgcctctggcctttggcaagagacagggcagagaattcatctggaacgacctgctgtccctggaaaccggcagcctgaagctggccaacggaagagtgatcgagaagacactgtacaacagaagaacccggcaggatgagcctgccctgttcgtggccctgaccttcgagcggcgggaggtcctggactcctccaatatcaaaccaatgaacctgatcggcgtggcaagaggcgaaaacatccccgccgtgatcgccctgaccgaccccgagggctgcccactgagccggtttaaggatagcctgggaaacccaacccacatcctgagaatcggcgagagctataaggagaagcagcggaccatccaggccaagaaggaggtggagcagcggagagccggcggctacagccggaagtacgccagcaaagccaagaatctggcagacgatatggtgagaaacaccgctagagatctgctgtactacgccgtgacccaggatgccatgctgatcttcgccaacctgagccggggcttcggccggcagggcaagcggaccttcatggccgagagacagtacacacggatggaggactggctgaccgccaagctggcctacgagggcctgagcaagacctacctgtccaagacactggcccagtacacctccaagacatgcagcaactgtgggtttaccatcaccagcgccgactacgacagggtgctggagaagctgaagaagacagcaacaggctggatgaccacaattaacggcaaggagctgaaggtggagggccagattacctactacaacagatacaagagacagaacgtagtcaaggacctgtccgtcgagctggatagactgagcgaagaatctgtgaacaacgacatctcctcctggacaaagggcagaagcggagaagctctgagcctcctgaagaaaagattctcccatagacccgtgcaggagaagttcgtgtgcctgaactgcggcttcgagacacacgcagccgagcaagccgccctgaacatcgccagatcctggctgttcctgcggagccaggagtacaagaaataccagacaaacaagacaaccggcaacaccgataagagagccttcgtcgagacctggcagtccttttaccggaagaagcttaaggaggtgtggaaacctgccgtgcggtctggcggatctggcggaggctccaccagccccaagaaaaagagaaaagtctaagctgccttctgcggggcttgccttctggccatgcccttcttctctcccttgcacctgtacctcttggtctttgaataaagcctgagtaggaaggctagcaaaaaaaaaaaaaaaaaaaaaaaaaaaaaaaaaaaaaaaaaaaaaaaaaaaaaaaaaaaaaaaaaaaaaaaaaaaaaaaagcccagccggctccccaacctctaccgaggagggcacctctgagtccgccacccccgagagcggccctggcacctccaccgagcccagcgagggcagcgcacccggcagccctgccggcagccccacctccacagaggagggaaccagcaccgagcccagcgaaggcagcgccccaggcaccagcaccgagcctagtgagcaggagattaaacggatcaacaagatcagaagaagacttgtgaaagacagcaacaccaagaaggccggcaagacaggccccatgaaaaccctgctggttagagtgatgacacccgatctgagagagcggctggaaaacctgagaaagaagcctgaaaatatcccccagcccatcagcaatacatctagagccaacctgaataagctgctgaccgattacaccgaaatgaagaaggcgatcctgcatgtgtactgggaagagttccagaaggaccctgtgggcctgatgagccgggtggcccagcctgccagcaagaagatcgatcagaacaagctgaaacctgagatggacgagaagggcaacctgaccaccgccggctttgcctgctctcagtgtggccagcccctgttcgtgtacaagctggagcaggtgtctgagaagggcaaggcttacaccaactacttcggacggtgcaatgtggccgagcacgaaaagctgatcctgctggcccagctgaagcccgagaaggatagcgacgaagccgtgacatatagcctgggaaagtttgggcagagggccctggatttctacagcattcatgtgaccaaggagtccacccaccccgtgaagcccctggcccagatcgccggaaacagatacgcctccggacctgtgggaaaggccctgagcgacgcatgtatgggcacaatcgcctccttcctgtctaagtaccaggacatcatcatcgaacaccagaaggtggtgaagggcaaccagaagagactggagagcctgcgggagctggccggcaaggaaaacctggaataccctagcgtgaccctgccacctcagcctcacaccaaggagggcgttgatgcctacaacgaagtgatcgcccgggtgcgaatgtgggtgaacctgaacctgtggcagaagctgaagctaagcagagatgatgccaagcctctgctgagactgaagggattcccttcctttcctctggtcgagagacaggccaacgaagtggactggtgggacatggtgtgtaacgtgaagaagctgatcaacgagaaaaaggaggatggcaaggtgttttggcagaatctggctggctacaagagacaggaagccctgagaccatacctgagcagcgaggaagatcggaagaagggaaagaaattcgctcggtaccagctgggcgacctgctgctgcacctggaaaagaagcacggcgaggactggggaaaggtgtacgacgaggcctgggagcggattgacaagaaagtggaaggcctgagcaagcacatcaagctggaagaggaacggagaagcgaggacgcccagagcaaggccgccctgaccgactggctgcgggctaaggccagcttcgtgatcgagggcctgaaggaggccgacaaggacgagttctgcagatgcgagctgaagctgcagaagtggtacggggacctgcggggaaagcccttcgccatcgaagccgagaacagcatcctggacatcagcggcttcagcaagcagtacaactgtgccttcatctggcagaaggacggcgtgaagaagctgaacctgtacctgatcatcaactacttcaagggcggcaagctgcggttcaagaagatcaaacctgaagccttcgaagccaacagattctacaccgtgatcaacaaaaagagcggcgagatcgtgcccatggaggtgaacttcaacttcgacgaccccaacctgatcatcctgcctctggcctttggcaagagacagggcagagaattcatctggaacgacctgctgtccctggaaaccggcagcctgaagctggccaacggaagagtgatcgagaagacactgtacaacagaagaacccggcaggatgagcctgccctgttcgtggccctgaccttcgagcggcgggaggtcctggactcctccaatatcaaaccaatgaacctgatcggcgtggcaagaggcgaaaacatccccgccgtgatcgccctgaccgaccccgagggctgcccactgagccggtttaaggatagcctgggaaacccaacccacatcctgagaatcggcgagagctataaggagaagcagcggaccatccaggccaagaaggaggtggagcagcggagagccggcggctacagccggaagtacgccagcaaagccaagaatctggcagacgatatggtgagaaacaccgctagagatctgctgtactacgccgtgacccaggatgccatgctgatcttcgccaacctgagccggggcttcggccggcagggcaagcggaccttcatggccgagagacagtacacacggatggaggactggctgaccgccaagctggcctacgagggcctgagcaagacctacctgtccaagacactggcccagtacacctccaagacatgcagcaactgtgggtttaccatcaccagcgccgactacgacagggtgctggagaagctgaagaagacagcaacaggctggatgaccacaattaacggcaaggagctgaaggtggagggccagattacctactacaacagatacaagagacagaacgtagtcaaggacctgtccgtcgagctggatagactgagcgaagaatctgtgaacaacgacatctcctcctggacaaagggcagaagcggagaagctctgagcctcctgaagaaaagattctcccatagacccgtgcaggagaagttcgtgtgcctgaactgcggcttcgagacacacgcagccgagcaagccgccctgaacatcgccagatcctggctgttcctgcggagccaggagtacaagaaataccagacaaacaagacaaccggcaacaccgataagagagccttcgtcgagacctggcagtccttttaccggaagaagcttaaggaggtgtggaaacctgccgtgcggtctggcggatctggcggaggctccaccagccccaagaaaaagagaaaagtctaagctgccttctgcggggcttgccttctggccatgcccttcttctctcccttgcacctgtacctcttggtctttgaataaagcctgagtaggaaggctagcaaaaaaaaaaaaaaaaaaaaaaaaaaaaaaaaaaaaaaaaaaaaaaaaaaaaaaaaaaaaaaaaaaaaaaaaaaaaaaaa

SEQ ID NO: 9254 - RNA, 8787 nt, synthetic construct
  source 1..8787: mol_type = other RNA
aggaaataagagagaaaagaagagtaagaagaaatataagagccaccatggcccctaagaagaagcgtaaagtgagccggatgaaccacgaccaggagttcgacccccctaaggtgtaccctcccgtccccgccgagaagagaaagcccatccgggtcctgagcctgttcgatggcatcgccaccggtctgctggtgctgaaggacctgggcatccaggtggataggtacattgcctccgaggtgtgcgaggactccatcaccgtgggaatggtgcgtcatcagggcaagatcatgtacgtgggcgacgtgcggagcgtgacacagaagcatatccaggagtggggccctttcgacctggtgatcggcggcagcccttgcaatgacctgagcatcgtgaacccagcccggaagggcctgtacgagggaaccggcagactgttcttcgagttttacagactgctgcacgacgcccggcctaaggaaggcgacgaccggcccttcttttggctgttcgagaatgtggtggccatgggagtcagcgacaagcgggatattagccggttcctggagagcaaccccgtgatgatcgatgccaaggaagtgagcgccgcccaccgggccagatacttctggggcaatctgcctggcatgaacagacccctggccagcaccgtgaacgacaagctggagctgcaggagtgcctggagcacggccggatcgccaagttcagcaaggtgagaaccatcaccacccgaagcaacagcatcaaacaaggcaaggaccagcactttcctgtgttcatgaacgagaaggaggacatcctgtggtgtaccgagatggagagagtgttcgggttcccagtccactacacagatgtcagcaacatgtctagactggccagacagagactgctgggaagaagctggtccgtccctgtgatcagacacctgttcgcccctctgaaggagtacttcgcctgcgtgagcagcggcaacagcaacgccaacagccggggccccagcttctctagcggcctggtgccactgtccctgagagggagccacatgggccccatggagatctacaaaaccgtgagcgcctggaagcggcagcctgtgcgcgtgctgagcctgtttcggaatatcgataaagtcctgaaaagcctgggattcctggagagcggctctggctccggcggtggcaccctgaagtacgtggaggatgtgacaaacgtggtcagacgggatgtggagaagtggggccccttcgatctggtgtacggcagcacccaacccctgggcagctcttgtgaccggtgccctggctggtacatgtttcagttccaccggatcctgcagtacgccctgccgagacaggagtcccagcggccattcttttggattttcatggacaacttgctgctgaccgaggatgaccaggaaactaccactcggttcctgcagaccgaagccgtgaccctgcaggacgtgagaggccgggactaccagaacgccatgcgggtgtggtccaacatccctggactgaaaagcaagcacgcacctctgacccctaaagaagaggagtacctgcaggcccaggtgcggagcagaagcaagctggacgcccctaaggtggatctgctggtgaagaattgcctcctgcccctgagagagtacttcaagtatttcagccagaatagtctgcccctgggaggcagcggcggcggcccccaggagctggtgaccttcgaggacgtggccgtgtacctgaccaaggaggagtgggagcacctgggccccgcccagaggaggctgtacagggacgtgatgctggagaactacgagaacgtggtgagcctgggcttccccgtgagcaagcccgacctgatcagccagctggagcagggcgaggtgccctgcctgcccgacctgcccaggaccgaggtgcccgagatccacggcggccccctgggcggcccaagcagcggcgcccctcctcccagcggcggcaggcggcccaagcagcggcgcccctcctcccagcggcggcagcccagccggctccccaacctctaccgaggagggcacctctgagtccgccacccccgagagcggccctggcacctccaccgagcccagcgagggcagcgcacccggcagccctgccggcagccccacctccacagaggagggaaccagcaccgagcccagcgaaggcagcgccccaggcaccagcaccgagcctagtgagcaggagattaaacggatcaacaagatcagaagaagacttgtgaaagacagcaacaccaagaaggccggcaagacaggccccatgaaaaccctgctggttagagtgatgacacccgatctgagagagcggctggaaaacctgagaaagaagcctgaaaatatcccccagcccatcagcaatacatctagagccaacctgaataagctgctgaccgattacaccgaaatgaagaaggcgatcctgcatgtgtactgggaagagttccagaaggaccctgtgggcctgatgagccgggtggcccagcctgccagcaagaagatcgatcagaacaagctgaaacctgagatggacgagaagggcaacctgaccaccgccggctttgcctgctctcagtgtggccagcccctgttcgtgtacaagctggagcaggtgtctgagaagggcaaggcttacaccaactacttcggacggtgcaatgtggccgagcacgaaaagctgatcctgctggcccagctgaagcccgagaaggatagcgacgaagccgtgacatatagcctgggaaagtttgggcagagggccctggatttctacagcattcatgtgaccaaggagtccacccaccccgtgaagcccctggcccagatcgccggaaacagatacgcctccggacctgtgggaaaggccctgagcgacgcatgtatgggcacaatcgcctccttcctgtctaagtaccaggacatcatcatcgaacaccagaaggtggtgaagggcaaccagaagagactggagagcctgcgggagctggccggcaaggaaaacctggaataccctagcgtgaccctgccacctcagcctcacaccaaggagggcgttgatgcctacaacgaagtgatcgcccgggtgcgaatgtgggtgaacctgaacctgtggcagaagctgaagctaagcagagatgatgccaagcctctgctgagactgaagggattcccttcctttcctctggtcgagagacaggccaacgaagtggactggtgggacatggtgtgtaacgtgaagaagctgatcaacgagaaaaaggaggatggcaaggtgttttggcagaatctggctggctacaagagacaggaagccctgagaccatacctgagcagcgaggaagatcggaagaagggaaagaaattcgctcggtaccagctgggcgacctgctgctgcacctggaaaagaagcacggcgaggactggggaaaggtgtacgacgaggcctgggagcggattgacaagaaagtggaaggcctgagcaagcacatcaagctggaagaggaacggagaagcgaggacgcccagagcaaggccgccctgaccgactggctgcgggctaaggccagcttcgtgatcgagggcctgaaggaggccgacaaggacgagttctgcagatgcgagctgaagctgcagaagtggtacggggacctgcggggaaagcccttcgccatcgaagccgagaacagcatcctggacatcagcggcttcagcaagcagtacaactgtgccttcatctggcagaaggacggcgtgaagaagctgaacctgtacctgatcatcaactacttcaagggcggcaagctgcggttcaagaagatcaaacctgaagccttcgaagccaacagattctacaccgtgatcaacaaaaagagcggcgagatcgtgcccatggaggtgaacttcaacttcgacgaccccaacctgatcatcctgcctctggcctttggcaagagacagggcagagaattcatctggaacgacctgctgtccctggaaaccggcagcctgaagctggccaacggaagagtgatcgagaagacactgtacaacagaagaacccggcaggatgagcctgccctgttcgtggccctgaccttcgagcggcgggaggtcctggactcctccaatatcaaaccaatgaacctgatcggcgtggcaagaggcgaaaacatccccgccgtgatcgccctgaccgaccccgagggctgcccactgagccggtttaaggatagcctgggaaacccaacccacatcctgagaatcggcgagagctataaggagaagcagcggaccatccaggccaagaaggaggtggagcagcggagagccggcggctacagccggaagtacgccagcaaagccaagaatctggcagacgatatggtgagaaacaccgctagagatctgctgtactacgccgtgacccaggatgccatgctgatcttcgccaacctgagccggggcttcggccggcagggcaagcggaccttcatggccgagagacagtacacacggatggaggactggctgaccgccaagctggcctacgagggcctgagcaagacctacctgtccaagacactggcccagtacacctccaagacatgcagcaactgtgggtttaccatcaccagcgccgactacgacagggtgctggagaagctgaagaagacagcaacaggctggatgaccacaattaacggcaaggagctgaaggtggagggccagattacctactacaacagatacaagagacagaacgtagtcaaggacctgtccgtcgagctggatagactgagcgaagaatctgtgaacaacgacatctcctcctggacaaagggcagaagcggagaagctctgagcctcctgaagaaaagattctcccatagacccgtgcaggagaagttcgtgtgcctgaactgcggcttcgagacacacgcagccgagcaagccgccctgaacatcgccagatcctggctgttcctgcggagccaggagtacaagaaataccagacaaacaagacaaccggcaacaccgataagagagccttcgtcgagacctggcagtccttttaccggaagaagcttaaggaggtgtggaaacctgccgtgcggtctggcggatctggcggaggctccaccagccccaagaaaaagagaaaagtctaagctgccttctgcggggcttgccttctggccatgcccttcttctctcccttgcacctgtacctcttggtctttgaataaagcctgagtaggaaggctagcaaaaaaaaaaaaaaaaaaaaaaaaaaaaaaaaaaaaaaaaaaaaaaaaaaaaaaaaaaaaaaaaaaaaaaaaaaaaaaaagcccagccggctccccaacctctaccgaggagggcacctctgagtccgccacccccgagagcggccctggcacctccaccgagcccagcgagggcagcgcacccggcagccctgccggcagccccacctccacagaggagggaaccagcaccgagcccagcgaaggcagcgccccaggcaccagcaccgagcctagtgagcaggagattaaacggatcaacaagatcagaagaagacttgtgaaagacagcaacaccaagaaggccggcaagacaggccccatgaaaaccctgctggttagagtgatgacacccgatctgagagagcggctggaaaacctgagaaagaagcctgaaaatatcccccagcccatcagcaatacatctagagccaacctgaataagctgctgaccgattacaccgaaatgaagaaggcgatcctgcatgtgtactgggaagagttccagaaggaccctgtgggcctgatgagccgggtggcccagcctgccagcaagaagatcgatcagaacaagctgaaacctgagatggacgagaagggcaacctgaccaccgccggctttgcctgctctcagtgtggccagcccctgttcgtgtacaagctggagcaggtgtctgagaagggcaaggcttacaccaactacttcggacggtgcaatgtggccgagcacgaaaagctgatcctgctggcccagctgaagcccgagaaggatagcgacgaagccgtgacatatagcctgggaaagtttgggcagagggccctggatttctacagcattcatgtgaccaaggagtccacccaccccgtgaagcccctggcccagatcgccggaaacagatacgcctccggacctgtgggaaaggccctgagcgacgcatgtatgggcacaatcgcctccttcctgtctaagtaccaggacatcatcatcgaacaccagaaggtggtgaagggcaaccagaagagactggagagcctgcgggagctggccggcaaggaaaacctggaataccctagcgtgaccctgccacctcagcctcacaccaaggagggcgttgatgcctacaacgaagtgatcgcccgggtgcgaatgtgggtgaacctgaacctgtggcagaagctgaagctaagcagagatgatgccaagcctctgctgagactgaagggattcccttcctttcctctggtcgagagacaggccaacgaagtggactggtgggacatggtgtgtaacgtgaagaagctgatcaacgagaaaaaggaggatggcaaggtgttttggcagaatctggctggctacaagagacaggaagccctgagaccatacctgagcagcgaggaagatcggaagaagggaaagaaattcgctcggtaccagctgggcgacctgctgctgcacctggaaaagaagcacggcgaggactggggaaaggtgtacgacgaggcctgggagcggattgacaagaaagtggaaggcctgagcaagcacatcaagctggaagaggaacggagaagcgaggacgcccagagcaaggccgccctgaccgactggctgcgggctaaggccagcttcgtgatcgagggcctgaaggaggccgacaaggacgagttctgcagatgcgagctgaagctgcagaagtggtacggggacctgcggggaaagcccttcgccatcgaagccgagaacagcatcctggacatcagcggcttcagcaagcagtacaactgtgccttcatctggcagaaggacggcgtgaagaagctgaacctgtacctgatcatcaactacttcaagggcggcaagctgcggttcaagaagatcaaacctgaagccttcgaagccaacagattctacaccgtgatcaacaaaaagagcggcgagatcgtgcccatggaggtgaacttcaacttcgacgaccccaacctgatcatcctgcctctggcctttggcaagagacagggcagagaattcatctggaacgacctgctgtccctggaaaccggcagcctgaagctggccaacggaagagtgatcgagaagacactgtacaacagaagaacccggcaggatgagcctgccctgttcgtggccctgaccttcgagcggcgggaggtcctggactcctccaatatcaaaccaatgaacctgatcggcgtggcaagaggcgaaaacatccccgccgtgatcgccctgaccgaccccgagggctgcccactgagccggtttaaggatagcctgggaaacccaacccacatcctgagaatcggcgagagctataaggagaagcagcggaccatccaggccaagaaggaggtggagcagcggagagccggcggctacagccggaagtacgccagcaaagccaagaatctggcagacgatatggtgagaaacaccgctagagatctgctgtactacgccgtgacccaggatgccatgctgatcttcgccaacctgagccggggcttcggccggcagggcaagcggaccttcatggccgagagacagtacacacggatggaggactggctgaccgccaagctggcctacgagggcctgagcaagacctacctgtccaagacactggcccagtacacctccaagacatgcagcaactgtgggtttaccatcaccagcgccgactacgacagggtgctggagaagctgaagaagacagcaacaggctggatgaccacaattaacggcaaggagctgaaggtggagggccagattacctactacaacagatacaagagacagaacgtagtcaaggacctgtccgtcgagctggatagactgagcgaagaatctgtgaacaacgacatctcctcctggacaaagggcagaagcggagaagctctgagcctcctgaagaaaagattctcccatagacccgtgcaggagaagttcgtgtgcctgaactgcggcttcgagacacacgcagccgagcaagccgccctgaacatcgccagatcctggctgttcctgcggagccaggagtacaagaaataccagacaaacaagacaaccggcaacaccgataagagagccttcgtcgagacctggcagtccttttaccggaagaagcttaaggaggtgtggaaacctgccgtgcggtctggcggatctggcggaggctccaccagccccaagaaaaagagaaaagtctaagctgccttctgcggggcttgccttctggccatgcccttcttctctcccttgcacctgtacctcttggtctttgaataaagcctgagtaggaaggctagcaaaaaaaaaaaaaaaaaaaaaaaaaaaaaaaaaaaaaaaaaaaaaaaaaaaaaaaaaaaaaaaaaaaaaaaaaaaaaaaa

SEQ ID NO: 9255 - RNA, 8787 nt, synthetic construct
  source 1..8787: mol_type = other RNA
aggaaataagagagaaaagaagagtaagaagaaatataagagccaccatggcccctaagaagaagcgtaaagtgagccggatgaaccacgaccaggagttcgacccccctaaggtgtaccctcccgtccccgccgagaagagaaagcccatccgggtcctgagcctgttcgatggcatcgccaccggtctgctggtgctgaaggacctgggcatccaggtggataggtacattgcctccgaggtgtgcgaggactccatcaccgtgggaatggtgcgtcatcagggcaagatcatgtacgtgggcgacgtgcggagcgtgacacagaagcatatccaggagtggggccctttcgacctggtgatcggcggcagcccttgcaatgacctgagcatcgtgaacccagcccggaagggcctgtacgagggaaccggcagactgttcttcgagttttacagactgctgcacgacgcccggcctaaggaaggcgacgaccggcccttcttttggctgttcgagaatgtggtggccatgggagtcagcgacaagcgggatattagccggttcctggagagcaaccccgtgatgatcgatgccaaggaagtgagcgccgcccaccgggccagatacttctggggcaatctgcctggcatgaacagacccctggccagcaccgtgaacgacaagctggagctgcaggagtgcctggagcacggccggatcgccaagttcagcaaggtgagaaccatcaccacccgaagcaacagcatcaaacaaggcaaggaccagcactttcctgtgttcatgaacgagaaggaggacatcctgtggtgtaccgagatggagagagtgttcgggttcccagtccactacacagatgtcagcaacatgtctagactggccagacagagactgctgggaagaagctggtccgtccctgtgatcagacacctgttcgcccctctgaaggagtacttcgcctgcgtgagcagcggcaacagcaacgccaacagccggggccccagcttctctagcggcctggtgccactgtccctgagagggagccacatgggccccatggagatctacaaaaccgtgagcgcctggaagcggcagcctgtgcgcgtgctgagcctgtttcggaatatcgataaagtcctgaaaagcctgggattcctggagagcggctctggctccggcggtggcaccctgaagtacgtggaggatgtgacaaacgtggtcagacgggatgtggagaagtggggccccttcgatctggtgtacggcagcacccaacccctgggcagctcttgtgaccggtgccctggctggtacatgtttcagttccaccggatcctgcagtacgccctgccgagacaggagtcccagcggccattcttttggattttcatggacaacttgctgctgaccgaggatgaccaggaaactaccactcggttcctgcagaccgaagccgtgaccctgcaggacgtgagaggccgggactaccagaacgccatgcgggtgtggtccaacatccctggactgaaaagcaagcacgcacctctgacccctaaagaagaggagtacctgcaggcccaggtgcggagcagaagcaagctggacgcccctaaggtggatctgctggtgaagaattgcctcctgcccctgagagagtacttcaagtatttcagccagaatagtctgcccctgggaggcagcggcggcggcttccaggaggccgtgaccttcaaggacgtggccgtggtgttcagcgaggaggagctgggcctgctggacagcacccagaggaagctgtacagggacgtgatgctggagaacttcaggaacctggtgagcgtgggccacagcagcagcaagcccgacatgatcagccagctggagagggaggaggagaagctgtacgtgaaggagatctgcaccgagaggggcaggcacagcgacaagaactgcggcggcccaagcagcggcgcccctcctcccagcggcggcaggcggcccaagcagcggcgcccctcctcccagcggcggcagcccagccggctccccaacctctaccgaggagggcacctctgagtccgccacccccgagagcggccctggcacctccaccgagcccagcgagggcagcgcacccggcagccctgccggcagccccacctccacagaggagggaaccagcaccgagcccagcgaaggcagcgccccaggcaccagcaccgagcctagtgagcaggagattaaacggatcaacaagatcagaagaagacttgtgaaagacagcaacaccaagaaggccggcaagacaggccccatgaaaaccctgctggttagagtgatgacacccgatctgagagagcggctggaaaacctgagaaagaagcctgaaaatatcccccagcccatcagcaatacatctagagccaacctgaataagctgctgaccgattacaccgaaatgaagaaggcgatcctgcatgtgtactgggaagagttccagaaggaccctgtgggcctgatgagccgggtggcccagcctgccagcaagaagatcgatcagaacaagctgaaacctgagatggacgagaagggcaacctgaccaccgccggctttgcctgctctcagtgtggccagcccctgttcgtgtacaagctggagcaggtgtctgagaagggcaaggcttacaccaactacttcggacggtgcaatgtggccgagcacgaaaagctgatcctgctggcccagctgaagcccgagaaggatagcgacgaagccgtgacatatagcctgggaaagtttgggcagagggccctggatttctacagcattcatgtgaccaaggagtccacccaccccgtgaagcccctggcccagatcgccggaaacagatacgcctccggacctgtgggaaaggccctgagcgacgcatgtatgggcacaatcgcctccttcctgtctaagtaccaggacatcatcatcgaacaccagaaggtggtgaagggcaaccagaagagactggagagcctgcgggagctggccggcaaggaaaacctggaataccctagcgtgaccctgccacctcagcctcacaccaaggagggcgttgatgcctacaacgaagtgatcgcccgggtgcgaatgtgggtgaacctgaacctgtggcagaagctgaagctaagcagagatgatgccaagcctctgctgagactgaagggattcccttcctttcctctggtcgagagacaggccaacgaagtggactggtgggacatggtgtgtaacgtgaagaagctgatcaacgagaaaaaggaggatggcaaggtgttttggcagaatctggctggctacaagagacaggaagccctgagaccatacctgagcagcgaggaagatcggaagaagggaaagaaattcgctcggtaccagctgggcgacctgctgctgcacctggaaaagaagcacggcgaggactggggaaaggtgtacgacgaggcctgggagcggattgacaagaaagtggaaggcctgagcaagcacatcaagctggaagaggaacggagaagcgaggacgcccagagcaaggccgccctgaccgactggctgcgggctaaggccagcttcgtgatcgagggcctgaaggaggccgacaaggacgagttctgcagatgcgagctgaagctgcagaagtggtacggggacctgcggggaaagcccttcgccatcgaagccgagaacagcatcctggacatcagcggcttcagcaagcagtacaactgtgccttcatctggcagaaggacggcgtgaagaagctgaacctgtacctgatcatcaactacttcaagggcggcaagctgcggttcaagaagatcaaacctgaagccttcgaagccaacagattctacaccgtgatcaacaaaaagagcggcgagatcgtgcccatggaggtgaacttcaacttcgacgaccccaacctgatcatcctgcctctggcctttggcaagagacagggcagagaattcatctggaacgacctgctgtccctggaaaccggcagcctgaagctggccaacggaagagtgatcgagaagacactgtacaacagaagaacccggcaggatgagcctgccctgttcgtggccctgaccttcgagcggcgggaggtcctggactcctccaatatcaaaccaatgaacctgatcggcgtggcaagaggcgaaaacatccccgccgtgatcgccctgaccgaccccgagggctgcccactgagccggtttaaggatagcctgggaaacccaacccacatcctgagaatcggcgagagctataaggagaagcagcggaccatccaggccaagaaggaggtggagcagcggagagccggcggctacagccggaagtacgccagcaaagccaagaatctggcagacgatatggtgagaaacaccgctagagatctgctgtactacgccgtgacccaggatgccatgctgatcttcgccaacctgagccggggcttcggccggcagggcaagcggaccttcatggccgagagacagtacacacggatggaggactggctgaccgccaagctggcctacgagggcctgagcaagacctacctgtccaagacactggcccagtacacctccaagacatgcagcaactgtgggtttaccatcaccagcgccgactacgacagggtgctggagaagctgaagaagacagcaacaggctggatgaccacaattaacggcaaggagctgaaggtggagggccagattacctactacaacagatacaagagacagaacgtagtcaaggacctgtccgtcgagctggatagactgagcgaagaatctgtgaacaacgacatctcctcctggacaaagggcagaagcggagaagctctgagcctcctgaagaaaagattctcccatagacccgtgcaggagaagttcgtgtgcctgaactgcggcttcgagacacacgcagccgagcaagccgccctgaacatcgccagatcctggctgttcctgcggagccaggagtacaagaaataccagacaaacaagacaaccggcaacaccgataagagagccttcgtcgagacctggcagtccttttaccggaagaagcttaaggaggtgtggaaacctgccgtgcggtctggcggatctggcggaggctccaccagccccaagaaaaagagaaaagtctaagctgccttctgcggggcttgccttctggccatgcccttcttctctcccttgcacctgtacctcttggtctttgaataaagcctgagtaggaaggctagcaaaaaaaaaaaaaaaaaaaaaaaaaaaaaaaaaaaaaaaaaaaaaaaaaaaaaaaaaaaaaaaaaaaaaaaaaaaaaaaagcccagccggctccccaacctctaccgaggagggcacctctgagtccgccacccccgagagcggccctggcacctccaccgagcccagcgagggcagcgcacccggcagccctgccggcagccccacctccacagaggagggaaccagcaccgagcccagcgaaggcagcgccccaggcaccagcaccgagcctagtgagcaggagattaaacggatcaacaagatcagaagaagacttgtgaaagacagcaacaccaagaaggccggcaagacaggccccatgaaaaccctgctggttagagtgatgacacccgatctgagagagcggctggaaaacctgagaaagaagcctgaaaatatcccccagcccatcagcaatacatctagagccaacctgaataagctgctgaccgattacaccgaaatgaagaaggcgatcctgcatgtgtactgggaagagttccagaaggaccctgtgggcctgatgagccgggtggcccagcctgccagcaagaagatcgatcagaacaagctgaaacctgagatggacgagaagggcaacctgaccaccgccggctttgcctgctctcagtgtggccagcccctgttcgtgtacaagctggagcaggtgtctgagaagggcaaggcttacaccaactacttcggacggtgcaatgtggccgagcacgaaaagctgatcctgctggcccagctgaagcccgagaaggatagcgacgaagccgtgacatatagcctgggaaagtttgggcagagggccctggatttctacagcattcatgtgaccaaggagtccacccaccccgtgaagcccctggcccagatcgccggaaacagatacgcctccggacctgtgggaaaggccctgagcgacgcatgtatgggcacaatcgcctccttcctgtctaagtaccaggacatcatcatcgaacaccagaaggtggtgaagggcaaccagaagagactggagagcctgcgggagctggccggcaaggaaaacctggaataccctagcgtgaccctgccacctcagcctcacaccaaggagggcgttgatgcctacaacgaagtgatcgcccgggtgcgaatgtgggtgaacctgaacctgtggcagaagctgaagctaagcagagatgatgccaagcctctgctgagactgaagggattcccttcctttcctctggtcgagagacaggccaacgaagtggactggtgggacatggtgtgtaacgtgaagaagctgatcaacgagaaaaaggaggatggcaaggtgttttggcagaatctggctggctacaagagacaggaagccctgagaccatacctgagcagcgaggaagatcggaagaagggaaagaaattcgctcggtaccagctgggcgacctgctgctgcacctggaaaagaagcacggcgaggactggggaaaggtgtacgacgaggcctgggagcggattgacaagaaagtggaaggcctgagcaagcacatcaagctggaagaggaacggagaagcgaggacgcccagagcaaggccgccctgaccgactggctgcgggctaaggccagcttcgtgatcgagggcctgaaggaggccgacaaggacgagttctgcagatgcgagctgaagctgcagaagtggtacggggacctgcggggaaagcccttcgccatcgaagccgagaacagcatcctggacatcagcggcttcagcaagcagtacaactgtgccttcatctggcagaaggacggcgtgaagaagctgaacctgtacctgatcatcaactacttcaagggcggcaagctgcggttcaagaagatcaaacctgaagccttcgaagccaacagattctacaccgtgatcaacaaaaagagcggcgagatcgtgcccatggaggtgaacttcaacttcgacgaccccaacctgatcatcctgcctctggcctttggcaagagacagggcagagaattcatctggaacgacctgctgtccctggaaaccggcagcctgaagctggccaacggaagagtgatcgagaagacactgtacaacagaagaacccggcaggatgagcctgccctgttcgtggccctgaccttcgagcggcgggaggtcctggactcctccaatatcaaaccaatgaacctgatcggcgtggcaagaggcgaaaacatccccgccgtgatcgccctgaccgaccccgagggctgcccactgagccggtttaaggatagcctgggaaacccaacccacatcctgagaatcggcgagagctataaggagaagcagcggaccatccaggccaagaaggaggtggagcagcggagagccggcggctacagccggaagtacgccagcaaagccaagaatctggcagacgatatggtgagaaacaccgctagagatctgctgtactacgccgtgacccaggatgccatgctgatcttcgccaacctgagccggggcttcggccggcagggcaagcggaccttcatggccgagagacagtacacacggatggaggactggctgaccgccaagctggcctacgagggcctgagcaagacctacctgtccaagacactggcccagtacacctccaagacatgcagcaactgtgggtttaccatcaccagcgccgactacgacagggtgctggagaagctgaagaagacagcaacaggctggatgaccacaattaacggcaaggagctgaaggtggagggccagattacctactacaacagatacaagagacagaacgtagtcaaggacctgtccgtcgagctggatagactgagcgaagaatctgtgaacaacgacatctcctcctggacaaagggcagaagcggagaagctctgagcctcctgaagaaaagattctcccatagacccgtgcaggagaagttcgtgtgcctgaactgcggcttcgagacacacgcagccgagcaagccgccctgaacatcgccagatcctggctgttcctgcggagccaggagtacaagaaataccagacaaacaagacaaccggcaacaccgataagagagccttcgtcgagacctggcagtccttttaccggaagaagcttaaggaggtgtggaaacctgccgtgcggtctggcggatctggcggaggctccaccagccccaagaaaaagagaaaagtctaagctgccttctgcggggcttgccttctggccatgcccttcttctctcccttgcacctgtacctcttggtctttgaataaagcctgagtaggaaggctagcaaaaaaaaaaaaaaaaaaaaaaaaaaaaaaaaaaaaaaaaaaaaaaaaaaaaaaaaaaaaaaaaaaaaaaaaaaaaaaaa

SEQ ID NO: 9256 - RNA, 8787 nt, synthetic construct
  source 1..8787: mol_type = other RNA
aggaaataagagagaaaagaagagtaagaagaaatataagagccaccatggcccctaagaagaagcgtaaagtgagccggatgaaccacgaccaggagttcgacccccctaaggtgtaccctcccgtccccgccgagaagagaaagcccatccgggtcctgagcctgttcgatggcatcgccaccggtctgctggtgctgaaggacctgggcatccaggtggataggtacattgcctccgaggtgtgcgaggactccatcaccgtgggaatggtgcgtcatcagggcaagatcatgtacgtgggcgacgtgcggagcgtgacacagaagcatatccaggagtggggccctttcgacctggtgatcggcggcagcccttgcaatgacctgagcatcgtgaacccagcccggaagggcctgtacgagggaaccggcagactgttcttcgagttttacagactgctgcacgacgcccggcctaaggaaggcgacgaccggcccttcttttggctgttcgagaatgtggtggccatgggagtcagcgacaagcgggatattagccggttcctggagagcaaccccgtgatgatcgatgccaaggaagtgagcgccgcccaccgggccagatacttctggggcaatctgcctggcatgaacagacccctggccagcaccgtgaacgacaagctggagctgcaggagtgcctggagcacggccggatcgccaagttcagcaaggtgagaaccatcaccacccgaagcaacagcatcaaacaaggcaaggaccagcactttcctgtgttcatgaacgagaaggaggacatcctgtggtgtaccgagatggagagagtgttcgggttcccagtccactacacagatgtcagcaacatgtctagactggccagacagagactgctgggaagaagctggtccgtccctgtgatcagacacctgttcgcccctctgaaggagtacttcgcctgcgtgagcagcggcaacagcaacgccaacagccggggccccagcttctctagcggcctggtgccactgtccctgagagggagccacatgggccccatggagatctacaaaaccgtgagcgcctggaagcggcagcctgtgcgcgtgctgagcctgtttcggaatatcgataaagtcctgaaaagcctgggattcctggagagcggctctggctccggcggtggcaccctgaagtacgtggaggatgtgacaaacgtggtcagacgggatgtggagaagtggggccccttcgatctggtgtacggcagcacccaacccctgggcagctcttgtgaccggtgccctggctggtacatgtttcagttccaccggatcctgcagtacgccctgccgagacaggagtcccagcggccattcttttggattttcatggacaacttgctgctgaccgaggatgaccaggaaactaccactcggttcctgcagaccgaagccgtgaccctgcaggacgtgagaggccgggactaccagaacgccatgcgggtgtggtccaacatccctggactgaaaagcaagcacgcacctctgacccctaaagaagaggagtacctgcaggcccaggtgcggagcagaagcaagctggacgcccctaaggtggatctgctggtgaagaattgcctcctgcccctgagagagtacttcaagtatttcagccagaatagtctgcccctgggaggcagcggcggcggcgcccaggcccccctgagcttcgaggacgtggccgtgagcttcagcagggaggagtggaggctgctggtgcccgcccagaaggacctgtacagggacgtgatgctggagaactacaggaacctggtgagcgtgggctaccaggccagcgagcccgacagcctgttccagctggagcacggcggccccctgtgggccgtggagggcgccgcccccaggcccccctgccccggcttcgtgctgcagggcggcccaagcagcggcgcccctcctcccagcggcggcaggcggcccaagcagcggcgcccctcctcccagcggcggcagcccagccggctccccaacctctaccgaggagggcacctctgagtccgccacccccgagagcggccctggcacctccaccgagcccagcgagggcagcgcacccggcagccctgccggcagccccacctccacagaggagggaaccagcaccgagcccagcgaaggcagcgccccaggcaccagcaccgagcctagtgagcaggagattaaacggatcaacaagatcagaagaagacttgtgaaagacagcaacaccaagaaggccggcaagacaggccccatgaaaaccctgctggttagagtgatgacacccgatctgagagagcggctggaaaacctgagaaagaagcctgaaaatatcccccagcccatcagcaatacatctagagccaacctgaataagctgctgaccgattacaccgaaatgaagaaggcgatcctgcatgtgtactgggaagagttccagaaggaccctgtgggcctgatgagccgggtggcccagcctgccagcaagaagatcgatcagaacaagctgaaacctgagatggacgagaagggcaacctgaccaccgccggctttgcctgctctcagtgtggccagcccctgttcgtgtacaagctggagcaggtgtctgagaagggcaaggcttacaccaactacttcggacggtgcaatgtggccgagcacgaaaagctgatcctgctggcccagctgaagcccgagaaggatagcgacgaagccgtgacatatagcctgggaaagtttgggcagagggccctggatttctacagcattcatgtgaccaaggagtccacccaccccgtgaagcccctggcccagatcgccggaaacagatacgcctccggacctgtgggaaaggccctgagcgacgcatgtatgggcacaatcgcctccttcctgtctaagtaccaggacatcatcatcgaacaccagaaggtggtgaagggcaaccagaagagactggagagcctgcgggagctggccggcaaggaaaacctggaataccctagcgtgaccctgccacctcagcctcacaccaaggagggcgttgatgcctacaacgaagtgatcgcccgggtgcgaatgtgggtgaacctgaacctgtggcagaagctgaagctaagcagagatgatgccaagcctctgctgagactgaagggattcccttcctttcctctggtcgagagacaggccaacgaagtggactggtgggacatggtgtgtaacgtgaagaagctgatcaacgagaaaaaggaggatggcaaggtgttttggcagaatctggctggctacaagagacaggaagccctgagaccatacctgagcagcgaggaagatcggaagaagggaaagaaattcgctcggtaccagctgggcgacctgctgctgcacctggaaaagaagcacggcgaggactggggaaaggtgtacgacgaggcctgggagcggattgacaagaaagtggaaggcctgagcaagcacatcaagctggaagaggaacggagaagcgaggacgcccagagcaaggccgccctgaccgactggctgcgggctaaggccagcttcgtgatcgagggcctgaaggaggccgacaaggacgagttctgcagatgcgagctgaagctgcagaagtggtacggggacctgcggggaaagcccttcgccatcgaagccgagaacagcatcctggacatcagcggcttcagcaagcagtacaactgtgccttcatctggcagaaggacggcgtgaagaagctgaacctgtacctgatcatcaactacttcaagggcggcaagctgcggttcaagaagatcaaacctgaagccttcgaagccaacagattctacaccgtgatcaacaaaaagagcggcgagatcgtgcccatggaggtgaacttcaacttcgacgaccccaacctgatcatcctgcctctggcctttggcaagagacagggcagagaattcatctggaacgacctgctgtccctggaaaccggcagcctgaagctggccaacggaagagtgatcgagaagacactgtacaacagaagaacccggcaggatgagcctgccctgttcgtggccctgaccttcgagcggcgggaggtcctggactcctccaatatcaaaccaatgaacctgatcggcgtggcaagaggcgaaaacatccccgccgtgatcgccctgaccgaccccgagggctgcccactgagccggtttaaggatagcctgggaaacccaacccacatcctgagaatcggcgagagctataaggagaagcagcggaccatccaggccaagaaggaggtggagcagcggagagccggcggctacagccggaagtacgccagcaaagccaagaatctggcagacgatatggtgagaaacaccgctagagatctgctgtactacgccgtgacccaggatgccatgctgatcttcgccaacctgagccggggcttcggccggcagggcaagcggaccttcatggccgagagacagtacacacggatggaggactggctgaccgccaagctggcctacgagggcctgagcaagacctacctgtccaagacactggcccagtacacctccaagacatgcagcaactgtgggtttaccatcaccagcgccgactacgacagggtgctggagaagctgaagaagacagcaacaggctggatgaccacaattaacggcaaggagctgaaggtggagggccagattacctactacaacagatacaagagacagaacgtagtcaaggacctgtccgtcgagctggatagactgagcgaagaatctgtgaacaacgacatctcctcctggacaaagggcagaagcggagaagctctgagcctcctgaagaaaagattctcccatagacccgtgcaggagaagttcgtgtgcctgaactgcggcttcgagacacacgcagccgagcaagccgccctgaacatcgccagatcctggctgttcctgcggagccaggagtacaagaaataccagacaaacaagacaaccggcaacaccgataagagagccttcgtcgagacctggcagtccttttaccggaagaagcttaaggaggtgtggaaacctgccgtgcggtctggcggatctggcggaggctccaccagccccaagaaaaagagaaaagtctaagctgccttctgcggggcttgccttctggccatgcccttcttctctcccttgcacctgtacctcttggtctttgaataaagcctgagtaggaaggctagcaaaaaaaaaaaaaaaaaaaaaaaaaaaaaaaaaaaaaaaaaaaaaaaaaaaaaaaaaaaaaaaaaaaaaaaaaaaaaaaagcccagccggctccccaacctctaccgaggagggcacctctgagtccgccacccccgagagcggccctggcacctccaccgagcccagcgagggcagcgcacccggcagccctgccggcagccccacctccacagaggagggaaccagcaccgagcccagcgaaggcagcgccccaggcaccagcaccgagcctagtgagcaggagattaaacggatcaacaagatcagaagaagacttgtgaaagacagcaacaccaagaaggccggcaagacaggccccatgaaaaccctgctggttagagtgatgacacccgatctgagagagcggctggaaaacctgagaaagaagcctgaaaatatcccccagcccatcagcaatacatctagagccaacctgaataagctgctgaccgattacaccgaaatgaagaaggcgatcctgcatgtgtactgggaagagttccagaaggaccctgtgggcctgatgagccgggtggcccagcctgccagcaagaagatcgatcagaacaagctgaaacctgagatggacgagaagggcaacctgaccaccgccggctttgcctgctctcagtgtggccagcccctgttcgtgtacaagctggagcaggtgtctgagaagggcaaggcttacaccaactacttcggacggtgcaatgtggccgagcacgaaaagctgatcctgctggcccagctgaagcccgagaaggatagcgacgaagccgtgacatatagcctgggaaagtttgggcagagggccctggatttctacagcattcatgtgaccaaggagtccacccaccccgtgaagcccctggcccagatcgccggaaacagatacgcctccggacctgtgggaaaggccctgagcgacgcatgtatgggcacaatcgcctccttcctgtctaagtaccaggacatcatcatcgaacaccagaaggtggtgaagggcaaccagaagagactggagagcctgcgggagctggccggcaaggaaaacctggaataccctagcgtgaccctgccacctcagcctcacaccaaggagggcgttgatgcctacaacgaagtgatcgcccgggtgcgaatgtgggtgaacctgaacctgtggcagaagctgaagctaagcagagatgatgccaagcctctgctgagactgaagggattcccttcctttcctctggtcgagagacaggccaacgaagtggactggtgggacatggtgtgtaacgtgaagaagctgatcaacgagaaaaaggaggatggcaaggtgttttggcagaatctggctggctacaagagacaggaagccctgagaccatacctgagcagcgaggaagatcggaagaagggaaagaaattcgctcggtaccagctgggcgacctgctgctgcacctggaaaagaagcacggcgaggactggggaaaggtgtacgacgaggcctgggagcggattgacaagaaagtggaaggcctgagcaagcacatcaagctggaagaggaacggagaagcgaggacgcccagagcaaggccgccctgaccgactggctgcgggctaaggccagcttcgtgatcgagggcctgaaggaggccgacaaggacgagttctgcagatgcgagctgaagctgcagaagtggtacggggacctgcggggaaagcccttcgccatcgaagccgagaacagcatcctggacatcagcggcttcagcaagcagtacaactgtgccttcatctggcagaaggacggcgtgaagaagctgaacctgtacctgatcatcaactacttcaagggcggcaagctgcggttcaagaagatcaaacctgaagccttcgaagccaacagattctacaccgtgatcaacaaaaagagcggcgagatcgtgcccatggaggtgaacttcaacttcgacgaccccaacctgatcatcctgcctctggcctttggcaagagacagggcagagaattcatctggaacgacctgctgtccctggaaaccggcagcctgaagctggccaacggaagagtgatcgagaagacactgtacaacagaagaacccggcaggatgagcctgccctgttcgtggccctgaccttcgagcggcgggaggtcctggactcctccaatatcaaaccaatgaacctgatcggcgtggcaagaggcgaaaacatccccgccgtgatcgccctgaccgaccccgagggctgcccactgagccggtttaaggatagcctgggaaacccaacccacatcctgagaatcggcgagagctataaggagaagcagcggaccatccaggccaagaaggaggtggagcagcggagagccggcggctacagccggaagtacgccagcaaagccaagaatctggcagacgatatggtgagaaacaccgctagagatctgctgtactacgccgtgacccaggatgccatgctgatcttcgccaacctgagccggggcttcggccggcagggcaagcggaccttcatggccgagagacagtacacacggatggaggactggctgaccgccaagctggcctacgagggcctgagcaagacctacctgtccaagacactggcccagtacacctccaagacatgcagcaactgtgggtttaccatcaccagcgccgactacgacagggtgctggagaagctgaagaagacagcaacaggctggatgaccacaattaacggcaaggagctgaaggtggagggccagattacctactacaacagatacaagagacagaacgtagtcaaggacctgtccgtcgagctggatagactgagcgaagaatctgtgaacaacgacatctcctcctggacaaagggcagaagcggagaagctctgagcctcctgaagaaaagattctcccatagacccgtgcaggagaagttcgtgtgcctgaactgcggcttcgagacacacgcagccgagcaagccgccctgaacatcgccagatcctggctgttcctgcggagccaggagtacaagaaataccagacaaacaagacaaccggcaacaccgataagagagccttcgtcgagacctggcagtccttttaccggaagaagcttaaggaggtgtggaaacctgccgtgcggtctggcggatctggcggaggctccaccagccccaagaaaaagagaaaagtctaagctgccttctgcggggcttgccttctggccatgcccttcttctctcccttgcacctgtacctcttggtctttgaataaagcctgagtaggaaggctagcaaaaaaaaaaaaaaaaaaaaaaaaaaaaaaaaaaaaaaaaaaaaaaaaaaaaaaaaaaaaaaaaaaaaaaaaaaaaaaaa

SEQ ID NO: 9257 - RNA, 8787 nt, synthetic construct
  source 1..8787: mol_type = other RNA
aggaaataagagagaaaagaagagtaagaagaaatataagagccaccatggcccctaagaagaagcgtaaagtgagccggatgaaccacgaccaggagttcgacccccctaaggtgtaccctcccgtccccgccgagaagagaaagcccatccgggtcctgagcctgttcgatggcatcgccaccggtctgctggtgctgaaggacctgggcatccaggtggataggtacattgcctccgaggtgtgcgaggactccatcaccgtgggaatggtgcgtcatcagggcaagatcatgtacgtgggcgacgtgcggagcgtgacacagaagcatatccaggagtggggccctttcgacctggtgatcggcggcagcccttgcaatgacctgagcatcgtgaacccagcccggaagggcctgtacgagggaaccggcagactgttcttcgagttttacagactgctgcacgacgcccggcctaaggaaggcgacgaccggcccttcttttggctgttcgagaatgtggtggccatgggagtcagcgacaagcgggatattagccggttcctggagagcaaccccgtgatgatcgatgccaaggaagtgagcgccgcccaccgggccagatacttctggggcaatctgcctggcatgaacagacccctggccagcaccgtgaacgacaagctggagctgcaggagtgcctggagcacggccggatcgccaagttcagcaaggtgagaaccatcaccacccgaagcaacagcatcaaacaaggcaaggaccagcactttcctgtgttcatgaacgagaaggaggacatcctgtggtgtaccgagatggagagagtgttcgggttcccagtccactacacagatgtcagcaacatgtctagactggccagacagagactgctgggaagaagctggtccgtccctgtgatcagacacctgttcgcccctctgaaggagtacttcgcctgcgtgagcagcggcaacagcaacgccaacagccggggccccagcttctctagcggcctggtgccactgtccctgagagggagccacatgggccccatggagatctacaaaaccgtgagcgcctggaagcggcagcctgtgcgcgtgctgagcctgtttcggaatatcgataaagtcctgaaaagcctgggattcctggagagcggctctggctccggcggtggcaccctgaagtacgtggaggatgtgacaaacgtggtcagacgggatgtggagaagtggggccccttcgatctggtgtacggcagcacccaacccctgggcagctcttgtgaccggtgccctggctggtacatgtttcagttccaccggatcctgcagtacgccctgccgagacaggagtcccagcggccattcttttggattttcatggacaacttgctgctgaccgaggatgaccaggaaactaccactcggttcctgcagaccgaagccgtgaccctgcaggacgtgagaggccgggactaccagaacgccatgcgggtgtggtccaacatccctggactgaaaagcaagcacgcacctctgacccctaaagaagaggagtacctgcaggcccaggtgcggagcagaagcaagctggacgcccctaaggtggatctgctggtgaagaattgcctcctgcccctgagagagtacttcaagtatttcagccagaatagtctgcccctgggaggcagcggcggcggcttccagggcagcctgaccttcagcgacgtggccatcggcttcagccagcaggagtgggagtgcctggaccccgtgcagaagagcctgtacagggacgtgatgatggagaactacggcaacctggtgagcctgggctacagcatcagcaagcccgacgtgatcaccctgctggagcagggcaaggagccctggatggtgctgagggaggagaccaagaggtgggacaccgacagcttcctgagcggcggcccaagcagcggcgcccctcctcccagcggcggcaggcggcccaagcagcggcgcccctcctcccagcggcggcagcccagccggctccccaacctctaccgaggagggcacctctgagtccgccacccccgagagcggccctggcacctccaccgagcccagcgagggcagcgcacccggcagccctgccggcagccccacctccacagaggagggaaccagcaccgagcccagcgaaggcagcgccccaggcaccagcaccgagcctagtgagcaggagattaaacggatcaacaagatcagaagaagacttgtgaaagacagcaacaccaagaaggccggcaagacaggccccatgaaaaccctgctggttagagtgatgacacccgatctgagagagcggctggaaaacctgagaaagaagcctgaaaatatcccccagcccatcagcaatacatctagagccaacctgaataagctgctgaccgattacaccgaaatgaagaaggcgatcctgcatgtgtactgggaagagttccagaaggaccctgtgggcctgatgagccgggtggcccagcctgccagcaagaagatcgatcagaacaagctgaaacctgagatggacgagaagggcaacctgaccaccgccggctttgcctgctctcagtgtggccagcccctgttcgtgtacaagctggagcaggtgtctgagaagggcaaggcttacaccaactacttcggacggtgcaatgtggccgagcacgaaaagctgatcctgctggcccagctgaagcccgagaaggatagcgacgaagccgtgacatatagcctgggaaagtttgggcagagggccctggatttctacagcattcatgtgaccaaggagtccacccaccccgtgaagcccctggcccagatcgccggaaacagatacgcctccggacctgtgggaaaggccctgagcgacgcatgtatgggcacaatcgcctccttcctgtctaagtaccaggacatcatcatcgaacaccagaaggtggtgaagggcaaccagaagagactggagagcctgcgggagctggccggcaaggaaaacctggaataccctagcgtgaccctgccacctcagcctcacaccaaggagggcgttgatgcctacaacgaagtgatcgcccgggtgcgaatgtgggtgaacctgaacctgtggcagaagctgaagctaagcagagatgatgccaagcctctgctgagactgaagggattcccttcctttcctctggtcgagagacaggccaacgaagtggactggtgggacatggtgtgtaacgtgaagaagctgatcaacgagaaaaaggaggatggcaaggtgttttggcagaatctggctggctacaagagacaggaagccctgagaccatacctgagcagcgaggaagatcggaagaagggaaagaaattcgctcggtaccagctgggcgacctgctgctgcacctggaaaagaagcacggcgaggactggggaaaggtgtacgacgaggcctgggagcggattgacaagaaagtggaaggcctgagcaagcacatcaagctggaagaggaacggagaagcgaggacgcccagagcaaggccgccctgaccgactggctgcgggctaaggccagcttcgtgatcgagggcctgaaggaggccgacaaggacgagttctgcagatgcgagctgaagctgcagaagtggtacggggacctgcggggaaagcccttcgccatcgaagccgagaacagcatcctggacatcagcggcttcagcaagcagtacaactgtgccttcatctggcagaaggacggcgtgaagaagctgaacctgtacctgatcatcaactacttcaagggcggcaagctgcggttcaagaagatcaaacctgaagccttcgaagccaacagattctacaccgtgatcaacaaaaagagcggcgagatcgtgcccatggaggtgaacttcaacttcgacgaccccaacctgatcatcctgcctctggcctttggcaagagacagggcagagaattcatctggaacgacctgctgtccctggaaaccggcagcctgaagctggccaacggaagagtgatcgagaagacactgtacaacagaagaacccggcaggatgagcctgccctgttcgtggccctgaccttcgagcggcgggaggtcctggactcctccaatatcaaaccaatgaacctgatcggcgtggcaagaggcgaaaacatccccgccgtgatcgccctgaccgaccccgagggctgcccactgagccggtttaaggatagcctgggaaacccaacccacatcctgagaatcggcgagagctataaggagaagcagcggaccatccaggccaagaaggaggtggagcagcggagagccggcggctacagccggaagtacgccagcaaagccaagaatctggcagacgatatggtgagaaacaccgctagagatctgctgtactacgccgtgacccaggatgccatgctgatcttcgccaacctgagccggggcttcggccggcagggcaagcggaccttcatggccgagagacagtacacacggatggaggactggctgaccgccaagctggcctacgagggcctgagcaagacctacctgtccaagacactggcccagtacacctccaagacatgcagcaactgtgggtttaccatcaccagcgccgactacgacagggtgctggagaagctgaagaagacagcaacaggctggatgaccacaattaacggcaaggagctgaaggtggagggccagattacctactacaacagatacaagagacagaacgtagtcaaggacctgtccgtcgagctggatagactgagcgaagaatctgtgaacaacgacatctcctcctggacaaagggcagaagcggagaagctctgagcctcctgaagaaaagattctcccatagacccgtgcaggagaagttcgtgtgcctgaactgcggcttcgagacacacgcagccgagcaagccgccctgaacatcgccagatcctggctgttcctgcggagccaggagtacaagaaataccagacaaacaagacaaccggcaacaccgataagagagccttcgtcgagacctggcagtccttttaccggaagaagcttaaggaggtgtggaaacctgccgtgcggtctggcggatctggcggaggctccaccagccccaagaaaaagagaaaagtctaagctgccttctgcggggcttgccttctggccatgcccttcttctctcccttgcacctgtacctcttggtctttgaataaagcctgagtaggaaggctagcaaaaaaaaaaaaaaaaaaaaaaaaaaaaaaaaaaaaaaaaaaaaaaaaaaaaaaaaaaaaaaaaaaaaaaaaaaaaaaaagcccagccggctccccaacctctaccgaggagggcacctctgagtccgccacccccgagagcggccctggcacctccaccgagcccagcgagggcagcgcacccggcagccctgccggcagccccacctccacagaggagggaaccagcaccgagcccagcgaaggcagcgccccaggcaccagcaccgagcctagtgagcaggagattaaacggatcaacaagatcagaagaagacttgtgaaagacagcaacaccaagaaggccggcaagacaggccccatgaaaaccctgctggttagagtgatgacacccgatctgagagagcggctggaaaacctgagaaagaagcctgaaaatatcccccagcccatcagcaatacatctagagccaacctgaataagctgctgaccgattacaccgaaatgaagaaggcgatcctgcatgtgtactgggaagagttccagaaggaccctgtgggcctgatgagccgggtggcccagcctgccagcaagaagatcgatcagaacaagctgaaacctgagatggacgagaagggcaacctgaccaccgccggctttgcctgctctcagtgtggccagcccctgttcgtgtacaagctggagcaggtgtctgagaagggcaaggcttacaccaactacttcggacggtgcaatgtggccgagcacgaaaagctgatcctgctggcccagctgaagcccgagaaggatagcgacgaagccgtgacatatagcctgggaaagtttgggcagagggccctggatttctacagcattcatgtgaccaaggagtccacccaccccgtgaagcccctggcccagatcgccggaaacagatacgcctccggacctgtgggaaaggccctgagcgacgcatgtatgggcacaatcgcctccttcctgtctaagtaccaggacatcatcatcgaacaccagaaggtggtgaagggcaaccagaagagactggagagcctgcgggagctggccggcaaggaaaacctggaataccctagcgtgaccctgccacctcagcctcacaccaaggagggcgttgatgcctacaacgaagtgatcgcccgggtgcgaatgtgggtgaacctgaacctgtggcagaagctgaagctaagcagagatgatgccaagcctctgctgagactgaagggattcccttcctttcctctggtcgagagacaggccaacgaagtggactggtgggacatggtgtgtaacgtgaagaagctgatcaacgagaaaaaggaggatggcaaggtgttttggcagaatctggctggctacaagagacaggaagccctgagaccatacctgagcagcgaggaagatcggaagaagggaaagaaattcgctcggtaccagctgggcgacctgctgctgcacctggaaaagaagcacggcgaggactggggaaaggtgtacgacgaggcctgggagcggattgacaagaaagtggaaggcctgagcaagcacatcaagctggaagaggaacggagaagcgaggacgcccagagcaaggccgccctgaccgactggctgcgggctaaggccagcttcgtgatcgagggcctgaaggaggccgacaaggacgagttctgcagatgcgagctgaagctgcagaagtggtacggggacctgcggggaaagcccttcgccatcgaagccgagaacagcatcctggacatcagcggcttcagcaagcagtacaactgtgccttcatctggcagaaggacggcgtgaagaagctgaacctgtacctgatcatcaactacttcaagggcggcaagctgcggttcaagaagatcaaacctgaagccttcgaagccaacagattctacaccgtgatcaacaaaaagagcggcgagatcgtgcccatggaggtgaacttcaacttcgacgaccccaacctgatcatcctgcctctggcctttggcaagagacagggcagagaattcatctggaacgacctgctgtccctggaaaccggcagcctgaagctggccaacggaagagtgatcgagaagacactgtacaacagaagaacccggcaggatgagcctgccctgttcgtggccctgaccttcgagcggcgggaggtcctggactcctccaatatcaaaccaatgaacctgatcggcgtggcaagaggcgaaaacatccccgccgtgatcgccctgaccgaccccgagggctgcccactgagccggtttaaggatagcctgggaaacccaacccacatcctgagaatcggcgagagctataaggagaagcagcggaccatccaggccaagaaggaggtggagcagcggagagccggcggctacagccggaagtacgccagcaaagccaagaatctggcagacgatatggtgagaaacaccgctagagatctgctgtactacgccgtgacccaggatgccatgctgatcttcgccaacctgagccggggcttcggccggcagggcaagcggaccttcatggccgagagacagtacacacggatggaggactggctgaccgccaagctggcctacgagggcctgagcaagacctacctgtccaagacactggcccagtacacctccaagacatgcagcaactgtgggtttaccatcaccagcgccgactacgacagggtgctggagaagctgaagaagacagcaacaggctggatgaccacaattaacggcaaggagctgaaggtggagggccagattacctactacaacagatacaagagacagaacgtagtcaaggacctgtccgtcgagctggatagactgagcgaagaatctgtgaacaacgacatctcctcctggacaaagggcagaagcggagaagctctgagcctcctgaagaaaagattctcccatagacccgtgcaggagaagttcgtgtgcctgaactgcggcttcgagacacacgcagccgagcaagccgccctgaacatcgccagatcctggctgttcctgcggagccaggagtacaagaaataccagacaaacaagacaaccggcaacaccgataagagagccttcgtcgagacctggcagtccttttaccggaagaagcttaaggaggtgtggaaacctgccgtgcggtctggcggatctggcggaggctccaccagccccaagaaaaagagaaaagtctaagctgccttctgcggggcttgccttctggccatgcccttcttctctcccttgcacctgtacctcttggtctttgaataaagcctgagtaggaaggctagcaaaaaaaaaaaaaaaaaaaaaaaaaaaaaaaaaaaaaaaaaaaaaaaaaaaaaaaaaaaaaaaaaaaaaaaaaaaaaaaa

SEQ ID NO: 9258 - RNA, 8787 nt, synthetic construct
  source 1..8787: mol_type = other RNA
aggaaataagagagaaaagaagagtaagaagaaatataagagccaccatggcccctaagaagaagcgtaaagtgagccggatgaaccacgaccaggagttcgacccccctaaggtgtaccctcccgtccccgccgagaagagaaagcccatccgggtcctgagcctgttcgatggcatcgccaccggtctgctggtgctgaaggacctgggcatccaggtggataggtacattgcctccgaggtgtgcgaggactccatcaccgtgggaatggtgcgtcatcagggcaagatcatgtacgtgggcgacgtgcggagcgtgacacagaagcatatccaggagtggggccctttcgacctggtgatcggcggcagcccttgcaatgacctgagcatcgtgaacccagcccggaagggcctgtacgagggaaccggcagactgttcttcgagttttacagactgctgcacgacgcccggcctaaggaaggcgacgaccggcccttcttttggctgttcgagaatgtggtggccatgggagtcagcgacaagcgggatattagccggttcctggagagcaaccccgtgatgatcgatgccaaggaagtgagcgccgcccaccgggccagatacttctggggcaatctgcctggcatgaacagacccctggccagcaccgtgaacgacaagctggagctgcaggagtgcctggagcacggccggatcgccaagttcagcaaggtgagaaccatcaccacccgaagcaacagcatcaaacaaggcaaggaccagcactttcctgtgttcatgaacgagaaggaggacatcctgtggtgtaccgagatggagagagtgttcgggttcccagtccactacacagatgtcagcaacatgtctagactggccagacagagactgctgggaagaagctggtccgtccctgtgatcagacacctgttcgcccctctgaaggagtacttcgcctgcgtgagcagcggcaacagcaacgccaacagccggggccccagcttctctagcggcctggtgccactgtccctgagagggagccacatgggccccatggagatctacaaaaccgtgagcgcctggaagcggcagcctgtgcgcgtgctgagcctgtttcggaatatcgataaagtcctgaaaagcctgggattcctggagagcggctctggctccggcggtggcaccctgaagtacgtggaggatgtgacaaacgtggtcagacgggatgtggagaagtggggccccttcgatctggtgtacggcagcacccaacccctgggcagctcttgtgaccggtgccctggctggtacatgtttcagttccaccggatcctgcagtacgccctgccgagacaggagtcccagcggccattcttttggattttcatggacaacttgctgctgaccgaggatgaccaggaaactaccactcggttcctgcagaccgaagccgtgaccctgcaggacgtgagaggccgggactaccagaacgccatgcgggtgtggtccaacatccctggactgaaaagcaagcacgcacctctgacccctaaagaagaggagtacctgcaggcccaggtgcggagcagaagcaagctggacgcccctaaggtggatctgctggtgaagaattgcctcctgcccctgagagagtacttcaagtatttcagccagaatagtctgcccctgggaggcagcggcggcggccaggacgtggtgaccttcaaggacgtggccatctacttcagccccgaggagtgggtgaggctgagcgccggccagagggagctgtaccaggaggtgatgctggacaactacgagctggtgaccagcctggacagggagagcaagctgctgtacaagatggaccccgaggaggagagctgcgagggcgtgccctacagcagcgccgacagcggcgcccccgacagcagcagcaccagcgcctgcggcggcccaagcagcggcgcccctcctcccagcggcggcaggcggcccaagcagcggcgcccctcctcccagcggcggcagcccagccggctccccaacctctaccgaggagggcacctctgagtccgccacccccgagagcggccctggcacctccaccgagcccagcgagggcagcgcacccggcagccctgccggcagccccacctccacagaggagggaaccagcaccgagcccagcgaaggcagcgccccaggcaccagcaccgagcctagtgagcaggagattaaacggatcaacaagatcagaagaagacttgtgaaagacagcaacaccaagaaggccggcaagacaggccccatgaaaaccctgctggttagagtgatgacacccgatctgagagagcggctggaaaacctgagaaagaagcctgaaaatatcccccagcccatcagcaatacatctagagccaacctgaataagctgctgaccgattacaccgaaatgaagaaggcgatcctgcatgtgtactgggaagagttccagaaggaccctgtgggcctgatgagccgggtggcccagcctgccagcaagaagatcgatcagaacaagctgaaacctgagatggacgagaagggcaacctgaccaccgccggctttgcctgctctcagtgtggccagcccctgttcgtgtacaagctggagcaggtgtctgagaagggcaaggcttacaccaactacttcggacggtgcaatgtggccgagcacgaaaagctgatcctgctggcccagctgaagcccgagaaggatagcgacgaagccgtgacatatagcctgggaaagtttgggcagagggccctggatttctacagcattcatgtgaccaaggagtccacccaccccgtgaagcccctggcccagatcgccggaaacagatacgcctccggacctgtgggaaaggccctgagcgacgcatgtatgggcacaatcgcctccttcctgtctaagtaccaggacatcatcatcgaacaccagaaggtggtgaagggcaaccagaagagactggagagcctgcgggagctggccggcaaggaaaacctggaataccctagcgtgaccctgccacctcagcctcacaccaaggagggcgttgatgcctacaacgaagtgatcgcccgggtgcgaatgtgggtgaacctgaacctgtggcagaagctgaagctaagcagagatgatgccaagcctctgctgagactgaagggattcccttcctttcctctggtcgagagacaggccaacgaagtggactggtgggacatggtgtgtaacgtgaagaagctgatcaacgagaaaaaggaggatggcaaggtgttttggcagaatctggctggctacaagagacaggaagccctgagaccatacctgagcagcgaggaagatcggaagaagggaaagaaattcgctcggtaccagctgggcgacctgctgctgcacctggaaaagaagcacggcgaggactggggaaaggtgtacgacgaggcctgggagcggattgacaagaaagtggaaggcctgagcaagcacatcaagctggaagaggaacggagaagcgaggacgcccagagcaaggccgccctgaccgactggctgcgggctaaggccagcttcgtgatcgagggcctgaaggaggccgacaaggacgagttctgcagatgcgagctgaagctgcagaagtggtacggggacctgcggggaaagcccttcgccatcgaagccgagaacagcatcctggacatcagcggcttcagcaagcagtacaactgtgccttcatctggcagaaggacggcgtgaagaagctgaacctgtacctgatcatcaactacttcaagggcggcaagctgcggttcaagaagatcaaacctgaagccttcgaagccaacagattctacaccgtgatcaacaaaaagagcggcgagatcgtgcccatggaggtgaacttcaacttcgacgaccccaacctgatcatcctgcctctggcctttggcaagagacagggcagagaattcatctggaacgacctgctgtccctggaaaccggcagcctgaagctggccaacggaagagtgatcgagaagacactgtacaacagaagaacccggcaggatgagcctgccctgttcgtggccctgaccttcgagcggcgggaggtcctggactcctccaatatcaaaccaatgaacctgatcggcgtggcaagaggcgaaaacatccccgccgtgatcgccctgaccgaccccgagggctgcccactgagccggtttaaggatagcctgggaaacccaacccacatcctgagaatcggcgagagctataaggagaagcagcggaccatccaggccaagaaggaggtggagcagcggagagccggcggctacagccggaagtacgccagcaaagccaagaatctggcagacgatatggtgagaaacaccgctagagatctgctgtactacgccgtgacccaggatgccatgctgatcttcgccaacctgagccggggcttcggccggcagggcaagcggaccttcatggccgagagacagtacacacggatggaggactggctgaccgccaagctggcctacgagggcctgagcaagacctacctgtccaagacactggcccagtacacctccaagacatgcagcaactgtgggtttaccatcaccagcgccgactacgacagggtgctggagaagctgaagaagacagcaacaggctggatgaccacaattaacggcaaggagctgaaggtggagggccagattacctactacaacagatacaagagacagaacgtagtcaaggacctgtccgtcgagctggatagactgagcgaagaatctgtgaacaacgacatctcctcctggacaaagggcagaagcggagaagctctgagcctcctgaagaaaagattctcccatagacccgtgcaggagaagttcgtgtgcctgaactgcggcttcgagacacacgcagccgagcaagccgccctgaacatcgccagatcctggctgttcctgcggagccaggagtacaagaaataccagacaaacaagacaaccggcaacaccgataagagagccttcgtcgagacctggcagtccttttaccggaagaagcttaaggaggtgtggaaacctgccgtgcggtctggcggatctggcggaggctccaccagccccaagaaaaagagaaaagtctaagctgccttctgcggggcttgccttctggccatgcccttcttctctcccttgcacctgtacctcttggtctttgaataaagcctgagtaggaaggctagcaaaaaaaaaaaaaaaaaaaaaaaaaaaaaaaaaaaaaaaaaaaaaaaaaaaaaaaaaaaaaaaaaaaaaaaaaaaaaaaagcccagccggctccccaacctctaccgaggagggcacctctgagtccgccacccccgagagcggccctggcacctccaccgagcccagcgagggcagcgcacccggcagccctgccggcagccccacctccacagaggagggaaccagcaccgagcccagcgaaggcagcgccccaggcaccagcaccgagcctagtgagcaggagattaaacggatcaacaagatcagaagaagacttgtgaaagacagcaacaccaagaaggccggcaagacaggccccatgaaaaccctgctggttagagtgatgacacccgatctgagagagcggctggaaaacctgagaaagaagcctgaaaatatcccccagcccatcagcaatacatctagagccaacctgaataagctgctgaccgattacaccgaaatgaagaaggcgatcctgcatgtgtactgggaagagttccagaaggaccctgtgggcctgatgagccgggtggcccagcctgccagcaagaagatcgatcagaacaagctgaaacctgagatggacgagaagggcaacctgaccaccgccggctttgcctgctctcagtgtggccagcccctgttcgtgtacaagctggagcaggtgtctgagaagggcaaggcttacaccaactacttcggacggtgcaatgtggccgagcacgaaaagctgatcctgctggcccagctgaagcccgagaaggatagcgacgaagccgtgacatatagcctgggaaagtttgggcagagggccctggatttctacagcattcatgtgaccaaggagtccacccaccccgtgaagcccctggcccagatcgccggaaacagatacgcctccggacctgtgggaaaggccctgagcgacgcatgtatgggcacaatcgcctccttcctgtctaagtaccaggacatcatcatcgaacaccagaaggtggtgaagggcaaccagaagagactggagagcctgcgggagctggccggcaaggaaaacctggaataccctagcgtgaccctgccacctcagcctcacaccaaggagggcgttgatgcctacaacgaagtgatcgcccgggtgcgaatgtgggtgaacctgaacctgtggcagaagctgaagctaagcagagatgatgccaagcctctgctgagactgaagggattcccttcctttcctctggtcgagagacaggccaacgaagtggactggtgggacatggtgtgtaacgtgaagaagctgatcaacgagaaaaaggaggatggcaaggtgttttggcagaatctggctggctacaagagacaggaagccctgagaccatacctgagcagcgaggaagatcggaagaagggaaagaaattcgctcggtaccagctgggcgacctgctgctgcacctggaaaagaagcacggcgaggactggggaaaggtgtacgacgaggcctgggagcggattgacaagaaagtggaaggcctgagcaagcacatcaagctggaagaggaacggagaagcgaggacgcccagagcaaggccgccctgaccgactggctgcgggctaaggccagcttcgtgatcgagggcctgaaggaggccgacaaggacgagttctgcagatgcgagctgaagctgcagaagtggtacggggacctgcggggaaagcccttcgccatcgaagccgagaacagcatcctggacatcagcggcttcagcaagcagtacaactgtgccttcatctggcagaaggacggcgtgaagaagctgaacctgtacctgatcatcaactacttcaagggcggcaagctgcggttcaagaagatcaaacctgaagccttcgaagccaacagattctacaccgtgatcaacaaaaagagcggcgagatcgtgcccatggaggtgaacttcaacttcgacgaccccaacctgatcatcctgcctctggcctttggcaagagacagggcagagaattcatctggaacgacctgctgtccctggaaaccggcagcctgaagctggccaacggaagagtgatcgagaagacactgtacaacagaagaacccggcaggatgagcctgccctgttcgtggccctgaccttcgagcggcgggaggtcctggactcctccaatatcaaaccaatgaacctgatcggcgtggcaagaggcgaaaacatccccgccgtgatcgccctgaccgaccccgagggctgcccactgagccggtttaaggatagcctgggaaacccaacccacatcctgagaatcggcgagagctataaggagaagcagcggaccatccaggccaagaaggaggtggagcagcggagagccggcggctacagccggaagtacgccagcaaagccaagaatctggcagacgatatggtgagaaacaccgctagagatctgctgtactacgccgtgacccaggatgccatgctgatcttcgccaacctgagccggggcttcggccggcagggcaagcggaccttcatggccgagagacagtacacacggatggaggactggctgaccgccaagctggcctacgagggcctgagcaagacctacctgtccaagacactggcccagtacacctccaagacatgcagcaactgtgggtttaccatcaccagcgccgactacgacagggtgctggagaagctgaagaagacagcaacaggctggatgaccacaattaacggcaaggagctgaaggtggagggccagattacctactacaacagatacaagagacagaacgtagtcaaggacctgtccgtcgagctggatagactgagcgaagaatctgtgaacaacgacatctcctcctggacaaagggcagaagcggagaagctctgagcctcctgaagaaaagattctcccatagacccgtgcaggagaagttcgtgtgcctgaactgcggcttcgagacacacgcagccgagcaagccgccctgaacatcgccagatcctggctgttcctgcggagccaggagtacaagaaataccagacaaacaagacaaccggcaacaccgataagagagccttcgtcgagacctggcagtccttttaccggaagaagcttaaggaggtgtggaaacctgccgtgcggtctggcggatctggcggaggctccaccagccccaagaaaaagagaaaagtctaagctgccttctgcggggcttgccttctggccatgcccttcttctctcccttgcacctgtacctcttggtctttgaataaagcctgagtaggaaggctagcaaaaaaaaaaaaaaaaaaaaaaaaaaaaaaaaaaaaaaaaaaaaaaaaaaaaaaaaaaaaaaaaaaaaaaaaaaaaaaaa

SEQ ID NO: 9259 - RNA, 8787 nt, synthetic construct
  source 1..8787: mol_type = other RNA
aggaaataagagagaaaagaagagtaagaagaaatataagagccaccatggcccctaagaagaagcgtaaagtgagccggatgaaccacgaccaggagttcgacccccctaaggtgtaccctcccgtccccgccgagaagagaaagcccatccgggtcctgagcctgttcgatggcatcgccaccggtctgctggtgctgaaggacctgggcatccaggtggataggtacattgcctccgaggtgtgcgaggactccatcaccgtgggaatggtgcgtcatcagggcaagatcatgtacgtgggcgacgtgcggagcgtgacacagaagcatatccaggagtggggccctttcgacctggtgatcggcggcagcccttgcaatgacctgagcatcgtgaacccagcccggaagggcctgtacgagggaaccggcagactgttcttcgagttttacagactgctgcacgacgcccggcctaaggaaggcgacgaccggcccttcttttggctgttcgagaatgtggtggccatgggagtcagcgacaagcgggatattagccggttcctggagagcaaccccgtgatgatcgatgccaaggaagtgagcgccgcccaccgggccagatacttctggggcaatctgcctggcatgaacagacccctggccagcaccgtgaacgacaagctggagctgcaggagtgcctggagcacggccggatcgccaagttcagcaaggtgagaaccatcaccacccgaagcaacagcatcaaacaaggcaaggaccagcactttcctgtgttcatgaacgagaaggaggacatcctgtggtgtaccgagatggagagagtgttcgggttcccagtccactacacagatgtcagcaacatgtctagactggccagacagagactgctgggaagaagctggtccgtccctgtgatcagacacctgttcgcccctctgaaggagtacttcgcctgcgtgagcagcggcaacagcaacgccaacagccggggccccagcttctctagcggcctggtgccactgtccctgagagggagccacatgggccccatggagatctacaaaaccgtgagcgcctggaagcggcagcctgtgcgcgtgctgagcctgtttcggaatatcgataaagtcctgaaaagcctgggattcctggagagcggctctggctccggcggtggcaccctgaagtacgtggaggatgtgacaaacgtggtcagacgggatgtggagaagtggggccccttcgatctggtgtacggcagcacccaacccctgggcagctcttgtgaccggtgccctggctggtacatgtttcagttccaccggatcctgcagtacgccctgccgagacaggagtcccagcggccattcttttggattttcatggacaacttgctgctgaccgaggatgaccaggaaactaccactcggttcctgcagaccgaagccgtgaccctgcaggacgtgagaggccgggactaccagaacgccatgcgggtgtggtccaacatccctggactgaaaagcaagcacgcacctctgacccctaaagaagaggagtacctgcaggcccaggtgcggagcagaagcaagctggacgcccctaaggtggatctgctggtgaagaattgcctcctgcccctgagagagtacttcaagtatttcagccagaatagtctgcccctgggaggcagcggcggcggcgtggagcccgtgagcttcgaggaggtggccgtgtacttcagcgaggaggagtgggccctgctggaccccggccagagggccctgtactgggacgtgatgcaggagaactacgaggccgtgagctggctggtgaggggcaggggcgtgagcaaggcccacgtgatcagctgggtggagaggggcgaggagctgtggatccccgacaggcagggctgcgaggagggcgagagcatcagcgacatcggcggcccaagcagcggcgcccctcctcccagcggcggcaggcggcccaagcagcggcgcccctcctcccagcggcggcagcccagccggctccccaacctctaccgaggagggcacctctgagtccgccacccccgagagcggccctggcacctccaccgagcccagcgagggcagcgcacccggcagccctgccggcagccccacctccacagaggagggaaccagcaccgagcccagcgaaggcagcgccccaggcaccagcaccgagcctagtgagcaggagattaaacggatcaacaagatcagaagaagacttgtgaaagacagcaacaccaagaaggccggcaagacaggccccatgaaaaccctgctggttagagtgatgacacccgatctgagagagcggctggaaaacctgagaaagaagcctgaaaatatcccccagcccatcagcaatacatctagagccaacctgaataagctgctgaccgattacaccgaaatgaagaaggcgatcctgcatgtgtactgggaagagttccagaaggaccctgtgggcctgatgagccgggtggcccagcctgccagcaagaagatcgatcagaacaagctgaaacctgagatggacgagaagggcaacctgaccaccgccggctttgcctgctctcagtgtggccagcccctgttcgtgtacaagctggagcaggtgtctgagaagggcaaggcttacaccaactacttcggacggtgcaatgtggccgagcacgaaaagctgatcctgctggcccagctgaagcccgagaaggatagcgacgaagccgtgacatatagcctgggaaagtttgggcagagggccctggatttctacagcattcatgtgaccaaggagtccacccaccccgtgaagcccctggcccagatcgccggaaacagatacgcctccggacctgtgggaaaggccctgagcgacgcatgtatgggcacaatcgcctccttcctgtctaagtaccaggacatcatcatcgaacaccagaaggtggtgaagggcaaccagaagagactggagagcctgcgggagctggccggcaaggaaaacctggaataccctagcgtgaccctgccacctcagcctcacaccaaggagggcgttgatgcctacaacgaagtgatcgcccgggtgcgaatgtgggtgaacctgaacctgtggcagaagctgaagctaagcagagatgatgccaagcctctgctgagactgaagggattcccttcctttcctctggtcgagagacaggccaacgaagtggactggtgggacatggtgtgtaacgtgaagaagctgatcaacgagaaaaaggaggatggcaaggtgttttggcagaatctggctggctacaagagacaggaagccctgagaccatacctgagcagcgaggaagatcggaagaagggaaagaaattcgctcggtaccagctgggcgacctgctgctgcacctggaaaagaagcacggcgaggactggggaaaggtgtacgacgaggcctgggagcggattgacaagaaagtggaaggcctgagcaagcacatcaagctggaagaggaacggagaagcgaggacgcccagagcaaggccgccctgaccgactggctgcgggctaaggccagcttcgtgatcgagggcctgaaggaggccgacaaggacgagttctgcagatgcgagctgaagctgcagaagtggtacggggacctgcggggaaagcccttcgccatcgaagccgagaacagcatcctggacatcagcggcttcagcaagcagtacaactgtgccttcatctggcagaaggacggcgtgaagaagctgaacctgtacctgatcatcaactacttcaagggcggcaagctgcggttcaagaagatcaaacctgaagccttcgaagccaacagattctacaccgtgatcaacaaaaagagcggcgagatcgtgcccatggaggtgaacttcaacttcgacgaccccaacctgatcatcctgcctctggcctttggcaagagacagggcagagaattcatctggaacgacctgctgtccctggaaaccggcagcctgaagctggccaacggaagagtgatcgagaagacactgtacaacagaagaacccggcaggatgagcctgccctgttcgtggccctgaccttcgagcggcgggaggtcctggactcctccaatatcaaaccaatgaacctgatcggcgtggcaagaggcgaaaacatccccgccgtgatcgccctgaccgaccccgagggctgcccactgagccggtttaaggatagcctgggaaacccaacccacatcctgagaatcggcgagagctataaggagaagcagcggaccatccaggccaagaaggaggtggagcagcggagagccggcggctacagccggaagtacgccagcaaagccaagaatctggcagacgatatggtgagaaacaccgctagagatctgctgtactacgccgtgacccaggatgccatgctgatcttcgccaacctgagccggggcttcggccggcagggcaagcggaccttcatggccgagagacagtacacacggatggaggactggctgaccgccaagctggcctacgagggcctgagcaagacctacctgtccaagacactggcccagtacacctccaagacatgcagcaactgtgggtttaccatcaccagcgccgactacgacagggtgctggagaagctgaagaagacagcaacaggctggatgaccacaattaacggcaaggagctgaaggtggagggccagattacctactacaacagatacaagagacagaacgtagtcaaggacctgtccgtcgagctggatagactgagcgaagaatctgtgaacaacgacatctcctcctggacaaagggcagaagcggagaagctctgagcctcctgaagaaaagattctcccatagacccgtgcaggagaagttcgtgtgcctgaactgcggcttcgagacacacgcagccgagcaagccgccctgaacatcgccagatcctggctgttcctgcggagccaggagtacaagaaataccagacaaacaagacaaccggcaacaccgataagagagccttcgtcgagacctggcagtccttttaccggaagaagcttaaggaggtgtggaaacctgccgtgcggtctggcggatctggcggaggctccaccagccccaagaaaaagagaaaagtctaagctgccttctgcggggcttgccttctggccatgcccttcttctctcccttgcacctgtacctcttggtctttgaataaagcctgagtaggaaggctagcaaaaaaaaaaaaaaaaaaaaaaaaaaaaaaaaaaaaaaaaaaaaaaaaaaaaaaaaaaaaaaaaaaaaaaaaaaaaaaaagcccagccggctccccaacctctaccgaggagggcacctctgagtccgccacccccgagagcggccctggcacctccaccgagcccagcgagggcagcgcacccggcagccctgccggcagccccacctccacagaggagggaaccagcaccgagcccagcgaaggcagcgccccaggcaccagcaccgagcctagtgagcaggagattaaacggatcaacaagatcagaagaagacttgtgaaagacagcaacaccaagaaggccggcaagacaggccccatgaaaaccctgctggttagagtgatgacacccgatctgagagagcggctggaaaacctgagaaagaagcctgaaaatatcccccagcccatcagcaatacatctagagccaacctgaataagctgctgaccgattacaccgaaatgaagaaggcgatcctgcatgtgtactgggaagagttccagaaggaccctgtgggcctgatgagccgggtggcccagcctgccagcaagaagatcgatcagaacaagctgaaacctgagatggacgagaagggcaacctgaccaccgccggctttgcctgctctcagtgtggccagcccctgttcgtgtacaagctggagcaggtgtctgagaagggcaaggcttacaccaactacttcggacggtgcaatgtggccgagcacgaaaagctgatcctgctggcccagctgaagcccgagaaggatagcgacgaagccgtgacatatagcctgggaaagtttgggcagagggccctggatttctacagcattcatgtgaccaaggagtccacccaccccgtgaagcccctggcccagatcgccggaaacagatacgcctccggacctgtgggaaaggccctgagcgacgcatgtatgggcacaatcgcctccttcctgtctaagtaccaggacatcatcatcgaacaccagaaggtggtgaagggcaaccagaagagactggagagcctgcgggagctggccggcaaggaaaacctggaataccctagcgtgaccctgccacctcagcctcacaccaaggagggcgttgatgcctacaacgaagtgatcgcccgggtgcgaatgtgggtgaacctgaacctgtggcagaagctgaagctaagcagagatgatgccaagcctctgctgagactgaagggattcccttcctttcctctggtcgagagacaggccaacgaagtggactggtgggacatggtgtgtaacgtgaagaagctgatcaacgagaaaaaggaggatggcaaggtgttttggcagaatctggctggctacaagagacaggaagccctgagaccatacctgagcagcgaggaagatcggaagaagggaaagaaattcgctcggtaccagctgggcgacctgctgctgcacctggaaaagaagcacggcgaggactggggaaaggtgtacgacgaggcctgggagcggattgacaagaaagtggaaggcctgagcaagcacatcaagctggaagaggaacggagaagcgaggacgcccagagcaaggccgccctgaccgactggctgcgggctaaggccagcttcgtgatcgagggcctgaaggaggccgacaaggacgagttctgcagatgcgagctgaagctgcagaagtggtacggggacctgcggggaaagcccttcgccatcgaagccgagaacagcatcctggacatcagcggcttcagcaagcagtacaactgtgccttcatctggcagaaggacggcgtgaagaagctgaacctgtacctgatcatcaactacttcaagggcggcaagctgcggttcaagaagatcaaacctgaagccttcgaagccaacagattctacaccgtgatcaacaaaaagagcggcgagatcgtgcccatggaggtgaacttcaacttcgacgaccccaacctgatcatcctgcctctggcctttggcaagagacagggcagagaattcatctggaacgacctgctgtccctggaaaccggcagcctgaagctggccaacggaagagtgatcgagaagacactgtacaacagaagaacccggcaggatgagcctgccctgttcgtggccctgaccttcgagcggcgggaggtcctggactcctccaatatcaaaccaatgaacctgatcggcgtggcaagaggcgaaaacatccccgccgtgatcgccctgaccgaccccgagggctgcccactgagccggtttaaggatagcctgggaaacccaacccacatcctgagaatcggcgagagctataaggagaagcagcggaccatccaggccaagaaggaggtggagcagcggagagccggcggctacagccggaagtacgccagcaaagccaagaatctggcagacgatatggtgagaaacaccgctagagatctgctgtactacgccgtgacccaggatgccatgctgatcttcgccaacctgagccggggcttcggccggcagggcaagcggaccttcatggccgagagacagtacacacggatggaggactggctgaccgccaagctggcctacgagggcctgagcaagacctacctgtccaagacactggcccagtacacctccaagacatgcagcaactgtgggtttaccatcaccagcgccgactacgacagggtgctggagaagctgaagaagacagcaacaggctggatgaccacaattaacggcaaggagctgaaggtggagggccagattacctactacaacagatacaagagacagaacgtagtcaaggacctgtccgtcgagctggatagactgagcgaagaatctgtgaacaacgacatctcctcctggacaaagggcagaagcggagaagctctgagcctcctgaagaaaagattctcccatagacccgtgcaggagaagttcgtgtgcctgaactgcggcttcgagacacacgcagccgagcaagccgccctgaacatcgccagatcctggctgttcctgcggagccaggagtacaagaaataccagacaaacaagacaaccggcaacaccgataagagagccttcgtcgagacctggcagtccttttaccggaagaagcttaaggaggtgtggaaacctgccgtgcggtctggcggatctggcggaggctccaccagccccaagaaaaagagaaaagtctaagctgccttctgcggggcttgccttctggccatgcccttcttctctcccttgcacctgtacctcttggtctttgaataaagcctgagtaggaaggctagcaaaaaaaaaaaaaaaaaaaaaaaaaaaaaaaaaaaaaaaaaaaaaaaaaaaaaaaaaaaaaaaaaaaaaaaaaaaaaaaa

SEQ ID NO: 9260 - RNA, 8787 nt, synthetic construct
  source 1..8787: mol_type = other RNA
aggaaataagagagaaaagaagagtaagaagaaatataagagccaccatggcccctaagaagaagcgtaaagtgagccggatgaaccacgaccaggagttcgacccccctaaggtgtaccctcccgtccccgccgagaagagaaagcccatccgggtcctgagcctgttcgatggcatcgccaccggtctgctggtgctgaaggacctgggcatccaggtggataggtacattgcctccgaggtgtgcgaggactccatcaccgtgggaatggtgcgtcatcagggcaagatcatgtacgtgggcgacgtgcggagcgtgacacagaagcatatccaggagtggggccctttcgacctggtgatcggcggcagcccttgcaatgacctgagcatcgtgaacccagcccggaagggcctgtacgagggaaccggcagactgttcttcgagttttacagactgctgcacgacgcccggcctaaggaaggcgacgaccggcccttcttttggctgttcgagaatgtggtggccatgggagtcagcgacaagcgggatattagccggttcctggagagcaaccccgtgatgatcgatgccaaggaagtgagcgccgcccaccgggccagatacttctggggcaatctgcctggcatgaacagacccctggccagcaccgtgaacgacaagctggagctgcaggagtgcctggagcacggccggatcgccaagttcagcaaggtgagaaccatcaccacccgaagcaacagcatcaaacaaggcaaggaccagcactttcctgtgttcatgaacgagaaggaggacatcctgtggtgtaccgagatggagagagtgttcgggttcccagtccactacacagatgtcagcaacatgtctagactggccagacagagactgctgggaagaagctggtccgtccctgtgatcagacacctgttcgcccctctgaaggagtacttcgcctgcgtgagcagcggcaacagcaacgccaacagccggggccccagcttctctagcggcctggtgccactgtccctgagagggagccacatgggccccatggagatctacaaaaccgtgagcgcctggaagcggcagcctgtgcgcgtgctgagcctgtttcggaatatcgataaagtcctgaaaagcctgggattcctggagagcggctctggctccggcggtggcaccctgaagtacgtggaggatgtgacaaacgtggtcagacgggatgtggagaagtggggccccttcgatctggtgtacggcagcacccaacccctgggcagctcttgtgaccggtgccctggctggtacatgtttcagttccaccggatcctgcagtacgccctgccgagacaggagtcccagcggccattcttttggattttcatggacaacttgctgctgaccgaggatgaccaggaaactaccactcggttcctgcagaccgaagccgtgaccctgcaggacgtgagaggccgggactaccagaacgccatgcgggtgtggtccaacatccctggactgaaaagcaagcacgcacctctgacccctaaagaagaggagtacctgcaggcccaggtgcggagcagaagcaagctggacgcccctaaggtggatctgctggtgaagaattgcctcctgcccctgagagagtacttcaagtatttcagccagaatagtctgcccctgggaggcagcggcggcggcggcagcgtgagcttcgacgaggtgagcgtgaggttcagcaacgaggagtgggccctgctggaccccggccagagggccctgtacgaggaggtgatggaggagatcagggagatgatgaccagcgtgggcgacgtgagcgagttcctgaccgagggcgagcagagcgagctgagcagggagggcgccgaggagcagaaggagcagaggaagcagagggtgcaggtgggcacctacaggaacgagggcggcccaagcagcggcgcccctcctcccagcggcggcaggcggcccaagcagcggcgcccctcctcccagcggcggcagcccagccggctccccaacctctaccgaggagggcacctctgagtccgccacccccgagagcggccctggcacctccaccgagcccagcgagggcagcgcacccggcagccctgccggcagccccacctccacagaggagggaaccagcaccgagcccagcgaaggcagcgccccaggcaccagcaccgagcctagtgagcaggagattaaacggatcaacaagatcagaagaagacttgtgaaagacagcaacaccaagaaggccggcaagacaggccccatgaaaaccctgctggttagagtgatgacacccgatctgagagagcggctggaaaacctgagaaagaagcctgaaaatatcccccagcccatcagcaatacatctagagccaacctgaataagctgctgaccgattacaccgaaatgaagaaggcgatcctgcatgtgtactgggaagagttccagaaggaccctgtgggcctgatgagccgggtggcccagcctgccagcaagaagatcgatcagaacaagctgaaacctgagatggacgagaagggcaacctgaccaccgccggctttgcctgctctcagtgtggccagcccctgttcgtgtacaagctggagcaggtgtctgagaagggcaaggcttacaccaactacttcggacggtgcaatgtggccgagcacgaaaagctgatcctgctggcccagctgaagcccgagaaggatagcgacgaagccgtgacatatagcctgggaaagtttgggcagagggccctggatttctacagcattcatgtgaccaaggagtccacccaccccgtgaagcccctggcccagatcgccggaaacagatacgcctccggacctgtgggaaaggccctgagcgacgcatgtatgggcacaatcgcctccttcctgtctaagtaccaggacatcatcatcgaacaccagaaggtggtgaagggcaaccagaagagactggagagcctgcgggagctggccggcaaggaaaacctggaataccctagcgtgaccctgccacctcagcctcacaccaaggagggcgttgatgcctacaacgaagtgatcgcccgggtgcgaatgtgggtgaacctgaacctgtggcagaagctgaagctaagcagagatgatgccaagcctctgctgagactgaagggattcccttcctttcctctggtcgagagacaggccaacgaagtggactggtgggacatggtgtgtaacgtgaagaagctgatcaacgagaaaaaggaggatggcaaggtgttttggcagaatctggctggctacaagagacaggaagccctgagaccatacctgagcagcgaggaagatcggaagaagggaaagaaattcgctcggtaccagctgggcgacctgctgctgcacctggaaaagaagcacggcgaggactggggaaaggtgtacgacgaggcctgggagcggattgacaagaaagtggaaggcctgagcaagcacatcaagctggaagaggaacggagaagcgaggacgcccagagcaaggccgccctgaccgactggctgcgggctaaggccagcttcgtgatcgagggcctgaaggaggccgacaaggacgagttctgcagatgcgagctgaagctgcagaagtggtacggggacctgcggggaaagcccttcgccatcgaagccgagaacagcatcctggacatcagcggcttcagcaagcagtacaactgtgccttcatctggcagaaggacggcgtgaagaagctgaacctgtacctgatcatcaactacttcaagggcggcaagctgcggttcaagaagatcaaacctgaagccttcgaagccaacagattctacaccgtgatcaacaaaaagagcggcgagatcgtgcccatggaggtgaacttcaacttcgacgaccccaacctgatcatcctgcctctggcctttggcaagagacagggcagagaattcatctggaacgacctgctgtccctggaaaccggcagcctgaagctggccaacggaagagtgatcgagaagacactgtacaacagaagaacccggcaggatgagcctgccctgttcgtggccctgaccttcgagcggcgggaggtcctggactcctccaatatcaaaccaatgaacctgatcggcgtggcaagaggcgaaaacatccccgccgtgatcgccctgaccgaccccgagggctgcccactgagccggtttaaggatagcctgggaaacccaacccacatcctgagaatcggcgagagctataaggagaagcagcggaccatccaggccaagaaggaggtggagcagcggagagccggcggctacagccggaagtacgccagcaaagccaagaatctggcagacgatatggtgagaaacaccgctagagatctgctgtactacgccgtgacccaggatgccatgctgatcttcgccaacctgagccggggcttcggccggcagggcaagcggaccttcatggccgagagacagtacacacggatggaggactggctgaccgccaagctggcctacgagggcctgagcaagacctacctgtccaagacactggcccagtacacctccaagacatgcagcaactgtgggtttaccatcaccagcgccgactacgacagggtgctggagaagctgaagaagacagcaacaggctggatgaccacaattaacggcaaggagctgaaggtggagggccagattacctactacaacagatacaagagacagaacgtagtcaaggacctgtccgtcgagctggatagactgagcgaagaatctgtgaacaacgacatctcctcctggacaaagggcagaagcggagaagctctgagcctcctgaagaaaagattctcccatagacccgtgcaggagaagttcgtgtgcctgaactgcggcttcgagacacacgcagccgagcaagccgccctgaacatcgccagatcctggctgttcctgcggagccaggagtacaagaaataccagacaaacaagacaaccggcaacaccgataagagagccttcgtcgagacctggcagtccttttaccggaagaagcttaaggaggtgtggaaacctgccgtgcggtctggcggatctggcggaggctccaccagccccaagaaaaagagaaaagtctaagctgccttctgcggggcttgccttctggccatgcccttcttctctcccttgcacctgtacctcttggtctttgaataaagcctgagtaggaaggctagcaaaaaaaaaaaaaaaaaaaaaaaaaaaaaaaaaaaaaaaaaaaaaaaaaaaaaaaaaaaaaaaaaaaaaaaaaaaaaaaagcccagccggctccccaacctctaccgaggagggcacctctgagtccgccacccccgagagcggccctggcacctccaccgagcccagcgagggcagcgcacccggcagccctgccggcagccccacctccacagaggagggaaccagcaccgagcccagcgaaggcagcgccccaggcaccagcaccgagcctagtgagcaggagattaaacggatcaacaagatcagaagaagacttgtgaaagacagcaacaccaagaaggccggcaagacaggccccatgaaaaccctgctggttagagtgatgacacccgatctgagagagcggctggaaaacctgagaaagaagcctgaaaatatcccccagcccatcagcaatacatctagagccaacctgaataagctgctgaccgattacaccgaaatgaagaaggcgatcctgcatgtgtactgggaagagttccagaaggaccctgtgggcctgatgagccgggtggcccagcctgccagcaagaagatcgatcagaacaagctgaaacctgagatggacgagaagggcaacctgaccaccgccggctttgcctgctctcagtgtggccagcccctgttcgtgtacaagctggagcaggtgtctgagaagggcaaggcttacaccaactacttcggacggtgcaatgtggccgagcacgaaaagctgatcctgctggcccagctgaagcccgagaaggatagcgacgaagccgtgacatatagcctgggaaagtttgggcagagggccctggatttctacagcattcatgtgaccaaggagtccacccaccccgtgaagcccctggcccagatcgccggaaacagatacgcctccggacctgtgggaaaggccctgagcgacgcatgtatgggcacaatcgcctccttcctgtctaagtaccaggacatcatcatcgaacaccagaaggtggtgaagggcaaccagaagagactggagagcctgcgggagctggccggcaaggaaaacctggaataccctagcgtgaccctgccacctcagcctcacaccaaggagggcgttgatgcctacaacgaagtgatcgcccgggtgcgaatgtgggtgaacctgaacctgtggcagaagctgaagctaagcagagatgatgccaagcctctgctgagactgaagggattcccttcctttcctctggtcgagagacaggccaacgaagtggactggtgggacatggtgtgtaacgtgaagaagctgatcaacgagaaaaaggaggatggcaaggtgttttggcagaatctggctggctacaagagacaggaagccctgagaccatacctgagcagcgaggaagatcggaagaagggaaagaaattcgctcggtaccagctgggcgacctgctgctgcacctggaaaagaagcacggcgaggactggggaaaggtgtacgacgaggcctgggagcggattgacaagaaagtggaaggcctgagcaagcacatcaagctggaagaggaacggagaagcgaggacgcccagagcaaggccgccctgaccgactggctgcgggctaaggccagcttcgtgatcgagggcctgaaggaggccgacaaggacgagttctgcagatgcgagctgaagctgcagaagtggtacggggacctgcggggaaagcccttcgccatcgaagccgagaacagcatcctggacatcagcggcttcagcaagcagtacaactgtgccttcatctggcagaaggacggcgtgaagaagctgaacctgtacctgatcatcaactacttcaagggcggcaagctgcggttcaagaagatcaaacctgaagccttcgaagccaacagattctacaccgtgatcaacaaaaagagcggcgagatcgtgcccatggaggtgaacttcaacttcgacgaccccaacctgatcatcctgcctctggcctttggcaagagacagggcagagaattcatctggaacgacctgctgtccctggaaaccggcagcctgaagctggccaacggaagagtgatcgagaagacactgtacaacagaagaacccggcaggatgagcctgccctgttcgtggccctgaccttcgagcggcgggaggtcctggactcctccaatatcaaaccaatgaacctgatcggcgtggcaagaggcgaaaacatccccgccgtgatcgccctgaccgaccccgagggctgcccactgagccggtttaaggatagcctgggaaacccaacccacatcctgagaatcggcgagagctataaggagaagcagcggaccatccaggccaagaaggaggtggagcagcggagagccggcggctacagccggaagtacgccagcaaagccaagaatctggcagacgatatggtgagaaacaccgctagagatctgctgtactacgccgtgacccaggatgccatgctgatcttcgccaacctgagccggggcttcggccggcagggcaagcggaccttcatggccgagagacagtacacacggatggaggactggctgaccgccaagctggcctacgagggcctgagcaagacctacctgtccaagacactggcccagtacacctccaagacatgcagcaactgtgggtttaccatcaccagcgccgactacgacagggtgctggagaagctgaagaagacagcaacaggctggatgaccacaattaacggcaaggagctgaaggtggagggccagattacctactacaacagatacaagagacagaacgtagtcaaggacctgtccgtcgagctggatagactgagcgaagaatctgtgaacaacgacatctcctcctggacaaagggcagaagcggagaagctctgagcctcctgaagaaaagattctcccatagacccgtgcaggagaagttcgtgtgcctgaactgcggcttcgagacacacgcagccgagcaagccgccctgaacatcgccagatcctggctgttcctgcggagccaggagtacaagaaataccagacaaacaagacaaccggcaacaccgataagagagccttcgtcgagacctggcagtccttttaccggaagaagcttaaggaggtgtggaaacctgccgtgcggtctggcggatctggcggaggctccaccagccccaagaaaaagagaaaagtctaagctgccttctgcggggcttgccttctggccatgcccttcttctctcccttgcacctgtacctcttggtctttgaataaagcctgagtaggaaggctagcaaaaaaaaaaaaaaaaaaaaaaaaaaaaaaaaaaaaaaaaaaaaaaaaaaaaaaaaaaaaaaaaaaaaaaaaaaaaaaaa

SEQ ID NO: 9261 - RNA, 8823 nt, synthetic construct
  source 1..8823: mol_type = other RNA
aggaaataagagagaaaagaagagtaagaagaaatataagagccaccatggcccctaagaagaagcgtaaagtgagccggatgaaccacgaccaggagttcgacccccctaaggtgtaccctcccgtccccgccgagaagagaaagcccatccgggtcctgagcctgttcgatggcatcgccaccggtctgctggtgctgaaggacctgggcatccaggtggataggtacattgcctccgaggtgtgcgaggactccatcaccgtgggaatggtgcgtcatcagggcaagatcatgtacgtgggcgacgtgcggagcgtgacacagaagcatatccaggagtggggccctttcgacctggtgatcggcggcagcccttgcaatgacctgagcatcgtgaacccagcccggaagggcctgtacgagggaaccggcagactgttcttcgagttttacagactgctgcacgacgcccggcctaaggaaggcgacgaccggcccttcttttggctgttcgagaatgtggtggccatgggagtcagcgacaagcgggatattagccggttcctggagagcaaccccgtgatgatcgatgccaaggaagtgagcgccgcccaccgggccagatacttctggggcaatctgcctggcatgaacagacccctggccagcaccgtgaacgacaagctggagctgcaggagtgcctggagcacggccggatcgccaagttcagcaaggtgagaaccatcaccacccgaagcaacagcatcaaacaaggcaaggaccagcactttcctgtgttcatgaacgagaaggaggacatcctgtggtgtaccgagatggagagagtgttcgggttcccagtccactacacagatgtcagcaacatgtctagactggccagacagagactgctgggaagaagctggtccgtccctgtgatcagacacctgttcgcccctctgaaggagtacttcgcctgcgtgagcagcggcaacagcaacgccaacagccggggccccagcttctctagcggcctggtgccactgtccctgagagggagccacatgggccccatggagatctacaaaaccgtgagcgcctggaagcggcagcctgtgcgcgtgctgagcctgtttcggaatatcgataaagtcctgaaaagcctgggattcctggagagcggctctggctccggcggtggcaccctgaagtacgtggaggatgtgacaaacgtggtcagacgggatgtggagaagtggggccccttcgatctggtgtacggcagcacccaacccctgggcagctcttgtgaccggtgccctggctggtacatgtttcagttccaccggatcctgcagtacgccctgccgagacaggagtcccagcggccattcttttggattttcatggacaacttgctgctgaccgaggatgaccaggaaactaccactcggttcctgcagaccgaagccgtgaccctgcaggacgtgagaggccgggactaccagaacgccatgcgggtgtggtccaacatccctggactgaaaagcaagcacgcacctctgacccctaaagaagaggagtacctgcaggcccaggtgcggagcagaagcaagctggacgcccctaaggtggatctgctggtgaagaattgcctcctgcccctgagagagtacttcaagtatttcagccagaatagtctgcccctgggaggcagcggcggcggcgtgacctacgaggacgtgcacgtgaacttcacccaggaggagtgggccctgctggaccccagccagaagaagctgtacaaggacgtgatgctggagacctacaggaacctgaacgccatcggcttcagctgggaggcccagaacatcgaggagcactgccagagcttcggcaggcacaggaggtgcgagaggagccagagggccgagaagcccagcgagtacacccagcccgacaagggcttcgccctgagggcccacagccacgcccagaggcacgagggcggcccaagcagcggcgcccctcctcccagcggcggcaggcggcccaagcagcggcgcccctcctcccagcggcggcagcccagccggctccccaacctctaccgaggagggcacctctgagtccgccacccccgagagcggccctggcacctccaccgagcccagcgagggcagcgcacccggcagccctgccggcagccccacctccacagaggagggaaccagcaccgagcccagcgaaggcagcgccccaggcaccagcaccgagcctagtgagcaggagattaaacggatcaacaagatcagaagaagacttgtgaaagacagcaacaccaagaaggccggcaagacaggccccatgaaaaccctgctggttagagtgatgacacccgatctgagagagcggctggaaaacctgagaaagaagcctgaaaatatcccccagcccatcagcaatacatctagagccaacctgaataagctgctgaccgattacaccgaaatgaagaaggcgatcctgcatgtgtactgggaagagttccagaaggaccctgtgggcctgatgagccgggtggcccagcctgccagcaagaagatcgatcagaacaagctgaaacctgagatggacgagaagggcaacctgaccaccgccggctttgcctgctctcagtgtggccagcccctgttcgtgtacaagctggagcaggtgtctgagaagggcaaggcttacaccaactacttcggacggtgcaatgtggccgagcacgaaaagctgatcctgctggcccagctgaagcccgagaaggatagcgacgaagccgtgacatatagcctgggaaagtttgggcagagggccctggatttctacagcattcatgtgaccaaggagtccacccaccccgtgaagcccctggcccagatcgccggaaacagatacgcctccggacctgtgggaaaggccctgagcgacgcatgtatgggcacaatcgcctccttcctgtctaagtaccaggacatcatcatcgaacaccagaaggtggtgaagggcaaccagaagagactggagagcctgcgggagctggccggcaaggaaaacctggaataccctagcgtgaccctgccacctcagcctcacaccaaggagggcgttgatgcctacaacgaagtgatcgcccgggtgcgaatgtgggtgaacctgaacctgtggcagaagctgaagctaagcagagatgatgccaagcctctgctgagactgaagggattcccttcctttcctctggtcgagagacaggccaacgaagtggactggtgggacatggtgtgtaacgtgaagaagctgatcaacgagaaaaaggaggatggcaaggtgttttggcagaatctggctggctacaagagacaggaagccctgagaccatacctgagcagcgaggaagatcggaagaagggaaagaaattcgctcggtaccagctgggcgacctgctgctgcacctggaaaagaagcacggcgaggactggggaaaggtgtacgacgaggcctgggagcggattgacaagaaagtggaaggcctgagcaagcacatcaagctggaagaggaacggagaagcgaggacgcccagagcaaggccgccctgaccgactggctgcgggctaaggccagcttcgtgatcgagggcctgaaggaggccgacaaggacgagttctgcagatgcgagctgaagctgcagaagtggtacggggacctgcggggaaagcccttcgccatcgaagccgagaacagcatcctggacatcagcggcttcagcaagcagtacaactgtgccttcatctggcagaaggacggcgtgaagaagctgaacctgtacctgatcatcaactacttcaagggcggcaagctgcggttcaagaagatcaaacctgaagccttcgaagccaacagattctacaccgtgatcaacaaaaagagcggcgagatcgtgcccatggaggtgaacttcaacttcgacgaccccaacctgatcatcctgcctctggcctttggcaagagacagggcagagaattcatctggaacgacctgctgtccctggaaaccggcagcctgaagctggccaacggaagagtgatcgagaagacactgtacaacagaagaacccggcaggatgagcctgccctgttcgtggccctgaccttcgagcggcgggaggtcctggactcctccaatatcaaaccaatgaacctgatcggcgtggcaagaggcgaaaacatccccgccgtgatcgccctgaccgaccccgagggctgcccactgagccggtttaaggatagcctgggaaacccaacccacatcctgagaatcggcgagagctataaggagaagcagcggaccatccaggccaagaaggaggtggagcagcggagagccggcggctacagccggaagtacgccagcaaagccaagaatctggcagacgatatggtgagaaacaccgctagagatctgctgtactacgccgtgacccaggatgccatgctgatcttcgccaacctgagccggggcttcggccggcagggcaagcggaccttcatggccgagagacagtacacacggatggaggactggctgaccgccaagctggcctacgagggcctgagcaagacctacctgtccaagacactggcccagtacacctccaagacatgcagcaactgtgggtttaccatcaccagcgccgactacgacagggtgctggagaagctgaagaagacagcaacaggctggatgaccacaattaacggcaaggagctgaaggtggagggccagattacctactacaacagatacaagagacagaacgtagtcaaggacctgtccgtcgagctggatagactgagcgaagaatctgtgaacaacgacatctcctcctggacaaagggcagaagcggagaagctctgagcctcctgaagaaaagattctcccatagacccgtgcaggagaagttcgtgtgcctgaactgcggcttcgagacacacgcagccgagcaagccgccctgaacatcgccagatcctggctgttcctgcggagccaggagtacaagaaataccagacaaacaagacaaccggcaacaccgataagagagccttcgtcgagacctggcagtccttttaccggaagaagcttaaggaggtgtggaaacctgccgtgcggtctggcggatctggcggaggctccaccagccccaagaaaaagagaaaagtctaagctgccttctgcggggcttgccttctggccatgcccttcttctctcccttgcacctgtacctcttggtctttgaataaagcctgagtaggaaggctagcaaaaaaaaaaaaaaaaaaaaaaaaaaaaaaaaaaaaaaaaaaaaaaaaaaaaaaaaaaaaaaaaaaaaaaaaaaaaaaaagcccagccggctccccaacctctaccgaggagggcacctctgagtccgccacccccgagagcggccctggcacctccaccgagcccagcgagggcagcgcacccggcagccctgccggcagccccacctccacagaggagggaaccagcaccgagcccagcgaaggcagcgccccaggcaccagcaccgagcctagtgagcaggagattaaacggatcaacaagatcagaagaagacttgtgaaagacagcaacaccaagaaggccggcaagacaggccccatgaaaaccctgctggttagagtgatgacacccgatctgagagagcggctggaaaacctgagaaagaagcctgaaaatatcccccagcccatcagcaatacatctagagccaacctgaataagctgctgaccgattacaccgaaatgaagaaggcgatcctgcatgtgtactgggaagagttccagaaggaccctgtgggcctgatgagccgggtggcccagcctgccagcaagaagatcgatcagaacaagctgaaacctgagatggacgagaagggcaacctgaccaccgccggctttgcctgctctcagtgtggccagcccctgttcgtgtacaagctggagcaggtgtctgagaagggcaaggcttacaccaactacttcggacggtgcaatgtggccgagcacgaaaagctgatcctgctggcccagctgaagcccgagaaggatagcgacgaagccgtgacatatagcctgggaaagtttgggcagagggccctggatttctacagcattcatgtgaccaaggagtccacccaccccgtgaagcccctggcccagatcgccggaaacagatacgcctccggacctgtgggaaaggccctgagcgacgcatgtatgggcacaatcgcctccttcctgtctaagtaccaggacatcatcatcgaacaccagaaggtggtgaagggcaaccagaagagactggagagcctgcgggagctggccggcaaggaaaacctggaataccctagcgtgaccctgccacctcagcctcacaccaaggagggcgttgatgcctacaacgaagtgatcgcccgggtgcgaatgtgggtgaacctgaacctgtggcagaagctgaagctaagcagagatgatgccaagcctctgctgagactgaagggattcccttcctttcctctggtcgagagacaggccaacgaagtggactggtgggacatggtgtgtaacgtgaagaagctgatcaacgagaaaaaggaggatggcaaggtgttttggcagaatctggctggctacaagagacaggaagccctgagaccatacctgagcagcgaggaagatcggaagaagggaaagaaattcgctcggtaccagctgggcgacctgctgctgcacctggaaaagaagcacggcgaggactggggaaaggtgtacgacgaggcctgggagcggattgacaagaaagtggaaggcctgagcaagcacatcaagctggaagaggaacggagaagcgaggacgcccagagcaaggccgccctgaccgactggctgcgggctaaggccagcttcgtgatcgagggcctgaaggaggccgacaaggacgagttctgcagatgcgagctgaagctgcagaagtggtacggggacctgcggggaaagcccttcgccatcgaagccgagaacagcatcctggacatcagcggcttcagcaagcagtacaactgtgccttcatctggcagaaggacggcgtgaagaagctgaacctgtacctgatcatcaactacttcaagggcggcaagctgcggttcaagaagatcaaacctgaagccttcgaagccaacagattctacaccgtgatcaacaaaaagagcggcgagatcgtgcccatggaggtgaacttcaacttcgacgaccccaacctgatcatcctgcctctggcctttggcaagagacagggcagagaattcatctggaacgacctgctgtccctggaaaccggcagcctgaagctggccaacggaagagtgatcgagaagacactgtacaacagaagaacccggcaggatgagcctgccctgttcgtggccctgaccttcgagcggcgggaggtcctggactcctccaatatcaaaccaatgaacctgatcggcgtggcaagaggcgaaaacatccccgccgtgatcgccctgaccgaccccgagggctgcccactgagccggtttaaggatagcctgggaaacccaacccacatcctgagaatcggcgagagctataaggagaagcagcggaccatccaggccaagaaggaggtggagcagcggagagccggcggctacagccggaagtacgccagcaaagccaagaatctggcagacgatatggtgagaaacaccgctagagatctgctgtactacgccgtgacccaggatgccatgctgatcttcgccaacctgagccggggcttcggccggcagggcaagcggaccttcatggccgagagacagtacacacggatggaggactggctgaccgccaagctggcctacgagggcctgagcaagacctacctgtccaagacactggcccagtacacctccaagacatgcagcaactgtgggtttaccatcaccagcgccgactacgacagggtgctggagaagctgaagaagacagcaacaggctggatgaccacaattaacggcaaggagctgaaggtggagggccagattacctactacaacagatacaagagacagaacgtagtcaaggacctgtccgtcgagctggatagactgagcgaagaatctgtgaacaacgacatctcctcctggacaaagggcagaagcggagaagctctgagcctcctgaagaaaagattctcccatagacccgtgcaggagaagttcgtgtgcctgaactgcggcttcgagacacacgcagccgagcaagccgccctgaacatcgccagatcctggctgttcctgcggagccaggagtacaagaaataccagacaaacaagacaaccggcaacaccgataagagagccttcgtcgagacctggcagtccttttaccggaagaagcttaaggaggtgtggaaacctgccgtgcggtctggcggatctggcggaggctccaccagccccaagaaaaagagaaaagtctaagctgccttctgcggggcttgccttctggccatgcccttcttctctcccttgcacctgtacctcttggtctttgaataaagcctgagtaggaaggctagcaaaaaaaaaaaaaaaaaaaaaaaaaaaaaaaaaaaaaaaaaaaaaaaaaaaaaaaaaaaaaaaaaaaaaaaaaaaaaaaa

SEQ ID NO: 9262 - RNA, 8787 nt, synthetic construct
  source 1..8787: mol_type = other RNA
aggaaataagagagaaaagaagagtaagaagaaatataagagccaccatggcccctaagaagaagcgtaaagtgagccggatgaaccacgaccaggagttcgacccccctaaggtgtaccctcccgtccccgccgagaagagaaagcccatccgggtcctgagcctgttcgatggcatcgccaccggtctgctggtgctgaaggacctgggcatccaggtggataggtacattgcctccgaggtgtgcgaggactccatcaccgtgggaatggtgcgtcatcagggcaagatcatgtacgtgggcgacgtgcggagcgtgacacagaagcatatccaggagtggggccctttcgacctggtgatcggcggcagcccttgcaatgacctgagcatcgtgaacccagcccggaagggcctgtacgagggaaccggcagactgttcttcgagttttacagactgctgcacgacgcccggcctaaggaaggcgacgaccggcccttcttttggctgttcgagaatgtggtggccatgggagtcagcgacaagcgggatattagccggttcctggagagcaaccccgtgatgatcgatgccaaggaagtgagcgccgcccaccgggccagatacttctggggcaatctgcctggcatgaacagacccctggccagcaccgtgaacgacaagctggagctgcaggagtgcctggagcacggccggatcgccaagttcagcaaggtgagaaccatcaccacccgaagcaacagcatcaaacaaggcaaggaccagcactttcctgtgttcatgaacgagaaggaggacatcctgtggtgtaccgagatggagagagtgttcgggttcccagtccactacacagatgtcagcaacatgtctagactggccagacagagactgctgggaagaagctggtccgtccctgtgatcagacacctgttcgcccctctgaaggagtacttcgcctgcgtgagcagcggcaacagcaacgccaacagccggggccccagcttctctagcggcctggtgccactgtccctgagagggagccacatgggccccatggagatctacaaaaccgtgagcgcctggaagcggcagcctgtgcgcgtgctgagcctgtttcggaatatcgataaagtcctgaaaagcctgggattcctggagagcggctctggctccggcggtggcaccctgaagtacgtggaggatgtgacaaacgtggtcagacgggatgtggagaagtggggccccttcgatctggtgtacggcagcacccaacccctgggcagctcttgtgaccggtgccctggctggtacatgtttcagttccaccggatcctgcagtacgccctgccgagacaggagtcccagcggccattcttttggattttcatggacaacttgctgctgaccgaggatgaccaggaaactaccactcggttcctgcagaccgaagccgtgaccctgcaggacgtgagaggccgggactaccagaacgccatgcgggtgtggtccaacatccctggactgaaaagcaagcacgcacctctgacccctaaagaagaggagtacctgcaggcccaggtgcggagcagaagcaagctggacgcccctaaggtggatctgctggtgaagaattgcctcctgcccctgagagagtacttcaagtatttcagccagaatagtctgcccctgggaggcagcggcggcggcatggccggcgaggccgaggcccagctggaccccagcctgcagggcctggtgatgttcgaggacgtgaccgtgtacttcagcagggaggagtggggcctgctgaacgtgacccagaagggcctgtacagggacgtgatgctggagaacttcgccctggtgagcagcctgggcctggcccccagcaggagccccgtgttcacccagctggaggacgacgagcagagctgggtgcccaactgggtgggcggcccaagcagcggcgcccctcctcccagcggcggcaggcggcccaagcagcggcgcccctcctcccagcggcggcagcccagccggctccccaacctctaccgaggagggcacctctgagtccgccacccccgagagcggccctggcacctccaccgagcccagcgagggcagcgcacccggcagccctgccggcagccccacctccacagaggagggaaccagcaccgagcccagcgaaggcagcgccccaggcaccagcaccgagcctagtgagcaggagattaaacggatcaacaagatcagaagaagacttgtgaaagacagcaacaccaagaaggccggcaagacaggccccatgaaaaccctgctggttagagtgatgacacccgatctgagagagcggctggaaaacctgagaaagaagcctgaaaatatcccccagcccatcagcaatacatctagagccaacctgaataagctgctgaccgattacaccgaaatgaagaaggcgatcctgcatgtgtactgggaagagttccagaaggaccctgtgggcctgatgagccgggtggcccagcctgccagcaagaagatcgatcagaacaagctgaaacctgagatggacgagaagggcaacctgaccaccgccggctttgcctgctctcagtgtggccagcccctgttcgtgtacaagctggagcaggtgtctgagaagggcaaggcttacaccaactacttcggacggtgcaatgtggccgagcacgaaaagctgatcctgctggcccagctgaagcccgagaaggatagcgacgaagccgtgacatatagcctgggaaagtttgggcagagggccctggatttctacagcattcatgtgaccaaggagtccacccaccccgtgaagcccctggcccagatcgccggaaacagatacgcctccggacctgtgggaaaggccctgagcgacgcatgtatgggcacaatcgcctccttcctgtctaagtaccaggacatcatcatcgaacaccagaaggtggtgaagggcaaccagaagagactggagagcctgcgggagctggccggcaaggaaaacctggaataccctagcgtgaccctgccacctcagcctcacaccaaggagggcgttgatgcctacaacgaagtgatcgcccgggtgcgaatgtgggtgaacctgaacctgtggcagaagctgaagctaagcagagatgatgccaagcctctgctgagactgaagggattcccttcctttcctctggtcgagagacaggccaacgaagtggactggtgggacatggtgtgtaacgtgaagaagctgatcaacgagaaaaaggaggatggcaaggtgttttggcagaatctggctggctacaagagacaggaagccctgagaccatacctgagcagcgaggaagatcggaagaagggaaagaaattcgctcggtaccagctgggcgacctgctgctgcacctggaaaagaagcacggcgaggactggggaaaggtgtacgacgaggcctgggagcggattgacaagaaagtggaaggcctgagcaagcacatcaagctggaagaggaacggagaagcgaggacgcccagagcaaggccgccctgaccgactggctgcgggctaaggccagcttcgtgatcgagggcctgaaggaggccgacaaggacgagttctgcagatgcgagctgaagctgcagaagtggtacggggacctgcggggaaagcccttcgccatcgaagccgagaacagcatcctggacatcagcggcttcagcaagcagtacaactgtgccttcatctggcagaaggacggcgtgaagaagctgaacctgtacctgatcatcaactacttcaagggcggcaagctgcggttcaagaagatcaaacctgaagccttcgaagccaacagattctacaccgtgatcaacaaaaagagcggcgagatcgtgcccatggaggtgaacttcaacttcgacgaccccaacctgatcatcctgcctctggcctttggcaagagacagggcagagaattcatctggaacgacctgctgtccctggaaaccggcagcctgaagctggccaacggaagagtgatcgagaagacactgtacaacagaagaacccggcaggatgagcctgccctgttcgtggccctgaccttcgagcggcgggaggtcctggactcctccaatatcaaaccaatgaacctgatcggcgtggcaagaggcgaaaacatccccgccgtgatcgccctgaccgaccccgagggctgcccactgagccggtttaaggatagcctgggaaacccaacccacatcctgagaatcggcgagagctataaggagaagcagcggaccatccaggccaagaaggaggtggagcagcggagagccggcggctacagccggaagtacgccagcaaagccaagaatctggcagacgatatggtgagaaacaccgctagagatctgctgtactacgccgtgacccaggatgccatgctgatcttcgccaacctgagccggggcttcggccggcagggcaagcggaccttcatggccgagagacagtacacacggatggaggactggctgaccgccaagctggcctacgagggcctgagcaagacctacctgtccaagacactggcccagtacacctccaagacatgcagcaactgtgggtttaccatcaccagcgccgactacgacagggtgctggagaagctgaagaagacagcaacaggctggatgaccacaattaacggcaaggagctgaaggtggagggccagattacctactacaacagatacaagagacagaacgtagtcaaggacctgtccgtcgagctggatagactgagcgaagaatctgtgaacaacgacatctcctcctggacaaagggcagaagcggagaagctctgagcctcctgaagaaaagattctcccatagacccgtgcaggagaagttcgtgtgcctgaactgcggcttcgagacacacgcagccgagcaagccgccctgaacatcgccagatcctggctgttcctgcggagccaggagtacaagaaataccagacaaacaagacaaccggcaacaccgataagagagccttcgtcgagacctggcagtccttttaccggaagaagcttaaggaggtgtggaaacctgccgtgcggtctggcggatctggcggaggctccaccagccccaagaaaaagagaaaagtctaagctgccttctgcggggcttgccttctggccatgcccttcttctctcccttgcacctgtacctcttggtctttgaataaagcctgagtaggaaggctagcaaaaaaaaaaaaaaaaaaaaaaaaaaaaaaaaaaaaaaaaaaaaaaaaaaaaaaaaaaaaaaaaaaaaaaaaaaaaaaaagcccagccggctccccaacctctaccgaggagggcacctctgagtccgccacccccgagagcggccctggcacctccaccgagcccagcgagggcagcgcacccggcagccctgccggcagccccacctccacagaggagggaaccagcaccgagcccagcgaaggcagcgccccaggcaccagcaccgagcctagtgagcaggagattaaacggatcaacaagatcagaagaagacttgtgaaagacagcaacaccaagaaggccggcaagacaggccccatgaaaaccctgctggttagagtgatgacacccgatctgagagagcggctggaaaacctgagaaagaagcctgaaaatatcccccagcccatcagcaatacatctagagccaacctgaataagctgctgaccgattacaccgaaatgaagaaggcgatcctgcatgtgtactgggaagagttccagaaggaccctgtgggcctgatgagccgggtggcccagcctgccagcaagaagatcgatcagaacaagctgaaacctgagatggacgagaagggcaacctgaccaccgccggctttgcctgctctcagtgtggccagcccctgttcgtgtacaagctggagcaggtgtctgagaagggcaaggcttacaccaactacttcggacggtgcaatgtggccgagcacgaaaagctgatcctgctggcccagctgaagcccgagaaggatagcgacgaagccgtgacatatagcctgggaaagtttgggcagagggccctggatttctacagcattcatgtgaccaaggagtccacccaccccgtgaagcccctggcccagatcgccggaaacagatacgcctccggacctgtgggaaaggccctgagcgacgcatgtatgggcacaatcgcctccttcctgtctaagtaccaggacatcatcatcgaacaccagaaggtggtgaagggcaaccagaagagactggagagcctgcgggagctggccggcaaggaaaacctggaataccctagcgtgaccctgccacctcagcctcacaccaaggagggcgttgatgcctacaacgaagtgatcgcccgggtgcgaatgtgggtgaacctgaacctgtggcagaagctgaagctaagcagagatgatgccaagcctctgctgagactgaagggattcccttcctttcctctggtcgagagacaggccaacgaagtggactggtgggacatggtgtgtaacgtgaagaagctgatcaacgagaaaaaggaggatggcaaggtgttttggcagaatctggctggctacaagagacaggaagccctgagaccatacctgagcagcgaggaagatcggaagaagggaaagaaattcgctcggtaccagctgggcgacctgctgctgcacctggaaaagaagcacggcgaggactggggaaaggtgtacgacgaggcctgggagcggattgacaagaaagtggaaggcctgagcaagcacatcaagctggaagaggaacggagaagcgaggacgcccagagcaaggccgccctgaccgactggctgcgggctaaggccagcttcgtgatcgagggcctgaaggaggccgacaaggacgagttctgcagatgcgagctgaagctgcagaagtggtacggggacctgcggggaaagcccttcgccatcgaagccgagaacagcatcctggacatcagcggcttcagcaagcagtacaactgtgccttcatctggcagaaggacggcgtgaagaagctgaacctgtacctgatcatcaactacttcaagggcggcaagctgcggttcaagaagatcaaacctgaagccttcgaagccaacagattctacaccgtgatcaacaaaaagagcggcgagatcgtgcccatggaggtgaacttcaacttcgacgaccccaacctgatcatcctgcctctggcctttggcaagagacagggcagagaattcatctggaacgacctgctgtccctggaaaccggcagcctgaagctggccaacggaagagtgatcgagaagacactgtacaacagaagaacccggcaggatgagcctgccctgttcgtggccctgaccttcgagcggcgggaggtcctggactcctccaatatcaaaccaatgaacctgatcggcgtggcaagaggcgaaaacatccccgccgtgatcgccctgaccgaccccgagggctgcccactgagccggtttaaggatagcctgggaaacccaacccacatcctgagaatcggcgagagctataaggagaagcagcggaccatccaggccaagaaggaggtggagcagcggagagccggcggctacagccggaagtacgccagcaaagccaagaatctggcagacgatatggtgagaaacaccgctagagatctgctgtactacgccgtgacccaggatgccatgctgatcttcgccaacctgagccggggcttcggccggcagggcaagcggaccttcatggccgagagacagtacacacggatggaggactggctgaccgccaagctggcctacgagggcctgagcaagacctacctgtccaagacactggcccagtacacctccaagacatgcagcaactgtgggtttaccatcaccagcgccgactacgacagggtgctggagaagctgaagaagacagcaacaggctggatgaccacaattaacggcaaggagctgaaggtggagggccagattacctactacaacagatacaagagacagaacgtagtcaaggacctgtccgtcgagctggatagactgagcgaagaatctgtgaacaacgacatctcctcctggacaaagggcagaagcggagaagctctgagcctcctgaagaaaagattctcccatagacccgtgcaggagaagttcgtgtgcctgaactgcggcttcgagacacacgcagccgagcaagccgccctgaacatcgccagatcctggctgttcctgcggagccaggagtacaagaaataccagacaaacaagacaaccggcaacaccgataagagagccttcgtcgagacctggcagtccttttaccggaagaagcttaaggaggtgtggaaacctgccgtgcggtctggcggatctggcggaggctccaccagccccaagaaaaagagaaaagtctaagctgccttctgcggggcttgccttctggccatgcccttcttctctcccttgcacctgtacctcttggtctttgaataaagcctgagtaggaaggctagcaaaaaaaaaaaaaaaaaaaaaaaaaaaaaaaaaaaaaaaaaaaaaaaaaaaaaaaaaaaaaaaaaaaaaaaaaaaaaaaa

SEQ ID NO: 9263 - RNA, 8787 nt, synthetic construct
  source 1..8787: mol_type = other RNA
aggaaataagagagaaaagaagagtaagaagaaatataagagccaccatggcccctaagaagaagcgtaaagtgagccggatgaaccacgaccaggagttcgacccccctaaggtgtaccctcccgtccccgccgagaagagaaagcccatccgggtcctgagcctgttcgatggcatcgccaccggtctgctggtgctgaaggacctgggcatccaggtggataggtacattgcctccgaggtgtgcgaggactccatcaccgtgggaatggtgcgtcatcagggcaagatcatgtacgtgggcgacgtgcggagcgtgacacagaagcatatccaggagtggggccctttcgacctggtgatcggcggcagcccttgcaatgacctgagcatcgtgaacccagcccggaagggcctgtacgagggaaccggcagactgttcttcgagttttacagactgctgcacgacgcccggcctaaggaaggcgacgaccggcccttcttttggctgttcgagaatgtggtggccatgggagtcagcgacaagcgggatattagccggttcctggagagcaaccccgtgatgatcgatgccaaggaagtgagcgccgcccaccgggccagatacttctggggcaatctgcctggcatgaacagacccctggccagcaccgtgaacgacaagctggagctgcaggagtgcctggagcacggccggatcgccaagttcagcaaggtgagaaccatcaccacccgaagcaacagcatcaaacaaggcaaggaccagcactttcctgtgttcatgaacgagaaggaggacatcctgtggtgtaccgagatggagagagtgttcgggttcccagtccactacacagatgtcagcaacatgtctagactggccagacagagactgctgggaagaagctggtccgtccctgtgatcagacacctgttcgcccctctgaaggagtacttcgcctgcgtgagcagcggcaacagcaacgccaacagccggggccccagcttctctagcggcctggtgccactgtccctgagagggagccacatgggccccatggagatctacaaaaccgtgagcgcctggaagcggcagcctgtgcgcgtgctgagcctgtttcggaatatcgataaagtcctgaaaagcctgggattcctggagagcggctctggctccggcggtggcaccctgaagtacgtggaggatgtgacaaacgtggtcagacgggatgtggagaagtggggccccttcgatctggtgtacggcagcacccaacccctgggcagctcttgtgaccggtgccctggctggtacatgtttcagttccaccggatcctgcagtacgccctgccgagacaggagtcccagcggccattcttttggattttcatggacaacttgctgctgaccgaggatgaccaggaaactaccactcggttcctgcagaccgaagccgtgaccctgcaggacgtgagaggccgggactaccagaacgccatgcgggtgtggtccaacatccctggactgaaaagcaagcacgcacctctgacccctaaagaagaggagtacctgcaggcccaggtgcggagcagaagcaagctggacgcccctaaggtggatctgctggtgaagaattgcctcctgcccctgagagagtacttcaagtatttcagccagaatagtctgcccctgggaggcagcggcggcggccaggagcccgtgaccttcgaggacgtggccgtgtacttcacccagaaccagtgggccaagctggaccccacccagagggccctgtacagggaggtgatgctggagaactacgccaacgtggccagcctgggcgtggccttccccttccccaagcccgacctggtgagccagctggagaggggcgaggtgccctggggccccgacccctgggaggccgaggtgctgaggggcatctgccccggcggcggcccaagcagcggcgcccctcctcccagcggcggcaggcggcccaagcagcggcgcccctcctcccagcggcggcagcccagccggctccccaacctctaccgaggagggcacctctgagtccgccacccccgagagcggccctggcacctccaccgagcccagcgagggcagcgcacccggcagccctgccggcagccccacctccacagaggagggaaccagcaccgagcccagcgaaggcagcgccccaggcaccagcaccgagcctagtgagcaggagattaaacggatcaacaagatcagaagaagacttgtgaaagacagcaacaccaagaaggccggcaagacaggccccatgaaaaccctgctggttagagtgatgacacccgatctgagagagcggctggaaaacctgagaaagaagcctgaaaatatcccccagcccatcagcaatacatctagagccaacctgaataagctgctgaccgattacaccgaaatgaagaaggcgatcctgcatgtgtactgggaagagttccagaaggaccctgtgggcctgatgagccgggtggcccagcctgccagcaagaagatcgatcagaacaagctgaaacctgagatggacgagaagggcaacctgaccaccgccggctttgcctgctctcagtgtggccagcccctgttcgtgtacaagctggagcaggtgtctgagaagggcaaggcttacaccaactacttcggacggtgcaatgtggccgagcacgaaaagctgatcctgctggcccagctgaagcccgagaaggatagcgacgaagccgtgacatatagcctgggaaagtttgggcagagggccctggatttctacagcattcatgtgaccaaggagtccacccaccccgtgaagcccctggcccagatcgccggaaacagatacgcctccggacctgtgggaaaggccctgagcgacgcatgtatgggcacaatcgcctccttcctgtctaagtaccaggacatcatcatcgaacaccagaaggtggtgaagggcaaccagaagagactggagagcctgcgggagctggccggcaaggaaaacctggaataccctagcgtgaccctgccacctcagcctcacaccaaggagggcgttgatgcctacaacgaagtgatcgcccgggtgcgaatgtgggtgaacctgaacctgtggcagaagctgaagctaagcagagatgatgccaagcctctgctgagactgaagggattcccttcctttcctctggtcgagagacaggccaacgaagtggactggtgggacatggtgtgtaacgtgaagaagctgatcaacgagaaaaaggaggatggcaaggtgttttggcagaatctggctggctacaagagacaggaagccctgagaccatacctgagcagcgaggaagatcggaagaagggaaagaaattcgctcggtaccagctgggcgacctgctgctgcacctggaaaagaagcacggcgaggactggggaaaggtgtacgacgaggcctgggagcggattgacaagaaagtggaaggcctgagcaagcacatcaagctggaagaggaacggagaagcgaggacgcccagagcaaggccgccctgaccgactggctgcgggctaaggccagcttcgtgatcgagggcctgaaggaggccgacaaggacgagttctgcagatgcgagctgaagctgcagaagtggtacggggacctgcggggaaagcccttcgccatcgaagccgagaacagcatcctggacatcagcggcttcagcaagcagtacaactgtgccttcatctggcagaaggacggcgtgaagaagctgaacctgtacctgatcatcaactacttcaagggcggcaagctgcggttcaagaagatcaaacctgaagccttcgaagccaacagattctacaccgtgatcaacaaaaagagcggcgagatcgtgcccatggaggtgaacttcaacttcgacgaccccaacctgatcatcctgcctctggcctttggcaagagacagggcagagaattcatctggaacgacctgctgtccctggaaaccggcagcctgaagctggccaacggaagagtgatcgagaagacactgtacaacagaagaacccggcaggatgagcctgccctgttcgtggccctgaccttcgagcggcgggaggtcctggactcctccaatatcaaaccaatgaacctgatcggcgtggcaagaggcgaaaacatccccgccgtgatcgccctgaccgaccccgagggctgcccactgagccggtttaaggatagcctgggaaacccaacccacatcctgagaatcggcgagagctataaggagaagcagcggaccatccaggccaagaaggaggtggagcagcggagagccggcggctacagccggaagtacgccagcaaagccaagaatctggcagacgatatggtgagaaacaccgctagagatctgctgtactacgccgtgacccaggatgccatgctgatcttcgccaacctgagccggggcttcggccggcagggcaagcggaccttcatggccgagagacagtacacacggatggaggactggctgaccgccaagctggcctacgagggcctgagcaagacctacctgtccaagacactggcccagtacacctccaagacatgcagcaactgtgggtttaccatcaccagcgccgactacgacagggtgctggagaagctgaagaagacagcaacaggctggatgaccacaattaacggcaaggagctgaaggtggagggccagattacctactacaacagatacaagagacagaacgtagtcaaggacctgtccgtcgagctggatagactgagcgaagaatctgtgaacaacgacatctcctcctggacaaagggcagaagcggagaagctctgagcctcctgaagaaaagattctcccatagacccgtgcaggagaagttcgtgtgcctgaactgcggcttcgagacacacgcagccgagcaagccgccctgaacatcgccagatcctggctgttcctgcggagccaggagtacaagaaataccagacaaacaagacaaccggcaacaccgataagagagccttcgtcgagacctggcagtccttttaccggaagaagcttaaggaggtgtggaaacctgccgtgcggtctggcggatctggcggaggctccaccagccccaagaaaaagagaaaagtctaagctgccttctgcggggcttgccttctggccatgcccttcttctctcccttgcacctgtacctcttggtctttgaataaagcctgagtaggaaggctagcaaaaaaaaaaaaaaaaaaaaaaaaaaaaaaaaaaaaaaaaaaaaaaaaaaaaaaaaaaaaaaaaaaaaaaaaaaaaaaaagcccagccggctccccaacctctaccgaggagggcacctctgagtccgccacccccgagagcggccctggcacctccaccgagcccagcgagggcagcgcacccggcagccctgccggcagccccacctccacagaggagggaaccagcaccgagcccagcgaaggcagcgccccaggcaccagcaccgagcctagtgagcaggagattaaacggatcaacaagatcagaagaagacttgtgaaagacagcaacaccaagaaggccggcaagacaggccccatgaaaaccctgctggttagagtgatgacacccgatctgagagagcggctggaaaacctgagaaagaagcctgaaaatatcccccagcccatcagcaatacatctagagccaacctgaataagctgctgaccgattacaccgaaatgaagaaggcgatcctgcatgtgtactgggaagagttccagaaggaccctgtgggcctgatgagccgggtggcccagcctgccagcaagaagatcgatcagaacaagctgaaacctgagatggacgagaagggcaacctgaccaccgccggctttgcctgctctcagtgtggccagcccctgttcgtgtacaagctggagcaggtgtctgagaagggcaaggcttacaccaactacttcggacggtgcaatgtggccgagcacgaaaagctgatcctgctggcccagctgaagcccgagaaggatagcgacgaagccgtgacatatagcctgggaaagtttgggcagagggccctggatttctacagcattcatgtgaccaaggagtccacccaccccgtgaagcccctggcccagatcgccggaaacagatacgcctccggacctgtgggaaaggccctgagcgacgcatgtatgggcacaatcgcctccttcctgtctaagtaccaggacatcatcatcgaacaccagaaggtggtgaagggcaaccagaagagactggagagcctgcgggagctggccggcaaggaaaacctggaataccctagcgtgaccctgccacctcagcctcacaccaaggagggcgttgatgcctacaacgaagtgatcgcccgggtgcgaatgtgggtgaacctgaacctgtggcagaagctgaagctaagcagagatgatgccaagcctctgctgagactgaagggattcccttcctttcctctggtcgagagacaggccaacgaagtggactggtgggacatggtgtgtaacgtgaagaagctgatcaacgagaaaaaggaggatggcaaggtgttttggcagaatctggctggctacaagagacaggaagccctgagaccatacctgagcagcgaggaagatcggaagaagggaaagaaattcgctcggtaccagctgggcgacctgctgctgcacctggaaaagaagcacggcgaggactggggaaaggtgtacgacgaggcctgggagcggattgacaagaaagtggaaggcctgagcaagcacatcaagctggaagaggaacggagaagcgaggacgcccagagcaaggccgccctgaccgactggctgcgggctaaggccagcttcgtgatcgagggcctgaaggaggccgacaaggacgagttctgcagatgcgagctgaagctgcagaagtggtacggggacctgcggggaaagcccttcgccatcgaagccgagaacagcatcctggacatcagcggcttcagcaagcagtacaactgtgccttcatctggcagaaggacggcgtgaagaagctgaacctgtacctgatcatcaactacttcaagggcggcaagctgcggttcaagaagatcaaacctgaagccttcgaagccaacagattctacaccgtgatcaacaaaaagagcggcgagatcgtgcccatggaggtgaacttcaacttcgacgaccccaacctgatcatcctgcctctggcctttggcaagagacagggcagagaattcatctggaacgacctgctgtccctggaaaccggcagcctgaagctggccaacggaagagtgatcgagaagacactgtacaacagaagaacccggcaggatgagcctgccctgttcgtggccctgaccttcgagcggcgggaggtcctggactcctccaatatcaaaccaatgaacctgatcggcgtggcaagaggcgaaaacatccccgccgtgatcgccctgaccgaccccgagggctgcccactgagccggtttaaggatagcctgggaaacccaacccacatcctgagaatcggcgagagctataaggagaagcagcggaccatccaggccaagaaggaggtggagcagcggagagccggcggctacagccggaagtacgccagcaaagccaagaatctggcagacgatatggtgagaaacaccgctagagatctgctgtactacgccgtgacccaggatgccatgctgatcttcgccaacctgagccggggcttcggccggcagggcaagcggaccttcatggccgagagacagtacacacggatggaggactggctgaccgccaagctggcctacgagggcctgagcaagacctacctgtccaagacactggcccagtacacctccaagacatgcagcaactgtgggtttaccatcaccagcgccgactacgacagggtgctggagaagctgaagaagacagcaacaggctggatgaccacaattaacggcaaggagctgaaggtggagggccagattacctactacaacagatacaagagacagaacgtagtcaaggacctgtccgtcgagctggatagactgagcgaagaatctgtgaacaacgacatctcctcctggacaaagggcagaagcggagaagctctgagcctcctgaagaaaagattctcccatagacccgtgcaggagaagttcgtgtgcctgaactgcggcttcgagacacacgcagccgagcaagccgccctgaacatcgccagatcctggctgttcctgcggagccaggagtacaagaaataccagacaaacaagacaaccggcaacaccgataagagagccttcgtcgagacctggcagtccttttaccggaagaagcttaaggaggtgtggaaacctgccgtgcggtctggcggatctggcggaggctccaccagccccaagaaaaagagaaaagtctaagctgccttctgcggggcttgccttctggccatgcccttcttctctcccttgcacctgtacctcttggtctttgaataaagcctgagtaggaaggctagcaaaaaaaaaaaaaaaaaaaaaaaaaaaaaaaaaaaaaaaaaaaaaaaaaaaaaaaaaaaaaaaaaaaaaaaaaaaaaaaa

SEQ ID NO: 9264 - RNA, 8787 nt, synthetic construct
  source 1..8787: mol_type = other RNA
aggaaataagagagaaaagaagagtaagaagaaatataagagccaccatggcccctaagaagaagcgtaaagtgagccggatgaaccacgaccaggagttcgacccccctaaggtgtaccctcccgtccccgccgagaagagaaagcccatccgggtcctgagcctgttcgatggcatcgccaccggtctgctggtgctgaaggacctgggcatccaggtggataggtacattgcctccgaggtgtgcgaggactccatcaccgtgggaatggtgcgtcatcagggcaagatcatgtacgtgggcgacgtgcggagcgtgacacagaagcatatccaggagtggggccctttcgacctggtgatcggcggcagcccttgcaatgacctgagcatcgtgaacccagcccggaagggcctgtacgagggaaccggcagactgttcttcgagttttacagactgctgcacgacgcccggcctaaggaaggcgacgaccggcccttcttttggctgttcgagaatgtggtggccatgggagtcagcgacaagcgggatattagccggttcctggagagcaaccccgtgatgatcgatgccaaggaagtgagcgccgcccaccgggccagatacttctggggcaatctgcctggcatgaacagacccctggccagcaccgtgaacgacaagctggagctgcaggagtgcctggagcacggccggatcgccaagttcagcaaggtgagaaccatcaccacccgaagcaacagcatcaaacaaggcaaggaccagcactttcctgtgttcatgaacgagaaggaggacatcctgtggtgtaccgagatggagagagtgttcgggttcccagtccactacacagatgtcagcaacatgtctagactggccagacagagactgctgggaagaagctggtccgtccctgtgatcagacacctgttcgcccctctgaaggagtacttcgcctgcgtgagcagcggcaacagcaacgccaacagccggggccccagcttctctagcggcctggtgccactgtccctgagagggagccacatgggccccatggagatctacaaaaccgtgagcgcctggaagcggcagcctgtgcgcgtgctgagcctgtttcggaatatcgataaagtcctgaaaagcctgggattcctggagagcggctctggctccggcggtggcaccctgaagtacgtggaggatgtgacaaacgtggtcagacgggatgtggagaagtggggccccttcgatctggtgtacggcagcacccaacccctgggcagctcttgtgaccggtgccctggctggtacatgtttcagttccaccggatcctgcagtacgccctgccgagacaggagtcccagcggccattcttttggattttcatggacaacttgctgctgaccgaggatgaccaggaaactaccactcggttcctgcagaccgaagccgtgaccctgcaggacgtgagaggccgggactaccagaacgccatgcgggtgtggtccaacatccctggactgaaaagcaagcacgcacctctgacccctaaagaagaggagtacctgcaggcccaggtgcggagcagaagcaagctggacgcccctaaggtggatctgctggtgaagaattgcctcctgcccctgagagagtacttcaagtatttcagccagaatagtctgcccctgggaggcagcggcggcggcatgaccaagttccaggaggccgtgaccttcaaggacgtggccgtggccttcaccgaggaggagctgggcctgctggacagcgcccagaggaagctgtacagggacgtgatgctggagaacttcaggaacctggtgagcgtgggccaccagagcttcaagcccgacgtgatcagccagctggagagggaggagaagctgtggatgaaggagctgcagacccagaggggcaagcacagcgagaccggcggcccaagcagcggcgcccctcctcccagcggcggcaggcggcccaagcagcggcgcccctcctcccagcggcggcagcccagccggctccccaacctctaccgaggagggcacctctgagtccgccacccccgagagcggccctggcacctccaccgagcccagcgagggcagcgcacccggcagccctgccggcagccccacctccacagaggagggaaccagcaccgagcccagcgaaggcagcgccccaggcaccagcaccgagcctagtgagcaggagattaaacggatcaacaagatcagaagaagacttgtgaaagacagcaacaccaagaaggccggcaagacaggccccatgaaaaccctgctggttagagtgatgacacccgatctgagagagcggctggaaaacctgagaaagaagcctgaaaatatcccccagcccatcagcaatacatctagagccaacctgaataagctgctgaccgattacaccgaaatgaagaaggcgatcctgcatgtgtactgggaagagttccagaaggaccctgtgggcctgatgagccgggtggcccagcctgccagcaagaagatcgatcagaacaagctgaaacctgagatggacgagaagggcaacctgaccaccgccggctttgcctgctctcagtgtggccagcccctgttcgtgtacaagctggagcaggtgtctgagaagggcaaggcttacaccaactacttcggacggtgcaatgtggccgagcacgaaaagctgatcctgctggcccagctgaagcccgagaaggatagcgacgaagccgtgacatatagcctgggaaagtttgggcagagggccctggatttctacagcattcatgtgaccaaggagtccacccaccccgtgaagcccctggcccagatcgccggaaacagatacgcctccggacctgtgggaaaggccctgagcgacgcatgtatgggcacaatcgcctccttcctgtctaagtaccaggacatcatcatcgaacaccagaaggtggtgaagggcaaccagaagagactggagagcctgcgggagctggccggcaaggaaaacctggaataccctagcgtgaccctgccacctcagcctcacaccaaggagggcgttgatgcctacaacgaagtgatcgcccgggtgcgaatgtgggtgaacctgaacctgtggcagaagctgaagctaagcagagatgatgccaagcctctgctgagactgaagggattcccttcctttcctctggtcgagagacaggccaacgaagtggactggtgggacatggtgtgtaacgtgaagaagctgatcaacgagaaaaaggaggatggcaaggtgttttggcagaatctggctggctacaagagacaggaagccctgagaccatacctgagcagcgaggaagatcggaagaagggaaagaaattcgctcggtaccagctgggcgacctgctgctgcacctggaaaagaagcacggcgaggactggggaaaggtgtacgacgaggcctgggagcggattgacaagaaagtggaaggcctgagcaagcacatcaagctggaagaggaacggagaagcgaggacgcccagagcaaggccgccctgaccgactggctgcgggctaaggccagcttcgtgatcgagggcctgaaggaggccgacaaggacgagttctgcagatgcgagctgaagctgcagaagtggtacggggacctgcggggaaagcccttcgccatcgaagccgagaacagcatcctggacatcagcggcttcagcaagcagtacaactgtgccttcatctggcagaaggacggcgtgaagaagctgaacctgtacctgatcatcaactacttcaagggcggcaagctgcggttcaagaagatcaaacctgaagccttcgaagccaacagattctacaccgtgatcaacaaaaagagcggcgagatcgtgcccatggaggtgaacttcaacttcgacgaccccaacctgatcatcctgcctctggcctttggcaagagacagggcagagaattcatctggaacgacctgctgtccctggaaaccggcagcctgaagctggccaacggaagagtgatcgagaagacactgtacaacagaagaacccggcaggatgagcctgccctgttcgtggccctgaccttcgagcggcgggaggtcctggactcctccaatatcaaaccaatgaacctgatcggcgtggcaagaggcgaaaacatccccgccgtgatcgccctgaccgaccccgagggctgcccactgagccggtttaaggatagcctgggaaacccaacccacatcctgagaatcggcgagagctataaggagaagcagcggaccatccaggccaagaaggaggtggagcagcggagagccggcggctacagccggaagtacgccagcaaagccaagaatctggcagacgatatggtgagaaacaccgctagagatctgctgtactacgccgtgacccaggatgccatgctgatcttcgccaacctgagccggggcttcggccggcagggcaagcggaccttcatggccgagagacagtacacacggatggaggactggctgaccgccaagctggcctacgagggcctgagcaagacctacctgtccaagacactggcccagtacacctccaagacatgcagcaactgtgggtttaccatcaccagcgccgactacgacagggtgctggagaagctgaagaagacagcaacaggctggatgaccacaattaacggcaaggagctgaaggtggagggccagattacctactacaacagatacaagagacagaacgtagtcaaggacctgtccgtcgagctggatagactgagcgaagaatctgtgaacaacgacatctcctcctggacaaagggcagaagcggagaagctctgagcctcctgaagaaaagattctcccatagacccgtgcaggagaagttcgtgtgcctgaactgcggcttcgagacacacgcagccgagcaagccgccctgaacatcgccagatcctggctgttcctgcggagccaggagtacaagaaataccagacaaacaagacaaccggcaacaccgataagagagccttcgtcgagacctggcagtccttttaccggaagaagcttaaggaggtgtggaaacctgccgtgcggtctggcggatctggcggaggctccaccagccccaagaaaaagagaaaagtctaagctgccttctgcggggcttgccttctggccatgcccttcttctctcccttgcacctgtacctcttggtctttgaataaagcctgagtaggaaggctagcaaaaaaaaaaaaaaaaaaaaaaaaaaaaaaaaaaaaaaaaaaaaaaaaaaaaaaaaaaaaaaaaaaaaaaaaaaaaaaaagcccagccggctccccaacctctaccgaggagggcacctctgagtccgccacccccgagagcggccctggcacctccaccgagcccagcgagggcagcgcacccggcagccctgccggcagccccacctccacagaggagggaaccagcaccgagcccagcgaaggcagcgccccaggcaccagcaccgagcctagtgagcaggagattaaacggatcaacaagatcagaagaagacttgtgaaagacagcaacaccaagaaggccggcaagacaggccccatgaaaaccctgctggttagagtgatgacacccgatctgagagagcggctggaaaacctgagaaagaagcctgaaaatatcccccagcccatcagcaatacatctagagccaacctgaataagctgctgaccgattacaccgaaatgaagaaggcgatcctgcatgtgtactgggaagagttccagaaggaccctgtgggcctgatgagccgggtggcccagcctgccagcaagaagatcgatcagaacaagctgaaacctgagatggacgagaagggcaacctgaccaccgccggctttgcctgctctcagtgtggccagcccctgttcgtgtacaagctggagcaggtgtctgagaagggcaaggcttacaccaactacttcggacggtgcaatgtggccgagcacgaaaagctgatcctgctggcccagctgaagcccgagaaggatagcgacgaagccgtgacatatagcctgggaaagtttgggcagagggccctggatttctacagcattcatgtgaccaaggagtccacccaccccgtgaagcccctggcccagatcgccggaaacagatacgcctccggacctgtgggaaaggccctgagcgacgcatgtatgggcacaatcgcctccttcctgtctaagtaccaggacatcatcatcgaacaccagaaggtggtgaagggcaaccagaagagactggagagcctgcgggagctggccggcaaggaaaacctggaataccctagcgtgaccctgccacctcagcctcacaccaaggagggcgttgatgcctacaacgaagtgatcgcccgggtgcgaatgtgggtgaacctgaacctgtggcagaagctgaagctaagcagagatgatgccaagcctctgctgagactgaagggattcccttcctttcctctggtcgagagacaggccaacgaagtggactggtgggacatggtgtgtaacgtgaagaagctgatcaacgagaaaaaggaggatggcaaggtgttttggcagaatctggctggctacaagagacaggaagccctgagaccatacctgagcagcgaggaagatcggaagaagggaaagaaattcgctcggtaccagctgggcgacctgctgctgcacctggaaaagaagcacggcgaggactggggaaaggtgtacgacgaggcctgggagcggattgacaagaaagtggaaggcctgagcaagcacatcaagctggaagaggaacggagaagcgaggacgcccagagcaaggccgccctgaccgactggctgcgggctaaggccagcttcgtgatcgagggcctgaaggaggccgacaaggacgagttctgcagatgcgagctgaagctgcagaagtggtacggggacctgcggggaaagcccttcgccatcgaagccgagaacagcatcctggacatcagcggcttcagcaagcagtacaactgtgccttcatctggcagaaggacggcgtgaagaagctgaacctgtacctgatcatcaactacttcaagggcggcaagctgcggttcaagaagatcaaacctgaagccttcgaagccaacagattctacaccgtgatcaacaaaaagagcggcgagatcgtgcccatggaggtgaacttcaacttcgacgaccccaacctgatcatcctgcctctggcctttggcaagagacagggcagagaattcatctggaacgacctgctgtccctggaaaccggcagcctgaagctggccaacggaagagtgatcgagaagacactgtacaacagaagaacccggcaggatgagcctgccctgttcgtggccctgaccttcgagcggcgggaggtcctggactcctccaatatcaaaccaatgaacctgatcggcgtggcaagaggcgaaaacatccccgccgtgatcgccctgaccgaccccgagggctgcccactgagccggtttaaggatagcctgggaaacccaacccacatcctgagaatcggcgagagctataaggagaagcagcggaccatccaggccaagaaggaggtggagcagcggagagccggcggctacagccggaagtacgccagcaaagccaagaatctggcagacgatatggtgagaaacaccgctagagatctgctgtactacgccgtgacccaggatgccatgctgatcttcgccaacctgagccggggcttcggccggcagggcaagcggaccttcatggccgagagacagtacacacggatggaggactggctgaccgccaagctggcctacgagggcctgagcaagacctacctgtccaagacactggcccagtacacctccaagacatgcagcaactgtgggtttaccatcaccagcgccgactacgacagggtgctggagaagctgaagaagacagcaacaggctggatgaccacaattaacggcaaggagctgaaggtggagggccagattacctactacaacagatacaagagacagaacgtagtcaaggacctgtccgtcgagctggatagactgagcgaagaatctgtgaacaacgacatctcctcctggacaaagggcagaagcggagaagctctgagcctcctgaagaaaagattctcccatagacccgtgcaggagaagttcgtgtgcctgaactgcggcttcgagacacacgcagccgagcaagccgccctgaacatcgccagatcctggctgttcctgcggagccaggagtacaagaaataccagacaaacaagacaaccggcaacaccgataagagagccttcgtcgagacctggcagtccttttaccggaagaagcttaaggaggtgtggaaacctgccgtgcggtctggcggatctggcggaggctccaccagccccaagaaaaagagaaaagtctaagctgccttctgcggggcttgccttctggccatgcccttcttctctcccttgcacctgtacctcttggtctttgaataaagcctgagtaggaaggctagcaaaaaaaaaaaaaaaaaaaaaaaaaaaaaaaaaaaaaaaaaaaaaaaaaaaaaaaaaaaaaaaaaaaaaaaaaaaaaaaa

SEQ ID NO: 9265 - RNA, 8787 nt, synthetic construct
  source 1..8787: mol_type = other RNA
aggaaataagagagaaaagaagagtaagaagaaatataagagccaccatggcccctaagaagaagcgtaaagtgagccggatgaaccacgaccaggagttcgacccccctaaggtgtaccctcccgtccccgccgagaagagaaagcccatccgggtcctgagcctgttcgatggcatcgccaccggtctgctggtgctgaaggacctgggcatccaggtggataggtacattgcctccgaggtgtgcgaggactccatcaccgtgggaatggtgcgtcatcagggcaagatcatgtacgtgggcgacgtgcggagcgtgacacagaagcatatccaggagtggggccctttcgacctggtgatcggcggcagcccttgcaatgacctgagcatcgtgaacccagcccggaagggcctgtacgagggaaccggcagactgttcttcgagttttacagactgctgcacgacgcccggcctaaggaaggcgacgaccggcccttcttttggctgttcgagaatgtggtggccatgggagtcagcgacaagcgggatattagccggttcctggagagcaaccccgtgatgatcgatgccaaggaagtgagcgccgcccaccgggccagatacttctggggcaatctgcctggcatgaacagacccctggccagcaccgtgaacgacaagctggagctgcaggagtgcctggagcacggccggatcgccaagttcagcaaggtgagaaccatcaccacccgaagcaacagcatcaaacaaggcaaggaccagcactttcctgtgttcatgaacgagaaggaggacatcctgtggtgtaccgagatggagagagtgttcgggttcccagtccactacacagatgtcagcaacatgtctagactggccagacagagactgctgggaagaagctggtccgtccctgtgatcagacacctgttcgcccctctgaaggagtacttcgcctgcgtgagcagcggcaacagcaacgccaacagccggggccccagcttctctagcggcctggtgccactgtccctgagagggagccacatgggccccatggagatctacaaaaccgtgagcgcctggaagcggcagcctgtgcgcgtgctgagcctgtttcggaatatcgataaagtcctgaaaagcctgggattcctggagagcggctctggctccggcggtggcaccctgaagtacgtggaggatgtgacaaacgtggtcagacgggatgtggagaagtggggccccttcgatctggtgtacggcagcacccaacccctgggcagctcttgtgaccggtgccctggctggtacatgtttcagttccaccggatcctgcagtacgccctgccgagacaggagtcccagcggccattcttttggattttcatggacaacttgctgctgaccgaggatgaccaggaaactaccactcggttcctgcagaccgaagccgtgaccctgcaggacgtgagaggccgggactaccagaacgccatgcgggtgtggtccaacatccctggactgaaaagcaagcacgcacctctgacccctaaagaagaggagtacctgcaggcccaggtgcggagcagaagcaagctggacgcccctaaggtggatctgctggtgaagaattgcctcctgcccctgagagagtacttcaagtatttcagccagaatagtctgcccctgggaggcagcggcggcggcatgaacgccgtgacctacgaggacgtgcacgtgaacttcacccaggaggagtgggccctgctggaccccagccagaagaagctgtacaaggacgtgatgctggagacctacaggaacctgaacgccatcggcttcaactgggacagcaagatcttcaagaacatcgtgcaggtgctggaggacaccgagggcatgaaggaggtgagggtgcagaggaagaggctgaacatcctgaacgtgatcggcggcccaagcagcggcgcccctcctcccagcggcggcaggcggcccaagcagcggcgcccctcctcccagcggcggcagcccagccggctccccaacctctaccgaggagggcacctctgagtccgccacccccgagagcggccctggcacctccaccgagcccagcgagggcagcgcacccggcagccctgccggcagccccacctccacagaggagggaaccagcaccgagcccagcgaaggcagcgccccaggcaccagcaccgagcctagtgagcaggagattaaacggatcaacaagatcagaagaagacttgtgaaagacagcaacaccaagaaggccggcaagacaggccccatgaaaaccctgctggttagagtgatgacacccgatctgagagagcggctggaaaacctgagaaagaagcctgaaaatatcccccagcccatcagcaatacatctagagccaacctgaataagctgctgaccgattacaccgaaatgaagaaggcgatcctgcatgtgtactgggaagagttccagaaggaccctgtgggcctgatgagccgggtggcccagcctgccagcaagaagatcgatcagaacaagctgaaacctgagatggacgagaagggcaacctgaccaccgccggctttgcctgctctcagtgtggccagcccctgttcgtgtacaagctggagcaggtgtctgagaagggcaaggcttacaccaactacttcggacggtgcaatgtggccgagcacgaaaagctgatcctgctggcccagctgaagcccgagaaggatagcgacgaagccgtgacatatagcctgggaaagtttgggcagagggccctggatttctacagcattcatgtgaccaaggagtccacccaccccgtgaagcccctggcccagatcgccggaaacagatacgcctccggacctgtgggaaaggccctgagcgacgcatgtatgggcacaatcgcctccttcctgtctaagtaccaggacatcatcatcgaacaccagaaggtggtgaagggcaaccagaagagactggagagcctgcgggagctggccggcaaggaaaacctggaataccctagcgtgaccctgccacctcagcctcacaccaaggagggcgttgatgcctacaacgaagtgatcgcccgggtgcgaatgtgggtgaacctgaacctgtggcagaagctgaagctaagcagagatgatgccaagcctctgctgagactgaagggattcccttcctttcctctggtcgagagacaggccaacgaagtggactggtgggacatggtgtgtaacgtgaagaagctgatcaacgagaaaaaggaggatggcaaggtgttttggcagaatctggctggctacaagagacaggaagccctgagaccatacctgagcagcgaggaagatcggaagaagggaaagaaattcgctcggtaccagctgggcgacctgctgctgcacctggaaaagaagcacggcgaggactggggaaaggtgtacgacgaggcctgggagcggattgacaagaaagtggaaggcctgagcaagcacatcaagctggaagaggaacggagaagcgaggacgcccagagcaaggccgccctgaccgactggctgcgggctaaggccagcttcgtgatcgagggcctgaaggaggccgacaaggacgagttctgcagatgcgagctgaagctgcagaagtggtacggggacctgcggggaaagcccttcgccatcgaagccgagaacagcatcctggacatcagcggcttcagcaagcagtacaactgtgccttcatctggcagaaggacggcgtgaagaagctgaacctgtacctgatcatcaactacttcaagggcggcaagctgcggttcaagaagatcaaacctgaagccttcgaagccaacagattctacaccgtgatcaacaaaaagagcggcgagatcgtgcccatggaggtgaacttcaacttcgacgaccccaacctgatcatcctgcctctggcctttggcaagagacagggcagagaattcatctggaacgacctgctgtccctggaaaccggcagcctgaagctggccaacggaagagtgatcgagaagacactgtacaacagaagaacccggcaggatgagcctgccctgttcgtggccctgaccttcgagcggcgggaggtcctggactcctccaatatcaaaccaatgaacctgatcggcgtggcaagaggcgaaaacatccccgccgtgatcgccctgaccgaccccgagggctgcccactgagccggtttaaggatagcctgggaaacccaacccacatcctgagaatcggcgagagctataaggagaagcagcggaccatccaggccaagaaggaggtggagcagcggagagccggcggctacagccggaagtacgccagcaaagccaagaatctggcagacgatatggtgagaaacaccgctagagatctgctgtactacgccgtgacccaggatgccatgctgatcttcgccaacctgagccggggcttcggccggcagggcaagcggaccttcatggccgagagacagtacacacggatggaggactggctgaccgccaagctggcctacgagggcctgagcaagacctacctgtccaagacactggcccagtacacctccaagacatgcagcaactgtgggtttaccatcaccagcgccgactacgacagggtgctggagaagctgaagaagacagcaacaggctggatgaccacaattaacggcaaggagctgaaggtggagggccagattacctactacaacagatacaagagacagaacgtagtcaaggacctgtccgtcgagctggatagactgagcgaagaatctgtgaacaacgacatctcctcctggacaaagggcagaagcggagaagctctgagcctcctgaagaaaagattctcccatagacccgtgcaggagaagttcgtgtgcctgaactgcggcttcgagacacacgcagccgagcaagccgccctgaacatcgccagatcctggctgttcctgcggagccaggagtacaagaaataccagacaaacaagacaaccggcaacaccgataagagagccttcgtcgagacctggcagtccttttaccggaagaagcttaaggaggtgtggaaacctgccgtgcggtctggcggatctggcggaggctccaccagccccaagaaaaagagaaaagtctaagctgccttctgcggggcttgccttctggccatgcccttcttctctcccttgcacctgtacctcttggtctttgaataaagcctgagtaggaaggctagcaaaaaaaaaaaaaaaaaaaaaaaaaaaaaaaaaaaaaaaaaaaaaaaaaaaaaaaaaaaaaaaaaaaaaaaaaaaaaaaagcccagccggctccccaacctctaccgaggagggcacctctgagtccgccacccccgagagcggccctggcacctccaccgagcccagcgagggcagcgcacccggcagccctgccggcagccccacctccacagaggagggaaccagcaccgagcccagcgaaggcagcgccccaggcaccagcaccgagcctagtgagcaggagattaaacggatcaacaagatcagaagaagacttgtgaaagacagcaacaccaagaaggccggcaagacaggccccatgaaaaccctgctggttagagtgatgacacccgatctgagagagcggctggaaaacctgagaaagaagcctgaaaatatcccccagcccatcagcaatacatctagagccaacctgaataagctgctgaccgattacaccgaaatgaagaaggcgatcctgcatgtgtactgggaagagttccagaaggaccctgtgggcctgatgagccgggtggcccagcctgccagcaagaagatcgatcagaacaagctgaaacctgagatggacgagaagggcaacctgaccaccgccggctttgcctgctctcagtgtggccagcccctgttcgtgtacaagctggagcaggtgtctgagaagggcaaggcttacaccaactacttcggacggtgcaatgtggccgagcacgaaaagctgatcctgctggcccagctgaagcccgagaaggatagcgacgaagccgtgacatatagcctgggaaagtttgggcagagggccctggatttctacagcattcatgtgaccaaggagtccacccaccccgtgaagcccctggcccagatcgccggaaacagatacgcctccggacctgtgggaaaggccctgagcgacgcatgtatgggcacaatcgcctccttcctgtctaagtaccaggacatcatcatcgaacaccagaaggtggtgaagggcaaccagaagagactggagagcctgcgggagctggccggcaaggaaaacctggaataccctagcgtgaccctgccacctcagcctcacaccaaggagggcgttgatgcctacaacgaagtgatcgcccgggtgcgaatgtgggtgaacctgaacctgtggcagaagctgaagctaagcagagatgatgccaagcctctgctgagactgaagggattcccttcctttcctctggtcgagagacaggccaacgaagtggactggtgggacatggtgtgtaacgtgaagaagctgatcaacgagaaaaaggaggatggcaaggtgttttggcagaatctggctggctacaagagacaggaagccctgagaccatacctgagcagcgaggaagatcggaagaagggaaagaaattcgctcggtaccagctgggcgacctgctgctgcacctggaaaagaagcacggcgaggactggggaaaggtgtacgacgaggcctgggagcggattgacaagaaagtggaaggcctgagcaagcacatcaagctggaagaggaacggagaagcgaggacgcccagagcaaggccgccctgaccgactggctgcgggctaaggccagcttcgtgatcgagggcctgaaggaggccgacaaggacgagttctgcagatgcgagctgaagctgcagaagtggtacggggacctgcggggaaagcccttcgccatcgaagccgagaacagcatcctggacatcagcggcttcagcaagcagtacaactgtgccttcatctggcagaaggacggcgtgaagaagctgaacctgtacctgatcatcaactacttcaagggcggcaagctgcggttcaagaagatcaaacctgaagccttcgaagccaacagattctacaccgtgatcaacaaaaagagcggcgagatcgtgcccatggaggtgaacttcaacttcgacgaccccaacctgatcatcctgcctctggcctttggcaagagacagggcagagaattcatctggaacgacctgctgtccctggaaaccggcagcctgaagctggccaacggaagagtgatcgagaagacactgtacaacagaagaacccggcaggatgagcctgccctgttcgtggccctgaccttcgagcggcgggaggtcctggactcctccaatatcaaaccaatgaacctgatcggcgtggcaagaggcgaaaacatccccgccgtgatcgccctgaccgaccccgagggctgcccactgagccggtttaaggatagcctgggaaacccaacccacatcctgagaatcggcgagagctataaggagaagcagcggaccatccaggccaagaaggaggtggagcagcggagagccggcggctacagccggaagtacgccagcaaagccaagaatctggcagacgatatggtgagaaacaccgctagagatctgctgtactacgccgtgacccaggatgccatgctgatcttcgccaacctgagccggggcttcggccggcagggcaagcggaccttcatggccgagagacagtacacacggatggaggactggctgaccgccaagctggcctacgagggcctgagcaagacctacctgtccaagacactggcccagtacacctccaagacatgcagcaactgtgggtttaccatcaccagcgccgactacgacagggtgctggagaagctgaagaagacagcaacaggctggatgaccacaattaacggcaaggagctgaaggtggagggccagattacctactacaacagatacaagagacagaacgtagtcaaggacctgtccgtcgagctggatagactgagcgaagaatctgtgaacaacgacatctcctcctggacaaagggcagaagcggagaagctctgagcctcctgaagaaaagattctcccatagacccgtgcaggagaagttcgtgtgcctgaactgcggcttcgagacacacgcagccgagcaagccgccctgaacatcgccagatcctggctgttcctgcggagccaggagtacaagaaataccagacaaacaagacaaccggcaacaccgataagagagccttcgtcgagacctggcagtccttttaccggaagaagcttaaggaggtgtggaaacctgccgtgcggtctggcggatctggcggaggctccaccagccccaagaaaaagagaaaagtctaagctgccttctgcggggcttgccttctggccatgcccttcttctctcccttgcacctgtacctcttggtctttgaataaagcctgagtaggaaggctagcaaaaaaaaaaaaaaaaaaaaaaaaaaaaaaaaaaaaaaaaaaaaaaaaaaaaaaaaaaaaaaaaaaaaaaaaaaaaaaaa

SEQ ID NO: 9266 - RNA, 8787 nt, synthetic construct
  source 1..8787: mol_type = other RNA
aggaaataagagagaaaagaagagtaagaagaaatataagagccaccatggcccctaagaagaagcgtaaagtgagccggatgaaccacgaccaggagttcgacccccctaaggtgtaccctcccgtccccgccgagaagagaaagcccatccgggtcctgagcctgttcgatggcatcgccaccggtctgctggtgctgaaggacctgggcatccaggtggataggtacattgcctccgaggtgtgcgaggactccatcaccgtgggaatggtgcgtcatcagggcaagatcatgtacgtgggcgacgtgcggagcgtgacacagaagcatatccaggagtggggccctttcgacctggtgatcggcggcagcccttgcaatgacctgagcatcgtgaacccagcccggaagggcctgtacgagggaaccggcagactgttcttcgagttttacagactgctgcacgacgcccggcctaaggaaggcgacgaccggcccttcttttggctgttcgagaatgtggtggccatgggagtcagcgacaagcgggatattagccggttcctggagagcaaccccgtgatgatcgatgccaaggaagtgagcgccgcccaccgggccagatacttctggggcaatctgcctggcatgaacagacccctggccagcaccgtgaacgacaagctggagctgcaggagtgcctggagcacggccggatcgccaagttcagcaaggtgagaaccatcaccacccgaagcaacagcatcaaacaaggcaaggaccagcactttcctgtgttcatgaacgagaaggaggacatcctgtggtgtaccgagatggagagagtgttcgggttcccagtccactacacagatgtcagcaacatgtctagactggccagacagagactgctgggaagaagctggtccgtccctgtgatcagacacctgttcgcccctctgaaggagtacttcgcctgcgtgagcagcggcaacagcaacgccaacagccggggccccagcttctctagcggcctggtgccactgtccctgagagggagccacatgggccccatggagatctacaaaaccgtgagcgcctggaagcggcagcctgtgcgcgtgctgagcctgtttcggaatatcgataaagtcctgaaaagcctgggattcctggagagcggctctggctccggcggtggcaccctgaagtacgtggaggatgtgacaaacgtggtcagacgggatgtggagaagtggggccccttcgatctggtgtacggcagcacccaacccctgggcagctcttgtgaccggtgccctggctggtacatgtttcagttccaccggatcctgcagtacgccctgccgagacaggagtcccagcggccattcttttggattttcatggacaacttgctgctgaccgaggatgaccaggaaactaccactcggttcctgcagaccgaagccgtgaccctgcaggacgtgagaggccgggactaccagaacgccatgcgggtgtggtccaacatccctggactgaaaagcaagcacgcacctctgacccctaaagaagaggagtacctgcaggcccaggtgcggagcagaagcaagctggacgcccctaaggtggatctgctggtgaagaattgcctcctgcccctgagagagtacttcaagtatttcagccagaatagtctgcccctgggaggcagcggcggcggcatggtgaccttcgaggacgtggccgtgcacttcaccaagaccgagtggaccggcctgagccccgcccagagggccctgtacaggagcgtgatgctggagaacttcggcaacctgaccgccctgggctaccccgtgcccaagcccgccctgatcagcctgctggagggcggcgacatggcctggggcctggaggcccaggacgacccccccgccgagaccaccaagaacgtgaggaaggacgtgggcggcccaagcagcggcgcccctcctcccagcggcggcaggcggcccaagcagcggcgcccctcctcccagcggcggcagcccagccggctccccaacctctaccgaggagggcacctctgagtccgccacccccgagagcggccctggcacctccaccgagcccagcgagggcagcgcacccggcagccctgccggcagccccacctccacagaggagggaaccagcaccgagcccagcgaaggcagcgccccaggcaccagcaccgagcctagtgagcaggagattaaacggatcaacaagatcagaagaagacttgtgaaagacagcaacaccaagaaggccggcaagacaggccccatgaaaaccctgctggttagagtgatgacacccgatctgagagagcggctggaaaacctgagaaagaagcctgaaaatatcccccagcccatcagcaatacatctagagccaacctgaataagctgctgaccgattacaccgaaatgaagaaggcgatcctgcatgtgtactgggaagagttccagaaggaccctgtgggcctgatgagccgggtggcccagcctgccagcaagaagatcgatcagaacaagctgaaacctgagatggacgagaagggcaacctgaccaccgccggctttgcctgctctcagtgtggccagcccctgttcgtgtacaagctggagcaggtgtctgagaagggcaaggcttacaccaactacttcggacggtgcaatgtggccgagcacgaaaagctgatcctgctggcccagctgaagcccgagaaggatagcgacgaagccgtgacatatagcctgggaaagtttgggcagagggccctggatttctacagcattcatgtgaccaaggagtccacccaccccgtgaagcccctggcccagatcgccggaaacagatacgcctccggacctgtgggaaaggccctgagcgacgcatgtatgggcacaatcgcctccttcctgtctaagtaccaggacatcatcatcgaacaccagaaggtggtgaagggcaaccagaagagactggagagcctgcgggagctggccggcaaggaaaacctggaataccctagcgtgaccctgccacctcagcctcacaccaaggagggcgttgatgcctacaacgaagtgatcgcccgggtgcgaatgtgggtgaacctgaacctgtggcagaagctgaagctaagcagagatgatgccaagcctctgctgagactgaagggattcccttcctttcctctggtcgagagacaggccaacgaagtggactggtgggacatggtgtgtaacgtgaagaagctgatcaacgagaaaaaggaggatggcaaggtgttttggcagaatctggctggctacaagagacaggaagccctgagaccatacctgagcagcgaggaagatcggaagaagggaaagaaattcgctcggtaccagctgggcgacctgctgctgcacctggaaaagaagcacggcgaggactggggaaaggtgtacgacgaggcctgggagcggattgacaagaaagtggaaggcctgagcaagcacatcaagctggaagaggaacggagaagcgaggacgcccagagcaaggccgccctgaccgactggctgcgggctaaggccagcttcgtgatcgagggcctgaaggaggccgacaaggacgagttctgcagatgcgagctgaagctgcagaagtggtacggggacctgcggggaaagcccttcgccatcgaagccgagaacagcatcctggacatcagcggcttcagcaagcagtacaactgtgccttcatctggcagaaggacggcgtgaagaagctgaacctgtacctgatcatcaactacttcaagggcggcaagctgcggttcaagaagatcaaacctgaagccttcgaagccaacagattctacaccgtgatcaacaaaaagagcggcgagatcgtgcccatggaggtgaacttcaacttcgacgaccccaacctgatcatcctgcctctggcctttggcaagagacagggcagagaattcatctggaacgacctgctgtccctggaaaccggcagcctgaagctggccaacggaagagtgatcgagaagacactgtacaacagaagaacccggcaggatgagcctgccctgttcgtggccctgaccttcgagcggcgggaggtcctggactcctccaatatcaaaccaatgaacctgatcggcgtggcaagaggcgaaaacatccccgccgtgatcgccctgaccgaccccgagggctgcccactgagccggtttaaggatagcctgggaaacccaacccacatcctgagaatcggcgagagctataaggagaagcagcggaccatccaggccaagaaggaggtggagcagcggagagccggcggctacagccggaagtacgccagcaaagccaagaatctggcagacgatatggtgagaaacaccgctagagatctgctgtactacgccgtgacccaggatgccatgctgatcttcgccaacctgagccggggcttcggccggcagggcaagcggaccttcatggccgagagacagtacacacggatggaggactggctgaccgccaagctggcctacgagggcctgagcaagacctacctgtccaagacactggcccagtacacctccaagacatgcagcaactgtgggtttaccatcaccagcgccgactacgacagggtgctggagaagctgaagaagacagcaacaggctggatgaccacaattaacggcaaggagctgaaggtggagggccagattacctactacaacagatacaagagacagaacgtagtcaaggacctgtccgtcgagctggatagactgagcgaagaatctgtgaacaacgacatctcctcctggacaaagggcagaagcggagaagctctgagcctcctgaagaaaagattctcccatagacccgtgcaggagaagttcgtgtgcctgaactgcggcttcgagacacacgcagccgagcaagccgccctgaacatcgccagatcctggctgttcctgcggagccaggagtacaagaaataccagacaaacaagacaaccggcaacaccgataagagagccttcgtcgagacctggcagtccttttaccggaagaagcttaaggaggtgtggaaacctgccgtgcggtctggcggatctggcggaggctccaccagccccaagaaaaagagaaaagtctaagctgccttctgcggggcttgccttctggccatgcccttcttctctcccttgcacctgtacctcttggtctttgaataaagcctgagtaggaaggctagcaaaaaaaaaaaaaaaaaaaaaaaaaaaaaaaaaaaaaaaaaaaaaaaaaaaaaaaaaaaaaaaaaaaaaaaaaaaaaaaagcccagccggctccccaacctctaccgaggagggcacctctgagtccgccacccccgagagcggccctggcacctccaccgagcccagcgagggcagcgcacccggcagccctgccggcagccccacctccacagaggagggaaccagcaccgagcccagcgaaggcagcgccccaggcaccagcaccgagcctagtgagcaggagattaaacggatcaacaagatcagaagaagacttgtgaaagacagcaacaccaagaaggccggcaagacaggccccatgaaaaccctgctggttagagtgatgacacccgatctgagagagcggctggaaaacctgagaaagaagcctgaaaatatcccccagcccatcagcaatacatctagagccaacctgaataagctgctgaccgattacaccgaaatgaagaaggcgatcctgcatgtgtactgggaagagttccagaaggaccctgtgggcctgatgagccgggtggcccagcctgccagcaagaagatcgatcagaacaagctgaaacctgagatggacgagaagggcaacctgaccaccgccggctttgcctgctctcagtgtggccagcccctgttcgtgtacaagctggagcaggtgtctgagaagggcaaggcttacaccaactacttcggacggtgcaatgtggccgagcacgaaaagctgatcctgctggcccagctgaagcccgagaaggatagcgacgaagccgtgacatatagcctgggaaagtttgggcagagggccctggatttctacagcattcatgtgaccaaggagtccacccaccccgtgaagcccctggcccagatcgccggaaacagatacgcctccggacctgtgggaaaggccctgagcgacgcatgtatgggcacaatcgcctccttcctgtctaagtaccaggacatcatcatcgaacaccagaaggtggtgaagggcaaccagaagagactggagagcctgcgggagctggccggcaaggaaaacctggaataccctagcgtgaccctgccacctcagcctcacaccaaggagggcgttgatgcctacaacgaagtgatcgcccgggtgcgaatgtgggtgaacctgaacctgtggcagaagctgaagctaagcagagatgatgccaagcctctgctgagactgaagggattcccttcctttcctctggtcgagagacaggccaacgaagtggactggtgggacatggtgtgtaacgtgaagaagctgatcaacgagaaaaaggaggatggcaaggtgttttggcagaatctggctggctacaagagacaggaagccctgagaccatacctgagcagcgaggaagatcggaagaagggaaagaaattcgctcggtaccagctgggcgacctgctgctgcacctggaaaagaagcacggcgaggactggggaaaggtgtacgacgaggcctgggagcggattgacaagaaagtggaaggcctgagcaagcacatcaagctggaagaggaacggagaagcgaggacgcccagagcaaggccgccctgaccgactggctgcgggctaaggccagcttcgtgatcgagggcctgaaggaggccgacaaggacgagttctgcagatgcgagctgaagctgcagaagtggtacggggacctgcggggaaagcccttcgccatcgaagccgagaacagcatcctggacatcagcggcttcagcaagcagtacaactgtgccttcatctggcagaaggacggcgtgaagaagctgaacctgtacctgatcatcaactacttcaagggcggcaagctgcggttcaagaagatcaaacctgaagccttcgaagccaacagattctacaccgtgatcaacaaaaagagcggcgagatcgtgcccatggaggtgaacttcaacttcgacgaccccaacctgatcatcctgcctctggcctttggcaagagacagggcagagaattcatctggaacgacctgctgtccctggaaaccggcagcctgaagctggccaacggaagagtgatcgagaagacactgtacaacagaagaacccggcaggatgagcctgccctgttcgtggccctgaccttcgagcggcgggaggtcctggactcctccaatatcaaaccaatgaacctgatcggcgtggcaagaggcgaaaacatccccgccgtgatcgccctgaccgaccccgagggctgcccactgagccggtttaaggatagcctgggaaacccaacccacatcctgagaatcggcgagagctataaggagaagcagcggaccatccaggccaagaaggaggtggagcagcggagagccggcggctacagccggaagtacgccagcaaagccaagaatctggcagacgatatggtgagaaacaccgctagagatctgctgtactacgccgtgacccaggatgccatgctgatcttcgccaacctgagccggggcttcggccggcagggcaagcggaccttcatggccgagagacagtacacacggatggaggactggctgaccgccaagctggcctacgagggcctgagcaagacctacctgtccaagacactggcccagtacacctccaagacatgcagcaactgtgggtttaccatcaccagcgccgactacgacagggtgctggagaagctgaagaagacagcaacaggctggatgaccacaattaacggcaaggagctgaaggtggagggccagattacctactacaacagatacaagagacagaacgtagtcaaggacctgtccgtcgagctggatagactgagcgaagaatctgtgaacaacgacatctcctcctggacaaagggcagaagcggagaagctctgagcctcctgaagaaaagattctcccatagacccgtgcaggagaagttcgtgtgcctgaactgcggcttcgagacacacgcagccgagcaagccgccctgaacatcgccagatcctggctgttcctgcggagccaggagtacaagaaataccagacaaacaagacaaccggcaacaccgataagagagccttcgtcgagacctggcagtccttttaccggaagaagcttaaggaggtgtggaaacctgccgtgcggtctggcggatctggcggaggctccaccagccccaagaaaaagagaaaagtctaagctgccttctgcggggcttgccttctggccatgcccttcttctctcccttgcacctgtacctcttggtctttgaataaagcctgagtaggaaggctagcaaaaaaaaaaaaaaaaaaaaaaaaaaaaaaaaaaaaaaaaaaaaaaaaaaaaaaaaaaaaaaaaaaaaaaaaaaaaaaaa

SEQ ID NO: 9267 - RNA, 8787 nt, synthetic construct
  source 1..8787: mol_type = other RNA
aggaaataagagagaaaagaagagtaagaagaaatataagagccaccatggcccctaagaagaagcgtaaagtgagccggatgaaccacgaccaggagttcgacccccctaaggtgtaccctcccgtccccgccgagaagagaaagcccatccgggtcctgagcctgttcgatggcatcgccaccggtctgctggtgctgaaggacctgggcatccaggtggataggtacattgcctccgaggtgtgcgaggactccatcaccgtgggaatggtgcgtcatcagggcaagatcatgtacgtgggcgacgtgcggagcgtgacacagaagcatatccaggagtggggccctttcgacctggtgatcggcggcagcccttgcaatgacctgagcatcgtgaacccagcccggaagggcctgtacgagggaaccggcagactgttcttcgagttttacagactgctgcacgacgcccggcctaaggaaggcgacgaccggcccttcttttggctgttcgagaatgtggtggccatgggagtcagcgacaagcgggatattagccggttcctggagagcaaccccgtgatgatcgatgccaaggaagtgagcgccgcccaccgggccagatacttctggggcaatctgcctggcatgaacagacccctggccagcaccgtgaacgacaagctggagctgcaggagtgcctggagcacggccggatcgccaagttcagcaaggtgagaaccatcaccacccgaagcaacagcatcaaacaaggcaaggaccagcactttcctgtgttcatgaacgagaaggaggacatcctgtggtgtaccgagatggagagagtgttcgggttcccagtccactacacagatgtcagcaacatgtctagactggccagacagagactgctgggaagaagctggtccgtccctgtgatcagacacctgttcgcccctctgaaggagtacttcgcctgcgtgagcagcggcaacagcaacgccaacagccggggccccagcttctctagcggcctggtgccactgtccctgagagggagccacatgggccccatggagatctacaaaaccgtgagcgcctggaagcggcagcctgtgcgcgtgctgagcctgtttcggaatatcgataaagtcctgaaaagcctgggattcctggagagcggctctggctccggcggtggcaccctgaagtacgtggaggatgtgacaaacgtggtcagacgggatgtggagaagtggggccccttcgatctggtgtacggcagcacccaacccctgggcagctcttgtgaccggtgccctggctggtacatgtttcagttccaccggatcctgcagtacgccctgccgagacaggagtcccagcggccattcttttggattttcatggacaacttgctgctgaccgaggatgaccaggaaactaccactcggttcctgcagaccgaagccgtgaccctgcaggacgtgagaggccgggactaccagaacgccatgcgggtgtggtccaacatccctggactgaaaagcaagcacgcacctctgacccctaaagaagaggagtacctgcaggcccaggtgcggagcagaagcaagctggacgcccctaaggtggatctgctggtgaagaattgcctcctgcccctgagagagtacttcaagtatttcagccagaatagtctgcccctgggaggcagcggcggcggcgtgcaggtgcccgtgaccttcgaggacgtggccgtgtacttcagcgaggacgagtggggcatgctggccggctggcagaaggagctgtacaaggagaccatgaaggagaactacgagaccctgaccctgctgggctgcctgagcgagaagcccagcctgatcagcaagatcgagagggaggaggacccctgcgtgagggaccagcaggaccccagggacaggaggaagctgaggagcagctggggcggcccaagcagcggcgcccctcctcccagcggcggcaggcggcccaagcagcggcgcccctcctcccagcggcggcagcccagccggctccccaacctctaccgaggagggcacctctgagtccgccacccccgagagcggccctggcacctccaccgagcccagcgagggcagcgcacccggcagccctgccggcagccccacctccacagaggagggaaccagcaccgagcccagcgaaggcagcgccccaggcaccagcaccgagcctagtgagcaggagattaaacggatcaacaagatcagaagaagacttgtgaaagacagcaacaccaagaaggccggcaagacaggccccatgaaaaccctgctggttagagtgatgacacccgatctgagagagcggctggaaaacctgagaaagaagcctgaaaatatcccccagcccatcagcaatacatctagagccaacctgaataagctgctgaccgattacaccgaaatgaagaaggcgatcctgcatgtgtactgggaagagttccagaaggaccctgtgggcctgatgagccgggtggcccagcctgccagcaagaagatcgatcagaacaagctgaaacctgagatggacgagaagggcaacctgaccaccgccggctttgcctgctctcagtgtggccagcccctgttcgtgtacaagctggagcaggtgtctgagaagggcaaggcttacaccaactacttcggacggtgcaatgtggccgagcacgaaaagctgatcctgctggcccagctgaagcccgagaaggatagcgacgaagccgtgacatatagcctgggaaagtttgggcagagggccctggatttctacagcattcatgtgaccaaggagtccacccaccccgtgaagcccctggcccagatcgccggaaacagatacgcctccggacctgtgggaaaggccctgagcgacgcatgtatgggcacaatcgcctccttcctgtctaagtaccaggacatcatcatcgaacaccagaaggtggtgaagggcaaccagaagagactggagagcctgcgggagctggccggcaaggaaaacctggaataccctagcgtgaccctgccacctcagcctcacaccaaggagggcgttgatgcctacaacgaagtgatcgcccgggtgcgaatgtgggtgaacctgaacctgtggcagaagctgaagctaagcagagatgatgccaagcctctgctgagactgaagggattcccttcctttcctctggtcgagagacaggccaacgaagtggactggtgggacatggtgtgtaacgtgaagaagctgatcaacgagaaaaaggaggatggcaaggtgttttggcagaatctggctggctacaagagacaggaagccctgagaccatacctgagcagcgaggaagatcggaagaagggaaagaaattcgctcggtaccagctgggcgacctgctgctgcacctggaaaagaagcacggcgaggactggggaaaggtgtacgacgaggcctgggagcggattgacaagaaagtggaaggcctgagcaagcacatcaagctggaagaggaacggagaagcgaggacgcccagagcaaggccgccctgaccgactggctgcgggctaaggccagcttcgtgatcgagggcctgaaggaggccgacaaggacgagttctgcagatgcgagctgaagctgcagaagtggtacggggacctgcggggaaagcccttcgccatcgaagccgagaacagcatcctggacatcagcggcttcagcaagcagtacaactgtgccttcatctggcagaaggacggcgtgaagaagctgaacctgtacctgatcatcaactacttcaagggcggcaagctgcggttcaagaagatcaaacctgaagccttcgaagccaacagattctacaccgtgatcaacaaaaagagcggcgagatcgtgcccatggaggtgaacttcaacttcgacgaccccaacctgatcatcctgcctctggcctttggcaagagacagggcagagaattcatctggaacgacctgctgtccctggaaaccggcagcctgaagctggccaacggaagagtgatcgagaagacactgtacaacagaagaacccggcaggatgagcctgccctgttcgtggccctgaccttcgagcggcgggaggtcctggactcctccaatatcaaaccaatgaacctgatcggcgtggcaagaggcgaaaacatccccgccgtgatcgccctgaccgaccccgagggctgcccactgagccggtttaaggatagcctgggaaacccaacccacatcctgagaatcggcgagagctataaggagaagcagcggaccatccaggccaagaaggaggtggagcagcggagagccggcggctacagccggaagtacgccagcaaagccaagaatctggcagacgatatggtgagaaacaccgctagagatctgctgtactacgccgtgacccaggatgccatgctgatcttcgccaacctgagccggggcttcggccggcagggcaagcggaccttcatggccgagagacagtacacacggatggaggactggctgaccgccaagctggcctacgagggcctgagcaagacctacctgtccaagacactggcccagtacacctccaagacatgcagcaactgtgggtttaccatcaccagcgccgactacgacagggtgctggagaagctgaagaagacagcaacaggctggatgaccacaattaacggcaaggagctgaaggtggagggccagattacctactacaacagatacaagagacagaacgtagtcaaggacctgtccgtcgagctggatagactgagcgaagaatctgtgaacaacgacatctcctcctggacaaagggcagaagcggagaagctctgagcctcctgaagaaaagattctcccatagacccgtgcaggagaagttcgtgtgcctgaactgcggcttcgagacacacgcagccgagcaagccgccctgaacatcgccagatcctggctgttcctgcggagccaggagtacaagaaataccagacaaacaagacaaccggcaacaccgataagagagccttcgtcgagacctggcagtccttttaccggaagaagcttaaggaggtgtggaaacctgccgtgcggtctggcggatctggcggaggctccaccagccccaagaaaaagagaaaagtctaagctgccttctgcggggcttgccttctggccatgcccttcttctctcccttgcacctgtacctcttggtctttgaataaagcctgagtaggaaggctagcaaaaaaaaaaaaaaaaaaaaaaaaaaaaaaaaaaaaaaaaaaaaaaaaaaaaaaaaaaaaaaaaaaaaaaaaaaaaaaaagcccagccggctccccaacctctaccgaggagggcacctctgagtccgccacccccgagagcggccctggcacctccaccgagcccagcgagggcagcgcacccggcagccctgccggcagccccacctccacagaggagggaaccagcaccgagcccagcgaaggcagcgccccaggcaccagcaccgagcctagtgagcaggagattaaacggatcaacaagatcagaagaagacttgtgaaagacagcaacaccaagaaggccggcaagacaggccccatgaaaaccctgctggttagagtgatgacacccgatctgagagagcggctggaaaacctgagaaagaagcctgaaaatatcccccagcccatcagcaatacatctagagccaacctgaataagctgctgaccgattacaccgaaatgaagaaggcgatcctgcatgtgtactgggaagagttccagaaggaccctgtgggcctgatgagccgggtggcccagcctgccagcaagaagatcgatcagaacaagctgaaacctgagatggacgagaagggcaacctgaccaccgccggctttgcctgctctcagtgtggccagcccctgttcgtgtacaagctggagcaggtgtctgagaagggcaaggcttacaccaactacttcggacggtgcaatgtggccgagcacgaaaagctgatcctgctggcccagctgaagcccgagaaggatagcgacgaagccgtgacatatagcctgggaaagtttgggcagagggccctggatttctacagcattcatgtgaccaaggagtccacccaccccgtgaagcccctggcccagatcgccggaaacagatacgcctccggacctgtgggaaaggccctgagcgacgcatgtatgggcacaatcgcctccttcctgtctaagtaccaggacatcatcatcgaacaccagaaggtggtgaagggcaaccagaagagactggagagcctgcgggagctggccggcaaggaaaacctggaataccctagcgtgaccctgccacctcagcctcacaccaaggagggcgttgatgcctacaacgaagtgatcgcccgggtgcgaatgtgggtgaacctgaacctgtggcagaagctgaagctaagcagagatgatgccaagcctctgctgagactgaagggattcccttcctttcctctggtcgagagacaggccaacgaagtggactggtgggacatggtgtgtaacgtgaagaagctgatcaacgagaaaaaggaggatggcaaggtgttttggcagaatctggctggctacaagagacaggaagccctgagaccatacctgagcagcgaggaagatcggaagaagggaaagaaattcgctcggtaccagctgggcgacctgctgctgcacctggaaaagaagcacggcgaggactggggaaaggtgtacgacgaggcctgggagcggattgacaagaaagtggaaggcctgagcaagcacatcaagctggaagaggaacggagaagcgaggacgcccagagcaaggccgccctgaccgactggctgcgggctaaggccagcttcgtgatcgagggcctgaaggaggccgacaaggacgagttctgcagatgcgagctgaagctgcagaagtggtacggggacctgcggggaaagcccttcgccatcgaagccgagaacagcatcctggacatcagcggcttcagcaagcagtacaactgtgccttcatctggcagaaggacggcgtgaagaagctgaacctgtacctgatcatcaactacttcaagggcggcaagctgcggttcaagaagatcaaacctgaagccttcgaagccaacagattctacaccgtgatcaacaaaaagagcggcgagatcgtgcccatggaggtgaacttcaacttcgacgaccccaacctgatcatcctgcctctggcctttggcaagagacagggcagagaattcatctggaacgacctgctgtccctggaaaccggcagcctgaagctggccaacggaagagtgatcgagaagacactgtacaacagaagaacccggcaggatgagcctgccctgttcgtggccctgaccttcgagcggcgggaggtcctggactcctccaatatcaaaccaatgaacctgatcggcgtggcaagaggcgaaaacatccccgccgtgatcgccctgaccgaccccgagggctgcccactgagccggtttaaggatagcctgggaaacccaacccacatcctgagaatcggcgagagctataaggagaagcagcggaccatccaggccaagaaggaggtggagcagcggagagccggcggctacagccggaagtacgccagcaaagccaagaatctggcagacgatatggtgagaaacaccgctagagatctgctgtactacgccgtgacccaggatgccatgctgatcttcgccaacctgagccggggcttcggccggcagggcaagcggaccttcatggccgagagacagtacacacggatggaggactggctgaccgccaagctggcctacgagggcctgagcaagacctacctgtccaagacactggcccagtacacctccaagacatgcagcaactgtgggtttaccatcaccagcgccgactacgacagggtgctggagaagctgaagaagacagcaacaggctggatgaccacaattaacggcaaggagctgaaggtggagggccagattacctactacaacagatacaagagacagaacgtagtcaaggacctgtccgtcgagctggatagactgagcgaagaatctgtgaacaacgacatctcctcctggacaaagggcagaagcggagaagctctgagcctcctgaagaaaagattctcccatagacccgtgcaggagaagttcgtgtgcctgaactgcggcttcgagacacacgcagccgagcaagccgccctgaacatcgccagatcctggctgttcctgcggagccaggagtacaagaaataccagacaaacaagacaaccggcaacaccgataagagagccttcgtcgagacctggcagtccttttaccggaagaagcttaaggaggtgtggaaacctgccgtgcggtctggcggatctggcggaggctccaccagccccaagaaaaagagaaaagtctaagctgccttctgcggggcttgccttctggccatgcccttcttctctcccttgcacctgtacctcttggtctttgaataaagcctgagtaggaaggctagcaaaaaaaaaaaaaaaaaaaaaaaaaaaaaaaaaaaaaaaaaaaaaaaaaaaaaaaaaaaaaaaaaaaaaaaaaaaaaaaa

SEQ ID NO: 9268 - RNA, 8787 nt, synthetic construct
  source 1..8787: mol_type = other RNA
aggaaataagagagaaaagaagagtaagaagaaatataagagccaccatggcccctaagaagaagcgtaaagtgagccggatgaaccacgaccaggagttcgacccccctaaggtgtaccctcccgtccccgccgagaagagaaagcccatccgggtcctgagcctgttcgatggcatcgccaccggtctgctggtgctgaaggacctgggcatccaggtggataggtacattgcctccgaggtgtgcgaggactccatcaccgtgggaatggtgcgtcatcagggcaagatcatgtacgtgggcgacgtgcggagcgtgacacagaagcatatccaggagtggggccctttcgacctggtgatcggcggcagcccttgcaatgacctgagcatcgtgaacccagcccggaagggcctgtacgagggaaccggcagactgttcttcgagttttacagactgctgcacgacgcccggcctaaggaaggcgacgaccggcccttcttttggctgttcgagaatgtggtggccatgggagtcagcgacaagcgggatattagccggttcctggagagcaaccccgtgatgatcgatgccaaggaagtgagcgccgcccaccgggccagatacttctggggcaatctgcctggcatgaacagacccctggccagcaccgtgaacgacaagctggagctgcaggagtgcctggagcacggccggatcgccaagttcagcaaggtgagaaccatcaccacccgaagcaacagcatcaaacaaggcaaggaccagcactttcctgtgttcatgaacgagaaggaggacatcctgtggtgtaccgagatggagagagtgttcgggttcccagtccactacacagatgtcagcaacatgtctagactggccagacagagactgctgggaagaagctggtccgtccctgtgatcagacacctgttcgcccctctgaaggagtacttcgcctgcgtgagcagcggcaacagcaacgccaacagccggggccccagcttctctagcggcctggtgccactgtccctgagagggagccacatgggccccatggagatctacaaaaccgtgagcgcctggaagcggcagcctgtgcgcgtgctgagcctgtttcggaatatcgataaagtcctgaaaagcctgggattcctggagagcggctctggctccggcggtggcaccctgaagtacgtggaggatgtgacaaacgtggtcagacgggatgtggagaagtggggccccttcgatctggtgtacggcagcacccaacccctgggcagctcttgtgaccggtgccctggctggtacatgtttcagttccaccggatcctgcagtacgccctgccgagacaggagtcccagcggccattcttttggattttcatggacaacttgctgctgaccgaggatgaccaggaaactaccactcggttcctgcagaccgaagccgtgaccctgcaggacgtgagaggccgggactaccagaacgccatgcgggtgtggtccaacatccctggactgaaaagcaagcacgcacctctgacccctaaagaagaggagtacctgcaggcccaggtgcggagcagaagcaagctggacgcccctaaggtggatctgctggtgaagaattgcctcctgcccctgagagagtacttcaagtatttcagccagaatagtctgcccctgggaggcagcggcggcggcgacagcgtggccttcgaggacgtggccgtgaacttcacccaggaggagtgggccctgctggaccccagccagaagaacctgtacagggaggtgatgcaggagaccctgaggaacctgaccagcatcggcaagaagtggaacaaccagtacatcgaggacgagcaccagaaccccaagaggaacctgaggaggctgatcggcgagaggctgagcgagagcaaggagagccaccagcacggcgagggcggcccaagcagcggcgcccctcctcccagcggcggcaggcggcccaagcagcggcgcccctcctcccagcggcggcagcccagccggctccccaacctctaccgaggagggcacctctgagtccgccacccccgagagcggccctggcacctccaccgagcccagcgagggcagcgcacccggcagccctgccggcagccccacctccacagaggagggaaccagcaccgagcccagcgaaggcagcgccccaggcaccagcaccgagcctagtgagcaggagattaaacggatcaacaagatcagaagaagacttgtgaaagacagcaacaccaagaaggccggcaagacaggccccatgaaaaccctgctggttagagtgatgacacccgatctgagagagcggctggaaaacctgagaaagaagcctgaaaatatcccccagcccatcagcaatacatctagagccaacctgaataagctgctgaccgattacaccgaaatgaagaaggcgatcctgcatgtgtactgggaagagttccagaaggaccctgtgggcctgatgagccgggtggcccagcctgccagcaagaagatcgatcagaacaagctgaaacctgagatggacgagaagggcaacctgaccaccgccggctttgcctgctctcagtgtggccagcccctgttcgtgtacaagctggagcaggtgtctgagaagggcaaggcttacaccaactacttcggacggtgcaatgtggccgagcacgaaaagctgatcctgctggcccagctgaagcccgagaaggatagcgacgaagccgtgacatatagcctgggaaagtttgggcagagggccctggatttctacagcattcatgtgaccaaggagtccacccaccccgtgaagcccctggcccagatcgccggaaacagatacgcctccggacctgtgggaaaggccctgagcgacgcatgtatgggcacaatcgcctccttcctgtctaagtaccaggacatcatcatcgaacaccagaaggtggtgaagggcaaccagaagagactggagagcctgcgggagctggccggcaaggaaaacctggaataccctagcgtgaccctgccacctcagcctcacaccaaggagggcgttgatgcctacaacgaagtgatcgcccgggtgcgaatgtgggtgaacctgaacctgtggcagaagctgaagctaagcagagatgatgccaagcctctgctgagactgaagggattcccttcctttcctctggtcgagagacaggccaacgaagtggactggtgggacatggtgtgtaacgtgaagaagctgatcaacgagaaaaaggaggatggcaaggtgttttggcagaatctggctggctacaagagacaggaagccctgagaccatacctgagcagcgaggaagatcggaagaagggaaagaaattcgctcggtaccagctgggcgacctgctgctgcacctggaaaagaagcacggcgaggactggggaaaggtgtacgacgaggcctgggagcggattgacaagaaagtggaaggcctgagcaagcacatcaagctggaagaggaacggagaagcgaggacgcccagagcaaggccgccctgaccgactggctgcgggctaaggccagcttcgtgatcgagggcctgaaggaggccgacaaggacgagttctgcagatgcgagctgaagctgcagaagtggtacggggacctgcggggaaagcccttcgccatcgaagccgagaacagcatcctggacatcagcggcttcagcaagcagtacaactgtgccttcatctggcagaaggacggcgtgaagaagctgaacctgtacctgatcatcaactacttcaagggcggcaagctgcggttcaagaagatcaaacctgaagccttcgaagccaacagattctacaccgtgatcaacaaaaagagcggcgagatcgtgcccatggaggtgaacttcaacttcgacgaccccaacctgatcatcctgcctctggcctttggcaagagacagggcagagaattcatctggaacgacctgctgtccctggaaaccggcagcctgaagctggccaacggaagagtgatcgagaagacactgtacaacagaagaacccggcaggatgagcctgccctgttcgtggccctgaccttcgagcggcgggaggtcctggactcctccaatatcaaaccaatgaacctgatcggcgtggcaagaggcgaaaacatccccgccgtgatcgccctgaccgaccccgagggctgcccactgagccggtttaaggatagcctgggaaacccaacccacatcctgagaatcggcgagagctataaggagaagcagcggaccatccaggccaagaaggaggtggagcagcggagagccggcggctacagccggaagtacgccagcaaagccaagaatctggcagacgatatggtgagaaacaccgctagagatctgctgtactacgccgtgacccaggatgccatgctgatcttcgccaacctgagccggggcttcggccggcagggcaagcggaccttcatggccgagagacagtacacacggatggaggactggctgaccgccaagctggcctacgagggcctgagcaagacctacctgtccaagacactggcccagtacacctccaagacatgcagcaactgtgggtttaccatcaccagcgccgactacgacagggtgctggagaagctgaagaagacagcaacaggctggatgaccacaattaacggcaaggagctgaaggtggagggccagattacctactacaacagatacaagagacagaacgtagtcaaggacctgtccgtcgagctggatagactgagcgaagaatctgtgaacaacgacatctcctcctggacaaagggcagaagcggagaagctctgagcctcctgaagaaaagattctcccatagacccgtgcaggagaagttcgtgtgcctgaactgcggcttcgagacacacgcagccgagcaagccgccctgaacatcgccagatcctggctgttcctgcggagccaggagtacaagaaataccagacaaacaagacaaccggcaacaccgataagagagccttcgtcgagacctggcagtccttttaccggaagaagcttaaggaggtgtggaaacctgccgtgcggtctggcggatctggcggaggctccaccagccccaagaaaaagagaaaagtctaagctgccttctgcggggcttgccttctggccatgcccttcttctctcccttgcacctgtacctcttggtctttgaataaagcctgagtaggaaggctagcaaaaaaaaaaaaaaaaaaaaaaaaaaaaaaaaaaaaaaaaaaaaaaaaaaaaaaaaaaaaaaaaaaaaaaaaaaaaaaaagcccagccggctccccaacctctaccgaggagggcacctctgagtccgccacccccgagagcggccctggcacctccaccgagcccagcgagggcagcgcacccggcagccctgccggcagccccacctccacagaggagggaaccagcaccgagcccagcgaaggcagcgccccaggcaccagcaccgagcctagtgagcaggagattaaacggatcaacaagatcagaagaagacttgtgaaagacagcaacaccaagaaggccggcaagacaggccccatgaaaaccctgctggttagagtgatgacacccgatctgagagagcggctggaaaacctgagaaagaagcctgaaaatatcccccagcccatcagcaatacatctagagccaacctgaataagctgctgaccgattacaccgaaatgaagaaggcgatcctgcatgtgtactgggaagagttccagaaggaccctgtgggcctgatgagccgggtggcccagcctgccagcaagaagatcgatcagaacaagctgaaacctgagatggacgagaagggcaacctgaccaccgccggctttgcctgctctcagtgtggccagcccctgttcgtgtacaagctggagcaggtgtctgagaagggcaaggcttacaccaactacttcggacggtgcaatgtggccgagcacgaaaagctgatcctgctggcccagctgaagcccgagaaggatagcgacgaagccgtgacatatagcctgggaaagtttgggcagagggccctggatttctacagcattcatgtgaccaaggagtccacccaccccgtgaagcccctggcccagatcgccggaaacagatacgcctccggacctgtgggaaaggccctgagcgacgcatgtatgggcacaatcgcctccttcctgtctaagtaccaggacatcatcatcgaacaccagaaggtggtgaagggcaaccagaagagactggagagcctgcgggagctggccggcaaggaaaacctggaataccctagcgtgaccctgccacctcagcctcacaccaaggagggcgttgatgcctacaacgaagtgatcgcccgggtgcgaatgtgggtgaacctgaacctgtggcagaagctgaagctaagcagagatgatgccaagcctctgctgagactgaagggattcccttcctttcctctggtcgagagacaggccaacgaagtggactggtgggacatggtgtgtaacgtgaagaagctgatcaacgagaaaaaggaggatggcaaggtgttttggcagaatctggctggctacaagagacaggaagccctgagaccatacctgagcagcgaggaagatcggaagaagggaaagaaattcgctcggtaccagctgggcgacctgctgctgcacctggaaaagaagcacggcgaggactggggaaaggtgtacgacgaggcctgggagcggattgacaagaaagtggaaggcctgagcaagcacatcaagctggaagaggaacggagaagcgaggacgcccagagcaaggccgccctgaccgactggctgcgggctaaggccagcttcgtgatcgagggcctgaaggaggccgacaaggacgagttctgcagatgcgagctgaagctgcagaagtggtacggggacctgcggggaaagcccttcgccatcgaagccgagaacagcatcctggacatcagcggcttcagcaagcagtacaactgtgccttcatctggcagaaggacggcgtgaagaagctgaacctgtacctgatcatcaactacttcaagggcggcaagctgcggttcaagaagatcaaacctgaagccttcgaagccaacagattctacaccgtgatcaacaaaaagagcggcgagatcgtgcccatggaggtgaacttcaacttcgacgaccccaacctgatcatcctgcctctggcctttggcaagagacagggcagagaattcatctggaacgacctgctgtccctggaaaccggcagcctgaagctggccaacggaagagtgatcgagaagacactgtacaacagaagaacccggcaggatgagcctgccctgttcgtggccctgaccttcgagcggcgggaggtcctggactcctccaatatcaaaccaatgaacctgatcggcgtggcaagaggcgaaaacatccccgccgtgatcgccctgaccgaccccgagggctgcccactgagccggtttaaggatagcctgggaaacccaacccacatcctgagaatcggcgagagctataaggagaagcagcggaccatccaggccaagaaggaggtggagcagcggagagccggcggctacagccggaagtacgccagcaaagccaagaatctggcagacgatatggtgagaaacaccgctagagatctgctgtactacgccgtgacccaggatgccatgctgatcttcgccaacctgagccggggcttcggccggcagggcaagcggaccttcatggccgagagacagtacacacggatggaggactggctgaccgccaagctggcctacgagggcctgagcaagacctacctgtccaagacactggcccagtacacctccaagacatgcagcaactgtgggtttaccatcaccagcgccgactacgacagggtgctggagaagctgaagaagacagcaacaggctggatgaccacaattaacggcaaggagctgaaggtggagggccagattacctactacaacagatacaagagacagaacgtagtcaaggacctgtccgtcgagctggatagactgagcgaagaatctgtgaacaacgacatctcctcctggacaaagggcagaagcggagaagctctgagcctcctgaagaaaagattctcccatagacccgtgcaggagaagttcgtgtgcctgaactgcggcttcgagacacacgcagccgagcaagccgccctgaacatcgccagatcctggctgttcctgcggagccaggagtacaagaaataccagacaaacaagacaaccggcaacaccgataagagagccttcgtcgagacctggcagtccttttaccggaagaagcttaaggaggtgtggaaacctgccgtgcggtctggcggatctggcggaggctccaccagccccaagaaaaagagaaaagtctaagctgccttctgcggggcttgccttctggccatgcccttcttctctcccttgcacctgtacctcttggtctttgaataaagcctgagtaggaaggctagcaaaaaaaaaaaaaaaaaaaaaaaaaaaaaaaaaaaaaaaaaaaaaaaaaaaaaaaaaaaaaaaaaaaaaaaaaaaaaaaa

SEQ ID NO: 9269 - RNA, 8787 nt, synthetic construct
  source 1..8787: mol_type = other RNA
aggaaataagagagaaaagaagagtaagaagaaatataagagccaccatggcccctaagaagaagcgtaaagtgagccggatgaaccacgaccaggagttcgacccccctaaggtgtaccctcccgtccccgccgagaagagaaagcccatccgggtcctgagcctgttcgatggcatcgccaccggtctgctggtgctgaaggacctgggcatccaggtggataggtacattgcctccgaggtgtgcgaggactccatcaccgtgggaatggtgcgtcatcagggcaagatcatgtacgtgggcgacgtgcggagcgtgacacagaagcatatccaggagtggggccctttcgacctggtgatcggcggcagcccttgcaatgacctgagcatcgtgaacccagcccggaagggcctgtacgagggaaccggcagactgttcttcgagttttacagactgctgcacgacgcccggcctaaggaaggcgacgaccggcccttcttttggctgttcgagaatgtggtggccatgggagtcagcgacaagcgggatattagccggttcctggagagcaaccccgtgatgatcgatgccaaggaagtgagcgccgcccaccgggccagatacttctggggcaatctgcctggcatgaacagacccctggccagcaccgtgaacgacaagctggagctgcaggagtgcctggagcacggccggatcgccaagttcagcaaggtgagaaccatcaccacccgaagcaacagcatcaaacaaggcaaggaccagcactttcctgtgttcatgaacgagaaggaggacatcctgtggtgtaccgagatggagagagtgttcgggttcccagtccactacacagatgtcagcaacatgtctagactggccagacagagactgctgggaagaagctggtccgtccctgtgatcagacacctgttcgcccctctgaaggagtacttcgcctgcgtgagcagcggcaacagcaacgccaacagccggggccccagcttctctagcggcctggtgccactgtccctgagagggagccacatgggccccatggagatctacaaaaccgtgagcgcctggaagcggcagcctgtgcgcgtgctgagcctgtttcggaatatcgataaagtcctgaaaagcctgggattcctggagagcggctctggctccggcggtggcaccctgaagtacgtggaggatgtgacaaacgtggtcagacgggatgtggagaagtggggccccttcgatctggtgtacggcagcacccaacccctgggcagctcttgtgaccggtgccctggctggtacatgtttcagttccaccggatcctgcagtacgccctgccgagacaggagtcccagcggccattcttttggattttcatggacaacttgctgctgaccgaggatgaccaggaaactaccactcggttcctgcagaccgaagccgtgaccctgcaggacgtgagaggccgggactaccagaacgccatgcgggtgtggtccaacatccctggactgaaaagcaagcacgcacctctgacccctaaagaagaggagtacctgcaggcccaggtgcggagcagaagcaagctggacgcccctaaggtggatctgctggtgaagaattgcctcctgcccctgagagagtacttcaagtatttcagccagaatagtctgcccctgggaggcagcggcggcggcgtgcaggagcccgtgaccttcaaggacgtggccgtggacttcacccaggaggagtggggccagctggacctggtgcagaggaccctgtacagggacgtgatgctggagacctacggccacctgctgagcgtgggcaaccagatcgccaagcccgaggtgatcagcctgctggagcagggcgaggagccctggagcgtggagcaggcctgcccccagaggaccggccccgagtgggtgaggaacggcggcccaagcagcggcgcccctcctcccagcggcggcaggcggcccaagcagcggcgcccctcctcccagcggcggcagcccagccggctccccaacctctaccgaggagggcacctctgagtccgccacccccgagagcggccctggcacctccaccgagcccagcgagggcagcgcacccggcagccctgccggcagccccacctccacagaggagggaaccagcaccgagcccagcgaaggcagcgccccaggcaccagcaccgagcctagtgagcaggagattaaacggatcaacaagatcagaagaagacttgtgaaagacagcaacaccaagaaggccggcaagacaggccccatgaaaaccctgctggttagagtgatgacacccgatctgagagagcggctggaaaacctgagaaagaagcctgaaaatatcccccagcccatcagcaatacatctagagccaacctgaataagctgctgaccgattacaccgaaatgaagaaggcgatcctgcatgtgtactgggaagagttccagaaggaccctgtgggcctgatgagccgggtggcccagcctgccagcaagaagatcgatcagaacaagctgaaacctgagatggacgagaagggcaacctgaccaccgccggctttgcctgctctcagtgtggccagcccctgttcgtgtacaagctggagcaggtgtctgagaagggcaaggcttacaccaactacttcggacggtgcaatgtggccgagcacgaaaagctgatcctgctggcccagctgaagcccgagaaggatagcgacgaagccgtgacatatagcctgggaaagtttgggcagagggccctggatttctacagcattcatgtgaccaaggagtccacccaccccgtgaagcccctggcccagatcgccggaaacagatacgcctccggacctgtgggaaaggccctgagcgacgcatgtatgggcacaatcgcctccttcctgtctaagtaccaggacatcatcatcgaacaccagaaggtggtgaagggcaaccagaagagactggagagcctgcgggagctggccggcaaggaaaacctggaataccctagcgtgaccctgccacctcagcctcacaccaaggagggcgttgatgcctacaacgaagtgatcgcccgggtgcgaatgtgggtgaacctgaacctgtggcagaagctgaagctaagcagagatgatgccaagcctctgctgagactgaagggattcccttcctttcctctggtcgagagacaggccaacgaagtggactggtgggacatggtgtgtaacgtgaagaagctgatcaacgagaaaaaggaggatggcaaggtgttttggcagaatctggctggctacaagagacaggaagccctgagaccatacctgagcagcgaggaagatcggaagaagggaaagaaattcgctcggtaccagctgggcgacctgctgctgcacctggaaaagaagcacggcgaggactggggaaaggtgtacgacgaggcctgggagcggattgacaagaaagtggaaggcctgagcaagcacatcaagctggaagaggaacggagaagcgaggacgcccagagcaaggccgccctgaccgactggctgcgggctaaggccagcttcgtgatcgagggcctgaaggaggccgacaaggacgagttctgcagatgcgagctgaagctgcagaagtggtacggggacctgcggggaaagcccttcgccatcgaagccgagaacagcatcctggacatcagcggcttcagcaagcagtacaactgtgccttcatctggcagaaggacggcgtgaagaagctgaacctgtacctgatcatcaactacttcaagggcggcaagctgcggttcaagaagatcaaacctgaagccttcgaagccaacagattctacaccgtgatcaacaaaaagagcggcgagatcgtgcccatggaggtgaacttcaacttcgacgaccccaacctgatcatcctgcctctggcctttggcaagagacagggcagagaattcatctggaacgacctgctgtccctggaaaccggcagcctgaagctggccaacggaagagtgatcgagaagacactgtacaacagaagaacccggcaggatgagcctgccctgttcgtggccctgaccttcgagcggcgggaggtcctggactcctccaatatcaaaccaatgaacctgatcggcgtggcaagaggcgaaaacatccccgccgtgatcgccctgaccgaccccgagggctgcccactgagccggtttaaggatagcctgggaaacccaacccacatcctgagaatcggcgagagctataaggagaagcagcggaccatccaggccaagaaggaggtggagcagcggagagccggcggctacagccggaagtacgccagcaaagccaagaatctggcagacgatatggtgagaaacaccgctagagatctgctgtactacgccgtgacccaggatgccatgctgatcttcgccaacctgagccggggcttcggccggcagggcaagcggaccttcatggccgagagacagtacacacggatggaggactggctgaccgccaagctggcctacgagggcctgagcaagacctacctgtccaagacactggcccagtacacctccaagacatgcagcaactgtgggtttaccatcaccagcgccgactacgacagggtgctggagaagctgaagaagacagcaacaggctggatgaccacaattaacggcaaggagctgaaggtggagggccagattacctactacaacagatacaagagacagaacgtagtcaaggacctgtccgtcgagctggatagactgagcgaagaatctgtgaacaacgacatctcctcctggacaaagggcagaagcggagaagctctgagcctcctgaagaaaagattctcccatagacccgtgcaggagaagttcgtgtgcctgaactgcggcttcgagacacacgcagccgagcaagccgccctgaacatcgccagatcctggctgttcctgcggagccaggagtacaagaaataccagacaaacaagacaaccggcaacaccgataagagagccttcgtcgagacctggcagtccttttaccggaagaagcttaaggaggtgtggaaacctgccgtgcggtctggcggatctggcggaggctccaccagccccaagaaaaagagaaaagtctaagctgccttctgcggggcttgccttctggccatgcccttcttctctcccttgcacctgtacctcttggtctttgaataaagcctgagtaggaaggctagcaaaaaaaaaaaaaaaaaaaaaaaaaaaaaaaaaaaaaaaaaaaaaaaaaaaaaaaaaaaaaaaaaaaaaaaaaaaaaaaagcccagccggctccccaacctctaccgaggagggcacctctgagtccgccacccccgagagcggccctggcacctccaccgagcccagcgagggcagcgcacccggcagccctgccggcagccccacctccacagaggagggaaccagcaccgagcccagcgaaggcagcgccccaggcaccagcaccgagcctagtgagcaggagattaaacggatcaacaagatcagaagaagacttgtgaaagacagcaacaccaagaaggccggcaagacaggccccatgaaaaccctgctggttagagtgatgacacccgatctgagagagcggctggaaaacctgagaaagaagcctgaaaatatcccccagcccatcagcaatacatctagagccaacctgaataagctgctgaccgattacaccgaaatgaagaaggcgatcctgcatgtgtactgggaagagttccagaaggaccctgtgggcctgatgagccgggtggcccagcctgccagcaagaagatcgatcagaacaagctgaaacctgagatggacgagaagggcaacctgaccaccgccggctttgcctgctctcagtgtggccagcccctgttcgtgtacaagctggagcaggtgtctgagaagggcaaggcttacaccaactacttcggacggtgcaatgtggccgagcacgaaaagctgatcctgctggcccagctgaagcccgagaaggatagcgacgaagccgtgacatatagcctgggaaagtttgggcagagggccctggatttctacagcattcatgtgaccaaggagtccacccaccccgtgaagcccctggcccagatcgccggaaacagatacgcctccggacctgtgggaaaggccctgagcgacgcatgtatgggcacaatcgcctccttcctgtctaagtaccaggacatcatcatcgaacaccagaaggtggtgaagggcaaccagaagagactggagagcctgcgggagctggccggcaaggaaaacctggaataccctagcgtgaccctgccacctcagcctcacaccaaggagggcgttgatgcctacaacgaagtgatcgcccgggtgcgaatgtgggtgaacctgaacctgtggcagaagctgaagctaagcagagatgatgccaagcctctgctgagactgaagggattcccttcctttcctctggtcgagagacaggccaacgaagtggactggtgggacatggtgtgtaacgtgaagaagctgatcaacgagaaaaaggaggatggcaaggtgttttggcagaatctggctggctacaagagacaggaagccctgagaccatacctgagcagcgaggaagatcggaagaagggaaagaaattcgctcggtaccagctgggcgacctgctgctgcacctggaaaagaagcacggcgaggactggggaaaggtgtacgacgaggcctgggagcggattgacaagaaagtggaaggcctgagcaagcacatcaagctggaagaggaacggagaagcgaggacgcccagagcaaggccgccctgaccgactggctgcgggctaaggccagcttcgtgatcgagggcctgaaggaggccgacaaggacgagttctgcagatgcgagctgaagctgcagaagtggtacggggacctgcggggaaagcccttcgccatcgaagccgagaacagcatcctggacatcagcggcttcagcaagcagtacaactgtgccttcatctggcagaaggacggcgtgaagaagctgaacctgtacctgatcatcaactacttcaagggcggcaagctgcggttcaagaagatcaaacctgaagccttcgaagccaacagattctacaccgtgatcaacaaaaagagcggcgagatcgtgcccatggaggtgaacttcaacttcgacgaccccaacctgatcatcctgcctctggcctttggcaagagacagggcagagaattcatctggaacgacctgctgtccctggaaaccggcagcctgaagctggccaacggaagagtgatcgagaagacactgtacaacagaagaacccggcaggatgagcctgccctgttcgtggccctgaccttcgagcggcgggaggtcctggactcctccaatatcaaaccaatgaacctgatcggcgtggcaagaggcgaaaacatccccgccgtgatcgccctgaccgaccccgagggctgcccactgagccggtttaaggatagcctgggaaacccaacccacatcctgagaatcggcgagagctataaggagaagcagcggaccatccaggccaagaaggaggtggagcagcggagagccggcggctacagccggaagtacgccagcaaagccaagaatctggcagacgatatggtgagaaacaccgctagagatctgctgtactacgccgtgacccaggatgccatgctgatcttcgccaacctgagccggggcttcggccggcagggcaagcggaccttcatggccgagagacagtacacacggatggaggactggctgaccgccaagctggcctacgagggcctgagcaagacctacctgtccaagacactggcccagtacacctccaagacatgcagcaactgtgggtttaccatcaccagcgccgactacgacagggtgctggagaagctgaagaagacagcaacaggctggatgaccacaattaacggcaaggagctgaaggtggagggccagattacctactacaacagatacaagagacagaacgtagtcaaggacctgtccgtcgagctggatagactgagcgaagaatctgtgaacaacgacatctcctcctggacaaagggcagaagcggagaagctctgagcctcctgaagaaaagattctcccatagacccgtgcaggagaagttcgtgtgcctgaactgcggcttcgagacacacgcagccgagcaagccgccctgaacatcgccagatcctggctgttcctgcggagccaggagtacaagaaataccagacaaacaagacaaccggcaacaccgataagagagccttcgtcgagacctggcagtccttttaccggaagaagcttaaggaggtgtggaaacctgccgtgcggtctggcggatctggcggaggctccaccagccccaagaaaaagagaaaagtctaagctgccttctgcggggcttgccttctggccatgcccttcttctctcccttgcacctgtacctcttggtctttgaataaagcctgagtaggaaggctagcaaaaaaaaaaaaaaaaaaaaaaaaaaaaaaaaaaaaaaaaaaaaaaaaaaaaaaaaaaaaaaaaaaaaaaaaaaaaaaaa

SEQ ID NO: 9270 - RNA, 8787 nt, synthetic construct
  source 1..8787: mol_type = other RNA
aggaaataagagagaaaagaagagtaagaagaaatataagagccaccatggcccctaagaagaagcgtaaagtgagccggatgaaccacgaccaggagttcgacccccctaaggtgtaccctcccgtccccgccgagaagagaaagcccatccgggtcctgagcctgttcgatggcatcgccaccggtctgctggtgctgaaggacctgggcatccaggtggataggtacattgcctccgaggtgtgcgaggactccatcaccgtgggaatggtgcgtcatcagggcaagatcatgtacgtgggcgacgtgcggagcgtgacacagaagcatatccaggagtggggccctttcgacctggtgatcggcggcagcccttgcaatgacctgagcatcgtgaacccagcccggaagggcctgtacgagggaaccggcagactgttcttcgagttttacagactgctgcacgacgcccggcctaaggaaggcgacgaccggcccttcttttggctgttcgagaatgtggtggccatgggagtcagcgacaagcgggatattagccggttcctggagagcaaccccgtgatgatcgatgccaaggaagtgagcgccgcccaccgggccagatacttctggggcaatctgcctggcatgaacagacccctggccagcaccgtgaacgacaagctggagctgcaggagtgcctggagcacggccggatcgccaagttcagcaaggtgagaaccatcaccacccgaagcaacagcatcaaacaaggcaaggaccagcactttcctgtgttcatgaacgagaaggaggacatcctgtggtgtaccgagatggagagagtgttcgggttcccagtccactacacagatgtcagcaacatgtctagactggccagacagagactgctgggaagaagctggtccgtccctgtgatcagacacctgttcgcccctctgaaggagtacttcgcctgcgtgagcagcggcaacagcaacgccaacagccggggccccagcttctctagcggcctggtgccactgtccctgagagggagccacatgggccccatggagatctacaaaaccgtgagcgcctggaagcggcagcctgtgcgcgtgctgagcctgtttcggaatatcgataaagtcctgaaaagcctgggattcctggagagcggctctggctccggcggtggcaccctgaagtacgtggaggatgtgacaaacgtggtcagacgggatgtggagaagtggggccccttcgatctggtgtacggcagcacccaacccctgggcagctcttgtgaccggtgccctggctggtacatgtttcagttccaccggatcctgcagtacgccctgccgagacaggagtcccagcggccattcttttggattttcatggacaacttgctgctgaccgaggatgaccaggaaactaccactcggttcctgcagaccgaagccgtgaccctgcaggacgtgagaggccgggactaccagaacgccatgcgggtgtggtccaacatccctggactgaaaagcaagcacgcacctctgacccctaaagaagaggagtacctgcaggcccaggtgcggagcagaagcaagctggacgcccctaaggtggatctgctggtgaagaattgcctcctgcccctgagagagtacttcaagtatttcagccagaatagtctgcccctgggaggcagcggcggcggcttccaggagagcgtggccttcgaggacgtggccgtgtacttcacccagaaccagtggggcagcctggaccccgcccagagggccctgtacagcgaggtgatgctggagaactacgccaacgtggccagcctggccttccccttccccaagcccgccctgatcagccacctggagaagggcgaggccccctggggccccgacccctgggacgccgagatccccagcggcatcaaccagggcggcggcggcccaagcagcggcgcccctcctcccagcggcggcaggcggcccaagcagcggcgcccctcctcccagcggcggcagcccagccggctccccaacctctaccgaggagggcacctctgagtccgccacccccgagagcggccctggcacctccaccgagcccagcgagggcagcgcacccggcagccctgccggcagccccacctccacagaggagggaaccagcaccgagcccagcgaaggcagcgccccaggcaccagcaccgagcctagtgagcaggagattaaacggatcaacaagatcagaagaagacttgtgaaagacagcaacaccaagaaggccggcaagacaggccccatgaaaaccctgctggttagagtgatgacacccgatctgagagagcggctggaaaacctgagaaagaagcctgaaaatatcccccagcccatcagcaatacatctagagccaacctgaataagctgctgaccgattacaccgaaatgaagaaggcgatcctgcatgtgtactgggaagagttccagaaggaccctgtgggcctgatgagccgggtggcccagcctgccagcaagaagatcgatcagaacaagctgaaacctgagatggacgagaagggcaacctgaccaccgccggctttgcctgctctcagtgtggccagcccctgttcgtgtacaagctggagcaggtgtctgagaagggcaaggcttacaccaactacttcggacggtgcaatgtggccgagcacgaaaagctgatcctgctggcccagctgaagcccgagaaggatagcgacgaagccgtgacatatagcctgggaaagtttgggcagagggccctggatttctacagcattcatgtgaccaaggagtccacccaccccgtgaagcccctggcccagatcgccggaaacagatacgcctccggacctgtgggaaaggccctgagcgacgcatgtatgggcacaatcgcctccttcctgtctaagtaccaggacatcatcatcgaacaccagaaggtggtgaagggcaaccagaagagactggagagcctgcgggagctggccggcaaggaaaacctggaataccctagcgtgaccctgccacctcagcctcacaccaaggagggcgttgatgcctacaacgaagtgatcgcccgggtgcgaatgtgggtgaacctgaacctgtggcagaagctgaagctaagcagagatgatgccaagcctctgctgagactgaagggattcccttcctttcctctggtcgagagacaggccaacgaagtggactggtgggacatggtgtgtaacgtgaagaagctgatcaacgagaaaaaggaggatggcaaggtgttttggcagaatctggctggctacaagagacaggaagccctgagaccatacctgagcagcgaggaagatcggaagaagggaaagaaattcgctcggtaccagctgggcgacctgctgctgcacctggaaaagaagcacggcgaggactggggaaaggtgtacgacgaggcctgggagcggattgacaagaaagtggaaggcctgagcaagcacatcaagctggaagaggaacggagaagcgaggacgcccagagcaaggccgccctgaccgactggctgcgggctaaggccagcttcgtgatcgagggcctgaaggaggccgacaaggacgagttctgcagatgcgagctgaagctgcagaagtggtacggggacctgcggggaaagcccttcgccatcgaagccgagaacagcatcctggacatcagcggcttcagcaagcagtacaactgtgccttcatctggcagaaggacggcgtgaagaagctgaacctgtacctgatcatcaactacttcaagggcggcaagctgcggttcaagaagatcaaacctgaagccttcgaagccaacagattctacaccgtgatcaacaaaaagagcggcgagatcgtgcccatggaggtgaacttcaacttcgacgaccccaacctgatcatcctgcctctggcctttggcaagagacagggcagagaattcatctggaacgacctgctgtccctggaaaccggcagcctgaagctggccaacggaagagtgatcgagaagacactgtacaacagaagaacccggcaggatgagcctgccctgttcgtggccctgaccttcgagcggcgggaggtcctggactcctccaatatcaaaccaatgaacctgatcggcgtggcaagaggcgaaaacatccccgccgtgatcgccctgaccgaccccgagggctgcccactgagccggtttaaggatagcctgggaaacccaacccacatcctgagaatcggcgagagctataaggagaagcagcggaccatccaggccaagaaggaggtggagcagcggagagccggcggctacagccggaagtacgccagcaaagccaagaatctggcagacgatatggtgagaaacaccgctagagatctgctgtactacgccgtgacccaggatgccatgctgatcttcgccaacctgagccggggcttcggccggcagggcaagcggaccttcatggccgagagacagtacacacggatggaggactggctgaccgccaagctggcctacgagggcctgagcaagacctacctgtccaagacactggcccagtacacctccaagacatgcagcaactgtgggtttaccatcaccagcgccgactacgacagggtgctggagaagctgaagaagacagcaacaggctggatgaccacaattaacggcaaggagctgaaggtggagggccagattacctactacaacagatacaagagacagaacgtagtcaaggacctgtccgtcgagctggatagactgagcgaagaatctgtgaacaacgacatctcctcctggacaaagggcagaagcggagaagctctgagcctcctgaagaaaagattctcccatagacccgtgcaggagaagttcgtgtgcctgaactgcggcttcgagacacacgcagccgagcaagccgccctgaacatcgccagatcctggctgttcctgcggagccaggagtacaagaaataccagacaaacaagacaaccggcaacaccgataagagagccttcgtcgagacctggcagtccttttaccggaagaagcttaaggaggtgtggaaacctgccgtgcggtctggcggatctggcggaggctccaccagccccaagaaaaagagaaaagtctaagctgccttctgcggggcttgccttctggccatgcccttcttctctcccttgcacctgtacctcttggtctttgaataaagcctgagtaggaaggctagcaaaaaaaaaaaaaaaaaaaaaaaaaaaaaaaaaaaaaaaaaaaaaaaaaaaaaaaaaaaaaaaaaaaaaaaaaaaaaaaagcccagccggctccccaacctctaccgaggagggcacctctgagtccgccacccccgagagcggccctggcacctccaccgagcccagcgagggcagcgcacccggcagccctgccggcagccccacctccacagaggagggaaccagcaccgagcccagcgaaggcagcgccccaggcaccagcaccgagcctagtgagcaggagattaaacggatcaacaagatcagaagaagacttgtgaaagacagcaacaccaagaaggccggcaagacaggccccatgaaaaccctgctggttagagtgatgacacccgatctgagagagcggctggaaaacctgagaaagaagcctgaaaatatcccccagcccatcagcaatacatctagagccaacctgaataagctgctgaccgattacaccgaaatgaagaaggcgatcctgcatgtgtactgggaagagttccagaaggaccctgtgggcctgatgagccgggtggcccagcctgccagcaagaagatcgatcagaacaagctgaaacctgagatggacgagaagggcaacctgaccaccgccggctttgcctgctctcagtgtggccagcccctgttcgtgtacaagctggagcaggtgtctgagaagggcaaggcttacaccaactacttcggacggtgcaatgtggccgagcacgaaaagctgatcctgctggcccagctgaagcccgagaaggatagcgacgaagccgtgacatatagcctgggaaagtttgggcagagggccctggatttctacagcattcatgtgaccaaggagtccacccaccccgtgaagcccctggcccagatcgccggaaacagatacgcctccggacctgtgggaaaggccctgagcgacgcatgtatgggcacaatcgcctccttcctgtctaagtaccaggacatcatcatcgaacaccagaaggtggtgaagggcaaccagaagagactggagagcctgcgggagctggccggcaaggaaaacctggaataccctagcgtgaccctgccacctcagcctcacaccaaggagggcgttgatgcctacaacgaagtgatcgcccgggtgcgaatgtgggtgaacctgaacctgtggcagaagctgaagctaagcagagatgatgccaagcctctgctgagactgaagggattcccttcctttcctctggtcgagagacaggccaacgaagtggactggtgggacatggtgtgtaacgtgaagaagctgatcaacgagaaaaaggaggatggcaaggtgttttggcagaatctggctggctacaagagacaggaagccctgagaccatacctgagcagcgaggaagatcggaagaagggaaagaaattcgctcggtaccagctgggcgacctgctgctgcacctggaaaagaagcacggcgaggactggggaaaggtgtacgacgaggcctgggagcggattgacaagaaagtggaaggcctgagcaagcacatcaagctggaagaggaacggagaagcgaggacgcccagagcaaggccgccctgaccgactggctgcgggctaaggccagcttcgtgatcgagggcctgaaggaggccgacaaggacgagttctgcagatgcgagctgaagctgcagaagtggtacggggacctgcggggaaagcccttcgccatcgaagccgagaacagcatcctggacatcagcggcttcagcaagcagtacaactgtgccttcatctggcagaaggacggcgtgaagaagctgaacctgtacctgatcatcaactacttcaagggcggcaagctgcggttcaagaagatcaaacctgaagccttcgaagccaacagattctacaccgtgatcaacaaaaagagcggcgagatcgtgcccatggaggtgaacttcaacttcgacgaccccaacctgatcatcctgcctctggcctttggcaagagacagggcagagaattcatctggaacgacctgctgtccctggaaaccggcagcctgaagctggccaacggaagagtgatcgagaagacactgtacaacagaagaacccggcaggatgagcctgccctgttcgtggccctgaccttcgagcggcgggaggtcctggactcctccaatatcaaaccaatgaacctgatcggcgtggcaagaggcgaaaacatccccgccgtgatcgccctgaccgaccccgagggctgcccactgagccggtttaaggatagcctgggaaacccaacccacatcctgagaatcggcgagagctataaggagaagcagcggaccatccaggccaagaaggaggtggagcagcggagagccggcggctacagccggaagtacgccagcaaagccaagaatctggcagacgatatggtgagaaacaccgctagagatctgctgtactacgccgtgacccaggatgccatgctgatcttcgccaacctgagccggggcttcggccggcagggcaagcggaccttcatggccgagagacagtacacacggatggaggactggctgaccgccaagctggcctacgagggcctgagcaagacctacctgtccaagacactggcccagtacacctccaagacatgcagcaactgtgggtttaccatcaccagcgccgactacgacagggtgctggagaagctgaagaagacagcaacaggctggatgaccacaattaacggcaaggagctgaaggtggagggccagattacctactacaacagatacaagagacagaacgtagtcaaggacctgtccgtcgagctggatagactgagcgaagaatctgtgaacaacgacatctcctcctggacaaagggcagaagcggagaagctctgagcctcctgaagaaaagattctcccatagacccgtgcaggagaagttcgtgtgcctgaactgcggcttcgagacacacgcagccgagcaagccgccctgaacatcgccagatcctggctgttcctgcggagccaggagtacaagaaataccagacaaacaagacaaccggcaacaccgataagagagccttcgtcgagacctggcagtccttttaccggaagaagcttaaggaggtgtggaaacctgccgtgcggtctggcggatctggcggaggctccaccagccccaagaaaaagagaaaagtctaagctgccttctgcggggcttgccttctggccatgcccttcttctctcccttgcacctgtacctcttggtctttgaataaagcctgagtaggaaggctagcaaaaaaaaaaaaaaaaaaaaaaaaaaaaaaaaaaaaaaaaaaaaaaaaaaaaaaaaaaaaaaaaaaaaaaaaaaaaaaaa

SEQ ID NO: 9271 - RNA, 8787 nt, synthetic construct
  source 1..8787: mol_type = other RNA
aggaaataagagagaaaagaagagtaagaagaaatataagagccaccatggcccctaagaagaagcgtaaagtgagccggatgaaccacgaccaggagttcgacccccctaaggtgtaccctcccgtccccgccgagaagagaaagcccatccgggtcctgagcctgttcgatggcatcgccaccggtctgctggtgctgaaggacctgggcatccaggtggataggtacattgcctccgaggtgtgcgaggactccatcaccgtgggaatggtgcgtcatcagggcaagatcatgtacgtgggcgacgtgcggagcgtgacacagaagcatatccaggagtggggccctttcgacctggtgatcggcggcagcccttgcaatgacctgagcatcgtgaacccagcccggaagggcctgtacgagggaaccggcagactgttcttcgagttttacagactgctgcacgacgcccggcctaaggaaggcgacgaccggcccttcttttggctgttcgagaatgtggtggccatgggagtcagcgacaagcgggatattagccggttcctggagagcaaccccgtgatgatcgatgccaaggaagtgagcgccgcccaccgggccagatacttctggggcaatctgcctggcatgaacagacccctggccagcaccgtgaacgacaagctggagctgcaggagtgcctggagcacggccggatcgccaagttcagcaaggtgagaaccatcaccacccgaagcaacagcatcaaacaaggcaaggaccagcactttcctgtgttcatgaacgagaaggaggacatcctgtggtgtaccgagatggagagagtgttcgggttcccagtccactacacagatgtcagcaacatgtctagactggccagacagagactgctgggaagaagctggtccgtccctgtgatcagacacctgttcgcccctctgaaggagtacttcgcctgcgtgagcagcggcaacagcaacgccaacagccggggccccagcttctctagcggcctggtgccactgtccctgagagggagccacatgggccccatggagatctacaaaaccgtgagcgcctggaagcggcagcctgtgcgcgtgctgagcctgtttcggaatatcgataaagtcctgaaaagcctgggattcctggagagcggctctggctccggcggtggcaccctgaagtacgtggaggatgtgacaaacgtggtcagacgggatgtggagaagtggggccccttcgatctggtgtacggcagcacccaacccctgggcagctcttgtgaccggtgccctggctggtacatgtttcagttccaccggatcctgcagtacgccctgccgagacaggagtcccagcggccattcttttggattttcatggacaacttgctgctgaccgaggatgaccaggaaactaccactcggttcctgcagaccgaagccgtgaccctgcaggacgtgagaggccgggactaccagaacgccatgcgggtgtggtccaacatccctggactgaaaagcaagcacgcacctctgacccctaaagaagaggagtacctgcaggcccaggtgcggagcagaagcaagctggacgcccctaaggtggatctgctggtgaagaattgcctcctgcccctgagagagtacttcaagtatttcagccagaatagtctgcccctgggaggcagcggcggcggcatggacgccgtgacctacgacgacgtgcacatcaacttcaccctggaggagtgggccctgctgaaccccagccagaagagcctgtacaaggacgtgatgctggacacctacaggaacctgaccgccatcggctacagctgggacgaccacaacatcgaggagatctgccagagcagcaggagccacaggaggcacctgcagaggcacgccaagatcaacaccggcgagaagccctacggcagcggcggcccaagcagcggcgcccctcctcccagcggcggcaggcggcccaagcagcggcgcccctcctcccagcggcggcagcccagccggctccccaacctctaccgaggagggcacctctgagtccgccacccccgagagcggccctggcacctccaccgagcccagcgagggcagcgcacccggcagccctgccggcagccccacctccacagaggagggaaccagcaccgagcccagcgaaggcagcgccccaggcaccagcaccgagcctagtgagcaggagattaaacggatcaacaagatcagaagaagacttgtgaaagacagcaacaccaagaaggccggcaagacaggccccatgaaaaccctgctggttagagtgatgacacccgatctgagagagcggctggaaaacctgagaaagaagcctgaaaatatcccccagcccatcagcaatacatctagagccaacctgaataagctgctgaccgattacaccgaaatgaagaaggcgatcctgcatgtgtactgggaagagttccagaaggaccctgtgggcctgatgagccgggtggcccagcctgccagcaagaagatcgatcagaacaagctgaaacctgagatggacgagaagggcaacctgaccaccgccggctttgcctgctctcagtgtggccagcccctgttcgtgtacaagctggagcaggtgtctgagaagggcaaggcttacaccaactacttcggacggtgcaatgtggccgagcacgaaaagctgatcctgctggcccagctgaagcccgagaaggatagcgacgaagccgtgacatatagcctgggaaagtttgggcagagggccctggatttctacagcattcatgtgaccaaggagtccacccaccccgtgaagcccctggcccagatcgccggaaacagatacgcctccggacctgtgggaaaggccctgagcgacgcatgtatgggcacaatcgcctccttcctgtctaagtaccaggacatcatcatcgaacaccagaaggtggtgaagggcaaccagaagagactggagagcctgcgggagctggccggcaaggaaaacctggaataccctagcgtgaccctgccacctcagcctcacaccaaggagggcgttgatgcctacaacgaagtgatcgcccgggtgcgaatgtgggtgaacctgaacctgtggcagaagctgaagctaagcagagatgatgccaagcctctgctgagactgaagggattcccttcctttcctctggtcgagagacaggccaacgaagtggactggtgggacatggtgtgtaacgtgaagaagctgatcaacgagaaaaaggaggatggcaaggtgttttggcagaatctggctggctacaagagacaggaagccctgagaccatacctgagcagcgaggaagatcggaagaagggaaagaaattcgctcggtaccagctgggcgacctgctgctgcacctggaaaagaagcacggcgaggactggggaaaggtgtacgacgaggcctgggagcggattgacaagaaagtggaaggcctgagcaagcacatcaagctggaagaggaacggagaagcgaggacgcccagagcaaggccgccctgaccgactggctgcgggctaaggccagcttcgtgatcgagggcctgaaggaggccgacaaggacgagttctgcagatgcgagctgaagctgcagaagtggtacggggacctgcggggaaagcccttcgccatcgaagccgagaacagcatcctggacatcagcggcttcagcaagcagtacaactgtgccttcatctggcagaaggacggcgtgaagaagctgaacctgtacctgatcatcaactacttcaagggcggcaagctgcggttcaagaagatcaaacctgaagccttcgaagccaacagattctacaccgtgatcaacaaaaagagcggcgagatcgtgcccatggaggtgaacttcaacttcgacgaccccaacctgatcatcctgcctctggcctttggcaagagacagggcagagaattcatctggaacgacctgctgtccctggaaaccggcagcctgaagctggccaacggaagagtgatcgagaagacactgtacaacagaagaacccggcaggatgagcctgccctgttcgtggccctgaccttcgagcggcgggaggtcctggactcctccaatatcaaaccaatgaacctgatcggcgtggcaagaggcgaaaacatccccgccgtgatcgccctgaccgaccccgagggctgcccactgagccggtttaaggatagcctgggaaacccaacccacatcctgagaatcggcgagagctataaggagaagcagcggaccatccaggccaagaaggaggtggagcagcggagagccggcggctacagccggaagtacgccagcaaagccaagaatctggcagacgatatggtgagaaacaccgctagagatctgctgtactacgccgtgacccaggatgccatgctgatcttcgccaacctgagccggggcttcggccggcagggcaagcggaccttcatggccgagagacagtacacacggatggaggactggctgaccgccaagctggcctacgagggcctgagcaagacctacctgtccaagacactggcccagtacacctccaagacatgcagcaactgtgggtttaccatcaccagcgccgactacgacagggtgctggagaagctgaagaagacagcaacaggctggatgaccacaattaacggcaaggagctgaaggtggagggccagattacctactacaacagatacaagagacagaacgtagtcaaggacctgtccgtcgagctggatagactgagcgaagaatctgtgaacaacgacatctcctcctggacaaagggcagaagcggagaagctctgagcctcctgaagaaaagattctcccatagacccgtgcaggagaagttcgtgtgcctgaactgcggcttcgagacacacgcagccgagcaagccgccctgaacatcgccagatcctggctgttcctgcggagccaggagtacaagaaataccagacaaacaagacaaccggcaacaccgataagagagccttcgtcgagacctggcagtccttttaccggaagaagcttaaggaggtgtggaaacctgccgtgcggtctggcggatctggcggaggctccaccagccccaagaaaaagagaaaagtctaagctgccttctgcggggcttgccttctggccatgcccttcttctctcccttgcacctgtacctcttggtctttgaataaagcctgagtaggaaggctagcaaaaaaaaaaaaaaaaaaaaaaaaaaaaaaaaaaaaaaaaaaaaaaaaaaaaaaaaaaaaaaaaaaaaaaaaaaaaaaaagcccagccggctccccaacctctaccgaggagggcacctctgagtccgccacccccgagagcggccctggcacctccaccgagcccagcgagggcagcgcacccggcagccctgccggcagccccacctccacagaggagggaaccagcaccgagcccagcgaaggcagcgccccaggcaccagcaccgagcctagtgagcaggagattaaacggatcaacaagatcagaagaagacttgtgaaagacagcaacaccaagaaggccggcaagacaggccccatgaaaaccctgctggttagagtgatgacacccgatctgagagagcggctggaaaacctgagaaagaagcctgaaaatatcccccagcccatcagcaatacatctagagccaacctgaataagctgctgaccgattacaccgaaatgaagaaggcgatcctgcatgtgtactgggaagagttccagaaggaccctgtgggcctgatgagccgggtggcccagcctgccagcaagaagatcgatcagaacaagctgaaacctgagatggacgagaagggcaacctgaccaccgccggctttgcctgctctcagtgtggccagcccctgttcgtgtacaagctggagcaggtgtctgagaagggcaaggcttacaccaactacttcggacggtgcaatgtggccgagcacgaaaagctgatcctgctggcccagctgaagcccgagaaggatagcgacgaagccgtgacatatagcctgggaaagtttgggcagagggccctggatttctacagcattcatgtgaccaaggagtccacccaccccgtgaagcccctggcccagatcgccggaaacagatacgcctccggacctgtgggaaaggccctgagcgacgcatgtatgggcacaatcgcctccttcctgtctaagtaccaggacatcatcatcgaacaccagaaggtggtgaagggcaaccagaagagactggagagcctgcgggagctggccggcaaggaaaacctggaataccctagcgtgaccctgccacctcagcctcacaccaaggagggcgttgatgcctacaacgaagtgatcgcccgggtgcgaatgtgggtgaacctgaacctgtggcagaagctgaagctaagcagagatgatgccaagcctctgctgagactgaagggattcccttcctttcctctggtcgagagacaggccaacgaagtggactggtgggacatggtgtgtaacgtgaagaagctgatcaacgagaaaaaggaggatggcaaggtgttttggcagaatctggctggctacaagagacaggaagccctgagaccatacctgagcagcgaggaagatcggaagaagggaaagaaattcgctcggtaccagctgggcgacctgctgctgcacctggaaaagaagcacggcgaggactggggaaaggtgtacgacgaggcctgggagcggattgacaagaaagtggaaggcctgagcaagcacatcaagctggaagaggaacggagaagcgaggacgcccagagcaaggccgccctgaccgactggctgcgggctaaggccagcttcgtgatcgagggcctgaaggaggccgacaaggacgagttctgcagatgcgagctgaagctgcagaagtggtacggggacctgcggggaaagcccttcgccatcgaagccgagaacagcatcctggacatcagcggcttcagcaagcagtacaactgtgccttcatctggcagaaggacggcgtgaagaagctgaacctgtacctgatcatcaactacttcaagggcggcaagctgcggttcaagaagatcaaacctgaagccttcgaagccaacagattctacaccgtgatcaacaaaaagagcggcgagatcgtgcccatggaggtgaacttcaacttcgacgaccccaacctgatcatcctgcctctggcctttggcaagagacagggcagagaattcatctggaacgacctgctgtccctggaaaccggcagcctgaagctggccaacggaagagtgatcgagaagacactgtacaacagaagaacccggcaggatgagcctgccctgttcgtggccctgaccttcgagcggcgggaggtcctggactcctccaatatcaaaccaatgaacctgatcggcgtggcaagaggcgaaaacatccccgccgtgatcgccctgaccgaccccgagggctgcccactgagccggtttaaggatagcctgggaaacccaacccacatcctgagaatcggcgagagctataaggagaagcagcggaccatccaggccaagaaggaggtggagcagcggagagccggcggctacagccggaagtacgccagcaaagccaagaatctggcagacgatatggtgagaaacaccgctagagatctgctgtactacgccgtgacccaggatgccatgctgatcttcgccaacctgagccggggcttcggccggcagggcaagcggaccttcatggccgagagacagtacacacggatggaggactggctgaccgccaagctggcctacgagggcctgagcaagacctacctgtccaagacactggcccagtacacctccaagacatgcagcaactgtgggtttaccatcaccagcgccgactacgacagggtgctggagaagctgaagaagacagcaacaggctggatgaccacaattaacggcaaggagctgaaggtggagggccagattacctactacaacagatacaagagacagaacgtagtcaaggacctgtccgtcgagctggatagactgagcgaagaatctgtgaacaacgacatctcctcctggacaaagggcagaagcggagaagctctgagcctcctgaagaaaagattctcccatagacccgtgcaggagaagttcgtgtgcctgaactgcggcttcgagacacacgcagccgagcaagccgccctgaacatcgccagatcctggctgttcctgcggagccaggagtacaagaaataccagacaaacaagacaaccggcaacaccgataagagagccttcgtcgagacctggcagtccttttaccggaagaagcttaaggaggtgtggaaacctgccgtgcggtctggcggatctggcggaggctccaccagccccaagaaaaagagaaaagtctaagctgccttctgcggggcttgccttctggccatgcccttcttctctcccttgcacctgtacctcttggtctttgaataaagcctgagtaggaaggctagcaaaaaaaaaaaaaaaaaaaaaaaaaaaaaaaaaaaaaaaaaaaaaaaaaaaaaaaaaaaaaaaaaaaaaaaaaaaaaaaa

SEQ ID NO: 9272 - RNA, 8787 nt, synthetic construct
  source 1..8787: mol_type = other RNA
aggaaataagagagaaaagaagagtaagaagaaatataagagccaccatggcccctaagaagaagcgtaaagtgagccggatgaaccacgaccaggagttcgacccccctaaggtgtaccctcccgtccccgccgagaagagaaagcccatccgggtcctgagcctgttcgatggcatcgccaccggtctgctggtgctgaaggacctgggcatccaggtggataggtacattgcctccgaggtgtgcgaggactccatcaccgtgggaatggtgcgtcatcagggcaagatcatgtacgtgggcgacgtgcggagcgtgacacagaagcatatccaggagtggggccctttcgacctggtgatcggcggcagcccttgcaatgacctgagcatcgtgaacccagcccggaagggcctgtacgagggaaccggcagactgttcttcgagttttacagactgctgcacgacgcccggcctaaggaaggcgacgaccggcccttcttttggctgttcgagaatgtggtggccatgggagtcagcgacaagcgggatattagccggttcctggagagcaaccccgtgatgatcgatgccaaggaagtgagcgccgcccaccgggccagatacttctggggcaatctgcctggcatgaacagacccctggccagcaccgtgaacgacaagctggagctgcaggagtgcctggagcacggccggatcgccaagttcagcaaggtgagaaccatcaccacccgaagcaacagcatcaaacaaggcaaggaccagcactttcctgtgttcatgaacgagaaggaggacatcctgtggtgtaccgagatggagagagtgttcgggttcccagtccactacacagatgtcagcaacatgtctagactggccagacagagactgctgggaagaagctggtccgtccctgtgatcagacacctgttcgcccctctgaaggagtacttcgcctgcgtgagcagcggcaacagcaacgccaacagccggggccccagcttctctagcggcctggtgccactgtccctgagagggagccacatgggccccatggagatctacaaaaccgtgagcgcctggaagcggcagcctgtgcgcgtgctgagcctgtttcggaatatcgataaagtcctgaaaagcctgggattcctggagagcggctctggctccggcggtggcaccctgaagtacgtggaggatgtgacaaacgtggtcagacgggatgtggagaagtggggccccttcgatctggtgtacggcagcacccaacccctgggcagctcttgtgaccggtgccctggctggtacatgtttcagttccaccggatcctgcagtacgccctgccgagacaggagtcccagcggccattcttttggattttcatggacaacttgctgctgaccgaggatgaccaggaaactaccactcggttcctgcagaccgaagccgtgaccctgcaggacgtgagaggccgggactaccagaacgccatgcgggtgtggtccaacatccctggactgaaaagcaagcacgcacctctgacccctaaagaagaggagtacctgcaggcccaggtgcggagcagaagcaagctggacgcccctaaggtggatctgctggtgaagaattgcctcctgcccctgagagagtacttcaagtatttcagccagaatagtctgcccctgggaggcagcggcggcggcagccaggaggccgtgaccttcgaggacgtggccgtgtacttcacccagaaccagtgggccagcctggagcccgcccagaaggccctgtaccaggaggtgatgctggagaactacgccaacatcaccagcctggccgccctgcccttccccaagcccgacctgatcttccagctggagctgggcgaggccccctgggtgcccgacagctggaggcccgtgggcgaggaggccctgggcggcaggggcggcccaagcagcggcgcccctcctcccagcggcggcaggcggcccaagcagcggcgcccctcctcccagcggcggcagcccagccggctccccaacctctaccgaggagggcacctctgagtccgccacccccgagagcggccctggcacctccaccgagcccagcgagggcagcgcacccggcagccctgccggcagccccacctccacagaggagggaaccagcaccgagcccagcgaaggcagcgccccaggcaccagcaccgagcctagtgagcaggagattaaacggatcaacaagatcagaagaagacttgtgaaagacagcaacaccaagaaggccggcaagacaggccccatgaaaaccctgctggttagagtgatgacacccgatctgagagagcggctggaaaacctgagaaagaagcctgaaaatatcccccagcccatcagcaatacatctagagccaacctgaataagctgctgaccgattacaccgaaatgaagaaggcgatcctgcatgtgtactgggaagagttccagaaggaccctgtgggcctgatgagccgggtggcccagcctgccagcaagaagatcgatcagaacaagctgaaacctgagatggacgagaagggcaacctgaccaccgccggctttgcctgctctcagtgtggccagcccctgttcgtgtacaagctggagcaggtgtctgagaagggcaaggcttacaccaactacttcggacggtgcaatgtggccgagcacgaaaagctgatcctgctggcccagctgaagcccgagaaggatagcgacgaagccgtgacatatagcctgggaaagtttgggcagagggccctggatttctacagcattcatgtgaccaaggagtccacccaccccgtgaagcccctggcccagatcgccggaaacagatacgcctccggacctgtgggaaaggccctgagcgacgcatgtatgggcacaatcgcctccttcctgtctaagtaccaggacatcatcatcgaacaccagaaggtggtgaagggcaaccagaagagactggagagcctgcgggagctggccggcaaggaaaacctggaataccctagcgtgaccctgccacctcagcctcacaccaaggagggcgttgatgcctacaacgaagtgatcgcccgggtgcgaatgtgggtgaacctgaacctgtggcagaagctgaagctaagcagagatgatgccaagcctctgctgagactgaagggattcccttcctttcctctggtcgagagacaggccaacgaagtggactggtgggacatggtgtgtaacgtgaagaagctgatcaacgagaaaaaggaggatggcaaggtgttttggcagaatctggctggctacaagagacaggaagccctgagaccatacctgagcagcgaggaagatcggaagaagggaaagaaattcgctcggtaccagctgggcgacctgctgctgcacctggaaaagaagcacggcgaggactggggaaaggtgtacgacgaggcctgggagcggattgacaagaaagtggaaggcctgagcaagcacatcaagctggaagaggaacggagaagcgaggacgcccagagcaaggccgccctgaccgactggctgcgggctaaggccagcttcgtgatcgagggcctgaaggaggccgacaaggacgagttctgcagatgcgagctgaagctgcagaagtggtacggggacctgcggggaaagcccttcgccatcgaagccgagaacagcatcctggacatcagcggcttcagcaagcagtacaactgtgccttcatctggcagaaggacggcgtgaagaagctgaacctgtacctgatcatcaactacttcaagggcggcaagctgcggttcaagaagatcaaacctgaagccttcgaagccaacagattctacaccgtgatcaacaaaaagagcggcgagatcgtgcccatggaggtgaacttcaacttcgacgaccccaacctgatcatcctgcctctggcctttggcaagagacagggcagagaattcatctggaacgacctgctgtccctggaaaccggcagcctgaagctggccaacggaagagtgatcgagaagacactgtacaacagaagaacccggcaggatgagcctgccctgttcgtggccctgaccttcgagcggcgggaggtcctggactcctccaatatcaaaccaatgaacctgatcggcgtggcaagaggcgaaaacatccccgccgtgatcgccctgaccgaccccgagggctgcccactgagccggtttaaggatagcctgggaaacccaacccacatcctgagaatcggcgagagctataaggagaagcagcggaccatccaggccaagaaggaggtggagcagcggagagccggcggctacagccggaagtacgccagcaaagccaagaatctggcagacgatatggtgagaaacaccgctagagatctgctgtactacgccgtgacccaggatgccatgctgatcttcgccaacctgagccggggcttcggccggcagggcaagcggaccttcatggccgagagacagtacacacggatggaggactggctgaccgccaagctggcctacgagggcctgagcaagacctacctgtccaagacactggcccagtacacctccaagacatgcagcaactgtgggtttaccatcaccagcgccgactacgacagggtgctggagaagctgaagaagacagcaacaggctggatgaccacaattaacggcaaggagctgaaggtggagggccagattacctactacaacagatacaagagacagaacgtagtcaaggacctgtccgtcgagctggatagactgagcgaagaatctgtgaacaacgacatctcctcctggacaaagggcagaagcggagaagctctgagcctcctgaagaaaagattctcccatagacccgtgcaggagaagttcgtgtgcctgaactgcggcttcgagacacacgcagccgagcaagccgccctgaacatcgccagatcctggctgttcctgcggagccaggagtacaagaaataccagacaaacaagacaaccggcaacaccgataagagagccttcgtcgagacctggcagtccttttaccggaagaagcttaaggaggtgtggaaacctgccgtgcggtctggcggatctggcggaggctccaccagccccaagaaaaagagaaaagtctaagctgccttctgcggggcttgccttctggccatgcccttcttctctcccttgcacctgtacctcttggtctttgaataaagcctgagtaggaaggctagcaaaaaaaaaaaaaaaaaaaaaaaaaaaaaaaaaaaaaaaaaaaaaaaaaaaaaaaaaaaaaaaaaaaaaaaaaaaaaaaagcccagccggctccccaacctctaccgaggagggcacctctgagtccgccacccccgagagcggccctggcacctccaccgagcccagcgagggcagcgcacccggcagccctgccggcagccccacctccacagaggagggaaccagcaccgagcccagcgaaggcagcgccccaggcaccagcaccgagcctagtgagcaggagattaaacggatcaacaagatcagaagaagacttgtgaaagacagcaacaccaagaaggccggcaagacaggccccatgaaaaccctgctggttagagtgatgacacccgatctgagagagcggctggaaaacctgagaaagaagcctgaaaatatcccccagcccatcagcaatacatctagagccaacctgaataagctgctgaccgattacaccgaaatgaagaaggcgatcctgcatgtgtactgggaagagttccagaaggaccctgtgggcctgatgagccgggtggcccagcctgccagcaagaagatcgatcagaacaagctgaaacctgagatggacgagaagggcaacctgaccaccgccggctttgcctgctctcagtgtggccagcccctgttcgtgtacaagctggagcaggtgtctgagaagggcaaggcttacaccaactacttcggacggtgcaatgtggccgagcacgaaaagctgatcctgctggcccagctgaagcccgagaaggatagcgacgaagccgtgacatatagcctgggaaagtttgggcagagggccctggatttctacagcattcatgtgaccaaggagtccacccaccccgtgaagcccctggcccagatcgccggaaacagatacgcctccggacctgtgggaaaggccctgagcgacgcatgtatgggcacaatcgcctccttcctgtctaagtaccaggacatcatcatcgaacaccagaaggtggtgaagggcaaccagaagagactggagagcctgcgggagctggccggcaaggaaaacctggaataccctagcgtgaccctgccacctcagcctcacaccaaggagggcgttgatgcctacaacgaagtgatcgcccgggtgcgaatgtgggtgaacctgaacctgtggcagaagctgaagctaagcagagatgatgccaagcctctgctgagactgaagggattcccttcctttcctctggtcgagagacaggccaacgaagtggactggtgggacatggtgtgtaacgtgaagaagctgatcaacgagaaaaaggaggatggcaaggtgttttggcagaatctggctggctacaagagacaggaagccctgagaccatacctgagcagcgaggaagatcggaagaagggaaagaaattcgctcggtaccagctgggcgacctgctgctgcacctggaaaagaagcacggcgaggactggggaaaggtgtacgacgaggcctgggagcggattgacaagaaagtggaaggcctgagcaagcacatcaagctggaagaggaacggagaagcgaggacgcccagagcaaggccgccctgaccgactggctgcgggctaaggccagcttcgtgatcgagggcctgaaggaggccgacaaggacgagttctgcagatgcgagctgaagctgcagaagtggtacggggacctgcggggaaagcccttcgccatcgaagccgagaacagcatcctggacatcagcggcttcagcaagcagtacaactgtgccttcatctggcagaaggacggcgtgaagaagctgaacctgtacctgatcatcaactacttcaagggcggcaagctgcggttcaagaagatcaaacctgaagccttcgaagccaacagattctacaccgtgatcaacaaaaagagcggcgagatcgtgcccatggaggtgaacttcaacttcgacgaccccaacctgatcatcctgcctctggcctttggcaagagacagggcagagaattcatctggaacgacctgctgtccctggaaaccggcagcctgaagctggccaacggaagagtgatcgagaagacactgtacaacagaagaacccggcaggatgagcctgccctgttcgtggccctgaccttcgagcggcgggaggtcctggactcctccaatatcaaaccaatgaacctgatcggcgtggcaagaggcgaaaacatccccgccgtgatcgccctgaccgaccccgagggctgcccactgagccggtttaaggatagcctgggaaacccaacccacatcctgagaatcggcgagagctataaggagaagcagcggaccatccaggccaagaaggaggtggagcagcggagagccggcggctacagccggaagtacgccagcaaagccaagaatctggcagacgatatggtgagaaacaccgctagagatctgctgtactacgccgtgacccaggatgccatgctgatcttcgccaacctgagccggggcttcggccggcagggcaagcggaccttcatggccgagagacagtacacacggatggaggactggctgaccgccaagctggcctacgagggcctgagcaagacctacctgtccaagacactggcccagtacacctccaagacatgcagcaactgtgggtttaccatcaccagcgccgactacgacagggtgctggagaagctgaagaagacagcaacaggctggatgaccacaattaacggcaaggagctgaaggtggagggccagattacctactacaacagatacaagagacagaacgtagtcaaggacctgtccgtcgagctggatagactgagcgaagaatctgtgaacaacgacatctcctcctggacaaagggcagaagcggagaagctctgagcctcctgaagaaaagattctcccatagacccgtgcaggagaagttcgtgtgcctgaactgcggcttcgagacacacgcagccgagcaagccgccctgaacatcgccagatcctggctgttcctgcggagccaggagtacaagaaataccagacaaacaagacaaccggcaacaccgataagagagccttcgtcgagacctggcagtccttttaccggaagaagcttaaggaggtgtggaaacctgccgtgcggtctggcggatctggcggaggctccaccagccccaagaaaaagagaaaagtctaagctgccttctgcggggcttgccttctggccatgcccttcttctctcccttgcacctgtacctcttggtctttgaataaagcctgagtaggaaggctagcaaaaaaaaaaaaaaaaaaaaaaaaaaaaaaaaaaaaaaaaaaaaaaaaaaaaaaaaaaaaaaaaaaaaaaaaaaaaaaaa

SEQ ID NO: 9273 - RNA, 8787 nt, synthetic construct
  source 1..8787: mol_type = other RNA
aggaaataagagagaaaagaagagtaagaagaaatataagagccaccatggcccctaagaagaagcgtaaagtgagccggatgaaccacgaccaggagttcgacccccctaaggtgtaccctcccgtccccgccgagaagagaaagcccatccgggtcctgagcctgttcgatggcatcgccaccggtctgctggtgctgaaggacctgggcatccaggtggataggtacattgcctccgaggtgtgcgaggactccatcaccgtgggaatggtgcgtcatcagggcaagatcatgtacgtgggcgacgtgcggagcgtgacacagaagcatatccaggagtggggccctttcgacctggtgatcggcggcagcccttgcaatgacctgagcatcgtgaacccagcccggaagggcctgtacgagggaaccggcagactgttcttcgagttttacagactgctgcacgacgcccggcctaaggaaggcgacgaccggcccttcttttggctgttcgagaatgtggtggccatgggagtcagcgacaagcgggatattagccggttcctggagagcaaccccgtgatgatcgatgccaaggaagtgagcgccgcccaccgggccagatacttctggggcaatctgcctggcatgaacagacccctggccagcaccgtgaacgacaagctggagctgcaggagtgcctggagcacggccggatcgccaagttcagcaaggtgagaaccatcaccacccgaagcaacagcatcaaacaaggcaaggaccagcactttcctgtgttcatgaacgagaaggaggacatcctgtggtgtaccgagatggagagagtgttcgggttcccagtccactacacagatgtcagcaacatgtctagactggccagacagagactgctgggaagaagctggtccgtccctgtgatcagacacctgttcgcccctctgaaggagtacttcgcctgcgtgagcagcggcaacagcaacgccaacagccggggccccagcttctctagcggcctggtgccactgtccctgagagggagccacatgggccccatggagatctacaaaaccgtgagcgcctggaagcggcagcctgtgcgcgtgctgagcctgtttcggaatatcgataaagtcctgaaaagcctgggattcctggagagcggctctggctccggcggtggcaccctgaagtacgtggaggatgtgacaaacgtggtcagacgggatgtggagaagtggggccccttcgatctggtgtacggcagcacccaacccctgggcagctcttgtgaccggtgccctggctggtacatgtttcagttccaccggatcctgcagtacgccctgccgagacaggagtcccagcggccattcttttggattttcatggacaacttgctgctgaccgaggatgaccaggaaactaccactcggttcctgcagaccgaagccgtgaccctgcaggacgtgagaggccgggactaccagaacgccatgcgggtgtggtccaacatccctggactgaaaagcaagcacgcacctctgacccctaaagaagaggagtacctgcaggcccaggtgcggagcagaagcaagctggacgcccctaaggtggatctgctggtgaagaattgcctcctgcccctgagagagtacttcaagtatttcagccagaatagtctgcccctgggaggcagcggcggcggccagatgcccgtgaagttcgaggacatcgccgtgagcttcagccaggaggagtgggagtacctgaacgaggagcagaaggagctgtacagggaggtgatggaggagaactaccagaccctgatcagcctgggcatcggcagccccagcgtgacccccgacatcatcagccacatcgagggcggcgaggagccctacatcagggaggagcccggcagcgaggagagggagcccggcaggagcagcggcggcccaagcagcggcgcccctcctcccagcggcggcaggcggcccaagcagcggcgcccctcctcccagcggcggcagcccagccggctccccaacctctaccgaggagggcacctctgagtccgccacccccgagagcggccctggcacctccaccgagcccagcgagggcagcgcacccggcagccctgccggcagccccacctccacagaggagggaaccagcaccgagcccagcgaaggcagcgccccaggcaccagcaccgagcctagtgagcaggagattaaacggatcaacaagatcagaagaagacttgtgaaagacagcaacaccaagaaggccggcaagacaggccccatgaaaaccctgctggttagagtgatgacacccgatctgagagagcggctggaaaacctgagaaagaagcctgaaaatatcccccagcccatcagcaatacatctagagccaacctgaataagctgctgaccgattacaccgaaatgaagaaggcgatcctgcatgtgtactgggaagagttccagaaggaccctgtgggcctgatgagccgggtggcccagcctgccagcaagaagatcgatcagaacaagctgaaacctgagatggacgagaagggcaacctgaccaccgccggctttgcctgctctcagtgtggccagcccctgttcgtgtacaagctggagcaggtgtctgagaagggcaaggcttacaccaactacttcggacggtgcaatgtggccgagcacgaaaagctgatcctgctggcccagctgaagcccgagaaggatagcgacgaagccgtgacatatagcctgggaaagtttgggcagagggccctggatttctacagcattcatgtgaccaaggagtccacccaccccgtgaagcccctggcccagatcgccggaaacagatacgcctccggacctgtgggaaaggccctgagcgacgcatgtatgggcacaatcgcctccttcctgtctaagtaccaggacatcatcatcgaacaccagaaggtggtgaagggcaaccagaagagactggagagcctgcgggagctggccggcaaggaaaacctggaataccctagcgtgaccctgccacctcagcctcacaccaaggagggcgttgatgcctacaacgaagtgatcgcccgggtgcgaatgtgggtgaacctgaacctgtggcagaagctgaagctaagcagagatgatgccaagcctctgctgagactgaagggattcccttcctttcctctggtcgagagacaggccaacgaagtggactggtgggacatggtgtgtaacgtgaagaagctgatcaacgagaaaaaggaggatggcaaggtgttttggcagaatctggctggctacaagagacaggaagccctgagaccatacctgagcagcgaggaagatcggaagaagggaaagaaattcgctcggtaccagctgggcgacctgctgctgcacctggaaaagaagcacggcgaggactggggaaaggtgtacgacgaggcctgggagcggattgacaagaaagtggaaggcctgagcaagcacatcaagctggaagaggaacggagaagcgaggacgcccagagcaaggccgccctgaccgactggctgcgggctaaggccagcttcgtgatcgagggcctgaaggaggccgacaaggacgagttctgcagatgcgagctgaagctgcagaagtggtacggggacctgcggggaaagcccttcgccatcgaagccgagaacagcatcctggacatcagcggcttcagcaagcagtacaactgtgccttcatctggcagaaggacggcgtgaagaagctgaacctgtacctgatcatcaactacttcaagggcggcaagctgcggttcaagaagatcaaacctgaagccttcgaagccaacagattctacaccgtgatcaacaaaaagagcggcgagatcgtgcccatggaggtgaacttcaacttcgacgaccccaacctgatcatcctgcctctggcctttggcaagagacagggcagagaattcatctggaacgacctgctgtccctggaaaccggcagcctgaagctggccaacggaagagtgatcgagaagacactgtacaacagaagaacccggcaggatgagcctgccctgttcgtggccctgaccttcgagcggcgggaggtcctggactcctccaatatcaaaccaatgaacctgatcggcgtggcaagaggcgaaaacatccccgccgtgatcgccctgaccgaccccgagggctgcccactgagccggtttaaggatagcctgggaaacccaacccacatcctgagaatcggcgagagctataaggagaagcagcggaccatccaggccaagaaggaggtggagcagcggagagccggcggctacagccggaagtacgccagcaaagccaagaatctggcagacgatatggtgagaaacaccgctagagatctgctgtactacgccgtgacccaggatgccatgctgatcttcgccaacctgagccggggcttcggccggcagggcaagcggaccttcatggccgagagacagtacacacggatggaggactggctgaccgccaagctggcctacgagggcctgagcaagacctacctgtccaagacactggcccagtacacctccaagacatgcagcaactgtgggtttaccatcaccagcgccgactacgacagggtgctggagaagctgaagaagacagcaacaggctggatgaccacaattaacggcaaggagctgaaggtggagggccagattacctactacaacagatacaagagacagaacgtagtcaaggacctgtccgtcgagctggatagactgagcgaagaatctgtgaacaacgacatctcctcctggacaaagggcagaagcggagaagctctgagcctcctgaagaaaagattctcccatagacccgtgcaggagaagttcgtgtgcctgaactgcggcttcgagacacacgcagccgagcaagccgccctgaacatcgccagatcctggctgttcctgcggagccaggagtacaagaaataccagacaaacaagacaaccggcaacaccgataagagagccttcgtcgagacctggcagtccttttaccggaagaagcttaaggaggtgtggaaacctgccgtgcggtctggcggatctggcggaggctccaccagccccaagaaaaagagaaaagtctaagctgccttctgcggggcttgccttctggccatgcccttcttctctcccttgcacctgtacctcttggtctttgaataaagcctgagtaggaaggctagcaaaaaaaaaaaaaaaaaaaaaaaaaaaaaaaaaaaaaaaaaaaaaaaaaaaaaaaaaaaaaaaaaaaaaaaaaaaaaaaagcccagccggctccccaacctctaccgaggagggcacctctgagtccgccacccccgagagcggccctggcacctccaccgagcccagcgagggcagcgcacccggcagccctgccggcagccccacctccacagaggagggaaccagcaccgagcccagcgaaggcagcgccccaggcaccagcaccgagcctagtgagcaggagattaaacggatcaacaagatcagaagaagacttgtgaaagacagcaacaccaagaaggccggcaagacaggccccatgaaaaccctgctggttagagtgatgacacccgatctgagagagcggctggaaaacctgagaaagaagcctgaaaatatcccccagcccatcagcaatacatctagagccaacctgaataagctgctgaccgattacaccgaaatgaagaaggcgatcctgcatgtgtactgggaagagttccagaaggaccctgtgggcctgatgagccgggtggcccagcctgccagcaagaagatcgatcagaacaagctgaaacctgagatggacgagaagggcaacctgaccaccgccggctttgcctgctctcagtgtggccagcccctgttcgtgtacaagctggagcaggtgtctgagaagggcaaggcttacaccaactacttcggacggtgcaatgtggccgagcacgaaaagctgatcctgctggcccagctgaagcccgagaaggatagcgacgaagccgtgacatatagcctgggaaagtttgggcagagggccctggatttctacagcattcatgtgaccaaggagtccacccaccccgtgaagcccctggcccagatcgccggaaacagatacgcctccggacctgtgggaaaggccctgagcgacgcatgtatgggcacaatcgcctccttcctgtctaagtaccaggacatcatcatcgaacaccagaaggtggtgaagggcaaccagaagagactggagagcctgcgggagctggccggcaaggaaaacctggaataccctagcgtgaccctgccacctcagcctcacaccaaggagggcgttgatgcctacaacgaagtgatcgcccgggtgcgaatgtgggtgaacctgaacctgtggcagaagctgaagctaagcagagatgatgccaagcctctgctgagactgaagggattcccttcctttcctctggtcgagagacaggccaacgaagtggactggtgggacatggtgtgtaacgtgaagaagctgatcaacgagaaaaaggaggatggcaaggtgttttggcagaatctggctggctacaagagacaggaagccctgagaccatacctgagcagcgaggaagatcggaagaagggaaagaaattcgctcggtaccagctgggcgacctgctgctgcacctggaaaagaagcacggcgaggactggggaaaggtgtacgacgaggcctgggagcggattgacaagaaagtggaaggcctgagcaagcacatcaagctggaagaggaacggagaagcgaggacgcccagagcaaggccgccctgaccgactggctgcgggctaaggccagcttcgtgatcgagggcctgaaggaggccgacaaggacgagttctgcagatgcgagctgaagctgcagaagtggtacggggacctgcggggaaagcccttcgccatcgaagccgagaacagcatcctggacatcagcggcttcagcaagcagtacaactgtgccttcatctggcagaaggacggcgtgaagaagctgaacctgtacctgatcatcaactacttcaagggcggcaagctgcggttcaagaagatcaaacctgaagccttcgaagccaacagattctacaccgtgatcaacaaaaagagcggcgagatcgtgcccatggaggtgaacttcaacttcgacgaccccaacctgatcatcctgcctctggcctttggcaagagacagggcagagaattcatctggaacgacctgctgtccctggaaaccggcagcctgaagctggccaacggaagagtgatcgagaagacactgtacaacagaagaacccggcaggatgagcctgccctgttcgtggccctgaccttcgagcggcgggaggtcctggactcctccaatatcaaaccaatgaacctgatcggcgtggcaagaggcgaaaacatccccgccgtgatcgccctgaccgaccccgagggctgcccactgagccggtttaaggatagcctgggaaacccaacccacatcctgagaatcggcgagagctataaggagaagcagcggaccatccaggccaagaaggaggtggagcagcggagagccggcggctacagccggaagtacgccagcaaagccaagaatctggcagacgatatggtgagaaacaccgctagagatctgctgtactacgccgtgacccaggatgccatgctgatcttcgccaacctgagccggggcttcggccggcagggcaagcggaccttcatggccgagagacagtacacacggatggaggactggctgaccgccaagctggcctacgagggcctgagcaagacctacctgtccaagacactggcccagtacacctccaagacatgcagcaactgtgggtttaccatcaccagcgccgactacgacagggtgctggagaagctgaagaagacagcaacaggctggatgaccacaattaacggcaaggagctgaaggtggagggccagattacctactacaacagatacaagagacagaacgtagtcaaggacctgtccgtcgagctggatagactgagcgaagaatctgtgaacaacgacatctcctcctggacaaagggcagaagcggagaagctctgagcctcctgaagaaaagattctcccatagacccgtgcaggagaagttcgtgtgcctgaactgcggcttcgagacacacgcagccgagcaagccgccctgaacatcgccagatcctggctgttcctgcggagccaggagtacaagaaataccagacaaacaagacaaccggcaacaccgataagagagccttcgtcgagacctggcagtccttttaccggaagaagcttaaggaggtgtggaaacctgccgtgcggtctggcggatctggcggaggctccaccagccccaagaaaaagagaaaagtctaagctgccttctgcggggcttgccttctggccatgcccttcttctctcccttgcacctgtacctcttggtctttgaataaagcctgagtaggaaggctagcaaaaaaaaaaaaaaaaaaaaaaaaaaaaaaaaaaaaaaaaaaaaaaaaaaaaaaaaaaaaaaaaaaaaaaaaaaaaaaaa

SEQ ID NO: 9274 - RNA, 8787 nt, synthetic construct
  source 1..8787: mol_type = other RNA
aggaaataagagagaaaagaagagtaagaagaaatataagagccaccatggcccctaagaagaagcgtaaagtgagccggatgaaccacgaccaggagttcgacccccctaaggtgtaccctcccgtccccgccgagaagagaaagcccatccgggtcctgagcctgttcgatggcatcgccaccggtctgctggtgctgaaggacctgggcatccaggtggataggtacattgcctccgaggtgtgcgaggactccatcaccgtgggaatggtgcgtcatcagggcaagatcatgtacgtgggcgacgtgcggagcgtgacacagaagcatatccaggagtggggccctttcgacctggtgatcggcggcagcccttgcaatgacctgagcatcgtgaacccagcccggaagggcctgtacgagggaaccggcagactgttcttcgagttttacagactgctgcacgacgcccggcctaaggaaggcgacgaccggcccttcttttggctgttcgagaatgtggtggccatgggagtcagcgacaagcgggatattagccggttcctggagagcaaccccgtgatgatcgatgccaaggaagtgagcgccgcccaccgggccagatacttctggggcaatctgcctggcatgaacagacccctggccagcaccgtgaacgacaagctggagctgcaggagtgcctggagcacggccggatcgccaagttcagcaaggtgagaaccatcaccacccgaagcaacagcatcaaacaaggcaaggaccagcactttcctgtgttcatgaacgagaaggaggacatcctgtggtgtaccgagatggagagagtgttcgggttcccagtccactacacagatgtcagcaacatgtctagactggccagacagagactgctgggaagaagctggtccgtccctgtgatcagacacctgttcgcccctctgaaggagtacttcgcctgcgtgagcagcggcaacagcaacgccaacagccggggccccagcttctctagcggcctggtgccactgtccctgagagggagccacatgggccccatggagatctacaaaaccgtgagcgcctggaagcggcagcctgtgcgcgtgctgagcctgtttcggaatatcgataaagtcctgaaaagcctgggattcctggagagcggctctggctccggcggtggcaccctgaagtacgtggaggatgtgacaaacgtggtcagacgggatgtggagaagtggggccccttcgatctggtgtacggcagcacccaacccctgggcagctcttgtgaccggtgccctggctggtacatgtttcagttccaccggatcctgcagtacgccctgccgagacaggagtcccagcggccattcttttggattttcatggacaacttgctgctgaccgaggatgaccaggaaactaccactcggttcctgcagaccgaagccgtgaccctgcaggacgtgagaggccgggactaccagaacgccatgcgggtgtggtccaacatccctggactgaaaagcaagcacgcacctctgacccctaaagaagaggagtacctgcaggcccaggtgcggagcagaagcaagctggacgcccctaaggtggatctgctggtgaagaattgcctcctgcccctgagagagtacttcaagtatttcagccagaatagtctgcccctgggaggcagcggcggcggcatggacagcgtgaccatcgaggacgtggccgtggacttcaccctggaggagtgggccctgctgggccccagccagaggaagctgtacagggacgtgatgcaggagaccctgaggaacctggccgccgtgggcgccaagagggagtaccacgccatcgaggaccagtacaagaaccagggcaggaagctgaggaccttcatggtggagaggttctgcaagagcaaggacatcagcctgtgcggcggcggcccaagcagcggcgcccctcctcccagcggcggcaggcggcccaagcagcggcgcccctcctcccagcggcggcagcccagccggctccccaacctctaccgaggagggcacctctgagtccgccacccccgagagcggccctggcacctccaccgagcccagcgagggcagcgcacccggcagccctgccggcagccccacctccacagaggagggaaccagcaccgagcccagcgaaggcagcgccccaggcaccagcaccgagcctagtgagcaggagattaaacggatcaacaagatcagaagaagacttgtgaaagacagcaacaccaagaaggccggcaagacaggccccatgaaaaccctgctggttagagtgatgacacccgatctgagagagcggctggaaaacctgagaaagaagcctgaaaatatcccccagcccatcagcaatacatctagagccaacctgaataagctgctgaccgattacaccgaaatgaagaaggcgatcctgcatgtgtactgggaagagttccagaaggaccctgtgggcctgatgagccgggtggcccagcctgccagcaagaagatcgatcagaacaagctgaaacctgagatggacgagaagggcaacctgaccaccgccggctttgcctgctctcagtgtggccagcccctgttcgtgtacaagctggagcaggtgtctgagaagggcaaggcttacaccaactacttcggacggtgcaatgtggccgagcacgaaaagctgatcctgctggcccagctgaagcccgagaaggatagcgacgaagccgtgacatatagcctgggaaagtttgggcagagggccctggatttctacagcattcatgtgaccaaggagtccacccaccccgtgaagcccctggcccagatcgccggaaacagatacgcctccggacctgtgggaaaggccctgagcgacgcatgtatgggcacaatcgcctccttcctgtctaagtaccaggacatcatcatcgaacaccagaaggtggtgaagggcaaccagaagagactggagagcctgcgggagctggccggcaaggaaaacctggaataccctagcgtgaccctgccacctcagcctcacaccaaggagggcgttgatgcctacaacgaagtgatcgcccgggtgcgaatgtgggtgaacctgaacctgtggcagaagctgaagctaagcagagatgatgccaagcctctgctgagactgaagggattcccttcctttcctctggtcgagagacaggccaacgaagtggactggtgggacatggtgtgtaacgtgaagaagctgatcaacgagaaaaaggaggatggcaaggtgttttggcagaatctggctggctacaagagacaggaagccctgagaccatacctgagcagcgaggaagatcggaagaagggaaagaaattcgctcggtaccagctgggcgacctgctgctgcacctggaaaagaagcacggcgaggactggggaaaggtgtacgacgaggcctgggagcggattgacaagaaagtggaaggcctgagcaagcacatcaagctggaagaggaacggagaagcgaggacgcccagagcaaggccgccctgaccgactggctgcgggctaaggccagcttcgtgatcgagggcctgaaggaggccgacaaggacgagttctgcagatgcgagctgaagctgcagaagtggtacggggacctgcggggaaagcccttcgccatcgaagccgagaacagcatcctggacatcagcggcttcagcaagcagtacaactgtgccttcatctggcagaaggacggcgtgaagaagctgaacctgtacctgatcatcaactacttcaagggcggcaagctgcggttcaagaagatcaaacctgaagccttcgaagccaacagattctacaccgtgatcaacaaaaagagcggcgagatcgtgcccatggaggtgaacttcaacttcgacgaccccaacctgatcatcctgcctctggcctttggcaagagacagggcagagaattcatctggaacgacctgctgtccctggaaaccggcagcctgaagctggccaacggaagagtgatcgagaagacactgtacaacagaagaacccggcaggatgagcctgccctgttcgtggccctgaccttcgagcggcgggaggtcctggactcctccaatatcaaaccaatgaacctgatcggcgtggcaagaggcgaaaacatccccgccgtgatcgccctgaccgaccccgagggctgcccactgagccggtttaaggatagcctgggaaacccaacccacatcctgagaatcggcgagagctataaggagaagcagcggaccatccaggccaagaaggaggtggagcagcggagagccggcggctacagccggaagtacgccagcaaagccaagaatctggcagacgatatggtgagaaacaccgctagagatctgctgtactacgccgtgacccaggatgccatgctgatcttcgccaacctgagccggggcttcggccggcagggcaagcggaccttcatggccgagagacagtacacacggatggaggactggctgaccgccaagctggcctacgagggcctgagcaagacctacctgtccaagacactggcccagtacacctccaagacatgcagcaactgtgggtttaccatcaccagcgccgactacgacagggtgctggagaagctgaagaagacagcaacaggctggatgaccacaattaacggcaaggagctgaaggtggagggccagattacctactacaacagatacaagagacagaacgtagtcaaggacctgtccgtcgagctggatagactgagcgaagaatctgtgaacaacgacatctcctcctggacaaagggcagaagcggagaagctctgagcctcctgaagaaaagattctcccatagacccgtgcaggagaagttcgtgtgcctgaactgcggcttcgagacacacgcagccgagcaagccgccctgaacatcgccagatcctggctgttcctgcggagccaggagtacaagaaataccagacaaacaagacaaccggcaacaccgataagagagccttcgtcgagacctggcagtccttttaccggaagaagcttaaggaggtgtggaaacctgccgtgcggtctggcggatctggcggaggctccaccagccccaagaaaaagagaaaagtctaagctgccttctgcggggcttgccttctggccatgcccttcttctctcccttgcacctgtacctcttggtctttgaataaagcctgagtaggaaggctagcaaaaaaaaaaaaaaaaaaaaaaaaaaaaaaaaaaaaaaaaaaaaaaaaaaaaaaaaaaaaaaaaaaaaaaaaaaaaaaaagcccagccggctccccaacctctaccgaggagggcacctctgagtccgccacccccgagagcggccctggcacctccaccgagcccagcgagggcagcgcacccggcagccctgccggcagccccacctccacagaggagggaaccagcaccgagcccagcgaaggcagcgccccaggcaccagcaccgagcctagtgagcaggagattaaacggatcaacaagatcagaagaagacttgtgaaagacagcaacaccaagaaggccggcaagacaggccccatgaaaaccctgctggttagagtgatgacacccgatctgagagagcggctggaaaacctgagaaagaagcctgaaaatatcccccagcccatcagcaatacatctagagccaacctgaataagctgctgaccgattacaccgaaatgaagaaggcgatcctgcatgtgtactgggaagagttccagaaggaccctgtgggcctgatgagccgggtggcccagcctgccagcaagaagatcgatcagaacaagctgaaacctgagatggacgagaagggcaacctgaccaccgccggctttgcctgctctcagtgtggccagcccctgttcgtgtacaagctggagcaggtgtctgagaagggcaaggcttacaccaactacttcggacggtgcaatgtggccgagcacgaaaagctgatcctgctggcccagctgaagcccgagaaggatagcgacgaagccgtgacatatagcctgggaaagtttgggcagagggccctggatttctacagcattcatgtgaccaaggagtccacccaccccgtgaagcccctggcccagatcgccggaaacagatacgcctccggacctgtgggaaaggccctgagcgacgcatgtatgggcacaatcgcctccttcctgtctaagtaccaggacatcatcatcgaacaccagaaggtggtgaagggcaaccagaagagactggagagcctgcgggagctggccggcaaggaaaacctggaataccctagcgtgaccctgccacctcagcctcacaccaaggagggcgttgatgcctacaacgaagtgatcgcccgggtgcgaatgtgggtgaacctgaacctgtggcagaagctgaagctaagcagagatgatgccaagcctctgctgagactgaagggattcccttcctttcctctggtcgagagacaggccaacgaagtggactggtgggacatggtgtgtaacgtgaagaagctgatcaacgagaaaaaggaggatggcaaggtgttttggcagaatctggctggctacaagagacaggaagccctgagaccatacctgagcagcgaggaagatcggaagaagggaaagaaattcgctcggtaccagctgggcgacctgctgctgcacctggaaaagaagcacggcgaggactggggaaaggtgtacgacgaggcctgggagcggattgacaagaaagtggaaggcctgagcaagcacatcaagctggaagaggaacggagaagcgaggacgcccagagcaaggccgccctgaccgactggctgcgggctaaggccagcttcgtgatcgagggcctgaaggaggccgacaaggacgagttctgcagatgcgagctgaagctgcagaagtggtacggggacctgcggggaaagcccttcgccatcgaagccgagaacagcatcctggacatcagcggcttcagcaagcagtacaactgtgccttcatctggcagaaggacggcgtgaagaagctgaacctgtacctgatcatcaactacttcaagggcggcaagctgcggttcaagaagatcaaacctgaagccttcgaagccaacagattctacaccgtgatcaacaaaaagagcggcgagatcgtgcccatggaggtgaacttcaacttcgacgaccccaacctgatcatcctgcctctggcctttggcaagagacagggcagagaattcatctggaacgacctgctgtccctggaaaccggcagcctgaagctggccaacggaagagtgatcgagaagacactgtacaacagaagaacccggcaggatgagcctgccctgttcgtggccctgaccttcgagcggcgggaggtcctggactcctccaatatcaaaccaatgaacctgatcggcgtggcaagaggcgaaaacatccccgccgtgatcgccctgaccgaccccgagggctgcccactgagccggtttaaggatagcctgggaaacccaacccacatcctgagaatcggcgagagctataaggagaagcagcggaccatccaggccaagaaggaggtggagcagcggagagccggcggctacagccggaagtacgccagcaaagccaagaatctggcagacgatatggtgagaaacaccgctagagatctgctgtactacgccgtgacccaggatgccatgctgatcttcgccaacctgagccggggcttcggccggcagggcaagcggaccttcatggccgagagacagtacacacggatggaggactggctgaccgccaagctggcctacgagggcctgagcaagacctacctgtccaagacactggcccagtacacctccaagacatgcagcaactgtgggtttaccatcaccagcgccgactacgacagggtgctggagaagctgaagaagacagcaacaggctggatgaccacaattaacggcaaggagctgaaggtggagggccagattacctactacaacagatacaagagacagaacgtagtcaaggacctgtccgtcgagctggatagactgagcgaagaatctgtgaacaacgacatctcctcctggacaaagggcagaagcggagaagctctgagcctcctgaagaaaagattctcccatagacccgtgcaggagaagttcgtgtgcctgaactgcggcttcgagacacacgcagccgagcaagccgccctgaacatcgccagatcctggctgttcctgcggagccaggagtacaagaaataccagacaaacaagacaaccggcaacaccgataagagagccttcgtcgagacctggcagtccttttaccggaagaagcttaaggaggtgtggaaacctgccgtgcggtctggcggatctggcggaggctccaccagccccaagaaaaagagaaaagtctaagctgccttctgcggggcttgccttctggccatgcccttcttctctcccttgcacctgtacctcttggtctttgaataaagcctgagtaggaaggctagcaaaaaaaaaaaaaaaaaaaaaaaaaaaaaaaaaaaaaaaaaaaaaaaaaaaaaaaaaaaaaaaaaaaaaaaaaaaaaaaa

SEQ ID NO: 9275 - RNA, 8787 nt, synthetic construct
  source 1..8787: mol_type = other RNA
aggaaataagagagaaaagaagagtaagaagaaatataagagccaccatggcccctaagaagaagcgtaaagtgagccggatgaaccacgaccaggagttcgacccccctaaggtgtaccctcccgtccccgccgagaagagaaagcccatccgggtcctgagcctgttcgatggcatcgccaccggtctgctggtgctgaaggacctgggcatccaggtggataggtacattgcctccgaggtgtgcgaggactccatcaccgtgggaatggtgcgtcatcagggcaagatcatgtacgtgggcgacgtgcggagcgtgacacagaagcatatccaggagtggggccctttcgacctggtgatcggcggcagcccttgcaatgacctgagcatcgtgaacccagcccggaagggcctgtacgagggaaccggcagactgttcttcgagttttacagactgctgcacgacgcccggcctaaggaaggcgacgaccggcccttcttttggctgttcgagaatgtggtggccatgggagtcagcgacaagcgggatattagccggttcctggagagcaaccccgtgatgatcgatgccaaggaagtgagcgccgcccaccgggccagatacttctggggcaatctgcctggcatgaacagacccctggccagcaccgtgaacgacaagctggagctgcaggagtgcctggagcacggccggatcgccaagttcagcaaggtgagaaccatcaccacccgaagcaacagcatcaaacaaggcaaggaccagcactttcctgtgttcatgaacgagaaggaggacatcctgtggtgtaccgagatggagagagtgttcgggttcccagtccactacacagatgtcagcaacatgtctagactggccagacagagactgctgggaagaagctggtccgtccctgtgatcagacacctgttcgcccctctgaaggagtacttcgcctgcgtgagcagcggcaacagcaacgccaacagccggggccccagcttctctagcggcctggtgccactgtccctgagagggagccacatgggccccatggagatctacaaaaccgtgagcgcctggaagcggcagcctgtgcgcgtgctgagcctgtttcggaatatcgataaagtcctgaaaagcctgggattcctggagagcggctctggctccggcggtggcaccctgaagtacgtggaggatgtgacaaacgtggtcagacgggatgtggagaagtggggccccttcgatctggtgtacggcagcacccaacccctgggcagctcttgtgaccggtgccctggctggtacatgtttcagttccaccggatcctgcagtacgccctgccgagacaggagtcccagcggccattcttttggattttcatggacaacttgctgctgaccgaggatgaccaggaaactaccactcggttcctgcagaccgaagccgtgaccctgcaggacgtgagaggccgggactaccagaacgccatgcgggtgtggtccaacatccctggactgaaaagcaagcacgcacctctgacccctaaagaagaggagtacctgcaggcccaggtgcggagcagaagcaagctggacgcccctaaggtggatctgctggtgaagaattgcctcctgcccctgagagagtacttcaagtatttcagccagaatagtctgcccctgggaggcagcggcggcggcttccaggagcccgtgaccttcgaggacgtggccgtgtacttcacccagaacgagtggaccagcctgcagcccagccagagggccctgttcagggaggtgatgctggagaactacgccaccgtgaccagcctgagcgccttccccttccccaagcccgacctgatcttcaggctggagcagggcgaggccgcctggggccccgacccctggaccctggccggcgaggaggccctgaggggcctgggcggcccaagcagcggcgcccctcctcccagcggcggcaggcggcccaagcagcggcgcccctcctcccagcggcggcagcccagccggctccccaacctctaccgaggagggcacctctgagtccgccacccccgagagcggccctggcacctccaccgagcccagcgagggcagcgcacccggcagccctgccggcagccccacctccacagaggagggaaccagcaccgagcccagcgaaggcagcgccccaggcaccagcaccgagcctagtgagcaggagattaaacggatcaacaagatcagaagaagacttgtgaaagacagcaacaccaagaaggccggcaagacaggccccatgaaaaccctgctggttagagtgatgacacccgatctgagagagcggctggaaaacctgagaaagaagcctgaaaatatcccccagcccatcagcaatacatctagagccaacctgaataagctgctgaccgattacaccgaaatgaagaaggcgatcctgcatgtgtactgggaagagttccagaaggaccctgtgggcctgatgagccgggtggcccagcctgccagcaagaagatcgatcagaacaagctgaaacctgagatggacgagaagggcaacctgaccaccgccggctttgcctgctctcagtgtggccagcccctgttcgtgtacaagctggagcaggtgtctgagaagggcaaggcttacaccaactacttcggacggtgcaatgtggccgagcacgaaaagctgatcctgctggcccagctgaagcccgagaaggatagcgacgaagccgtgacatatagcctgggaaagtttgggcagagggccctggatttctacagcattcatgtgaccaaggagtccacccaccccgtgaagcccctggcccagatcgccggaaacagatacgcctccggacctgtgggaaaggccctgagcgacgcatgtatgggcacaatcgcctccttcctgtctaagtaccaggacatcatcatcgaacaccagaaggtggtgaagggcaaccagaagagactggagagcctgcgggagctggccggcaaggaaaacctggaataccctagcgtgaccctgccacctcagcctcacaccaaggagggcgttgatgcctacaacgaagtgatcgcccgggtgcgaatgtgggtgaacctgaacctgtggcagaagctgaagctaagcagagatgatgccaagcctctgctgagactgaagggattcccttcctttcctctggtcgagagacaggccaacgaagtggactggtgggacatggtgtgtaacgtgaagaagctgatcaacgagaaaaaggaggatggcaaggtgttttggcagaatctggctggctacaagagacaggaagccctgagaccatacctgagcagcgaggaagatcggaagaagggaaagaaattcgctcggtaccagctgggcgacctgctgctgcacctggaaaagaagcacggcgaggactggggaaaggtgtacgacgaggcctgggagcggattgacaagaaagtggaaggcctgagcaagcacatcaagctggaagaggaacggagaagcgaggacgcccagagcaaggccgccctgaccgactggctgcgggctaaggccagcttcgtgatcgagggcctgaaggaggccgacaaggacgagttctgcagatgcgagctgaagctgcagaagtggtacggggacctgcggggaaagcccttcgccatcgaagccgagaacagcatcctggacatcagcggcttcagcaagcagtacaactgtgccttcatctggcagaaggacggcgtgaagaagctgaacctgtacctgatcatcaactacttcaagggcggcaagctgcggttcaagaagatcaaacctgaagccttcgaagccaacagattctacaccgtgatcaacaaaaagagcggcgagatcgtgcccatggaggtgaacttcaacttcgacgaccccaacctgatcatcctgcctctggcctttggcaagagacagggcagagaattcatctggaacgacctgctgtccctggaaaccggcagcctgaagctggccaacggaagagtgatcgagaagacactgtacaacagaagaacccggcaggatgagcctgccctgttcgtggccctgaccttcgagcggcgggaggtcctggactcctccaatatcaaaccaatgaacctgatcggcgtggcaagaggcgaaaacatccccgccgtgatcgccctgaccgaccccgagggctgcccactgagccggtttaaggatagcctgggaaacccaacccacatcctgagaatcggcgagagctataaggagaagcagcggaccatccaggccaagaaggaggtggagcagcggagagccggcggctacagccggaagtacgccagcaaagccaagaatctggcagacgatatggtgagaaacaccgctagagatctgctgtactacgccgtgacccaggatgccatgctgatcttcgccaacctgagccggggcttcggccggcagggcaagcggaccttcatggccgagagacagtacacacggatggaggactggctgaccgccaagctggcctacgagggcctgagcaagacctacctgtccaagacactggcccagtacacctccaagacatgcagcaactgtgggtttaccatcaccagcgccgactacgacagggtgctggagaagctgaagaagacagcaacaggctggatgaccacaattaacggcaaggagctgaaggtggagggccagattacctactacaacagatacaagagacagaacgtagtcaaggacctgtccgtcgagctggatagactgagcgaagaatctgtgaacaacgacatctcctcctggacaaagggcagaagcggagaagctctgagcctcctgaagaaaagattctcccatagacccgtgcaggagaagttcgtgtgcctgaactgcggcttcgagacacacgcagccgagcaagccgccctgaacatcgccagatcctggctgttcctgcggagccaggagtacaagaaataccagacaaacaagacaaccggcaacaccgataagagagccttcgtcgagacctggcagtccttttaccggaagaagcttaaggaggtgtggaaacctgccgtgcggtctggcggatctggcggaggctccaccagccccaagaaaaagagaaaagtctaagctgccttctgcggggcttgccttctggccatgcccttcttctctcccttgcacctgtacctcttggtctttgaataaagcctgagtaggaaggctagcaaaaaaaaaaaaaaaaaaaaaaaaaaaaaaaaaaaaaaaaaaaaaaaaaaaaaaaaaaaaaaaaaaaaaaaaaaaaaaaagcccagccggctccccaacctctaccgaggagggcacctctgagtccgccacccccgagagcggccctggcacctccaccgagcccagcgagggcagcgcacccggcagccctgccggcagccccacctccacagaggagggaaccagcaccgagcccagcgaaggcagcgccccaggcaccagcaccgagcctagtgagcaggagattaaacggatcaacaagatcagaagaagacttgtgaaagacagcaacaccaagaaggccggcaagacaggccccatgaaaaccctgctggttagagtgatgacacccgatctgagagagcggctggaaaacctgagaaagaagcctgaaaatatcccccagcccatcagcaatacatctagagccaacctgaataagctgctgaccgattacaccgaaatgaagaaggcgatcctgcatgtgtactgggaagagttccagaaggaccctgtgggcctgatgagccgggtggcccagcctgccagcaagaagatcgatcagaacaagctgaaacctgagatggacgagaagggcaacctgaccaccgccggctttgcctgctctcagtgtggccagcccctgttcgtgtacaagctggagcaggtgtctgagaagggcaaggcttacaccaactacttcggacggtgcaatgtggccgagcacgaaaagctgatcctgctggcccagctgaagcccgagaaggatagcgacgaagccgtgacatatagcctgggaaagtttgggcagagggccctggatttctacagcattcatgtgaccaaggagtccacccaccccgtgaagcccctggcccagatcgccggaaacagatacgcctccggacctgtgggaaaggccctgagcgacgcatgtatgggcacaatcgcctccttcctgtctaagtaccaggacatcatcatcgaacaccagaaggtggtgaagggcaaccagaagagactggagagcctgcgggagctggccggcaaggaaaacctggaataccctagcgtgaccctgccacctcagcctcacaccaaggagggcgttgatgcctacaacgaagtgatcgcccgggtgcgaatgtgggtgaacctgaacctgtggcagaagctgaagctaagcagagatgatgccaagcctctgctgagactgaagggattcccttcctttcctctggtcgagagacaggccaacgaagtggactggtgggacatggtgtgtaacgtgaagaagctgatcaacgagaaaaaggaggatggcaaggtgttttggcagaatctggctggctacaagagacaggaagccctgagaccatacctgagcagcgaggaagatcggaagaagggaaagaaattcgctcggtaccagctgggcgacctgctgctgcacctggaaaagaagcacggcgaggactggggaaaggtgtacgacgaggcctgggagcggattgacaagaaagtggaaggcctgagcaagcacatcaagctggaagaggaacggagaagcgaggacgcccagagcaaggccgccctgaccgactggctgcgggctaaggccagcttcgtgatcgagggcctgaaggaggccgacaaggacgagttctgcagatgcgagctgaagctgcagaagtggtacggggacctgcggggaaagcccttcgccatcgaagccgagaacagcatcctggacatcagcggcttcagcaagcagtacaactgtgccttcatctggcagaaggacggcgtgaagaagctgaacctgtacctgatcatcaactacttcaagggcggcaagctgcggttcaagaagatcaaacctgaagccttcgaagccaacagattctacaccgtgatcaacaaaaagagcggcgagatcgtgcccatggaggtgaacttcaacttcgacgaccccaacctgatcatcctgcctctggcctttggcaagagacagggcagagaattcatctggaacgacctgctgtccctggaaaccggcagcctgaagctggccaacggaagagtgatcgagaagacactgtacaacagaagaacccggcaggatgagcctgccctgttcgtggccctgaccttcgagcggcgggaggtcctggactcctccaatatcaaaccaatgaacctgatcggcgtggcaagaggcgaaaacatccccgccgtgatcgccctgaccgaccccgagggctgcccactgagccggtttaaggatagcctgggaaacccaacccacatcctgagaatcggcgagagctataaggagaagcagcggaccatccaggccaagaaggaggtggagcagcggagagccggcggctacagccggaagtacgccagcaaagccaagaatctggcagacgatatggtgagaaacaccgctagagatctgctgtactacgccgtgacccaggatgccatgctgatcttcgccaacctgagccggggcttcggccggcagggcaagcggaccttcatggccgagagacagtacacacggatggaggactggctgaccgccaagctggcctacgagggcctgagcaagacctacctgtccaagacactggcccagtacacctccaagacatgcagcaactgtgggtttaccatcaccagcgccgactacgacagggtgctggagaagctgaagaagacagcaacaggctggatgaccacaattaacggcaaggagctgaaggtggagggccagattacctactacaacagatacaagagacagaacgtagtcaaggacctgtccgtcgagctggatagactgagcgaagaatctgtgaacaacgacatctcctcctggacaaagggcagaagcggagaagctctgagcctcctgaagaaaagattctcccatagacccgtgcaggagaagttcgtgtgcctgaactgcggcttcgagacacacgcagccgagcaagccgccctgaacatcgccagatcctggctgttcctgcggagccaggagtacaagaaataccagacaaacaagacaaccggcaacaccgataagagagccttcgtcgagacctggcagtccttttaccggaagaagcttaaggaggtgtggaaacctgccgtgcggtctggcggatctggcggaggctccaccagccccaagaaaaagagaaaagtctaagctgccttctgcggggcttgccttctggccatgcccttcttctctcccttgcacctgtacctcttggtctttgaataaagcctgagtaggaaggctagcaaaaaaaaaaaaaaaaaaaaaaaaaaaaaaaaaaaaaaaaaaaaaaaaaaaaaaaaaaaaaaaaaaaaaaaaaaaaaaaa

SEQ ID NO: 9276 - RNA, 8787 nt, synthetic construct
  source 1..8787: mol_type = other RNA
aggaaataagagagaaaagaagagtaagaagaaatataagagccaccatggcccctaagaagaagcgtaaagtgagccggatgaaccacgaccaggagttcgacccccctaaggtgtaccctcccgtccccgccgagaagagaaagcccatccgggtcctgagcctgttcgatggcatcgccaccggtctgctggtgctgaaggacctgggcatccaggtggataggtacattgcctccgaggtgtgcgaggactccatcaccgtgggaatggtgcgtcatcagggcaagatcatgtacgtgggcgacgtgcggagcgtgacacagaagcatatccaggagtggggccctttcgacctggtgatcggcggcagcccttgcaatgacctgagcatcgtgaacccagcccggaagggcctgtacgagggaaccggcagactgttcttcgagttttacagactgctgcacgacgcccggcctaaggaaggcgacgaccggcccttcttttggctgttcgagaatgtggtggccatgggagtcagcgacaagcgggatattagccggttcctggagagcaaccccgtgatgatcgatgccaaggaagtgagcgccgcccaccgggccagatacttctggggcaatctgcctggcatgaacagacccctggccagcaccgtgaacgacaagctggagctgcaggagtgcctggagcacggccggatcgccaagttcagcaaggtgagaaccatcaccacccgaagcaacagcatcaaacaaggcaaggaccagcactttcctgtgttcatgaacgagaaggaggacatcctgtggtgtaccgagatggagagagtgttcgggttcccagtccactacacagatgtcagcaacatgtctagactggccagacagagactgctgggaagaagctggtccgtccctgtgatcagacacctgttcgcccctctgaaggagtacttcgcctgcgtgagcagcggcaacagcaacgccaacagccggggccccagcttctctagcggcctggtgccactgtccctgagagggagccacatgggccccatggagatctacaaaaccgtgagcgcctggaagcggcagcctgtgcgcgtgctgagcctgtttcggaatatcgataaagtcctgaaaagcctgggattcctggagagcggctctggctccggcggtggcaccctgaagtacgtggaggatgtgacaaacgtggtcagacgggatgtggagaagtggggccccttcgatctggtgtacggcagcacccaacccctgggcagctcttgtgaccggtgccctggctggtacatgtttcagttccaccggatcctgcagtacgccctgccgagacaggagtcccagcggccattcttttggattttcatggacaacttgctgctgaccgaggatgaccaggaaactaccactcggttcctgcagaccgaagccgtgaccctgcaggacgtgagaggccgggactaccagaacgccatgcgggtgtggtccaacatccctggactgaaaagcaagcacgcacctctgacccctaaagaagaggagtacctgcaggcccaggtgcggagcagaagcaagctggacgcccctaaggtggatctgctggtgaagaattgcctcctgcccctgagagagtacttcaagtatttcagccagaatagtctgcccctgggaggcagcggcggcggcatgatcgagtaccagatccccgtgagcttcaaggacgtggtggtgggcttcacccaggaggagtggcaccagctgagccccgcccagagggccctgtacagggacgtgatgctggagacctacagcaacctggtgagcgtgggctacgagggcaccaagcccgacgtgatcctgaggctggagcaggaggaggccccctggatcggcgaggccgcctgccccggctgccactgctgggaggacggcggcccaagcagcggcgcccctcctcccagcggcggcaggcggcccaagcagcggcgcccctcctcccagcggcggcagcccagccggctccccaacctctaccgaggagggcacctctgagtccgccacccccgagagcggccctggcacctccaccgagcccagcgagggcagcgcacccggcagccctgccggcagccccacctccacagaggagggaaccagcaccgagcccagcgaaggcagcgccccaggcaccagcaccgagcctagtgagcaggagattaaacggatcaacaagatcagaagaagacttgtgaaagacagcaacaccaagaaggccggcaagacaggccccatgaaaaccctgctggttagagtgatgacacccgatctgagagagcggctggaaaacctgagaaagaagcctgaaaatatcccccagcccatcagcaatacatctagagccaacctgaataagctgctgaccgattacaccgaaatgaagaaggcgatcctgcatgtgtactgggaagagttccagaaggaccctgtgggcctgatgagccgggtggcccagcctgccagcaagaagatcgatcagaacaagctgaaacctgagatggacgagaagggcaacctgaccaccgccggctttgcctgctctcagtgtggccagcccctgttcgtgtacaagctggagcaggtgtctgagaagggcaaggcttacaccaactacttcggacggtgcaatgtggccgagcacgaaaagctgatcctgctggcccagctgaagcccgagaaggatagcgacgaagccgtgacatatagcctgggaaagtttgggcagagggccctggatttctacagcattcatgtgaccaaggagtccacccaccccgtgaagcccctggcccagatcgccggaaacagatacgcctccggacctgtgggaaaggccctgagcgacgcatgtatgggcacaatcgcctccttcctgtctaagtaccaggacatcatcatcgaacaccagaaggtggtgaagggcaaccagaagagactggagagcctgcgggagctggccggcaaggaaaacctggaataccctagcgtgaccctgccacctcagcctcacaccaaggagggcgttgatgcctacaacgaagtgatcgcccgggtgcgaatgtgggtgaacctgaacctgtggcagaagctgaagctaagcagagatgatgccaagcctctgctgagactgaagggattcccttcctttcctctggtcgagagacaggccaacgaagtggactggtgggacatggtgtgtaacgtgaagaagctgatcaacgagaaaaaggaggatggcaaggtgttttggcagaatctggctggctacaagagacaggaagccctgagaccatacctgagcagcgaggaagatcggaagaagggaaagaaattcgctcggtaccagctgggcgacctgctgctgcacctggaaaagaagcacggcgaggactggggaaaggtgtacgacgaggcctgggagcggattgacaagaaagtggaaggcctgagcaagcacatcaagctggaagaggaacggagaagcgaggacgcccagagcaaggccgccctgaccgactggctgcgggctaaggccagcttcgtgatcgagggcctgaaggaggccgacaaggacgagttctgcagatgcgagctgaagctgcagaagtggtacggggacctgcggggaaagcccttcgccatcgaagccgagaacagcatcctggacatcagcggcttcagcaagcagtacaactgtgccttcatctggcagaaggacggcgtgaagaagctgaacctgtacctgatcatcaactacttcaagggcggcaagctgcggttcaagaagatcaaacctgaagccttcgaagccaacagattctacaccgtgatcaacaaaaagagcggcgagatcgtgcccatggaggtgaacttcaacttcgacgaccccaacctgatcatcctgcctctggcctttggcaagagacagggcagagaattcatctggaacgacctgctgtccctggaaaccggcagcctgaagctggccaacggaagagtgatcgagaagacactgtacaacagaagaacccggcaggatgagcctgccctgttcgtggccctgaccttcgagcggcgggaggtcctggactcctccaatatcaaaccaatgaacctgatcggcgtggcaagaggcgaaaacatccccgccgtgatcgccctgaccgaccccgagggctgcccactgagccggtttaaggatagcctgggaaacccaacccacatcctgagaatcggcgagagctataaggagaagcagcggaccatccaggccaagaaggaggtggagcagcggagagccggcggctacagccggaagtacgccagcaaagccaagaatctggcagacgatatggtgagaaacaccgctagagatctgctgtactacgccgtgacccaggatgccatgctgatcttcgccaacctgagccggggcttcggccggcagggcaagcggaccttcatggccgagagacagtacacacggatggaggactggctgaccgccaagctggcctacgagggcctgagcaagacctacctgtccaagacactggcccagtacacctccaagacatgcagcaactgtgggtttaccatcaccagcgccgactacgacagggtgctggagaagctgaagaagacagcaacaggctggatgaccacaattaacggcaaggagctgaaggtggagggccagattacctactacaacagatacaagagacagaacgtagtcaaggacctgtccgtcgagctggatagactgagcgaagaatctgtgaacaacgacatctcctcctggacaaagggcagaagcggagaagctctgagcctcctgaagaaaagattctcccatagacccgtgcaggagaagttcgtgtgcctgaactgcggcttcgagacacacgcagccgagcaagccgccctgaacatcgccagatcctggctgttcctgcggagccaggagtacaagaaataccagacaaacaagacaaccggcaacaccgataagagagccttcgtcgagacctggcagtccttttaccggaagaagcttaaggaggtgtggaaacctgccgtgcggtctggcggatctggcggaggctccaccagccccaagaaaaagagaaaagtctaagctgccttctgcggggcttgccttctggccatgcccttcttctctcccttgcacctgtacctcttggtctttgaataaagcctgagtaggaaggctagcaaaaaaaaaaaaaaaaaaaaaaaaaaaaaaaaaaaaaaaaaaaaaaaaaaaaaaaaaaaaaaaaaaaaaaaaaaaaaaaagcccagccggctccccaacctctaccgaggagggcacctctgagtccgccacccccgagagcggccctggcacctccaccgagcccagcgagggcagcgcacccggcagccctgccggcagccccacctccacagaggagggaaccagcaccgagcccagcgaaggcagcgccccaggcaccagcaccgagcctagtgagcaggagattaaacggatcaacaagatcagaagaagacttgtgaaagacagcaacaccaagaaggccggcaagacaggccccatgaaaaccctgctggttagagtgatgacacccgatctgagagagcggctggaaaacctgagaaagaagcctgaaaatatcccccagcccatcagcaatacatctagagccaacctgaataagctgctgaccgattacaccgaaatgaagaaggcgatcctgcatgtgtactgggaagagttccagaaggaccctgtgggcctgatgagccgggtggcccagcctgccagcaagaagatcgatcagaacaagctgaaacctgagatggacgagaagggcaacctgaccaccgccggctttgcctgctctcagtgtggccagcccctgttcgtgtacaagctggagcaggtgtctgagaagggcaaggcttacaccaactacttcggacggtgcaatgtggccgagcacgaaaagctgatcctgctggcccagctgaagcccgagaaggatagcgacgaagccgtgacatatagcctgggaaagtttgggcagagggccctggatttctacagcattcatgtgaccaaggagtccacccaccccgtgaagcccctggcccagatcgccggaaacagatacgcctccggacctgtgggaaaggccctgagcgacgcatgtatgggcacaatcgcctccttcctgtctaagtaccaggacatcatcatcgaacaccagaaggtggtgaagggcaaccagaagagactggagagcctgcgggagctggccggcaaggaaaacctggaataccctagcgtgaccctgccacctcagcctcacaccaaggagggcgttgatgcctacaacgaagtgatcgcccgggtgcgaatgtgggtgaacctgaacctgtggcagaagctgaagctaagcagagatgatgccaagcctctgctgagactgaagggattcccttcctttcctctggtcgagagacaggccaacgaagtggactggtgggacatggtgtgtaacgtgaagaagctgatcaacgagaaaaaggaggatggcaaggtgttttggcagaatctggctggctacaagagacaggaagccctgagaccatacctgagcagcgaggaagatcggaagaagggaaagaaattcgctcggtaccagctgggcgacctgctgctgcacctggaaaagaagcacggcgaggactggggaaaggtgtacgacgaggcctgggagcggattgacaagaaagtggaaggcctgagcaagcacatcaagctggaagaggaacggagaagcgaggacgcccagagcaaggccgccctgaccgactggctgcgggctaaggccagcttcgtgatcgagggcctgaaggaggccgacaaggacgagttctgcagatgcgagctgaagctgcagaagtggtacggggacctgcggggaaagcccttcgccatcgaagccgagaacagcatcctggacatcagcggcttcagcaagcagtacaactgtgccttcatctggcagaaggacggcgtgaagaagctgaacctgtacctgatcatcaactacttcaagggcggcaagctgcggttcaagaagatcaaacctgaagccttcgaagccaacagattctacaccgtgatcaacaaaaagagcggcgagatcgtgcccatggaggtgaacttcaacttcgacgaccccaacctgatcatcctgcctctggcctttggcaagagacagggcagagaattcatctggaacgacctgctgtccctggaaaccggcagcctgaagctggccaacggaagagtgatcgagaagacactgtacaacagaagaacccggcaggatgagcctgccctgttcgtggccctgaccttcgagcggcgggaggtcctggactcctccaatatcaaaccaatgaacctgatcggcgtggcaagaggcgaaaacatccccgccgtgatcgccctgaccgaccccgagggctgcccactgagccggtttaaggatagcctgggaaacccaacccacatcctgagaatcggcgagagctataaggagaagcagcggaccatccaggccaagaaggaggtggagcagcggagagccggcggctacagccggaagtacgccagcaaagccaagaatctggcagacgatatggtgagaaacaccgctagagatctgctgtactacgccgtgacccaggatgccatgctgatcttcgccaacctgagccggggcttcggccggcagggcaagcggaccttcatggccgagagacagtacacacggatggaggactggctgaccgccaagctggcctacgagggcctgagcaagacctacctgtccaagacactggcccagtacacctccaagacatgcagcaactgtgggtttaccatcaccagcgccgactacgacagggtgctggagaagctgaagaagacagcaacaggctggatgaccacaattaacggcaaggagctgaaggtggagggccagattacctactacaacagatacaagagacagaacgtagtcaaggacctgtccgtcgagctggatagactgagcgaagaatctgtgaacaacgacatctcctcctggacaaagggcagaagcggagaagctctgagcctcctgaagaaaagattctcccatagacccgtgcaggagaagttcgtgtgcctgaactgcggcttcgagacacacgcagccgagcaagccgccctgaacatcgccagatcctggctgttcctgcggagccaggagtacaagaaataccagacaaacaagacaaccggcaacaccgataagagagccttcgtcgagacctggcagtccttttaccggaagaagcttaaggaggtgtggaaacctgccgtgcggtctggcggatctggcggaggctccaccagccccaagaaaaagagaaaagtctaagctgccttctgcggggcttgccttctggccatgcccttcttctctcccttgcacctgtacctcttggtctttgaataaagcctgagtaggaaggctagcaaaaaaaaaaaaaaaaaaaaaaaaaaaaaaaaaaaaaaaaaaaaaaaaaaaaaaaaaaaaaaaaaaaaaaaaaaaaaaaa

SEQ ID NO: 9277 - RNA, 8787 nt, synthetic construct
  source 1..8787: mol_type = other RNA
aggaaataagagagaaaagaagagtaagaagaaatataagagccaccatggcccctaagaagaagcgtaaagtgagccggatgaaccacgaccaggagttcgacccccctaaggtgtaccctcccgtccccgccgagaagagaaagcccatccgggtcctgagcctgttcgatggcatcgccaccggtctgctggtgctgaaggacctgggcatccaggtggataggtacattgcctccgaggtgtgcgaggactccatcaccgtgggaatggtgcgtcatcagggcaagatcatgtacgtgggcgacgtgcggagcgtgacacagaagcatatccaggagtggggccctttcgacctggtgatcggcggcagcccttgcaatgacctgagcatcgtgaacccagcccggaagggcctgtacgagggaaccggcagactgttcttcgagttttacagactgctgcacgacgcccggcctaaggaaggcgacgaccggcccttcttttggctgttcgagaatgtggtggccatgggagtcagcgacaagcgggatattagccggttcctggagagcaaccccgtgatgatcgatgccaaggaagtgagcgccgcccaccgggccagatacttctggggcaatctgcctggcatgaacagacccctggccagcaccgtgaacgacaagctggagctgcaggagtgcctggagcacggccggatcgccaagttcagcaaggtgagaaccatcaccacccgaagcaacagcatcaaacaaggcaaggaccagcactttcctgtgttcatgaacgagaaggaggacatcctgtggtgtaccgagatggagagagtgttcgggttcccagtccactacacagatgtcagcaacatgtctagactggccagacagagactgctgggaagaagctggtccgtccctgtgatcagacacctgttcgcccctctgaaggagtacttcgcctgcgtgagcagcggcaacagcaacgccaacagccggggccccagcttctctagcggcctggtgccactgtccctgagagggagccacatgggccccatggagatctacaaaaccgtgagcgcctggaagcggcagcctgtgcgcgtgctgagcctgtttcggaatatcgataaagtcctgaaaagcctgggattcctggagagcggctctggctccggcggtggcaccctgaagtacgtggaggatgtgacaaacgtggtcagacgggatgtggagaagtggggccccttcgatctggtgtacggcagcacccaacccctgggcagctcttgtgaccggtgccctggctggtacatgtttcagttccaccggatcctgcagtacgccctgccgagacaggagtcccagcggccattcttttggattttcatggacaacttgctgctgaccgaggatgaccaggaaactaccactcggttcctgcagaccgaagccgtgaccctgcaggacgtgagaggccgggactaccagaacgccatgcgggtgtggtccaacatccctggactgaaaagcaagcacgcacctctgacccctaaagaagaggagtacctgcaggcccaggtgcggagcagaagcaagctggacgcccctaaggtggatctgctggtgaagaattgcctcctgcccctgagagagtacttcaagtatttcagccagaatagtctgcccctgggaggcagcggcggcggcccccaggagctggtgaccttcgaggacgtggccgtgtacctgagcaaggaggagtggggcctgctggaccccgcccagaggaggctgtacagggacgtgatgctggagaactacggcaacgtggccagcctgggcctgcccgtgagcaagcccgacctgatcagccagctggagaggaccgacctgcccctggtgcccaggctgccccagaccgagatcgaggacctgttcgacgagaagctgggcggcccaagcagcggcgcccctcctcccagcggcggcaggcggcccaagcagcggcgcccctcctcccagcggcggcagcccagccggctccccaacctctaccgaggagggcacctctgagtccgccacccccgagagcggccctggcacctccaccgagcccagcgagggcagcgcacccggcagccctgccggcagccccacctccacagaggagggaaccagcaccgagcccagcgaaggcagcgccccaggcaccagcaccgagcctagtgagcaggagattaaacggatcaacaagatcagaagaagacttgtgaaagacagcaacaccaagaaggccggcaagacaggccccatgaaaaccctgctggttagagtgatgacacccgatctgagagagcggctggaaaacctgagaaagaagcctgaaaatatcccccagcccatcagcaatacatctagagccaacctgaataagctgctgaccgattacaccgaaatgaagaaggcgatcctgcatgtgtactgggaagagttccagaaggaccctgtgggcctgatgagccgggtggcccagcctgccagcaagaagatcgatcagaacaagctgaaacctgagatggacgagaagggcaacctgaccaccgccggctttgcctgctctcagtgtggccagcccctgttcgtgtacaagctggagcaggtgtctgagaagggcaaggcttacaccaactacttcggacggtgcaatgtggccgagcacgaaaagctgatcctgctggcccagctgaagcccgagaaggatagcgacgaagccgtgacatatagcctgggaaagtttgggcagagggccctggatttctacagcattcatgtgaccaaggagtccacccaccccgtgaagcccctggcccagatcgccggaaacagatacgcctccggacctgtgggaaaggccctgagcgacgcatgtatgggcacaatcgcctccttcctgtctaagtaccaggacatcatcatcgaacaccagaaggtggtgaagggcaaccagaagagactggagagcctgcgggagctggccggcaaggaaaacctggaataccctagcgtgaccctgccacctcagcctcacaccaaggagggcgttgatgcctacaacgaagtgatcgcccgggtgcgaatgtgggtgaacctgaacctgtggcagaagctgaagctaagcagagatgatgccaagcctctgctgagactgaagggattcccttcctttcctctggtcgagagacaggccaacgaagtggactggtgggacatggtgtgtaacgtgaagaagctgatcaacgagaaaaaggaggatggcaaggtgttttggcagaatctggctggctacaagagacaggaagccctgagaccatacctgagcagcgaggaagatcggaagaagggaaagaaattcgctcggtaccagctgggcgacctgctgctgcacctggaaaagaagcacggcgaggactggggaaaggtgtacgacgaggcctgggagcggattgacaagaaagtggaaggcctgagcaagcacatcaagctggaagaggaacggagaagcgaggacgcccagagcaaggccgccctgaccgactggctgcgggctaaggccagcttcgtgatcgagggcctgaaggaggccgacaaggacgagttctgcagatgcgagctgaagctgcagaagtggtacggggacctgcggggaaagcccttcgccatcgaagccgagaacagcatcctggacatcagcggcttcagcaagcagtacaactgtgccttcatctggcagaaggacggcgtgaagaagctgaacctgtacctgatcatcaactacttcaagggcggcaagctgcggttcaagaagatcaaacctgaagccttcgaagccaacagattctacaccgtgatcaacaaaaagagcggcgagatcgtgcccatggaggtgaacttcaacttcgacgaccccaacctgatcatcctgcctctggcctttggcaagagacagggcagagaattcatctggaacgacctgctgtccctggaaaccggcagcctgaagctggccaacggaagagtgatcgagaagacactgtacaacagaagaacccggcaggatgagcctgccctgttcgtggccctgaccttcgagcggcgggaggtcctggactcctccaatatcaaaccaatgaacctgatcggcgtggcaagaggcgaaaacatccccgccgtgatcgccctgaccgaccccgagggctgcccactgagccggtttaaggatagcctgggaaacccaacccacatcctgagaatcggcgagagctataaggagaagcagcggaccatccaggccaagaaggaggtggagcagcggagagccggcggctacagccggaagtacgccagcaaagccaagaatctggcagacgatatggtgagaaacaccgctagagatctgctgtactacgccgtgacccaggatgccatgctgatcttcgccaacctgagccggggcttcggccggcagggcaagcggaccttcatggccgagagacagtacacacggatggaggactggctgaccgccaagctggcctacgagggcctgagcaagacctacctgtccaagacactggcccagtacacctccaagacatgcagcaactgtgggtttaccatcaccagcgccgactacgacagggtgctggagaagctgaagaagacagcaacaggctggatgaccacaattaacggcaaggagctgaaggtggagggccagattacctactacaacagatacaagagacagaacgtagtcaaggacctgtccgtcgagctggatagactgagcgaagaatctgtgaacaacgacatctcctcctggacaaagggcagaagcggagaagctctgagcctcctgaagaaaagattctcccatagacccgtgcaggagaagttcgtgtgcctgaactgcggcttcgagacacacgcagccgagcaagccgccctgaacatcgccagatcctggctgttcctgcggagccaggagtacaagaaataccagacaaacaagacaaccggcaacaccgataagagagccttcgtcgagacctggcagtccttttaccggaagaagcttaaggaggtgtggaaacctgccgtgcggtctggcggatctggcggaggctccaccagccccaagaaaaagagaaaagtctaagctgccttctgcggggcttgccttctggccatgcccttcttctctcccttgcacctgtacctcttggtctttgaataaagcctgagtaggaaggctagcaaaaaaaaaaaaaaaaaaaaaaaaaaaaaaaaaaaaaaaaaaaaaaaaaaaaaaaaaaaaaaaaaaaaaaaaaaaaaaaagcccagccggctccccaacctctaccgaggagggcacctctgagtccgccacccccgagagcggccctggcacctccaccgagcccagcgagggcagcgcacccggcagccctgccggcagccccacctccacagaggagggaaccagcaccgagcccagcgaaggcagcgccccaggcaccagcaccgagcctagtgagcaggagattaaacggatcaacaagatcagaagaagacttgtgaaagacagcaacaccaagaaggccggcaagacaggccccatgaaaaccctgctggttagagtgatgacacccgatctgagagagcggctggaaaacctgagaaagaagcctgaaaatatcccccagcccatcagcaatacatctagagccaacctgaataagctgctgaccgattacaccgaaatgaagaaggcgatcctgcatgtgtactgggaagagttccagaaggaccctgtgggcctgatgagccgggtggcccagcctgccagcaagaagatcgatcagaacaagctgaaacctgagatggacgagaagggcaacctgaccaccgccggctttgcctgctctcagtgtggccagcccctgttcgtgtacaagctggagcaggtgtctgagaagggcaaggcttacaccaactacttcggacggtgcaatgtggccgagcacgaaaagctgatcctgctggcccagctgaagcccgagaaggatagcgacgaagccgtgacatatagcctgggaaagtttgggcagagggccctggatttctacagcattcatgtgaccaaggagtccacccaccccgtgaagcccctggcccagatcgccggaaacagatacgcctccggacctgtgggaaaggccctgagcgacgcatgtatgggcacaatcgcctccttcctgtctaagtaccaggacatcatcatcgaacaccagaaggtggtgaagggcaaccagaagagactggagagcctgcgggagctggccggcaaggaaaacctggaataccctagcgtgaccctgccacctcagcctcacaccaaggagggcgttgatgcctacaacgaagtgatcgcccgggtgcgaatgtgggtgaacctgaacctgtggcagaagctgaagctaagcagagatgatgccaagcctctgctgagactgaagggattcccttcctttcctctggtcgagagacaggccaacgaagtggactggtgggacatggtgtgtaacgtgaagaagctgatcaacgagaaaaaggaggatggcaaggtgttttggcagaatctggctggctacaagagacaggaagccctgagaccatacctgagcagcgaggaagatcggaagaagggaaagaaattcgctcggtaccagctgggcgacctgctgctgcacctggaaaagaagcacggcgaggactggggaaaggtgtacgacgaggcctgggagcggattgacaagaaagtggaaggcctgagcaagcacatcaagctggaagaggaacggagaagcgaggacgcccagagcaaggccgccctgaccgactggctgcgggctaaggccagcttcgtgatcgagggcctgaaggaggccgacaaggacgagttctgcagatgcgagctgaagctgcagaagtggtacggggacctgcggggaaagcccttcgccatcgaagccgagaacagcatcctggacatcagcggcttcagcaagcagtacaactgtgccttcatctggcagaaggacggcgtgaagaagctgaacctgtacctgatcatcaactacttcaagggcggcaagctgcggttcaagaagatcaaacctgaagccttcgaagccaacagattctacaccgtgatcaacaaaaagagcggcgagatcgtgcccatggaggtgaacttcaacttcgacgaccccaacctgatcatcctgcctctggcctttggcaagagacagggcagagaattcatctggaacgacctgctgtccctggaaaccggcagcctgaagctggccaacggaagagtgatcgagaagacactgtacaacagaagaacccggcaggatgagcctgccctgttcgtggccctgaccttcgagcggcgggaggtcctggactcctccaatatcaaaccaatgaacctgatcggcgtggcaagaggcgaaaacatccccgccgtgatcgccctgaccgaccccgagggctgcccactgagccggtttaaggatagcctgggaaacccaacccacatcctgagaatcggcgagagctataaggagaagcagcggaccatccaggccaagaaggaggtggagcagcggagagccggcggctacagccggaagtacgccagcaaagccaagaatctggcagacgatatggtgagaaacaccgctagagatctgctgtactacgccgtgacccaggatgccatgctgatcttcgccaacctgagccggggcttcggccggcagggcaagcggaccttcatggccgagagacagtacacacggatggaggactggctgaccgccaagctggcctacgagggcctgagcaagacctacctgtccaagacactggcccagtacacctccaagacatgcagcaactgtgggtttaccatcaccagcgccgactacgacagggtgctggagaagctgaagaagacagcaacaggctggatgaccacaattaacggcaaggagctgaaggtggagggccagattacctactacaacagatacaagagacagaacgtagtcaaggacctgtccgtcgagctggatagactgagcgaagaatctgtgaacaacgacatctcctcctggacaaagggcagaagcggagaagctctgagcctcctgaagaaaagattctcccatagacccgtgcaggagaagttcgtgtgcctgaactgcggcttcgagacacacgcagccgagcaagccgccctgaacatcgccagatcctggctgttcctgcggagccaggagtacaagaaataccagacaaacaagacaaccggcaacaccgataagagagccttcgtcgagacctggcagtccttttaccggaagaagcttaaggaggtgtggaaacctgccgtgcggtctggcggatctggcggaggctccaccagccccaagaaaaagagaaaagtctaagctgccttctgcggggcttgccttctggccatgcccttcttctctcccttgcacctgtacctcttggtctttgaataaagcctgagtaggaaggctagcaaaaaaaaaaaaaaaaaaaaaaaaaaaaaaaaaaaaaaaaaaaaaaaaaaaaaaaaaaaaaaaaaaaaaaaaaaaaaaaa

SEQ ID NO: 9278 - RNA, 8787 nt, synthetic construct
  source 1..8787: mol_type = other RNA
aggaaataagagagaaaagaagagtaagaagaaatataagagccaccatggcccctaagaagaagcgtaaagtgagccggatgaaccacgaccaggagttcgacccccctaaggtgtaccctcccgtccccgccgagaagagaaagcccatccgggtcctgagcctgttcgatggcatcgccaccggtctgctggtgctgaaggacctgggcatccaggtggataggtacattgcctccgaggtgtgcgaggactccatcaccgtgggaatggtgcgtcatcagggcaagatcatgtacgtgggcgacgtgcggagcgtgacacagaagcatatccaggagtggggccctttcgacctggtgatcggcggcagcccttgcaatgacctgagcatcgtgaacccagcccggaagggcctgtacgagggaaccggcagactgttcttcgagttttacagactgctgcacgacgcccggcctaaggaaggcgacgaccggcccttcttttggctgttcgagaatgtggtggccatgggagtcagcgacaagcgggatattagccggttcctggagagcaaccccgtgatgatcgatgccaaggaagtgagcgccgcccaccgggccagatacttctggggcaatctgcctggcatgaacagacccctggccagcaccgtgaacgacaagctggagctgcaggagtgcctggagcacggccggatcgccaagttcagcaaggtgagaaccatcaccacccgaagcaacagcatcaaacaaggcaaggaccagcactttcctgtgttcatgaacgagaaggaggacatcctgtggtgtaccgagatggagagagtgttcgggttcccagtccactacacagatgtcagcaacatgtctagactggccagacagagactgctgggaagaagctggtccgtccctgtgatcagacacctgttcgcccctctgaaggagtacttcgcctgcgtgagcagcggcaacagcaacgccaacagccggggccccagcttctctagcggcctggtgccactgtccctgagagggagccacatgggccccatggagatctacaaaaccgtgagcgcctggaagcggcagcctgtgcgcgtgctgagcctgtttcggaatatcgataaagtcctgaaaagcctgggattcctggagagcggctctggctccggcggtggcaccctgaagtacgtggaggatgtgacaaacgtggtcagacgggatgtggagaagtggggccccttcgatctggtgtacggcagcacccaacccctgggcagctcttgtgaccggtgccctggctggtacatgtttcagttccaccggatcctgcagtacgccctgccgagacaggagtcccagcggccattcttttggattttcatggacaacttgctgctgaccgaggatgaccaggaaactaccactcggttcctgcagaccgaagccgtgaccctgcaggacgtgagaggccgggactaccagaacgccatgcgggtgtggtccaacatccctggactgaaaagcaagcacgcacctctgacccctaaagaagaggagtacctgcaggcccaggtgcggagcagaagcaagctggacgcccctaaggtggatctgctggtgaagaattgcctcctgcccctgagagagtacttcaagtatttcagccagaatagtctgcccctgggaggcagcggcggcggcccccagggcctggtgaccttcggcgacgtggccgtggacttcagccaggaggagtgggagtggctgaaccccaaccagaggaacctgtacaggaaggtgatgctggagaactacaagaacctggccagcctgggcctgtgcgtgagcaagcccgacgtgatcagcagcctggagcagggcaaggagccctggaccgtgaagaggaagatgaccagggcctggtgccccgacctgaagatcgtgggcggcccaagcagcggcgcccctcctcccagcggcggcaggcggcccaagcagcggcgcccctcctcccagcggcggcagcccagccggctccccaacctctaccgaggagggcacctctgagtccgccacccccgagagcggccctggcacctccaccgagcccagcgagggcagcgcacccggcagccctgccggcagccccacctccacagaggagggaaccagcaccgagcccagcgaaggcagcgccccaggcaccagcaccgagcctagtgagcaggagattaaacggatcaacaagatcagaagaagacttgtgaaagacagcaacaccaagaaggccggcaagacaggccccatgaaaaccctgctggttagagtgatgacacccgatctgagagagcggctggaaaacctgagaaagaagcctgaaaatatcccccagcccatcagcaatacatctagagccaacctgaataagctgctgaccgattacaccgaaatgaagaaggcgatcctgcatgtgtactgggaagagttccagaaggaccctgtgggcctgatgagccgggtggcccagcctgccagcaagaagatcgatcagaacaagctgaaacctgagatggacgagaagggcaacctgaccaccgccggctttgcctgctctcagtgtggccagcccctgttcgtgtacaagctggagcaggtgtctgagaagggcaaggcttacaccaactacttcggacggtgcaatgtggccgagcacgaaaagctgatcctgctggcccagctgaagcccgagaaggatagcgacgaagccgtgacatatagcctgggaaagtttgggcagagggccctggatttctacagcattcatgtgaccaaggagtccacccaccccgtgaagcccctggcccagatcgccggaaacagatacgcctccggacctgtgggaaaggccctgagcgacgcatgtatgggcacaatcgcctccttcctgtctaagtaccaggacatcatcatcgaacaccagaaggtggtgaagggcaaccagaagagactggagagcctgcgggagctggccggcaaggaaaacctggaataccctagcgtgaccctgccacctcagcctcacaccaaggagggcgttgatgcctacaacgaagtgatcgcccgggtgcgaatgtgggtgaacctgaacctgtggcagaagctgaagctaagcagagatgatgccaagcctctgctgagactgaagggattcccttcctttcctctggtcgagagacaggccaacgaagtggactggtgggacatggtgtgtaacgtgaagaagctgatcaacgagaaaaaggaggatggcaaggtgttttggcagaatctggctggctacaagagacaggaagccctgagaccatacctgagcagcgaggaagatcggaagaagggaaagaaattcgctcggtaccagctgggcgacctgctgctgcacctggaaaagaagcacggcgaggactggggaaaggtgtacgacgaggcctgggagcggattgacaagaaagtggaaggcctgagcaagcacatcaagctggaagaggaacggagaagcgaggacgcccagagcaaggccgccctgaccgactggctgcgggctaaggccagcttcgtgatcgagggcctgaaggaggccgacaaggacgagttctgcagatgcgagctgaagctgcagaagtggtacggggacctgcggggaaagcccttcgccatcgaagccgagaacagcatcctggacatcagcggcttcagcaagcagtacaactgtgccttcatctggcagaaggacggcgtgaagaagctgaacctgtacctgatcatcaactacttcaagggcggcaagctgcggttcaagaagatcaaacctgaagccttcgaagccaacagattctacaccgtgatcaacaaaaagagcggcgagatcgtgcccatggaggtgaacttcaacttcgacgaccccaacctgatcatcctgcctctggcctttggcaagagacagggcagagaattcatctggaacgacctgctgtccctggaaaccggcagcctgaagctggccaacggaagagtgatcgagaagacactgtacaacagaagaacccggcaggatgagcctgccctgttcgtggccctgaccttcgagcggcgggaggtcctggactcctccaatatcaaaccaatgaacctgatcggcgtggcaagaggcgaaaacatccccgccgtgatcgccctgaccgaccccgagggctgcccactgagccggtttaaggatagcctgggaaacccaacccacatcctgagaatcggcgagagctataaggagaagcagcggaccatccaggccaagaaggaggtggagcagcggagagccggcggctacagccggaagtacgccagcaaagccaagaatctggcagacgatatggtgagaaacaccgctagagatctgctgtactacgccgtgacccaggatgccatgctgatcttcgccaacctgagccggggcttcggccggcagggcaagcggaccttcatggccgagagacagtacacacggatggaggactggctgaccgccaagctggcctacgagggcctgagcaagacctacctgtccaagacactggcccagtacacctccaagacatgcagcaactgtgggtttaccatcaccagcgccgactacgacagggtgctggagaagctgaagaagacagcaacaggctggatgaccacaattaacggcaaggagctgaaggtggagggccagattacctactacaacagatacaagagacagaacgtagtcaaggacctgtccgtcgagctggatagactgagcgaagaatctgtgaacaacgacatctcctcctggacaaagggcagaagcggagaagctctgagcctcctgaagaaaagattctcccatagacccgtgcaggagaagttcgtgtgcctgaactgcggcttcgagacacacgcagccgagcaagccgccctgaacatcgccagatcctggctgttcctgcggagccaggagtacaagaaataccagacaaacaagacaaccggcaacaccgataagagagccttcgtcgagacctggcagtccttttaccggaagaagcttaaggaggtgtggaaacctgccgtgcggtctggcggatctggcggaggctccaccagccccaagaaaaagagaaaagtctaagctgccttctgcggggcttgccttctggccatgcccttcttctctcccttgcacctgtacctcttggtctttgaataaagcctgagtaggaaggctagcaaaaaaaaaaaaaaaaaaaaaaaaaaaaaaaaaaaaaaaaaaaaaaaaaaaaaaaaaaaaaaaaaaaaaaaaaaaaaaaagcccagccggctccccaacctctaccgaggagggcacctctgagtccgccacccccgagagcggccctggcacctccaccgagcccagcgagggcagcgcacccggcagccctgccggcagccccacctccacagaggagggaaccagcaccgagcccagcgaaggcagcgccccaggcaccagcaccgagcctagtgagcaggagattaaacggatcaacaagatcagaagaagacttgtgaaagacagcaacaccaagaaggccggcaagacaggccccatgaaaaccctgctggttagagtgatgacacccgatctgagagagcggctggaaaacctgagaaagaagcctgaaaatatcccccagcccatcagcaatacatctagagccaacctgaataagctgctgaccgattacaccgaaatgaagaaggcgatcctgcatgtgtactgggaagagttccagaaggaccctgtgggcctgatgagccgggtggcccagcctgccagcaagaagatcgatcagaacaagctgaaacctgagatggacgagaagggcaacctgaccaccgccggctttgcctgctctcagtgtggccagcccctgttcgtgtacaagctggagcaggtgtctgagaagggcaaggcttacaccaactacttcggacggtgcaatgtggccgagcacgaaaagctgatcctgctggcccagctgaagcccgagaaggatagcgacgaagccgtgacatatagcctgggaaagtttgggcagagggccctggatttctacagcattcatgtgaccaaggagtccacccaccccgtgaagcccctggcccagatcgccggaaacagatacgcctccggacctgtgggaaaggccctgagcgacgcatgtatgggcacaatcgcctccttcctgtctaagtaccaggacatcatcatcgaacaccagaaggtggtgaagggcaaccagaagagactggagagcctgcgggagctggccggcaaggaaaacctggaataccctagcgtgaccctgccacctcagcctcacaccaaggagggcgttgatgcctacaacgaagtgatcgcccgggtgcgaatgtgggtgaacctgaacctgtggcagaagctgaagctaagcagagatgatgccaagcctctgctgagactgaagggattcccttcctttcctctggtcgagagacaggccaacgaagtggactggtgggacatggtgtgtaacgtgaagaagctgatcaacgagaaaaaggaggatggcaaggtgttttggcagaatctggctggctacaagagacaggaagccctgagaccatacctgagcagcgaggaagatcggaagaagggaaagaaattcgctcggtaccagctgggcgacctgctgctgcacctggaaaagaagcacggcgaggactggggaaaggtgtacgacgaggcctgggagcggattgacaagaaagtggaaggcctgagcaagcacatcaagctggaagaggaacggagaagcgaggacgcccagagcaaggccgccctgaccgactggctgcgggctaaggccagcttcgtgatcgagggcctgaaggaggccgacaaggacgagttctgcagatgcgagctgaagctgcagaagtggtacggggacctgcggggaaagcccttcgccatcgaagccgagaacagcatcctggacatcagcggcttcagcaagcagtacaactgtgccttcatctggcagaaggacggcgtgaagaagctgaacctgtacctgatcatcaactacttcaagggcggcaagctgcggttcaagaagatcaaacctgaagccttcgaagccaacagattctacaccgtgatcaacaaaaagagcggcgagatcgtgcccatggaggtgaacttcaacttcgacgaccccaacctgatcatcctgcctctggcctttggcaagagacagggcagagaattcatctggaacgacctgctgtccctggaaaccggcagcctgaagctggccaacggaagagtgatcgagaagacactgtacaacagaagaacccggcaggatgagcctgccctgttcgtggccctgaccttcgagcggcgggaggtcctggactcctccaatatcaaaccaatgaacctgatcggcgtggcaagaggcgaaaacatccccgccgtgatcgccctgaccgaccccgagggctgcccactgagccggtttaaggatagcctgggaaacccaacccacatcctgagaatcggcgagagctataaggagaagcagcggaccatccaggccaagaaggaggtggagcagcggagagccggcggctacagccggaagtacgccagcaaagccaagaatctggcagacgatatggtgagaaacaccgctagagatctgctgtactacgccgtgacccaggatgccatgctgatcttcgccaacctgagccggggcttcggccggcagggcaagcggaccttcatggccgagagacagtacacacggatggaggactggctgaccgccaagctggcctacgagggcctgagcaagacctacctgtccaagacactggcccagtacacctccaagacatgcagcaactgtgggtttaccatcaccagcgccgactacgacagggtgctggagaagctgaagaagacagcaacaggctggatgaccacaattaacggcaaggagctgaaggtggagggccagattacctactacaacagatacaagagacagaacgtagtcaaggacctgtccgtcgagctggatagactgagcgaagaatctgtgaacaacgacatctcctcctggacaaagggcagaagcggagaagctctgagcctcctgaagaaaagattctcccatagacccgtgcaggagaagttcgtgtgcctgaactgcggcttcgagacacacgcagccgagcaagccgccctgaacatcgccagatcctggctgttcctgcggagccaggagtacaagaaataccagacaaacaagacaaccggcaacaccgataagagagccttcgtcgagacctggcagtccttttaccggaagaagcttaaggaggtgtggaaacctgccgtgcggtctggcggatctggcggaggctccaccagccccaagaaaaagagaaaagtctaagctgccttctgcggggcttgccttctggccatgcccttcttctctcccttgcacctgtacctcttggtctttgaataaagcctgagtaggaaggctagcaaaaaaaaaaaaaaaaaaaaaaaaaaaaaaaaaaaaaaaaaaaaaaaaaaaaaaaaaaaaaaaaaaaaaaaaaaaaaaaa

SEQ ID NO: 9279 - RNA, 8787 nt, synthetic construct
  source 1..8787: mol_type = other RNA
aggaaataagagagaaaagaagagtaagaagaaatataagagccaccatggcccctaagaagaagcgtaaagtgagccggatgaaccacgaccaggagttcgacccccctaaggtgtaccctcccgtccccgccgagaagagaaagcccatccgggtcctgagcctgttcgatggcatcgccaccggtctgctggtgctgaaggacctgggcatccaggtggataggtacattgcctccgaggtgtgcgaggactccatcaccgtgggaatggtgcgtcatcagggcaagatcatgtacgtgggcgacgtgcggagcgtgacacagaagcatatccaggagtggggccctttcgacctggtgatcggcggcagcccttgcaatgacctgagcatcgtgaacccagcccggaagggcctgtacgagggaaccggcagactgttcttcgagttttacagactgctgcacgacgcccggcctaaggaaggcgacgaccggcccttcttttggctgttcgagaatgtggtggccatgggagtcagcgacaagcgggatattagccggttcctggagagcaaccccgtgatgatcgatgccaaggaagtgagcgccgcccaccgggccagatacttctggggcaatctgcctggcatgaacagacccctggccagcaccgtgaacgacaagctggagctgcaggagtgcctggagcacggccggatcgccaagttcagcaaggtgagaaccatcaccacccgaagcaacagcatcaaacaaggcaaggaccagcactttcctgtgttcatgaacgagaaggaggacatcctgtggtgtaccgagatggagagagtgttcgggttcccagtccactacacagatgtcagcaacatgtctagactggccagacagagactgctgggaagaagctggtccgtccctgtgatcagacacctgttcgcccctctgaaggagtacttcgcctgcgtgagcagcggcaacagcaacgccaacagccggggccccagcttctctagcggcctggtgccactgtccctgagagggagccacatgggccccatggagatctacaaaaccgtgagcgcctggaagcggcagcctgtgcgcgtgctgagcctgtttcggaatatcgataaagtcctgaaaagcctgggattcctggagagcggctctggctccggcggtggcaccctgaagtacgtggaggatgtgacaaacgtggtcagacgggatgtggagaagtggggccccttcgatctggtgtacggcagcacccaacccctgggcagctcttgtgaccggtgccctggctggtacatgtttcagttccaccggatcctgcagtacgccctgccgagacaggagtcccagcggccattcttttggattttcatggacaacttgctgctgaccgaggatgaccaggaaactaccactcggttcctgcagaccgaagccgtgaccctgcaggacgtgagaggccgggactaccagaacgccatgcgggtgtggtccaacatccctggactgaaaagcaagcacgcacctctgacccctaaagaagaggagtacctgcaggcccaggtgcggagcagaagcaagctggacgcccctaaggtggatctgctggtgaagaattgcctcctgcccctgagagagtacttcaagtatttcagccagaatagtctgcccctgggaggcagcggcggcggcagcgtgaccttcagggacgtgatcgtggacttcacccaggaggagtgggagcagctgaagcccgtgcagaaggacctgtacagggacgtgatgatggagaactactggaacctggtgagcctggacctggagaccgagggcgacatgaacgaccccgaccccgagaaggacagctgggaggacaggcccagcgtgaccagcagcatgcccgccccccccaggctggagggccccaggggcgccggcggcccaagcagcggcgcccctcctcccagcggcggcaggcggcccaagcagcggcgcccctcctcccagcggcggcagcccagccggctccccaacctctaccgaggagggcacctctgagtccgccacccccgagagcggccctggcacctccaccgagcccagcgagggcagcgcacccggcagccctgccggcagccccacctccacagaggagggaaccagcaccgagcccagcgaaggcagcgccccaggcaccagcaccgagcctagtgagcaggagattaaacggatcaacaagatcagaagaagacttgtgaaagacagcaacaccaagaaggccggcaagacaggccccatgaaaaccctgctggttagagtgatgacacccgatctgagagagcggctggaaaacctgagaaagaagcctgaaaatatcccccagcccatcagcaatacatctagagccaacctgaataagctgctgaccgattacaccgaaatgaagaaggcgatcctgcatgtgtactgggaagagttccagaaggaccctgtgggcctgatgagccgggtggcccagcctgccagcaagaagatcgatcagaacaagctgaaacctgagatggacgagaagggcaacctgaccaccgccggctttgcctgctctcagtgtggccagcccctgttcgtgtacaagctggagcaggtgtctgagaagggcaaggcttacaccaactacttcggacggtgcaatgtggccgagcacgaaaagctgatcctgctggcccagctgaagcccgagaaggatagcgacgaagccgtgacatatagcctgggaaagtttgggcagagggccctggatttctacagcattcatgtgaccaaggagtccacccaccccgtgaagcccctggcccagatcgccggaaacagatacgcctccggacctgtgggaaaggccctgagcgacgcatgtatgggcacaatcgcctccttcctgtctaagtaccaggacatcatcatcgaacaccagaaggtggtgaagggcaaccagaagagactggagagcctgcgggagctggccggcaaggaaaacctggaataccctagcgtgaccctgccacctcagcctcacaccaaggagggcgttgatgcctacaacgaagtgatcgcccgggtgcgaatgtgggtgaacctgaacctgtggcagaagctgaagctaagcagagatgatgccaagcctctgctgagactgaagggattcccttcctttcctctggtcgagagacaggccaacgaagtggactggtgggacatggtgtgtaacgtgaagaagctgatcaacgagaaaaaggaggatggcaaggtgttttggcagaatctggctggctacaagagacaggaagccctgagaccatacctgagcagcgaggaagatcggaagaagggaaagaaattcgctcggtaccagctgggcgacctgctgctgcacctggaaaagaagcacggcgaggactggggaaaggtgtacgacgaggcctgggagcggattgacaagaaagtggaaggcctgagcaagcacatcaagctggaagaggaacggagaagcgaggacgcccagagcaaggccgccctgaccgactggctgcgggctaaggccagcttcgtgatcgagggcctgaaggaggccgacaaggacgagttctgcagatgcgagctgaagctgcagaagtggtacggggacctgcggggaaagcccttcgccatcgaagccgagaacagcatcctggacatcagcggcttcagcaagcagtacaactgtgccttcatctggcagaaggacggcgtgaagaagctgaacctgtacctgatcatcaactacttcaagggcggcaagctgcggttcaagaagatcaaacctgaagccttcgaagccaacagattctacaccgtgatcaacaaaaagagcggcgagatcgtgcccatggaggtgaacttcaacttcgacgaccccaacctgatcatcctgcctctggcctttggcaagagacagggcagagaattcatctggaacgacctgctgtccctggaaaccggcagcctgaagctggccaacggaagagtgatcgagaagacactgtacaacagaagaacccggcaggatgagcctgccctgttcgtggccctgaccttcgagcggcgggaggtcctggactcctccaatatcaaaccaatgaacctgatcggcgtggcaagaggcgaaaacatccccgccgtgatcgccctgaccgaccccgagggctgcccactgagccggtttaaggatagcctgggaaacccaacccacatcctgagaatcggcgagagctataaggagaagcagcggaccatccaggccaagaaggaggtggagcagcggagagccggcggctacagccggaagtacgccagcaaagccaagaatctggcagacgatatggtgagaaacaccgctagagatctgctgtactacgccgtgacccaggatgccatgctgatcttcgccaacctgagccggggcttcggccggcagggcaagcggaccttcatggccgagagacagtacacacggatggaggactggctgaccgccaagctggcctacgagggcctgagcaagacctacctgtccaagacactggcccagtacacctccaagacatgcagcaactgtgggtttaccatcaccagcgccgactacgacagggtgctggagaagctgaagaagacagcaacaggctggatgaccacaattaacggcaaggagctgaaggtggagggccagattacctactacaacagatacaagagacagaacgtagtcaaggacctgtccgtcgagctggatagactgagcgaagaatctgtgaacaacgacatctcctcctggacaaagggcagaagcggagaagctctgagcctcctgaagaaaagattctcccatagacccgtgcaggagaagttcgtgtgcctgaactgcggcttcgagacacacgcagccgagcaagccgccctgaacatcgccagatcctggctgttcctgcggagccaggagtacaagaaataccagacaaacaagacaaccggcaacaccgataagagagccttcgtcgagacctggcagtccttttaccggaagaagcttaaggaggtgtggaaacctgccgtgcggtctggcggatctggcggaggctccaccagccccaagaaaaagagaaaagtctaagctgccttctgcggggcttgccttctggccatgcccttcttctctcccttgcacctgtacctcttggtctttgaataaagcctgagtaggaaggctagcaaaaaaaaaaaaaaaaaaaaaaaaaaaaaaaaaaaaaaaaaaaaaaaaaaaaaaaaaaaaaaaaaaaaaaaaaaaaaaaagcccagccggctccccaacctctaccgaggagggcacctctgagtccgccacccccgagagcggccctggcacctccaccgagcccagcgagggcagcgcacccggcagccctgccggcagccccacctccacagaggagggaaccagcaccgagcccagcgaaggcagcgccccaggcaccagcaccgagcctagtgagcaggagattaaacggatcaacaagatcagaagaagacttgtgaaagacagcaacaccaagaaggccggcaagacaggccccatgaaaaccctgctggttagagtgatgacacccgatctgagagagcggctggaaaacctgagaaagaagcctgaaaatatcccccagcccatcagcaatacatctagagccaacctgaataagctgctgaccgattacaccgaaatgaagaaggcgatcctgcatgtgtactgggaagagttccagaaggaccctgtgggcctgatgagccgggtggcccagcctgccagcaagaagatcgatcagaacaagctgaaacctgagatggacgagaagggcaacctgaccaccgccggctttgcctgctctcagtgtggccagcccctgttcgtgtacaagctggagcaggtgtctgagaagggcaaggcttacaccaactacttcggacggtgcaatgtggccgagcacgaaaagctgatcctgctggcccagctgaagcccgagaaggatagcgacgaagccgtgacatatagcctgggaaagtttgggcagagggccctggatttctacagcattcatgtgaccaaggagtccacccaccccgtgaagcccctggcccagatcgccggaaacagatacgcctccggacctgtgggaaaggccctgagcgacgcatgtatgggcacaatcgcctccttcctgtctaagtaccaggacatcatcatcgaacaccagaaggtggtgaagggcaaccagaagagactggagagcctgcgggagctggccggcaaggaaaacctggaataccctagcgtgaccctgccacctcagcctcacaccaaggagggcgttgatgcctacaacgaagtgatcgcccgggtgcgaatgtgggtgaacctgaacctgtggcagaagctgaagctaagcagagatgatgccaagcctctgctgagactgaagggattcccttcctttcctctggtcgagagacaggccaacgaagtggactggtgggacatggtgtgtaacgtgaagaagctgatcaacgagaaaaaggaggatggcaaggtgttttggcagaatctggctggctacaagagacaggaagccctgagaccatacctgagcagcgaggaagatcggaagaagggaaagaaattcgctcggtaccagctgggcgacctgctgctgcacctggaaaagaagcacggcgaggactggggaaaggtgtacgacgaggcctgggagcggattgacaagaaagtggaaggcctgagcaagcacatcaagctggaagaggaacggagaagcgaggacgcccagagcaaggccgccctgaccgactggctgcgggctaaggccagcttcgtgatcgagggcctgaaggaggccgacaaggacgagttctgcagatgcgagctgaagctgcagaagtggtacggggacctgcggggaaagcccttcgccatcgaagccgagaacagcatcctggacatcagcggcttcagcaagcagtacaactgtgccttcatctggcagaaggacggcgtgaagaagctgaacctgtacctgatcatcaactacttcaagggcggcaagctgcggttcaagaagatcaaacctgaagccttcgaagccaacagattctacaccgtgatcaacaaaaagagcggcgagatcgtgcccatggaggtgaacttcaacttcgacgaccccaacctgatcatcctgcctctggcctttggcaagagacagggcagagaattcatctggaacgacctgctgtccctggaaaccggcagcctgaagctggccaacggaagagtgatcgagaagacactgtacaacagaagaacccggcaggatgagcctgccctgttcgtggccctgaccttcgagcggcgggaggtcctggactcctccaatatcaaaccaatgaacctgatcggcgtggcaagaggcgaaaacatccccgccgtgatcgccctgaccgaccccgagggctgcccactgagccggtttaaggatagcctgggaaacccaacccacatcctgagaatcggcgagagctataaggagaagcagcggaccatccaggccaagaaggaggtggagcagcggagagccggcggctacagccggaagtacgccagcaaagccaagaatctggcagacgatatggtgagaaacaccgctagagatctgctgtactacgccgtgacccaggatgccatgctgatcttcgccaacctgagccggggcttcggccggcagggcaagcggaccttcatggccgagagacagtacacacggatggaggactggctgaccgccaagctggcctacgagggcctgagcaagacctacctgtccaagacactggcccagtacacctccaagacatgcagcaactgtgggtttaccatcaccagcgccgactacgacagggtgctggagaagctgaagaagacagcaacaggctggatgaccacaattaacggcaaggagctgaaggtggagggccagattacctactacaacagatacaagagacagaacgtagtcaaggacctgtccgtcgagctggatagactgagcgaagaatctgtgaacaacgacatctcctcctggacaaagggcagaagcggagaagctctgagcctcctgaagaaaagattctcccatagacccgtgcaggagaagttcgtgtgcctgaactgcggcttcgagacacacgcagccgagcaagccgccctgaacatcgccagatcctggctgttcctgcggagccaggagtacaagaaataccagacaaacaagacaaccggcaacaccgataagagagccttcgtcgagacctggcagtccttttaccggaagaagcttaaggaggtgtggaaacctgccgtgcggtctggcggatctggcggaggctccaccagccccaagaaaaagagaaaagtctaagctgccttctgcggggcttgccttctggccatgcccttcttctctcccttgcacctgtacctcttggtctttgaataaagcctgagtaggaaggctagcaaaaaaaaaaaaaaaaaaaaaaaaaaaaaaaaaaaaaaaaaaaaaaaaaaaaaaaaaaaaaaaaaaaaaaaaaaaaaaaa

SEQ ID NO: 9280 - RNA, 8787 nt, synthetic construct
  source 1..8787: mol_type = other RNA
aggaaataagagagaaaagaagagtaagaagaaatataagagccaccatggcccctaagaagaagcgtaaagtgagccggatgaaccacgaccaggagttcgacccccctaaggtgtaccctcccgtccccgccgagaagagaaagcccatccgggtcctgagcctgttcgatggcatcgccaccggtctgctggtgctgaaggacctgggcatccaggtggataggtacattgcctccgaggtgtgcgaggactccatcaccgtgggaatggtgcgtcatcagggcaagatcatgtacgtgggcgacgtgcggagcgtgacacagaagcatatccaggagtggggccctttcgacctggtgatcggcggcagcccttgcaatgacctgagcatcgtgaacccagcccggaagggcctgtacgagggaaccggcagactgttcttcgagttttacagactgctgcacgacgcccggcctaaggaaggcgacgaccggcccttcttttggctgttcgagaatgtggtggccatgggagtcagcgacaagcgggatattagccggttcctggagagcaaccccgtgatgatcgatgccaaggaagtgagcgccgcccaccgggccagatacttctggggcaatctgcctggcatgaacagacccctggccagcaccgtgaacgacaagctggagctgcaggagtgcctggagcacggccggatcgccaagttcagcaaggtgagaaccatcaccacccgaagcaacagcatcaaacaaggcaaggaccagcactttcctgtgttcatgaacgagaaggaggacatcctgtggtgtaccgagatggagagagtgttcgggttcccagtccactacacagatgtcagcaacatgtctagactggccagacagagactgctgggaagaagctggtccgtccctgtgatcagacacctgttcgcccctctgaaggagtacttcgcctgcgtgagcagcggcaacagcaacgccaacagccggggccccagcttctctagcggcctggtgccactgtccctgagagggagccacatgggccccatggagatctacaaaaccgtgagcgcctggaagcggcagcctgtgcgcgtgctgagcctgtttcggaatatcgataaagtcctgaaaagcctgggattcctggagagcggctctggctccggcggtggcaccctgaagtacgtggaggatgtgacaaacgtggtcagacgggatgtggagaagtggggccccttcgatctggtgtacggcagcacccaacccctgggcagctcttgtgaccggtgccctggctggtacatgtttcagttccaccggatcctgcagtacgccctgccgagacaggagtcccagcggccattcttttggattttcatggacaacttgctgctgaccgaggatgaccaggaaactaccactcggttcctgcagaccgaagccgtgaccctgcaggacgtgagaggccgggactaccagaacgccatgcgggtgtggtccaacatccctggactgaaaagcaagcacgcacctctgacccctaaagaagaggagtacctgcaggcccaggtgcggagcagaagcaagctggacgcccctaaggtggatctgctggtgaagaattgcctcctgcccctgagagagtacttcaagtatttcagccagaatagtctgcccctgggaggcagcggcggcggccccgcccaggtgctggtgaccttcaaggacgtggccgtggacttcacccaggaggagtggaggctgctggacccccaccagaaggagctgtacaaggaggtgaccctggagaacgcctggaacatgctgagcatgggcctgcccgtgcccagggacctggtgagccacttcaagcaggtggaggccccctggatgctggaggaggagggcagcagcaacagctgcctggacggcgagaggaggggcggcccaagcagcggcgcccctcctcccagcggcggcaggcggcccaagcagcggcgcccctcctcccagcggcggcagcccagccggctccccaacctctaccgaggagggcacctctgagtccgccacccccgagagcggccctggcacctccaccgagcccagcgagggcagcgcacccggcagccctgccggcagccccacctccacagaggagggaaccagcaccgagcccagcgaaggcagcgccccaggcaccagcaccgagcctagtgagcaggagattaaacggatcaacaagatcagaagaagacttgtgaaagacagcaacaccaagaaggccggcaagacaggccccatgaaaaccctgctggttagagtgatgacacccgatctgagagagcggctggaaaacctgagaaagaagcctgaaaatatcccccagcccatcagcaatacatctagagccaacctgaataagctgctgaccgattacaccgaaatgaagaaggcgatcctgcatgtgtactgggaagagttccagaaggaccctgtgggcctgatgagccgggtggcccagcctgccagcaagaagatcgatcagaacaagctgaaacctgagatggacgagaagggcaacctgaccaccgccggctttgcctgctctcagtgtggccagcccctgttcgtgtacaagctggagcaggtgtctgagaagggcaaggcttacaccaactacttcggacggtgcaatgtggccgagcacgaaaagctgatcctgctggcccagctgaagcccgagaaggatagcgacgaagccgtgacatatagcctgggaaagtttgggcagagggccctggatttctacagcattcatgtgaccaaggagtccacccaccccgtgaagcccctggcccagatcgccggaaacagatacgcctccggacctgtgggaaaggccctgagcgacgcatgtatgggcacaatcgcctccttcctgtctaagtaccaggacatcatcatcgaacaccagaaggtggtgaagggcaaccagaagagactggagagcctgcgggagctggccggcaaggaaaacctggaataccctagcgtgaccctgccacctcagcctcacaccaaggagggcgttgatgcctacaacgaagtgatcgcccgggtgcgaatgtgggtgaacctgaacctgtggcagaagctgaagctaagcagagatgatgccaagcctctgctgagactgaagggattcccttcctttcctctggtcgagagacaggccaacgaagtggactggtgggacatggtgtgtaacgtgaagaagctgatcaacgagaaaaaggaggatggcaaggtgttttggcagaatctggctggctacaagagacaggaagccctgagaccatacctgagcagcgaggaagatcggaagaagggaaagaaattcgctcggtaccagctgggcgacctgctgctgcacctggaaaagaagcacggcgaggactggggaaaggtgtacgacgaggcctgggagcggattgacaagaaagtggaaggcctgagcaagcacatcaagctggaagaggaacggagaagcgaggacgcccagagcaaggccgccctgaccgactggctgcgggctaaggccagcttcgtgatcgagggcctgaaggaggccgacaaggacgagttctgcagatgcgagctgaagctgcagaagtggtacggggacctgcggggaaagcccttcgccatcgaagccgagaacagcatcctggacatcagcggcttcagcaagcagtacaactgtgccttcatctggcagaaggacggcgtgaagaagctgaacctgtacctgatcatcaactacttcaagggcggcaagctgcggttcaagaagatcaaacctgaagccttcgaagccaacagattctacaccgtgatcaacaaaaagagcggcgagatcgtgcccatggaggtgaacttcaacttcgacgaccccaacctgatcatcctgcctctggcctttggcaagagacagggcagagaattcatctggaacgacctgctgtccctggaaaccggcagcctgaagctggccaacggaagagtgatcgagaagacactgtacaacagaagaacccggcaggatgagcctgccctgttcgtggccctgaccttcgagcggcgggaggtcctggactcctccaatatcaaaccaatgaacctgatcggcgtggcaagaggcgaaaacatccccgccgtgatcgccctgaccgaccccgagggctgcccactgagccggtttaaggatagcctgggaaacccaacccacatcctgagaatcggcgagagctataaggagaagcagcggaccatccaggccaagaaggaggtggagcagcggagagccggcggctacagccggaagtacgccagcaaagccaagaatctggcagacgatatggtgagaaacaccgctagagatctgctgtactacgccgtgacccaggatgccatgctgatcttcgccaacctgagccggggcttcggccggcagggcaagcggaccttcatggccgagagacagtacacacggatggaggactggctgaccgccaagctggcctacgagggcctgagcaagacctacctgtccaagacactggcccagtacacctccaagacatgcagcaactgtgggtttaccatcaccagcgccgactacgacagggtgctggagaagctgaagaagacagcaacaggctggatgaccacaattaacggcaaggagctgaaggtggagggccagattacctactacaacagatacaagagacagaacgtagtcaaggacctgtccgtcgagctggatagactgagcgaagaatctgtgaacaacgacatctcctcctggacaaagggcagaagcggagaagctctgagcctcctgaagaaaagattctcccatagacccgtgcaggagaagttcgtgtgcctgaactgcggcttcgagacacacgcagccgagcaagccgccctgaacatcgccagatcctggctgttcctgcggagccaggagtacaagaaataccagacaaacaagacaaccggcaacaccgataagagagccttcgtcgagacctggcagtccttttaccggaagaagcttaaggaggtgtggaaacctgccgtgcggtctggcggatctggcggaggctccaccagccccaagaaaaagagaaaagtctaagctgccttctgcggggcttgccttctggccatgcccttcttctctcccttgcacctgtacctcttggtctttgaataaagcctgagtaggaaggctagcaaaaaaaaaaaaaaaaaaaaaaaaaaaaaaaaaaaaaaaaaaaaaaaaaaaaaaaaaaaaaaaaaaaaaaaaaaaaaaaagcccagccggctccccaacctctaccgaggagggcacctctgagtccgccacccccgagagcggccctggcacctccaccgagcccagcgagggcagcgcacccggcagccctgccggcagccccacctccacagaggagggaaccagcaccgagcccagcgaaggcagcgccccaggcaccagcaccgagcctagtgagcaggagattaaacggatcaacaagatcagaagaagacttgtgaaagacagcaacaccaagaaggccggcaagacaggccccatgaaaaccctgctggttagagtgatgacacccgatctgagagagcggctggaaaacctgagaaagaagcctgaaaatatcccccagcccatcagcaatacatctagagccaacctgaataagctgctgaccgattacaccgaaatgaagaaggcgatcctgcatgtgtactgggaagagttccagaaggaccctgtgggcctgatgagccgggtggcccagcctgccagcaagaagatcgatcagaacaagctgaaacctgagatggacgagaagggcaacctgaccaccgccggctttgcctgctctcagtgtggccagcccctgttcgtgtacaagctggagcaggtgtctgagaagggcaaggcttacaccaactacttcggacggtgcaatgtggccgagcacgaaaagctgatcctgctggcccagctgaagcccgagaaggatagcgacgaagccgtgacatatagcctgggaaagtttgggcagagggccctggatttctacagcattcatgtgaccaaggagtccacccaccccgtgaagcccctggcccagatcgccggaaacagatacgcctccggacctgtgggaaaggccctgagcgacgcatgtatgggcacaatcgcctccttcctgtctaagtaccaggacatcatcatcgaacaccagaaggtggtgaagggcaaccagaagagactggagagcctgcgggagctggccggcaaggaaaacctggaataccctagcgtgaccctgccacctcagcctcacaccaaggagggcgttgatgcctacaacgaagtgatcgcccgggtgcgaatgtgggtgaacctgaacctgtggcagaagctgaagctaagcagagatgatgccaagcctctgctgagactgaagggattcccttcctttcctctggtcgagagacaggccaacgaagtggactggtgggacatggtgtgtaacgtgaagaagctgatcaacgagaaaaaggaggatggcaaggtgttttggcagaatctggctggctacaagagacaggaagccctgagaccatacctgagcagcgaggaagatcggaagaagggaaagaaattcgctcggtaccagctgggcgacctgctgctgcacctggaaaagaagcacggcgaggactggggaaaggtgtacgacgaggcctgggagcggattgacaagaaagtggaaggcctgagcaagcacatcaagctggaagaggaacggagaagcgaggacgcccagagcaaggccgccctgaccgactggctgcgggctaaggccagcttcgtgatcgagggcctgaaggaggccgacaaggacgagttctgcagatgcgagctgaagctgcagaagtggtacggggacctgcggggaaagcccttcgccatcgaagccgagaacagcatcctggacatcagcggcttcagcaagcagtacaactgtgccttcatctggcagaaggacggcgtgaagaagctgaacctgtacctgatcatcaactacttcaagggcggcaagctgcggttcaagaagatcaaacctgaagccttcgaagccaacagattctacaccgtgatcaacaaaaagagcggcgagatcgtgcccatggaggtgaacttcaacttcgacgaccccaacctgatcatcctgcctctggcctttggcaagagacagggcagagaattcatctggaacgacctgctgtccctggaaaccggcagcctgaagctggccaacggaagagtgatcgagaagacactgtacaacagaagaacccggcaggatgagcctgccctgttcgtggccctgaccttcgagcggcgggaggtcctggactcctccaatatcaaaccaatgaacctgatcggcgtggcaagaggcgaaaacatccccgccgtgatcgccctgaccgaccccgagggctgcccactgagccggtttaaggatagcctgggaaacccaacccacatcctgagaatcggcgagagctataaggagaagcagcggaccatccaggccaagaaggaggtggagcagcggagagccggcggctacagccggaagtacgccagcaaagccaagaatctggcagacgatatggtgagaaacaccgctagagatctgctgtactacgccgtgacccaggatgccatgctgatcttcgccaacctgagccggggcttcggccggcagggcaagcggaccttcatggccgagagacagtacacacggatggaggactggctgaccgccaagctggcctacgagggcctgagcaagacctacctgtccaagacactggcccagtacacctccaagacatgcagcaactgtgggtttaccatcaccagcgccgactacgacagggtgctggagaagctgaagaagacagcaacaggctggatgaccacaattaacggcaaggagctgaaggtggagggccagattacctactacaacagatacaagagacagaacgtagtcaaggacctgtccgtcgagctggatagactgagcgaagaatctgtgaacaacgacatctcctcctggacaaagggcagaagcggagaagctctgagcctcctgaagaaaagattctcccatagacccgtgcaggagaagttcgtgtgcctgaactgcggcttcgagacacacgcagccgagcaagccgccctgaacatcgccagatcctggctgttcctgcggagccaggagtacaagaaataccagacaaacaagacaaccggcaacaccgataagagagccttcgtcgagacctggcagtccttttaccggaagaagcttaaggaggtgtggaaacctgccgtgcggtctggcggatctggcggaggctccaccagccccaagaaaaagagaaaagtctaagctgccttctgcggggcttgccttctggccatgcccttcttctctcccttgcacctgtacctcttggtctttgaataaagcctgagtaggaaggctagcaaaaaaaaaaaaaaaaaaaaaaaaaaaaaaaaaaaaaaaaaaaaaaaaaaaaaaaaaaaaaaaaaaaaaaaaaaaaaaaa

SEQ ID NO: 9281 - RNA, 8787 nt, synthetic construct
  source 1..8787: mol_type = other RNA
aggaaataagagagaaaagaagagtaagaagaaatataagagccaccatggcccctaagaagaagcgtaaagtgagccggatgaaccacgaccaggagttcgacccccctaaggtgtaccctcccgtccccgccgagaagagaaagcccatccgggtcctgagcctgttcgatggcatcgccaccggtctgctggtgctgaaggacctgggcatccaggtggataggtacattgcctccgaggtgtgcgaggactccatcaccgtgggaatggtgcgtcatcagggcaagatcatgtacgtgggcgacgtgcggagcgtgacacagaagcatatccaggagtggggccctttcgacctggtgatcggcggcagcccttgcaatgacctgagcatcgtgaacccagcccggaagggcctgtacgagggaaccggcagactgttcttcgagttttacagactgctgcacgacgcccggcctaaggaaggcgacgaccggcccttcttttggctgttcgagaatgtggtggccatgggagtcagcgacaagcgggatattagccggttcctggagagcaaccccgtgatgatcgatgccaaggaagtgagcgccgcccaccgggccagatacttctggggcaatctgcctggcatgaacagacccctggccagcaccgtgaacgacaagctggagctgcaggagtgcctggagcacggccggatcgccaagttcagcaaggtgagaaccatcaccacccgaagcaacagcatcaaacaaggcaaggaccagcactttcctgtgttcatgaacgagaaggaggacatcctgtggtgtaccgagatggagagagtgttcgggttcccagtccactacacagatgtcagcaacatgtctagactggccagacagagactgctgggaagaagctggtccgtccctgtgatcagacacctgttcgcccctctgaaggagtacttcgcctgcgtgagcagcggcaacagcaacgccaacagccggggccccagcttctctagcggcctggtgccactgtccctgagagggagccacatgggccccatggagatctacaaaaccgtgagcgcctggaagcggcagcctgtgcgcgtgctgagcctgtttcggaatatcgataaagtcctgaaaagcctgggattcctggagagcggctctggctccggcggtggcaccctgaagtacgtggaggatgtgacaaacgtggtcagacgggatgtggagaagtggggccccttcgatctggtgtacggcagcacccaacccctgggcagctcttgtgaccggtgccctggctggtacatgtttcagttccaccggatcctgcagtacgccctgccgagacaggagtcccagcggccattcttttggattttcatggacaacttgctgctgaccgaggatgaccaggaaactaccactcggttcctgcagaccgaagccgtgaccctgcaggacgtgagaggccgggactaccagaacgccatgcgggtgtggtccaacatccctggactgaaaagcaagcacgcacctctgacccctaaagaagaggagtacctgcaggcccaggtgcggagcagaagcaagctggacgcccctaaggtggatctgctggtgaagaattgcctcctgcccctgagagagtacttcaagtatttcagccagaatagtctgcccctgggaggcagcggcggcggcagcctggccctggtgaccttcaaggacgtgctggtgaacttcaccagggaggagtggaagctgctggacgccgcccagcaggtgatgtacagggacgtgatgctggagaactacaggaacctggtgagcctgggccacaggctgcccaagcccgacgtgatcctgcagctggagaagggcgaggagccctggctggtggagaggggcacccaccaggacgcccaccccgactgggacaccgccggcggcccaagcagcggcgcccctcctcccagcggcggcaggcggcccaagcagcggcgcccctcctcccagcggcggcagcccagccggctccccaacctctaccgaggagggcacctctgagtccgccacccccgagagcggccctggcacctccaccgagcccagcgagggcagcgcacccggcagccctgccggcagccccacctccacagaggagggaaccagcaccgagcccagcgaaggcagcgccccaggcaccagcaccgagcctagtgagcaggagattaaacggatcaacaagatcagaagaagacttgtgaaagacagcaacaccaagaaggccggcaagacaggccccatgaaaaccctgctggttagagtgatgacacccgatctgagagagcggctggaaaacctgagaaagaagcctgaaaatatcccccagcccatcagcaatacatctagagccaacctgaataagctgctgaccgattacaccgaaatgaagaaggcgatcctgcatgtgtactgggaagagttccagaaggaccctgtgggcctgatgagccgggtggcccagcctgccagcaagaagatcgatcagaacaagctgaaacctgagatggacgagaagggcaacctgaccaccgccggctttgcctgctctcagtgtggccagcccctgttcgtgtacaagctggagcaggtgtctgagaagggcaaggcttacaccaactacttcggacggtgcaatgtggccgagcacgaaaagctgatcctgctggcccagctgaagcccgagaaggatagcgacgaagccgtgacatatagcctgggaaagtttgggcagagggccctggatttctacagcattcatgtgaccaaggagtccacccaccccgtgaagcccctggcccagatcgccggaaacagatacgcctccggacctgtgggaaaggccctgagcgacgcatgtatgggcacaatcgcctccttcctgtctaagtaccaggacatcatcatcgaacaccagaaggtggtgaagggcaaccagaagagactggagagcctgcgggagctggccggcaaggaaaacctggaataccctagcgtgaccctgccacctcagcctcacaccaaggagggcgttgatgcctacaacgaagtgatcgcccgggtgcgaatgtgggtgaacctgaacctgtggcagaagctgaagctaagcagagatgatgccaagcctctgctgagactgaagggattcccttcctttcctctggtcgagagacaggccaacgaagtggactggtgggacatggtgtgtaacgtgaagaagctgatcaacgagaaaaaggaggatggcaaggtgttttggcagaatctggctggctacaagagacaggaagccctgagaccatacctgagcagcgaggaagatcggaagaagggaaagaaattcgctcggtaccagctgggcgacctgctgctgcacctggaaaagaagcacggcgaggactggggaaaggtgtacgacgaggcctgggagcggattgacaagaaagtggaaggcctgagcaagcacatcaagctggaagaggaacggagaagcgaggacgcccagagcaaggccgccctgaccgactggctgcgggctaaggccagcttcgtgatcgagggcctgaaggaggccgacaaggacgagttctgcagatgcgagctgaagctgcagaagtggtacggggacctgcggggaaagcccttcgccatcgaagccgagaacagcatcctggacatcagcggcttcagcaagcagtacaactgtgccttcatctggcagaaggacggcgtgaagaagctgaacctgtacctgatcatcaactacttcaagggcggcaagctgcggttcaagaagatcaaacctgaagccttcgaagccaacagattctacaccgtgatcaacaaaaagagcggcgagatcgtgcccatggaggtgaacttcaacttcgacgaccccaacctgatcatcctgcctctggcctttggcaagagacagggcagagaattcatctggaacgacctgctgtccctggaaaccggcagcctgaagctggccaacggaagagtgatcgagaagacactgtacaacagaagaacccggcaggatgagcctgccctgttcgtggccctgaccttcgagcggcgggaggtcctggactcctccaatatcaaaccaatgaacctgatcggcgtggcaagaggcgaaaacatccccgccgtgatcgccctgaccgaccccgagggctgcccactgagccggtttaaggatagcctgggaaacccaacccacatcctgagaatcggcgagagctataaggagaagcagcggaccatccaggccaagaaggaggtggagcagcggagagccggcggctacagccggaagtacgccagcaaagccaagaatctggcagacgatatggtgagaaacaccgctagagatctgctgtactacgccgtgacccaggatgccatgctgatcttcgccaacctgagccggggcttcggccggcagggcaagcggaccttcatggccgagagacagtacacacggatggaggactggctgaccgccaagctggcctacgagggcctgagcaagacctacctgtccaagacactggcccagtacacctccaagacatgcagcaactgtgggtttaccatcaccagcgccgactacgacagggtgctggagaagctgaagaagacagcaacaggctggatgaccacaattaacggcaaggagctgaaggtggagggccagattacctactacaacagatacaagagacagaacgtagtcaaggacctgtccgtcgagctggatagactgagcgaagaatctgtgaacaacgacatctcctcctggacaaagggcagaagcggagaagctctgagcctcctgaagaaaagattctcccatagacccgtgcaggagaagttcgtgtgcctgaactgcggcttcgagacacacgcagccgagcaagccgccctgaacatcgccagatcctggctgttcctgcggagccaggagtacaagaaataccagacaaacaagacaaccggcaacaccgataagagagccttcgtcgagacctggcagtccttttaccggaagaagcttaaggaggtgtggaaacctgccgtgcggtctggcggatctggcggaggctccaccagccccaagaaaaagagaaaagtctaagctgccttctgcggggcttgccttctggccatgcccttcttctctcccttgcacctgtacctcttggtctttgaataaagcctgagtaggaaggctagcaaaaaaaaaaaaaaaaaaaaaaaaaaaaaaaaaaaaaaaaaaaaaaaaaaaaaaaaaaaaaaaaaaaaaaaaaaaaaaaagcccagccggctccccaacctctaccgaggagggcacctctgagtccgccacccccgagagcggccctggcacctccaccgagcccagcgagggcagcgcacccggcagccctgccggcagccccacctccacagaggagggaaccagcaccgagcccagcgaaggcagcgccccaggcaccagcaccgagcctagtgagcaggagattaaacggatcaacaagatcagaagaagacttgtgaaagacagcaacaccaagaaggccggcaagacaggccccatgaaaaccctgctggttagagtgatgacacccgatctgagagagcggctggaaaacctgagaaagaagcctgaaaatatcccccagcccatcagcaatacatctagagccaacctgaataagctgctgaccgattacaccgaaatgaagaaggcgatcctgcatgtgtactgggaagagttccagaaggaccctgtgggcctgatgagccgggtggcccagcctgccagcaagaagatcgatcagaacaagctgaaacctgagatggacgagaagggcaacctgaccaccgccggctttgcctgctctcagtgtggccagcccctgttcgtgtacaagctggagcaggtgtctgagaagggcaaggcttacaccaactacttcggacggtgcaatgtggccgagcacgaaaagctgatcctgctggcccagctgaagcccgagaaggatagcgacgaagccgtgacatatagcctgggaaagtttgggcagagggccctggatttctacagcattcatgtgaccaaggagtccacccaccccgtgaagcccctggcccagatcgccggaaacagatacgcctccggacctgtgggaaaggccctgagcgacgcatgtatgggcacaatcgcctccttcctgtctaagtaccaggacatcatcatcgaacaccagaaggtggtgaagggcaaccagaagagactggagagcctgcgggagctggccggcaaggaaaacctggaataccctagcgtgaccctgccacctcagcctcacaccaaggagggcgttgatgcctacaacgaagtgatcgcccgggtgcgaatgtgggtgaacctgaacctgtggcagaagctgaagctaagcagagatgatgccaagcctctgctgagactgaagggattcccttcctttcctctggtcgagagacaggccaacgaagtggactggtgggacatggtgtgtaacgtgaagaagctgatcaacgagaaaaaggaggatggcaaggtgttttggcagaatctggctggctacaagagacaggaagccctgagaccatacctgagcagcgaggaagatcggaagaagggaaagaaattcgctcggtaccagctgggcgacctgctgctgcacctggaaaagaagcacggcgaggactggggaaaggtgtacgacgaggcctgggagcggattgacaagaaagtggaaggcctgagcaagcacatcaagctggaagaggaacggagaagcgaggacgcccagagcaaggccgccctgaccgactggctgcgggctaaggccagcttcgtgatcgagggcctgaaggaggccgacaaggacgagttctgcagatgcgagctgaagctgcagaagtggtacggggacctgcggggaaagcccttcgccatcgaagccgagaacagcatcctggacatcagcggcttcagcaagcagtacaactgtgccttcatctggcagaaggacggcgtgaagaagctgaacctgtacctgatcatcaactacttcaagggcggcaagctgcggttcaagaagatcaaacctgaagccttcgaagccaacagattctacaccgtgatcaacaaaaagagcggcgagatcgtgcccatggaggtgaacttcaacttcgacgaccccaacctgatcatcctgcctctggcctttggcaagagacagggcagagaattcatctggaacgacctgctgtccctggaaaccggcagcctgaagctggccaacggaagagtgatcgagaagacactgtacaacagaagaacccggcaggatgagcctgccctgttcgtggccctgaccttcgagcggcgggaggtcctggactcctccaatatcaaaccaatgaacctgatcggcgtggcaagaggcgaaaacatccccgccgtgatcgccctgaccgaccccgagggctgcccactgagccggtttaaggatagcctgggaaacccaacccacatcctgagaatcggcgagagctataaggagaagcagcggaccatccaggccaagaaggaggtggagcagcggagagccggcggctacagccggaagtacgccagcaaagccaagaatctggcagacgatatggtgagaaacaccgctagagatctgctgtactacgccgtgacccaggatgccatgctgatcttcgccaacctgagccggggcttcggccggcagggcaagcggaccttcatggccgagagacagtacacacggatggaggactggctgaccgccaagctggcctacgagggcctgagcaagacctacctgtccaagacactggcccagtacacctccaagacatgcagcaactgtgggtttaccatcaccagcgccgactacgacagggtgctggagaagctgaagaagacagcaacaggctggatgaccacaattaacggcaaggagctgaaggtggagggccagattacctactacaacagatacaagagacagaacgtagtcaaggacctgtccgtcgagctggatagactgagcgaagaatctgtgaacaacgacatctcctcctggacaaagggcagaagcggagaagctctgagcctcctgaagaaaagattctcccatagacccgtgcaggagaagttcgtgtgcctgaactgcggcttcgagacacacgcagccgagcaagccgccctgaacatcgccagatcctggctgttcctgcggagccaggagtacaagaaataccagacaaacaagacaaccggcaacaccgataagagagccttcgtcgagacctggcagtccttttaccggaagaagcttaaggaggtgtggaaacctgccgtgcggtctggcggatctggcggaggctccaccagccccaagaaaaagagaaaagtctaagctgccttctgcggggcttgccttctggccatgcccttcttctctcccttgcacctgtacctcttggtctttgaataaagcctgagtaggaaggctagcaaaaaaaaaaaaaaaaaaaaaaaaaaaaaaaaaaaaaaaaaaaaaaaaaaaaaaaaaaaaaaaaaaaaaaaaaaaaaaaa

SEQ ID NO: 9282 - RNA, 8787 nt, synthetic construct
  source 1..8787: mol_type = other RNA
aggaaataagagagaaaagaagagtaagaagaaatataagagccaccatggcccctaagaagaagcgtaaagtgagccggatgaaccacgaccaggagttcgacccccctaaggtgtaccctcccgtccccgccgagaagagaaagcccatccgggtcctgagcctgttcgatggcatcgccaccggtctgctggtgctgaaggacctgggcatccaggtggataggtacattgcctccgaggtgtgcgaggactccatcaccgtgggaatggtgcgtcatcagggcaagatcatgtacgtgggcgacgtgcggagcgtgacacagaagcatatccaggagtggggccctttcgacctggtgatcggcggcagcccttgcaatgacctgagcatcgtgaacccagcccggaagggcctgtacgagggaaccggcagactgttcttcgagttttacagactgctgcacgacgcccggcctaaggaaggcgacgaccggcccttcttttggctgttcgagaatgtggtggccatgggagtcagcgacaagcgggatattagccggttcctggagagcaaccccgtgatgatcgatgccaaggaagtgagcgccgcccaccgggccagatacttctggggcaatctgcctggcatgaacagacccctggccagcaccgtgaacgacaagctggagctgcaggagtgcctggagcacggccggatcgccaagttcagcaaggtgagaaccatcaccacccgaagcaacagcatcaaacaaggcaaggaccagcactttcctgtgttcatgaacgagaaggaggacatcctgtggtgtaccgagatggagagagtgttcgggttcccagtccactacacagatgtcagcaacatgtctagactggccagacagagactgctgggaagaagctggtccgtccctgtgatcagacacctgttcgcccctctgaaggagtacttcgcctgcgtgagcagcggcaacagcaacgccaacagccggggccccagcttctctagcggcctggtgccactgtccctgagagggagccacatgggccccatggagatctacaaaaccgtgagcgcctggaagcggcagcctgtgcgcgtgctgagcctgtttcggaatatcgataaagtcctgaaaagcctgggattcctggagagcggctctggctccggcggtggcaccctgaagtacgtggaggatgtgacaaacgtggtcagacgggatgtggagaagtggggccccttcgatctggtgtacggcagcacccaacccctgggcagctcttgtgaccggtgccctggctggtacatgtttcagttccaccggatcctgcagtacgccctgccgagacaggagtcccagcggccattcttttggattttcatggacaacttgctgctgaccgaggatgaccaggaaactaccactcggttcctgcagaccgaagccgtgaccctgcaggacgtgagaggccgggactaccagaacgccatgcgggtgtggtccaacatccctggactgaaaagcaagcacgcacctctgacccctaaagaagaggagtacctgcaggcccaggtgcggagcagaagcaagctggacgcccctaaggtggatctgctggtgaagaattgcctcctgcccctgagagagtacttcaagtatttcagccagaatagtctgcccctgggaggcagcggcggcggcagccaggccagcgtgagcttcaaggacgtgaccgtggagttcacccaggacgagtggaggctgatgagcagcgcccagaggaccctgtacagggaggtgatgctggagaactacagccacctgatcagcatgggctactgcagcaccaagcccgagctgatcttcgccctggagcagaaggacttcagggagagcatcctggagagggagagcctgagcaccatcccccccgaggacttccagggcggcccaagcagcggcgcccctcctcccagcggcggcaggcggcccaagcagcggcgcccctcctcccagcggcggcagcccagccggctccccaacctctaccgaggagggcacctctgagtccgccacccccgagagcggccctggcacctccaccgagcccagcgagggcagcgcacccggcagccctgccggcagccccacctccacagaggagggaaccagcaccgagcccagcgaaggcagcgccccaggcaccagcaccgagcctagtgagcaggagattaaacggatcaacaagatcagaagaagacttgtgaaagacagcaacaccaagaaggccggcaagacaggccccatgaaaaccctgctggttagagtgatgacacccgatctgagagagcggctggaaaacctgagaaagaagcctgaaaatatcccccagcccatcagcaatacatctagagccaacctgaataagctgctgaccgattacaccgaaatgaagaaggcgatcctgcatgtgtactgggaagagttccagaaggaccctgtgggcctgatgagccgggtggcccagcctgccagcaagaagatcgatcagaacaagctgaaacctgagatggacgagaagggcaacctgaccaccgccggctttgcctgctctcagtgtggccagcccctgttcgtgtacaagctggagcaggtgtctgagaagggcaaggcttacaccaactacttcggacggtgcaatgtggccgagcacgaaaagctgatcctgctggcccagctgaagcccgagaaggatagcgacgaagccgtgacatatagcctgggaaagtttgggcagagggccctggatttctacagcattcatgtgaccaaggagtccacccaccccgtgaagcccctggcccagatcgccggaaacagatacgcctccggacctgtgggaaaggccctgagcgacgcatgtatgggcacaatcgcctccttcctgtctaagtaccaggacatcatcatcgaacaccagaaggtggtgaagggcaaccagaagagactggagagcctgcgggagctggccggcaaggaaaacctggaataccctagcgtgaccctgccacctcagcctcacaccaaggagggcgttgatgcctacaacgaagtgatcgcccgggtgcgaatgtgggtgaacctgaacctgtggcagaagctgaagctaagcagagatgatgccaagcctctgctgagactgaagggattcccttcctttcctctggtcgagagacaggccaacgaagtggactggtgggacatggtgtgtaacgtgaagaagctgatcaacgagaaaaaggaggatggcaaggtgttttggcagaatctggctggctacaagagacaggaagccctgagaccatacctgagcagcgaggaagatcggaagaagggaaagaaattcgctcggtaccagctgggcgacctgctgctgcacctggaaaagaagcacggcgaggactggggaaaggtgtacgacgaggcctgggagcggattgacaagaaagtggaaggcctgagcaagcacatcaagctggaagaggaacggagaagcgaggacgcccagagcaaggccgccctgaccgactggctgcgggctaaggccagcttcgtgatcgagggcctgaaggaggccgacaaggacgagttctgcagatgcgagctgaagctgcagaagtggtacggggacctgcggggaaagcccttcgccatcgaagccgagaacagcatcctggacatcagcggcttcagcaagcagtacaactgtgccttcatctggcagaaggacggcgtgaagaagctgaacctgtacctgatcatcaactacttcaagggcggcaagctgcggttcaagaagatcaaacctgaagccttcgaagccaacagattctacaccgtgatcaacaaaaagagcggcgagatcgtgcccatggaggtgaacttcaacttcgacgaccccaacctgatcatcctgcctctggcctttggcaagagacagggcagagaattcatctggaacgacctgctgtccctggaaaccggcagcctgaagctggccaacggaagagtgatcgagaagacactgtacaacagaagaacccggcaggatgagcctgccctgttcgtggccctgaccttcgagcggcgggaggtcctggactcctccaatatcaaaccaatgaacctgatcggcgtggcaagaggcgaaaacatccccgccgtgatcgccctgaccgaccccgagggctgcccactgagccggtttaaggatagcctgggaaacccaacccacatcctgagaatcggcgagagctataaggagaagcagcggaccatccaggccaagaaggaggtggagcagcggagagccggcggctacagccggaagtacgccagcaaagccaagaatctggcagacgatatggtgagaaacaccgctagagatctgctgtactacgccgtgacccaggatgccatgctgatcttcgccaacctgagccggggcttcggccggcagggcaagcggaccttcatggccgagagacagtacacacggatggaggactggctgaccgccaagctggcctacgagggcctgagcaagacctacctgtccaagacactggcccagtacacctccaagacatgcagcaactgtgggtttaccatcaccagcgccgactacgacagggtgctggagaagctgaagaagacagcaacaggctggatgaccacaattaacggcaaggagctgaaggtggagggccagattacctactacaacagatacaagagacagaacgtagtcaaggacctgtccgtcgagctggatagactgagcgaagaatctgtgaacaacgacatctcctcctggacaaagggcagaagcggagaagctctgagcctcctgaagaaaagattctcccatagacccgtgcaggagaagttcgtgtgcctgaactgcggcttcgagacacacgcagccgagcaagccgccctgaacatcgccagatcctggctgttcctgcggagccaggagtacaagaaataccagacaaacaagacaaccggcaacaccgataagagagccttcgtcgagacctggcagtccttttaccggaagaagcttaaggaggtgtggaaacctgccgtgcggtctggcggatctggcggaggctccaccagccccaagaaaaagagaaaagtctaagctgccttctgcggggcttgccttctggccatgcccttcttctctcccttgcacctgtacctcttggtctttgaataaagcctgagtaggaaggctagcaaaaaaaaaaaaaaaaaaaaaaaaaaaaaaaaaaaaaaaaaaaaaaaaaaaaaaaaaaaaaaaaaaaaaaaaaaaaaaaagcccagccggctccccaacctctaccgaggagggcacctctgagtccgccacccccgagagcggccctggcacctccaccgagcccagcgagggcagcgcacccggcagccctgccggcagccccacctccacagaggagggaaccagcaccgagcccagcgaaggcagcgccccaggcaccagcaccgagcctagtgagcaggagattaaacggatcaacaagatcagaagaagacttgtgaaagacagcaacaccaagaaggccggcaagacaggccccatgaaaaccctgctggttagagtgatgacacccgatctgagagagcggctggaaaacctgagaaagaagcctgaaaatatcccccagcccatcagcaatacatctagagccaacctgaataagctgctgaccgattacaccgaaatgaagaaggcgatcctgcatgtgtactgggaagagttccagaaggaccctgtgggcctgatgagccgggtggcccagcctgccagcaagaagatcgatcagaacaagctgaaacctgagatggacgagaagggcaacctgaccaccgccggctttgcctgctctcagtgtggccagcccctgttcgtgtacaagctggagcaggtgtctgagaagggcaaggcttacaccaactacttcggacggtgcaatgtggccgagcacgaaaagctgatcctgctggcccagctgaagcccgagaaggatagcgacgaagccgtgacatatagcctgggaaagtttgggcagagggccctggatttctacagcattcatgtgaccaaggagtccacccaccccgtgaagcccctggcccagatcgccggaaacagatacgcctccggacctgtgggaaaggccctgagcgacgcatgtatgggcacaatcgcctccttcctgtctaagtaccaggacatcatcatcgaacaccagaaggtggtgaagggcaaccagaagagactggagagcctgcgggagctggccggcaaggaaaacctggaataccctagcgtgaccctgccacctcagcctcacaccaaggagggcgttgatgcctacaacgaagtgatcgcccgggtgcgaatgtgggtgaacctgaacctgtggcagaagctgaagctaagcagagatgatgccaagcctctgctgagactgaagggattcccttcctttcctctggtcgagagacaggccaacgaagtggactggtgggacatggtgtgtaacgtgaagaagctgatcaacgagaaaaaggaggatggcaaggtgttttggcagaatctggctggctacaagagacaggaagccctgagaccatacctgagcagcgaggaagatcggaagaagggaaagaaattcgctcggtaccagctgggcgacctgctgctgcacctggaaaagaagcacggcgaggactggggaaaggtgtacgacgaggcctgggagcggattgacaagaaagtggaaggcctgagcaagcacatcaagctggaagaggaacggagaagcgaggacgcccagagcaaggccgccctgaccgactggctgcgggctaaggccagcttcgtgatcgagggcctgaaggaggccgacaaggacgagttctgcagatgcgagctgaagctgcagaagtggtacggggacctgcggggaaagcccttcgccatcgaagccgagaacagcatcctggacatcagcggcttcagcaagcagtacaactgtgccttcatctggcagaaggacggcgtgaagaagctgaacctgtacctgatcatcaactacttcaagggcggcaagctgcggttcaagaagatcaaacctgaagccttcgaagccaacagattctacaccgtgatcaacaaaaagagcggcgagatcgtgcccatggaggtgaacttcaacttcgacgaccccaacctgatcatcctgcctctggcctttggcaagagacagggcagagaattcatctggaacgacctgctgtccctggaaaccggcagcctgaagctggccaacggaagagtgatcgagaagacactgtacaacagaagaacccggcaggatgagcctgccctgttcgtggccctgaccttcgagcggcgggaggtcctggactcctccaatatcaaaccaatgaacctgatcggcgtggcaagaggcgaaaacatccccgccgtgatcgccctgaccgaccccgagggctgcccactgagccggtttaaggatagcctgggaaacccaacccacatcctgagaatcggcgagagctataaggagaagcagcggaccatccaggccaagaaggaggtggagcagcggagagccggcggctacagccggaagtacgccagcaaagccaagaatctggcagacgatatggtgagaaacaccgctagagatctgctgtactacgccgtgacccaggatgccatgctgatcttcgccaacctgagccggggcttcggccggcagggcaagcggaccttcatggccgagagacagtacacacggatggaggactggctgaccgccaagctggcctacgagggcctgagcaagacctacctgtccaagacactggcccagtacacctccaagacatgcagcaactgtgggtttaccatcaccagcgccgactacgacagggtgctggagaagctgaagaagacagcaacaggctggatgaccacaattaacggcaaggagctgaaggtggagggccagattacctactacaacagatacaagagacagaacgtagtcaaggacctgtccgtcgagctggatagactgagcgaagaatctgtgaacaacgacatctcctcctggacaaagggcagaagcggagaagctctgagcctcctgaagaaaagattctcccatagacccgtgcaggagaagttcgtgtgcctgaactgcggcttcgagacacacgcagccgagcaagccgccctgaacatcgccagatcctggctgttcctgcggagccaggagtacaagaaataccagacaaacaagacaaccggcaacaccgataagagagccttcgtcgagacctggcagtccttttaccggaagaagcttaaggaggtgtggaaacctgccgtgcggtctggcggatctggcggaggctccaccagccccaagaaaaagagaaaagtctaagctgccttctgcggggcttgccttctggccatgcccttcttctctcccttgcacctgtacctcttggtctttgaataaagcctgagtaggaaggctagcaaaaaaaaaaaaaaaaaaaaaaaaaaaaaaaaaaaaaaaaaaaaaaaaaaaaaaaaaaaaaaaaaaaaaaaaaaaaaaaa

SEQ ID NO: 9283 - RNA, 8787 nt, synthetic construct
  source 1..8787: mol_type = other RNA
aggaaataagagagaaaagaagagtaagaagaaatataagagccaccatggcccctaagaagaagcgtaaagtgagccggatgaaccacgaccaggagttcgacccccctaaggtgtaccctcccgtccccgccgagaagagaaagcccatccgggtcctgagcctgttcgatggcatcgccaccggtctgctggtgctgaaggacctgggcatccaggtggataggtacattgcctccgaggtgtgcgaggactccatcaccgtgggaatggtgcgtcatcagggcaagatcatgtacgtgggcgacgtgcggagcgtgacacagaagcatatccaggagtggggccctttcgacctggtgatcggcggcagcccttgcaatgacctgagcatcgtgaacccagcccggaagggcctgtacgagggaaccggcagactgttcttcgagttttacagactgctgcacgacgcccggcctaaggaaggcgacgaccggcccttcttttggctgttcgagaatgtggtggccatgggagtcagcgacaagcgggatattagccggttcctggagagcaaccccgtgatgatcgatgccaaggaagtgagcgccgcccaccgggccagatacttctggggcaatctgcctggcatgaacagacccctggccagcaccgtgaacgacaagctggagctgcaggagtgcctggagcacggccggatcgccaagttcagcaaggtgagaaccatcaccacccgaagcaacagcatcaaacaaggcaaggaccagcactttcctgtgttcatgaacgagaaggaggacatcctgtggtgtaccgagatggagagagtgttcgggttcccagtccactacacagatgtcagcaacatgtctagactggccagacagagactgctgggaagaagctggtccgtccctgtgatcagacacctgttcgcccctctgaaggagtacttcgcctgcgtgagcagcggcaacagcaacgccaacagccggggccccagcttctctagcggcctggtgccactgtccctgagagggagccacatgggccccatggagatctacaaaaccgtgagcgcctggaagcggcagcctgtgcgcgtgctgagcctgtttcggaatatcgataaagtcctgaaaagcctgggattcctggagagcggctctggctccggcggtggcaccctgaagtacgtggaggatgtgacaaacgtggtcagacgggatgtggagaagtggggccccttcgatctggtgtacggcagcacccaacccctgggcagctcttgtgaccggtgccctggctggtacatgtttcagttccaccggatcctgcagtacgccctgccgagacaggagtcccagcggccattcttttggattttcatggacaacttgctgctgaccgaggatgaccaggaaactaccactcggttcctgcagaccgaagccgtgaccctgcaggacgtgagaggccgggactaccagaacgccatgcgggtgtggtccaacatccctggactgaaaagcaagcacgcacctctgacccctaaagaagaggagtacctgcaggcccaggtgcggagcagaagcaagctggacgcccctaaggtggatctgctggtgaagaattgcctcctgcccctgagagagtacttcaagtatttcagccagaatagtctgcccctgggaggcagcggcggcggcagcctgggcagcgagctgttcagggacgtggccatcgtgttcagccaggaggagtggcagtggctggcccccgcccagagggacctgtacagggacgtgatgctggagacctacagcaacctggtgagcctgggcctggccatcagcaagcccgacgtgatcagcttcctggagcagggcagggagccctggatggtggagagggtggtggccggcggcctgtgccccgtgctggagagcaggggcggcccaagcagcggcgcccctcctcccagcggcggcaggcggcccaagcagcggcgcccctcctcccagcggcggcagcccagccggctccccaacctctaccgaggagggcacctctgagtccgccacccccgagagcggccctggcacctccaccgagcccagcgagggcagcgcacccggcagccctgccggcagccccacctccacagaggagggaaccagcaccgagcccagcgaaggcagcgccccaggcaccagcaccgagcctagtgagcaggagattaaacggatcaacaagatcagaagaagacttgtgaaagacagcaacaccaagaaggccggcaagacaggccccatgaaaaccctgctggttagagtgatgacacccgatctgagagagcggctggaaaacctgagaaagaagcctgaaaatatcccccagcccatcagcaatacatctagagccaacctgaataagctgctgaccgattacaccgaaatgaagaaggcgatcctgcatgtgtactgggaagagttccagaaggaccctgtgggcctgatgagccgggtggcccagcctgccagcaagaagatcgatcagaacaagctgaaacctgagatggacgagaagggcaacctgaccaccgccggctttgcctgctctcagtgtggccagcccctgttcgtgtacaagctggagcaggtgtctgagaagggcaaggcttacaccaactacttcggacggtgcaatgtggccgagcacgaaaagctgatcctgctggcccagctgaagcccgagaaggatagcgacgaagccgtgacatatagcctgggaaagtttgggcagagggccctggatttctacagcattcatgtgaccaaggagtccacccaccccgtgaagcccctggcccagatcgccggaaacagatacgcctccggacctgtgggaaaggccctgagcgacgcatgtatgggcacaatcgcctccttcctgtctaagtaccaggacatcatcatcgaacaccagaaggtggtgaagggcaaccagaagagactggagagcctgcgggagctggccggcaaggaaaacctggaataccctagcgtgaccctgccacctcagcctcacaccaaggagggcgttgatgcctacaacgaagtgatcgcccgggtgcgaatgtgggtgaacctgaacctgtggcagaagctgaagctaagcagagatgatgccaagcctctgctgagactgaagggattcccttcctttcctctggtcgagagacaggccaacgaagtggactggtgggacatggtgtgtaacgtgaagaagctgatcaacgagaaaaaggaggatggcaaggtgttttggcagaatctggctggctacaagagacaggaagccctgagaccatacctgagcagcgaggaagatcggaagaagggaaagaaattcgctcggtaccagctgggcgacctgctgctgcacctggaaaagaagcacggcgaggactggggaaaggtgtacgacgaggcctgggagcggattgacaagaaagtggaaggcctgagcaagcacatcaagctggaagaggaacggagaagcgaggacgcccagagcaaggccgccctgaccgactggctgcgggctaaggccagcttcgtgatcgagggcctgaaggaggccgacaaggacgagttctgcagatgcgagctgaagctgcagaagtggtacggggacctgcggggaaagcccttcgccatcgaagccgagaacagcatcctggacatcagcggcttcagcaagcagtacaactgtgccttcatctggcagaaggacggcgtgaagaagctgaacctgtacctgatcatcaactacttcaagggcggcaagctgcggttcaagaagatcaaacctgaagccttcgaagccaacagattctacaccgtgatcaacaaaaagagcggcgagatcgtgcccatggaggtgaacttcaacttcgacgaccccaacctgatcatcctgcctctggcctttggcaagagacagggcagagaattcatctggaacgacctgctgtccctggaaaccggcagcctgaagctggccaacggaagagtgatcgagaagacactgtacaacagaagaacccggcaggatgagcctgccctgttcgtggccctgaccttcgagcggcgggaggtcctggactcctccaatatcaaaccaatgaacctgatcggcgtggcaagaggcgaaaacatccccgccgtgatcgccctgaccgaccccgagggctgcccactgagccggtttaaggatagcctgggaaacccaacccacatcctgagaatcggcgagagctataaggagaagcagcggaccatccaggccaagaaggaggtggagcagcggagagccggcggctacagccggaagtacgccagcaaagccaagaatctggcagacgatatggtgagaaacaccgctagagatctgctgtactacgccgtgacccaggatgccatgctgatcttcgccaacctgagccggggcttcggccggcagggcaagcggaccttcatggccgagagacagtacacacggatggaggactggctgaccgccaagctggcctacgagggcctgagcaagacctacctgtccaagacactggcccagtacacctccaagacatgcagcaactgtgggtttaccatcaccagcgccgactacgacagggtgctggagaagctgaagaagacagcaacaggctggatgaccacaattaacggcaaggagctgaaggtggagggccagattacctactacaacagatacaagagacagaacgtagtcaaggacctgtccgtcgagctggatagactgagcgaagaatctgtgaacaacgacatctcctcctggacaaagggcagaagcggagaagctctgagcctcctgaagaaaagattctcccatagacccgtgcaggagaagttcgtgtgcctgaactgcggcttcgagacacacgcagccgagcaagccgccctgaacatcgccagatcctggctgttcctgcggagccaggagtacaagaaataccagacaaacaagacaaccggcaacaccgataagagagccttcgtcgagacctggcagtccttttaccggaagaagcttaaggaggtgtggaaacctgccgtgcggtctggcggatctggcggaggctccaccagccccaagaaaaagagaaaagtctaagctgccttctgcggggcttgccttctggccatgcccttcttctctcccttgcacctgtacctcttggtctttgaataaagcctgagtaggaaggctagcaaaaaaaaaaaaaaaaaaaaaaaaaaaaaaaaaaaaaaaaaaaaaaaaaaaaaaaaaaaaaaaaaaaaaaaaaaaaaaaagcccagccggctccccaacctctaccgaggagggcacctctgagtccgccacccccgagagcggccctggcacctccaccgagcccagcgagggcagcgcacccggcagccctgccggcagccccacctccacagaggagggaaccagcaccgagcccagcgaaggcagcgccccaggcaccagcaccgagcctagtgagcaggagattaaacggatcaacaagatcagaagaagacttgtgaaagacagcaacaccaagaaggccggcaagacaggccccatgaaaaccctgctggttagagtgatgacacccgatctgagagagcggctggaaaacctgagaaagaagcctgaaaatatcccccagcccatcagcaatacatctagagccaacctgaataagctgctgaccgattacaccgaaatgaagaaggcgatcctgcatgtgtactgggaagagttccagaaggaccctgtgggcctgatgagccgggtggcccagcctgccagcaagaagatcgatcagaacaagctgaaacctgagatggacgagaagggcaacctgaccaccgccggctttgcctgctctcagtgtggccagcccctgttcgtgtacaagctggagcaggtgtctgagaagggcaaggcttacaccaactacttcggacggtgcaatgtggccgagcacgaaaagctgatcctgctggcccagctgaagcccgagaaggatagcgacgaagccgtgacatatagcctgggaaagtttgggcagagggccctggatttctacagcattcatgtgaccaaggagtccacccaccccgtgaagcccctggcccagatcgccggaaacagatacgcctccggacctgtgggaaaggccctgagcgacgcatgtatgggcacaatcgcctccttcctgtctaagtaccaggacatcatcatcgaacaccagaaggtggtgaagggcaaccagaagagactggagagcctgcgggagctggccggcaaggaaaacctggaataccctagcgtgaccctgccacctcagcctcacaccaaggagggcgttgatgcctacaacgaagtgatcgcccgggtgcgaatgtgggtgaacctgaacctgtggcagaagctgaagctaagcagagatgatgccaagcctctgctgagactgaagggattcccttcctttcctctggtcgagagacaggccaacgaagtggactggtgggacatggtgtgtaacgtgaagaagctgatcaacgagaaaaaggaggatggcaaggtgttttggcagaatctggctggctacaagagacaggaagccctgagaccatacctgagcagcgaggaagatcggaagaagggaaagaaattcgctcggtaccagctgggcgacctgctgctgcacctggaaaagaagcacggcgaggactggggaaaggtgtacgacgaggcctgggagcggattgacaagaaagtggaaggcctgagcaagcacatcaagctggaagaggaacggagaagcgaggacgcccagagcaaggccgccctgaccgactggctgcgggctaaggccagcttcgtgatcgagggcctgaaggaggccgacaaggacgagttctgcagatgcgagctgaagctgcagaagtggtacggggacctgcggggaaagcccttcgccatcgaagccgagaacagcatcctggacatcagcggcttcagcaagcagtacaactgtgccttcatctggcagaaggacggcgtgaagaagctgaacctgtacctgatcatcaactacttcaagggcggcaagctgcggttcaagaagatcaaacctgaagccttcgaagccaacagattctacaccgtgatcaacaaaaagagcggcgagatcgtgcccatggaggtgaacttcaacttcgacgaccccaacctgatcatcctgcctctggcctttggcaagagacagggcagagaattcatctggaacgacctgctgtccctggaaaccggcagcctgaagctggccaacggaagagtgatcgagaagacactgtacaacagaagaacccggcaggatgagcctgccctgttcgtggccctgaccttcgagcggcgggaggtcctggactcctccaatatcaaaccaatgaacctgatcggcgtggcaagaggcgaaaacatccccgccgtgatcgccctgaccgaccccgagggctgcccactgagccggtttaaggatagcctgggaaacccaacccacatcctgagaatcggcgagagctataaggagaagcagcggaccatccaggccaagaaggaggtggagcagcggagagccggcggctacagccggaagtacgccagcaaagccaagaatctggcagacgatatggtgagaaacaccgctagagatctgctgtactacgccgtgacccaggatgccatgctgatcttcgccaacctgagccggggcttcggccggcagggcaagcggaccttcatggccgagagacagtacacacggatggaggactggctgaccgccaagctggcctacgagggcctgagcaagacctacctgtccaagacactggcccagtacacctccaagacatgcagcaactgtgggtttaccatcaccagcgccgactacgacagggtgctggagaagctgaagaagacagcaacaggctggatgaccacaattaacggcaaggagctgaaggtggagggccagattacctactacaacagatacaagagacagaacgtagtcaaggacctgtccgtcgagctggatagactgagcgaagaatctgtgaacaacgacatctcctcctggacaaagggcagaagcggagaagctctgagcctcctgaagaaaagattctcccatagacccgtgcaggagaagttcgtgtgcctgaactgcggcttcgagacacacgcagccgagcaagccgccctgaacatcgccagatcctggctgttcctgcggagccaggagtacaagaaataccagacaaacaagacaaccggcaacaccgataagagagccttcgtcgagacctggcagtccttttaccggaagaagcttaaggaggtgtggaaacctgccgtgcggtctggcggatctggcggaggctccaccagccccaagaaaaagagaaaagtctaagctgccttctgcggggcttgccttctggccatgcccttcttctctcccttgcacctgtacctcttggtctttgaataaagcctgagtaggaaggctagcaaaaaaaaaaaaaaaaaaaaaaaaaaaaaaaaaaaaaaaaaaaaaaaaaaaaaaaaaaaaaaaaaaaaaaaaaaaaaaaa

SEQ ID NO: 9284 - RNA, 8787 nt, synthetic construct
  source 1..8787: mol_type = other RNA
aggaaataagagagaaaagaagagtaagaagaaatataagagccaccatggcccctaagaagaagcgtaaagtgagccggatgaaccacgaccaggagttcgacccccctaaggtgtaccctcccgtccccgccgagaagagaaagcccatccgggtcctgagcctgttcgatggcatcgccaccggtctgctggtgctgaaggacctgggcatccaggtggataggtacattgcctccgaggtgtgcgaggactccatcaccgtgggaatggtgcgtcatcagggcaagatcatgtacgtgggcgacgtgcggagcgtgacacagaagcatatccaggagtggggccctttcgacctggtgatcggcggcagcccttgcaatgacctgagcatcgtgaacccagcccggaagggcctgtacgagggaaccggcagactgttcttcgagttttacagactgctgcacgacgcccggcctaaggaaggcgacgaccggcccttcttttggctgttcgagaatgtggtggccatgggagtcagcgacaagcgggatattagccggttcctggagagcaaccccgtgatgatcgatgccaaggaagtgagcgccgcccaccgggccagatacttctggggcaatctgcctggcatgaacagacccctggccagcaccgtgaacgacaagctggagctgcaggagtgcctggagcacggccggatcgccaagttcagcaaggtgagaaccatcaccacccgaagcaacagcatcaaacaaggcaaggaccagcactttcctgtgttcatgaacgagaaggaggacatcctgtggtgtaccgagatggagagagtgttcgggttcccagtccactacacagatgtcagcaacatgtctagactggccagacagagactgctgggaagaagctggtccgtccctgtgatcagacacctgttcgcccctctgaaggagtacttcgcctgcgtgagcagcggcaacagcaacgccaacagccggggccccagcttctctagcggcctggtgccactgtccctgagagggagccacatgggccccatggagatctacaaaaccgtgagcgcctggaagcggcagcctgtgcgcgtgctgagcctgtttcggaatatcgataaagtcctgaaaagcctgggattcctggagagcggctctggctccggcggtggcaccctgaagtacgtggaggatgtgacaaacgtggtcagacgggatgtggagaagtggggccccttcgatctggtgtacggcagcacccaacccctgggcagctcttgtgaccggtgccctggctggtacatgtttcagttccaccggatcctgcagtacgccctgccgagacaggagtcccagcggccattcttttggattttcatggacaacttgctgctgaccgaggatgaccaggaaactaccactcggttcctgcagaccgaagccgtgaccctgcaggacgtgagaggccgggactaccagaacgccatgcgggtgtggtccaacatccctggactgaaaagcaagcacgcacctctgacccctaaagaagaggagtacctgcaggcccaggtgcggagcagaagcaagctggacgcccctaaggtggatctgctggtgaagaattgcctcctgcccctgagagagtacttcaagtatttcagccagaatagtctgcccctgggaggcagcggcggcggcttccaggagagcgtgaccttcagggacgtggccgtggacttcacccaggaggagtggaggcacctggagcccgcccagagggccctgtacagggacgtgatgctggagaactacgagaacctggtgagcgtgggcatccccgtgagcaggctggacgtgaccagcctgctggagaggcaggaggccgtgtggaaggacggcggcctgagggacagctgcctggacagcctgagcaacaagatcggcggcccaagcagcggcgcccctcctcccagcggcggcaggcggcccaagcagcggcgcccctcctcccagcggcggcagcccagccggctccccaacctctaccgaggagggcacctctgagtccgccacccccgagagcggccctggcacctccaccgagcccagcgagggcagcgcacccggcagccctgccggcagccccacctccacagaggagggaaccagcaccgagcccagcgaaggcagcgccccaggcaccagcaccgagcctagtgagcaggagattaaacggatcaacaagatcagaagaagacttgtgaaagacagcaacaccaagaaggccggcaagacaggccccatgaaaaccctgctggttagagtgatgacacccgatctgagagagcggctggaaaacctgagaaagaagcctgaaaatatcccccagcccatcagcaatacatctagagccaacctgaataagctgctgaccgattacaccgaaatgaagaaggcgatcctgcatgtgtactgggaagagttccagaaggaccctgtgggcctgatgagccgggtggcccagcctgccagcaagaagatcgatcagaacaagctgaaacctgagatggacgagaagggcaacctgaccaccgccggctttgcctgctctcagtgtggccagcccctgttcgtgtacaagctggagcaggtgtctgagaagggcaaggcttacaccaactacttcggacggtgcaatgtggccgagcacgaaaagctgatcctgctggcccagctgaagcccgagaaggatagcgacgaagccgtgacatatagcctgggaaagtttgggcagagggccctggatttctacagcattcatgtgaccaaggagtccacccaccccgtgaagcccctggcccagatcgccggaaacagatacgcctccggacctgtgggaaaggccctgagcgacgcatgtatgggcacaatcgcctccttcctgtctaagtaccaggacatcatcatcgaacaccagaaggtggtgaagggcaaccagaagagactggagagcctgcgggagctggccggcaaggaaaacctggaataccctagcgtgaccctgccacctcagcctcacaccaaggagggcgttgatgcctacaacgaagtgatcgcccgggtgcgaatgtgggtgaacctgaacctgtggcagaagctgaagctaagcagagatgatgccaagcctctgctgagactgaagggattcccttcctttcctctggtcgagagacaggccaacgaagtggactggtgggacatggtgtgtaacgtgaagaagctgatcaacgagaaaaaggaggatggcaaggtgttttggcagaatctggctggctacaagagacaggaagccctgagaccatacctgagcagcgaggaagatcggaagaagggaaagaaattcgctcggtaccagctgggcgacctgctgctgcacctggaaaagaagcacggcgaggactggggaaaggtgtacgacgaggcctgggagcggattgacaagaaagtggaaggcctgagcaagcacatcaagctggaagaggaacggagaagcgaggacgcccagagcaaggccgccctgaccgactggctgcgggctaaggccagcttcgtgatcgagggcctgaaggaggccgacaaggacgagttctgcagatgcgagctgaagctgcagaagtggtacggggacctgcggggaaagcccttcgccatcgaagccgagaacagcatcctggacatcagcggcttcagcaagcagtacaactgtgccttcatctggcagaaggacggcgtgaagaagctgaacctgtacctgatcatcaactacttcaagggcggcaagctgcggttcaagaagatcaaacctgaagccttcgaagccaacagattctacaccgtgatcaacaaaaagagcggcgagatcgtgcccatggaggtgaacttcaacttcgacgaccccaacctgatcatcctgcctctggcctttggcaagagacagggcagagaattcatctggaacgacctgctgtccctggaaaccggcagcctgaagctggccaacggaagagtgatcgagaagacactgtacaacagaagaacccggcaggatgagcctgccctgttcgtggccctgaccttcgagcggcgggaggtcctggactcctccaatatcaaaccaatgaacctgatcggcgtggcaagaggcgaaaacatccccgccgtgatcgccctgaccgaccccgagggctgcccactgagccggtttaaggatagcctgggaaacccaacccacatcctgagaatcggcgagagctataaggagaagcagcggaccatccaggccaagaaggaggtggagcagcggagagccggcggctacagccggaagtacgccagcaaagccaagaatctggcagacgatatggtgagaaacaccgctagagatctgctgtactacgccgtgacccaggatgccatgctgatcttcgccaacctgagccggggcttcggccggcagggcaagcggaccttcatggccgagagacagtacacacggatggaggactggctgaccgccaagctggcctacgagggcctgagcaagacctacctgtccaagacactggcccagtacacctccaagacatgcagcaactgtgggtttaccatcaccagcgccgactacgacagggtgctggagaagctgaagaagacagcaacaggctggatgaccacaattaacggcaaggagctgaaggtggagggccagattacctactacaacagatacaagagacagaacgtagtcaaggacctgtccgtcgagctggatagactgagcgaagaatctgtgaacaacgacatctcctcctggacaaagggcagaagcggagaagctctgagcctcctgaagaaaagattctcccatagacccgtgcaggagaagttcgtgtgcctgaactgcggcttcgagacacacgcagccgagcaagccgccctgaacatcgccagatcctggctgttcctgcggagccaggagtacaagaaataccagacaaacaagacaaccggcaacaccgataagagagccttcgtcgagacctggcagtccttttaccggaagaagcttaaggaggtgtggaaacctgccgtgcggtctggcggatctggcggaggctccaccagccccaagaaaaagagaaaagtctaagctgccttctgcggggcttgccttctggccatgcccttcttctctcccttgcacctgtacctcttggtctttgaataaagcctgagtaggaaggctagcaaaaaaaaaaaaaaaaaaaaaaaaaaaaaaaaaaaaaaaaaaaaaaaaaaaaaaaaaaaaaaaaaaaaaaaaaaaaaaaagcccagccggctccccaacctctaccgaggagggcacctctgagtccgccacccccgagagcggccctggcacctccaccgagcccagcgagggcagcgcacccggcagccctgccggcagccccacctccacagaggagggaaccagcaccgagcccagcgaaggcagcgccccaggcaccagcaccgagcctagtgagcaggagattaaacggatcaacaagatcagaagaagacttgtgaaagacagcaacaccaagaaggccggcaagacaggccccatgaaaaccctgctggttagagtgatgacacccgatctgagagagcggctggaaaacctgagaaagaagcctgaaaatatcccccagcccatcagcaatacatctagagccaacctgaataagctgctgaccgattacaccgaaatgaagaaggcgatcctgcatgtgtactgggaagagttccagaaggaccctgtgggcctgatgagccgggtggcccagcctgccagcaagaagatcgatcagaacaagctgaaacctgagatggacgagaagggcaacctgaccaccgccggctttgcctgctctcagtgtggccagcccctgttcgtgtacaagctggagcaggtgtctgagaagggcaaggcttacaccaactacttcggacggtgcaatgtggccgagcacgaaaagctgatcctgctggcccagctgaagcccgagaaggatagcgacgaagccgtgacatatagcctgggaaagtttgggcagagggccctggatttctacagcattcatgtgaccaaggagtccacccaccccgtgaagcccctggcccagatcgccggaaacagatacgcctccggacctgtgggaaaggccctgagcgacgcatgtatgggcacaatcgcctccttcctgtctaagtaccaggacatcatcatcgaacaccagaaggtggtgaagggcaaccagaagagactggagagcctgcgggagctggccggcaaggaaaacctggaataccctagcgtgaccctgccacctcagcctcacaccaaggagggcgttgatgcctacaacgaagtgatcgcccgggtgcgaatgtgggtgaacctgaacctgtggcagaagctgaagctaagcagagatgatgccaagcctctgctgagactgaagggattcccttcctttcctctggtcgagagacaggccaacgaagtggactggtgggacatggtgtgtaacgtgaagaagctgatcaacgagaaaaaggaggatggcaaggtgttttggcagaatctggctggctacaagagacaggaagccctgagaccatacctgagcagcgaggaagatcggaagaagggaaagaaattcgctcggtaccagctgggcgacctgctgctgcacctggaaaagaagcacggcgaggactggggaaaggtgtacgacgaggcctgggagcggattgacaagaaagtggaaggcctgagcaagcacatcaagctggaagaggaacggagaagcgaggacgcccagagcaaggccgccctgaccgactggctgcgggctaaggccagcttcgtgatcgagggcctgaaggaggccgacaaggacgagttctgcagatgcgagctgaagctgcagaagtggtacggggacctgcggggaaagcccttcgccatcgaagccgagaacagcatcctggacatcagcggcttcagcaagcagtacaactgtgccttcatctggcagaaggacggcgtgaagaagctgaacctgtacctgatcatcaactacttcaagggcggcaagctgcggttcaagaagatcaaacctgaagccttcgaagccaacagattctacaccgtgatcaacaaaaagagcggcgagatcgtgcccatggaggtgaacttcaacttcgacgaccccaacctgatcatcctgcctctggcctttggcaagagacagggcagagaattcatctggaacgacctgctgtccctggaaaccggcagcctgaagctggccaacggaagagtgatcgagaagacactgtacaacagaagaacccggcaggatgagcctgccctgttcgtggccctgaccttcgagcggcgggaggtcctggactcctccaatatcaaaccaatgaacctgatcggcgtggcaagaggcgaaaacatccccgccgtgatcgccctgaccgaccccgagggctgcccactgagccggtttaaggatagcctgggaaacccaacccacatcctgagaatcggcgagagctataaggagaagcagcggaccatccaggccaagaaggaggtggagcagcggagagccggcggctacagccggaagtacgccagcaaagccaagaatctggcagacgatatggtgagaaacaccgctagagatctgctgtactacgccgtgacccaggatgccatgctgatcttcgccaacctgagccggggcttcggccggcagggcaagcggaccttcatggccgagagacagtacacacggatggaggactggctgaccgccaagctggcctacgagggcctgagcaagacctacctgtccaagacactggcccagtacacctccaagacatgcagcaactgtgggtttaccatcaccagcgccgactacgacagggtgctggagaagctgaagaagacagcaacaggctggatgaccacaattaacggcaaggagctgaaggtggagggccagattacctactacaacagatacaagagacagaacgtagtcaaggacctgtccgtcgagctggatagactgagcgaagaatctgtgaacaacgacatctcctcctggacaaagggcagaagcggagaagctctgagcctcctgaagaaaagattctcccatagacccgtgcaggagaagttcgtgtgcctgaactgcggcttcgagacacacgcagccgagcaagccgccctgaacatcgccagatcctggctgttcctgcggagccaggagtacaagaaataccagacaaacaagacaaccggcaacaccgataagagagccttcgtcgagacctggcagtccttttaccggaagaagcttaaggaggtgtggaaacctgccgtgcggtctggcggatctggcggaggctccaccagccccaagaaaaagagaaaagtctaagctgccttctgcggggcttgccttctggccatgcccttcttctctcccttgcacctgtacctcttggtctttgaataaagcctgagtaggaaggctagcaaaaaaaaaaaaaaaaaaaaaaaaaaaaaaaaaaaaaaaaaaaaaaaaaaaaaaaaaaaaaaaaaaaaaaaaaaaaaaaa

SEQ ID NO: 9285 - RNA, 8787 nt, synthetic construct
  source 1..8787: mol_type = other RNA
aggaaataagagagaaaagaagagtaagaagaaatataagagccaccatggcccctaagaagaagcgtaaagtgagccggatgaaccacgaccaggagttcgacccccctaaggtgtaccctcccgtccccgccgagaagagaaagcccatccgggtcctgagcctgttcgatggcatcgccaccggtctgctggtgctgaaggacctgggcatccaggtggataggtacattgcctccgaggtgtgcgaggactccatcaccgtgggaatggtgcgtcatcagggcaagatcatgtacgtgggcgacgtgcggagcgtgacacagaagcatatccaggagtggggccctttcgacctggtgatcggcggcagcccttgcaatgacctgagcatcgtgaacccagcccggaagggcctgtacgagggaaccggcagactgttcttcgagttttacagactgctgcacgacgcccggcctaaggaaggcgacgaccggcccttcttttggctgttcgagaatgtggtggccatgggagtcagcgacaagcgggatattagccggttcctggagagcaaccccgtgatgatcgatgccaaggaagtgagcgccgcccaccgggccagatacttctggggcaatctgcctggcatgaacagacccctggccagcaccgtgaacgacaagctggagctgcaggagtgcctggagcacggccggatcgccaagttcagcaaggtgagaaccatcaccacccgaagcaacagcatcaaacaaggcaaggaccagcactttcctgtgttcatgaacgagaaggaggacatcctgtggtgtaccgagatggagagagtgttcgggttcccagtccactacacagatgtcagcaacatgtctagactggccagacagagactgctgggaagaagctggtccgtccctgtgatcagacacctgttcgcccctctgaaggagtacttcgcctgcgtgagcagcggcaacagcaacgccaacagccggggccccagcttctctagcggcctggtgccactgtccctgagagggagccacatgggccccatggagatctacaaaaccgtgagcgcctggaagcggcagcctgtgcgcgtgctgagcctgtttcggaatatcgataaagtcctgaaaagcctgggattcctggagagcggctctggctccggcggtggcaccctgaagtacgtggaggatgtgacaaacgtggtcagacgggatgtggagaagtggggccccttcgatctggtgtacggcagcacccaacccctgggcagctcttgtgaccggtgccctggctggtacatgtttcagttccaccggatcctgcagtacgccctgccgagacaggagtcccagcggccattcttttggattttcatggacaacttgctgctgaccgaggatgaccaggaaactaccactcggttcctgcagaccgaagccgtgaccctgcaggacgtgagaggccgggactaccagaacgccatgcgggtgtggtccaacatccctggactgaaaagcaagcacgcacctctgacccctaaagaagaggagtacctgcaggcccaggtgcggagcagaagcaagctggacgcccctaaggtggatctgctggtgaagaattgcctcctgcccctgagagagtacttcaagtatttcagccagaatagtctgcccctgggaggcagcggcggcggcgaggccgtgaccttcaaggacgtggccgtgttcttcaccgaggaggagctgggcctgctggacctggcccagaggaagctgtacagagacgtgatgctggagaacttcaggaacctgctgagcgtgggccaccagcccttccaccaggacgtgttccacttcctgagggaggagaagttctggatgatggagaccgccacccagagggagggcaacagcggcgagaacgccagcgtgcaccccggcggcccaagcagcggcgcccctcctcccagcggcggcaggcggcccaagcagcggcgcccctcctcccagcggcggcagcccagccggctccccaacctctaccgaggagggcacctctgagtccgccacccccgagagcggccctggcacctccaccgagcccagcgagggcagcgcacccggcagccctgccggcagccccacctccacagaggagggaaccagcaccgagcccagcgaaggcagcgccccaggcaccagcaccgagcctagtgagcaggagattaaacggatcaacaagatcagaagaagacttgtgaaagacagcaacaccaagaaggccggcaagacaggccccatgaaaaccctgctggttagagtgatgacacccgatctgagagagcggctggaaaacctgagaaagaagcctgaaaatatcccccagcccatcagcaatacatctagagccaacctgaataagctgctgaccgattacaccgaaatgaagaaggcgatcctgcatgtgtactgggaagagttccagaaggaccctgtgggcctgatgagccgggtggcccagcctgccagcaagaagatcgatcagaacaagctgaaacctgagatggacgagaagggcaacctgaccaccgccggctttgcctgctctcagtgtggccagcccctgttcgtgtacaagctggagcaggtgtctgagaagggcaaggcttacaccaactacttcggacggtgcaatgtggccgagcacgaaaagctgatcctgctggcccagctgaagcccgagaaggatagcgacgaagccgtgacatatagcctgggaaagtttgggcagagggccctggatttctacagcattcatgtgaccaaggagtccacccaccccgtgaagcccctggcccagatcgccggaaacagatacgcctccggacctgtgggaaaggccctgagcgacgcatgtatgggcacaatcgcctccttcctgtctaagtaccaggacatcatcatcgaacaccagaaggtggtgaagggcaaccagaagagactggagagcctgcgggagctggccggcaaggaaaacctggaataccctagcgtgaccctgccacctcagcctcacaccaaggagggcgttgatgcctacaacgaagtgatcgcccgggtgcgaatgtgggtgaacctgaacctgtggcagaagctgaagctaagcagagatgatgccaagcctctgctgagactgaagggattcccttcctttcctctggtcgagagacaggccaacgaagtggactggtgggacatggtgtgtaacgtgaagaagctgatcaacgagaaaaaggaggatggcaaggtgttttggcagaatctggctggctacaagagacaggaagccctgagaccatacctgagcagcgaggaagatcggaagaagggaaagaaattcgctcggtaccagctgggcgacctgctgctgcacctggaaaagaagcacggcgaggactggggaaaggtgtacgacgaggcctgggagcggattgacaagaaagtggaaggcctgagcaagcacatcaagctggaagaggaacggagaagcgaggacgcccagagcaaggccgccctgaccgactggctgcgggctaaggccagcttcgtgatcgagggcctgaaggaggccgacaaggacgagttctgcagatgcgagctgaagctgcagaagtggtacggggacctgcggggaaagcccttcgccatcgaagccgagaacagcatcctggacatcagcggcttcagcaagcagtacaactgtgccttcatctggcagaaggacggcgtgaagaagctgaacctgtacctgatcatcaactacttcaagggcggcaagctgcggttcaagaagatcaaacctgaagccttcgaagccaacagattctacaccgtgatcaacaaaaagagcggcgagatcgtgcccatggaggtgaacttcaacttcgacgaccccaacctgatcatcctgcctctggcctttggcaagagacagggcagagaattcatctggaacgacctgctgtccctggaaaccggcagcctgaagctggccaacggaagagtgatcgagaagacactgtacaacagaagaacccggcaggatgagcctgccctgttcgtggccctgaccttcgagcggcgggaggtcctggactcctccaatatcaaaccaatgaacctgatcggcgtggcaagaggcgaaaacatccccgccgtgatcgccctgaccgaccccgagggctgcccactgagccggtttaaggatagcctgggaaacccaacccacatcctgagaatcggcgagagctataaggagaagcagcggaccatccaggccaagaaggaggtggagcagcggagagccggcggctacagccggaagtacgccagcaaagccaagaatctggcagacgatatggtgagaaacaccgctagagatctgctgtactacgccgtgacccaggatgccatgctgatcttcgccaacctgagccggggcttcggccggcagggcaagcggaccttcatggccgagagacagtacacacggatggaggactggctgaccgccaagctggcctacgagggcctgagcaagacctacctgtccaagacactggcccagtacacctccaagacatgcagcaactgtgggtttaccatcaccagcgccgactacgacagggtgctggagaagctgaagaagacagcaacaggctggatgaccacaattaacggcaaggagctgaaggtggagggccagattacctactacaacagatacaagagacagaacgtagtcaaggacctgtccgtcgagctggatagactgagcgaagaatctgtgaacaacgacatctcctcctggacaaagggcagaagcggagaagctctgagcctcctgaagaaaagattctcccatagacccgtgcaggagaagttcgtgtgcctgaactgcggcttcgagacacacgcagccgagcaagccgccctgaacatcgccagatcctggctgttcctgcggagccaggagtacaagaaataccagacaaacaagacaaccggcaacaccgataagagagccttcgtcgagacctggcagtccttttaccggaagaagcttaaggaggtgtggaaacctgccgtgcggtctggcggatctggcggaggctccaccagccccaagaaaaagagaaaagtctaagctgccttctgcggggcttgccttctggccatgcccttcttctctcccttgcacctgtacctcttggtctttgaataaagcctgagtaggaaggctagcaaaaaaaaaaaaaaaaaaaaaaaaaaaaaaaaaaaaaaaaaaaaaaaaaaaaaaaaaaaaaaaaaaaaaaaaaaaaaaaagcccagccggctccccaacctctaccgaggagggcacctctgagtccgccacccccgagagcggccctggcacctccaccgagcccagcgagggcagcgcacccggcagccctgccggcagccccacctccacagaggagggaaccagcaccgagcccagcgaaggcagcgccccaggcaccagcaccgagcctagtgagcaggagattaaacggatcaacaagatcagaagaagacttgtgaaagacagcaacaccaagaaggccggcaagacaggccccatgaaaaccctgctggttagagtgatgacacccgatctgagagagcggctggaaaacctgagaaagaagcctgaaaatatcccccagcccatcagcaatacatctagagccaacctgaataagctgctgaccgattacaccgaaatgaagaaggcgatcctgcatgtgtactgggaagagttccagaaggaccctgtgggcctgatgagccgggtggcccagcctgccagcaagaagatcgatcagaacaagctgaaacctgagatggacgagaagggcaacctgaccaccgccggctttgcctgctctcagtgtggccagcccctgttcgtgtacaagctggagcaggtgtctgagaagggcaaggcttacaccaactacttcggacggtgcaatgtggccgagcacgaaaagctgatcctgctggcccagctgaagcccgagaaggatagcgacgaagccgtgacatatagcctgggaaagtttgggcagagggccctggatttctacagcattcatgtgaccaaggagtccacccaccccgtgaagcccctggcccagatcgccggaaacagatacgcctccggacctgtgggaaaggccctgagcgacgcatgtatgggcacaatcgcctccttcctgtctaagtaccaggacatcatcatcgaacaccagaaggtggtgaagggcaaccagaagagactggagagcctgcgggagctggccggcaaggaaaacctggaataccctagcgtgaccctgccacctcagcctcacaccaaggagggcgttgatgcctacaacgaagtgatcgcccgggtgcgaatgtgggtgaacctgaacctgtggcagaagctgaagctaagcagagatgatgccaagcctctgctgagactgaagggattcccttcctttcctctggtcgagagacaggccaacgaagtggactggtgggacatggtgtgtaacgtgaagaagctgatcaacgagaaaaaggaggatggcaaggtgttttggcagaatctggctggctacaagagacaggaagccctgagaccatacctgagcagcgaggaagatcggaagaagggaaagaaattcgctcggtaccagctgggcgacctgctgctgcacctggaaaagaagcacggcgaggactggggaaaggtgtacgacgaggcctgggagcggattgacaagaaagtggaaggcctgagcaagcacatcaagctggaagaggaacggagaagcgaggacgcccagagcaaggccgccctgaccgactggctgcgggctaaggccagcttcgtgatcgagggcctgaaggaggccgacaaggacgagttctgcagatgcgagctgaagctgcagaagtggtacggggacctgcggggaaagcccttcgccatcgaagccgagaacagcatcctggacatcagcggcttcagcaagcagtacaactgtgccttcatctggcagaaggacggcgtgaagaagctgaacctgtacctgatcatcaactacttcaagggcggcaagctgcggttcaagaagatcaaacctgaagccttcgaagccaacagattctacaccgtgatcaacaaaaagagcggcgagatcgtgcccatggaggtgaacttcaacttcgacgaccccaacctgatcatcctgcctctggcctttggcaagagacagggcagagaattcatctggaacgacctgctgtccctggaaaccggcagcctgaagctggccaacggaagagtgatcgagaagacactgtacaacagaagaacccggcaggatgagcctgccctgttcgtggccctgaccttcgagcggcgggaggtcctggactcctccaatatcaaaccaatgaacctgatcggcgtggcaagaggcgaaaacatccccgccgtgatcgccctgaccgaccccgagggctgcccactgagccggtttaaggatagcctgggaaacccaacccacatcctgagaatcggcgagagctataaggagaagcagcggaccatccaggccaagaaggaggtggagcagcggagagccggcggctacagccggaagtacgccagcaaagccaagaatctggcagacgatatggtgagaaacaccgctagagatctgctgtactacgccgtgacccaggatgccatgctgatcttcgccaacctgagccggggcttcggccggcagggcaagcggaccttcatggccgagagacagtacacacggatggaggactggctgaccgccaagctggcctacgagggcctgagcaagacctacctgtccaagacactggcccagtacacctccaagacatgcagcaactgtgggtttaccatcaccagcgccgactacgacagggtgctggagaagctgaagaagacagcaacaggctggatgaccacaattaacggcaaggagctgaaggtggagggccagattacctactacaacagatacaagagacagaacgtagtcaaggacctgtccgtcgagctggatagactgagcgaagaatctgtgaacaacgacatctcctcctggacaaagggcagaagcggagaagctctgagcctcctgaagaaaagattctcccatagacccgtgcaggagaagttcgtgtgcctgaactgcggcttcgagacacacgcagccgagcaagccgccctgaacatcgccagatcctggctgttcctgcggagccaggagtacaagaaataccagacaaacaagacaaccggcaacaccgataagagagccttcgtcgagacctggcagtccttttaccggaagaagcttaaggaggtgtggaaacctgccgtgcggtctggcggatctggcggaggctccaccagccccaagaaaaagagaaaagtctaagctgccttctgcggggcttgccttctggccatgcccttcttctctcccttgcacctgtacctcttggtctttgaataaagcctgagtaggaaggctagcaaaaaaaaaaaaaaaaaaaaaaaaaaaaaaaaaaaaaaaaaaaaaaaaaaaaaaaaaaaaaaaaaaaaaaaaaaaaaaaa

SEQ ID NO: 9286 - RNA, 8787 nt, synthetic construct
  source 1..8787: mol_type = other RNA
aggaaataagagagaaaagaagagtaagaagaaatataagagccaccatggcccctaagaagaagcgtaaagtgagccggatgaaccacgaccaggagttcgacccccctaaggtgtaccctcccgtccccgccgagaagagaaagcccatccgggtcctgagcctgttcgatggcatcgccaccggtctgctggtgctgaaggacctgggcatccaggtggataggtacattgcctccgaggtgtgcgaggactccatcaccgtgggaatggtgcgtcatcagggcaagatcatgtacgtgggcgacgtgcggagcgtgacacagaagcatatccaggagtggggccctttcgacctggtgatcggcggcagcccttgcaatgacctgagcatcgtgaacccagcccggaagggcctgtacgagggaaccggcagactgttcttcgagttttacagactgctgcacgacgcccggcctaaggaaggcgacgaccggcccttcttttggctgttcgagaatgtggtggccatgggagtcagcgacaagcgggatattagccggttcctggagagcaaccccgtgatgatcgatgccaaggaagtgagcgccgcccaccgggccagatacttctggggcaatctgcctggcatgaacagacccctggccagcaccgtgaacgacaagctggagctgcaggagtgcctggagcacggccggatcgccaagttcagcaaggtgagaaccatcaccacccgaagcaacagcatcaaacaaggcaaggaccagcactttcctgtgttcatgaacgagaaggaggacatcctgtggtgtaccgagatggagagagtgttcgggttcccagtccactacacagatgtcagcaacatgtctagactggccagacagagactgctgggaagaagctggtccgtccctgtgatcagacacctgttcgcccctctgaaggagtacttcgcctgcgtgagcagcggcaacagcaacgccaacagccggggccccagcttctctagcggcctggtgccactgtccctgagagggagccacatgggccccatggagatctacaaaaccgtgagcgcctggaagcggcagcctgtgcgcgtgctgagcctgtttcggaatatcgataaagtcctgaaaagcctgggattcctggagagcggctctggctccggcggtggcaccctgaagtacgtggaggatgtgacaaacgtggtcagacgggatgtggagaagtggggccccttcgatctggtgtacggcagcacccaacccctgggcagctcttgtgaccggtgccctggctggtacatgtttcagttccaccggatcctgcagtacgccctgccgagacaggagtcccagcggccattcttttggattttcatggacaacttgctgctgaccgaggatgaccaggaaactaccactcggttcctgcagaccgaagccgtgaccctgcaggacgtgagaggccgggactaccagaacgccatgcgggtgtggtccaacatccctggactgaaaagcaagcacgcacctctgacccctaaagaagaggagtacctgcaggcccaggtgcggagcagaagcaagctggacgcccctaaggtggatctgctggtgaagaattgcctcctgcccctgagagagtacttcaagtatttcagccagaatagtctgcccctgggaggcagcggcggcggcacccagctgaccgtggaggacgtggacatcaagttcacccccgaggagtgggagtgcctggaccccgcccagagggccctgtactgggacgtgatggaggagacctacaggaacctgctgagcgtggacgtgagccacatccacatgaccaagaagctgcaggccaaggccaacagcggcaagggcgagatcctgcagaccgtgatgttcggcagggccgagacccacgagatcaaggacttcggcggcccaagcagcggcgcccctcctcccagcggcggcaggcggcccaagcagcggcgcccctcctcccagcggcggcagcccagccggctccccaacctctaccgaggagggcacctctgagtccgccacccccgagagcggccctggcacctccaccgagcccagcgagggcagcgcacccggcagccctgccggcagccccacctccacagaggagggaaccagcaccgagcccagcgaaggcagcgccccaggcaccagcaccgagcctagtgagcaggagattaaacggatcaacaagatcagaagaagacttgtgaaagacagcaacaccaagaaggccggcaagacaggccccatgaaaaccctgctggttagagtgatgacacccgatctgagagagcggctggaaaacctgagaaagaagcctgaaaatatcccccagcccatcagcaatacatctagagccaacctgaataagctgctgaccgattacaccgaaatgaagaaggcgatcctgcatgtgtactgggaagagttccagaaggaccctgtgggcctgatgagccgggtggcccagcctgccagcaagaagatcgatcagaacaagctgaaacctgagatggacgagaagggcaacctgaccaccgccggctttgcctgctctcagtgtggccagcccctgttcgtgtacaagctggagcaggtgtctgagaagggcaaggcttacaccaactacttcggacggtgcaatgtggccgagcacgaaaagctgatcctgctggcccagctgaagcccgagaaggatagcgacgaagccgtgacatatagcctgggaaagtttgggcagagggccctggatttctacagcattcatgtgaccaaggagtccacccaccccgtgaagcccctggcccagatcgccggaaacagatacgcctccggacctgtgggaaaggccctgagcgacgcatgtatgggcacaatcgcctccttcctgtctaagtaccaggacatcatcatcgaacaccagaaggtggtgaagggcaaccagaagagactggagagcctgcgggagctggccggcaaggaaaacctggaataccctagcgtgaccctgccacctcagcctcacaccaaggagggcgttgatgcctacaacgaagtgatcgcccgggtgcgaatgtgggtgaacctgaacctgtggcagaagctgaagctaagcagagatgatgccaagcctctgctgagactgaagggattcccttcctttcctctggtcgagagacaggccaacgaagtggactggtgggacatggtgtgtaacgtgaagaagctgatcaacgagaaaaaggaggatggcaaggtgttttggcagaatctggctggctacaagagacaggaagccctgagaccatacctgagcagcgaggaagatcggaagaagggaaagaaattcgctcggtaccagctgggcgacctgctgctgcacctggaaaagaagcacggcgaggactggggaaaggtgtacgacgaggcctgggagcggattgacaagaaagtggaaggcctgagcaagcacatcaagctggaagaggaacggagaagcgaggacgcccagagcaaggccgccctgaccgactggctgcgggctaaggccagcttcgtgatcgagggcctgaaggaggccgacaaggacgagttctgcagatgcgagctgaagctgcagaagtggtacggggacctgcggggaaagcccttcgccatcgaagccgagaacagcatcctggacatcagcggcttcagcaagcagtacaactgtgccttcatctggcagaaggacggcgtgaagaagctgaacctgtacctgatcatcaactacttcaagggcggcaagctgcggttcaagaagatcaaacctgaagccttcgaagccaacagattctacaccgtgatcaacaaaaagagcggcgagatcgtgcccatggaggtgaacttcaacttcgacgaccccaacctgatcatcctgcctctggcctttggcaagagacagggcagagaattcatctggaacgacctgctgtccctggaaaccggcagcctgaagctggccaacggaagagtgatcgagaagacactgtacaacagaagaacccggcaggatgagcctgccctgttcgtggccctgaccttcgagcggcgggaggtcctggactcctccaatatcaaaccaatgaacctgatcggcgtggcaagaggcgaaaacatccccgccgtgatcgccctgaccgaccccgagggctgcccactgagccggtttaaggatagcctgggaaacccaacccacatcctgagaatcggcgagagctataaggagaagcagcggaccatccaggccaagaaggaggtggagcagcggagagccggcggctacagccggaagtacgccagcaaagccaagaatctggcagacgatatggtgagaaacaccgctagagatctgctgtactacgccgtgacccaggatgccatgctgatcttcgccaacctgagccggggcttcggccggcagggcaagcggaccttcatggccgagagacagtacacacggatggaggactggctgaccgccaagctggcctacgagggcctgagcaagacctacctgtccaagacactggcccagtacacctccaagacatgcagcaactgtgggtttaccatcaccagcgccgactacgacagggtgctggagaagctgaagaagacagcaacaggctggatgaccacaattaacggcaaggagctgaaggtggagggccagattacctactacaacagatacaagagacagaacgtagtcaaggacctgtccgtcgagctggatagactgagcgaagaatctgtgaacaacgacatctcctcctggacaaagggcagaagcggagaagctctgagcctcctgaagaaaagattctcccatagacccgtgcaggagaagttcgtgtgcctgaactgcggcttcgagacacacgcagccgagcaagccgccctgaacatcgccagatcctggctgttcctgcggagccaggagtacaagaaataccagacaaacaagacaaccggcaacaccgataagagagccttcgtcgagacctggcagtccttttaccggaagaagcttaaggaggtgtggaaacctgccgtgcggtctggcggatctggcggaggctccaccagccccaagaaaaagagaaaagtctaagctgccttctgcggggcttgccttctggccatgcccttcttctctcccttgcacctgtacctcttggtctttgaataaagcctgagtaggaaggctagcaaaaaaaaaaaaaaaaaaaaaaaaaaaaaaaaaaaaaaaaaaaaaaaaaaaaaaaaaaaaaaaaaaaaaaaaaaaaaaaagcccagccggctccccaacctctaccgaggagggcacctctgagtccgccacccccgagagcggccctggcacctccaccgagcccagcgagggcagcgcacccggcagccctgccggcagccccacctccacagaggagggaaccagcaccgagcccagcgaaggcagcgccccaggcaccagcaccgagcctagtgagcaggagattaaacggatcaacaagatcagaagaagacttgtgaaagacagcaacaccaagaaggccggcaagacaggccccatgaaaaccctgctggttagagtgatgacacccgatctgagagagcggctggaaaacctgagaaagaagcctgaaaatatcccccagcccatcagcaatacatctagagccaacctgaataagctgctgaccgattacaccgaaatgaagaaggcgatcctgcatgtgtactgggaagagttccagaaggaccctgtgggcctgatgagccgggtggcccagcctgccagcaagaagatcgatcagaacaagctgaaacctgagatggacgagaagggcaacctgaccaccgccggctttgcctgctctcagtgtggccagcccctgttcgtgtacaagctggagcaggtgtctgagaagggcaaggcttacaccaactacttcggacggtgcaatgtggccgagcacgaaaagctgatcctgctggcccagctgaagcccgagaaggatagcgacgaagccgtgacatatagcctgggaaagtttgggcagagggccctggatttctacagcattcatgtgaccaaggagtccacccaccccgtgaagcccctggcccagatcgccggaaacagatacgcctccggacctgtgggaaaggccctgagcgacgcatgtatgggcacaatcgcctccttcctgtctaagtaccaggacatcatcatcgaacaccagaaggtggtgaagggcaaccagaagagactggagagcctgcgggagctggccggcaaggaaaacctggaataccctagcgtgaccctgccacctcagcctcacaccaaggagggcgttgatgcctacaacgaagtgatcgcccgggtgcgaatgtgggtgaacctgaacctgtggcagaagctgaagctaagcagagatgatgccaagcctctgctgagactgaagggattcccttcctttcctctggtcgagagacaggccaacgaagtggactggtgggacatggtgtgtaacgtgaagaagctgatcaacgagaaaaaggaggatggcaaggtgttttggcagaatctggctggctacaagagacaggaagccctgagaccatacctgagcagcgaggaagatcggaagaagggaaagaaattcgctcggtaccagctgggcgacctgctgctgcacctggaaaagaagcacggcgaggactggggaaaggtgtacgacgaggcctgggagcggattgacaagaaagtggaaggcctgagcaagcacatcaagctggaagaggaacggagaagcgaggacgcccagagcaaggccgccctgaccgactggctgcgggctaaggccagcttcgtgatcgagggcctgaaggaggccgacaaggacgagttctgcagatgcgagctgaagctgcagaagtggtacggggacctgcggggaaagcccttcgccatcgaagccgagaacagcatcctggacatcagcggcttcagcaagcagtacaactgtgccttcatctggcagaaggacggcgtgaagaagctgaacctgtacctgatcatcaactacttcaagggcggcaagctgcggttcaagaagatcaaacctgaagccttcgaagccaacagattctacaccgtgatcaacaaaaagagcggcgagatcgtgcccatggaggtgaacttcaacttcgacgaccccaacctgatcatcctgcctctggcctttggcaagagacagggcagagaattcatctggaacgacctgctgtccctggaaaccggcagcctgaagctggccaacggaagagtgatcgagaagacactgtacaacagaagaacccggcaggatgagcctgccctgttcgtggccctgaccttcgagcggcgggaggtcctggactcctccaatatcaaaccaatgaacctgatcggcgtggcaagaggcgaaaacatccccgccgtgatcgccctgaccgaccccgagggctgcccactgagccggtttaaggatagcctgggaaacccaacccacatcctgagaatcggcgagagctataaggagaagcagcggaccatccaggccaagaaggaggtggagcagcggagagccggcggctacagccggaagtacgccagcaaagccaagaatctggcagacgatatggtgagaaacaccgctagagatctgctgtactacgccgtgacccaggatgccatgctgatcttcgccaacctgagccggggcttcggccggcagggcaagcggaccttcatggccgagagacagtacacacggatggaggactggctgaccgccaagctggcctacgagggcctgagcaagacctacctgtccaagacactggcccagtacacctccaagacatgcagcaactgtgggtttaccatcaccagcgccgactacgacagggtgctggagaagctgaagaagacagcaacaggctggatgaccacaattaacggcaaggagctgaaggtggagggccagattacctactacaacagatacaagagacagaacgtagtcaaggacctgtccgtcgagctggatagactgagcgaagaatctgtgaacaacgacatctcctcctggacaaagggcagaagcggagaagctctgagcctcctgaagaaaagattctcccatagacccgtgcaggagaagttcgtgtgcctgaactgcggcttcgagacacacgcagccgagcaagccgccctgaacatcgccagatcctggctgttcctgcggagccaggagtacaagaaataccagacaaacaagacaaccggcaacaccgataagagagccttcgtcgagacctggcagtccttttaccggaagaagcttaaggaggtgtggaaacctgccgtgcggtctggcggatctggcggaggctccaccagccccaagaaaaagagaaaagtctaagctgccttctgcggggcttgccttctggccatgcccttcttctctcccttgcacctgtacctcttggtctttgaataaagcctgagtaggaaggctagcaaaaaaaaaaaaaaaaaaaaaaaaaaaaaaaaaaaaaaaaaaaaaaaaaaaaaaaaaaaaaaaaaaaaaaaaaaaaaaaa

SEQ ID NO: 9287 - RNA, 8787 nt, synthetic construct
  source 1..8787: mol_type = other RNA
aggaaataagagagaaaagaagagtaagaagaaatataagagccaccatggcccctaagaagaagcgtaaagtgagccggatgaaccacgaccaggagttcgacccccctaaggtgtaccctcccgtccccgccgagaagagaaagcccatccgggtcctgagcctgttcgatggcatcgccaccggtctgctggtgctgaaggacctgggcatccaggtggataggtacattgcctccgaggtgtgcgaggactccatcaccgtgggaatggtgcgtcatcagggcaagatcatgtacgtgggcgacgtgcggagcgtgacacagaagcatatccaggagtggggccctttcgacctggtgatcggcggcagcccttgcaatgacctgagcatcgtgaacccagcccggaagggcctgtacgagggaaccggcagactgttcttcgagttttacagactgctgcacgacgcccggcctaaggaaggcgacgaccggcccttcttttggctgttcgagaatgtggtggccatgggagtcagcgacaagcgggatattagccggttcctggagagcaaccccgtgatgatcgatgccaaggaagtgagcgccgcccaccgggccagatacttctggggcaatctgcctggcatgaacagacccctggccagcaccgtgaacgacaagctggagctgcaggagtgcctggagcacggccggatcgccaagttcagcaaggtgagaaccatcaccacccgaagcaacagcatcaaacaaggcaaggaccagcactttcctgtgttcatgaacgagaaggaggacatcctgtggtgtaccgagatggagagagtgttcgggttcccagtccactacacagatgtcagcaacatgtctagactggccagacagagactgctgggaagaagctggtccgtccctgtgatcagacacctgttcgcccctctgaaggagtacttcgcctgcgtgagcagcggcaacagcaacgccaacagccggggccccagcttctctagcggcctggtgccactgtccctgagagggagccacatgggccccatggagatctacaaaaccgtgagcgcctggaagcggcagcctgtgcgcgtgctgagcctgtttcggaatatcgataaagtcctgaaaagcctgggattcctggagagcggctctggctccggcggtggcaccctgaagtacgtggaggatgtgacaaacgtggtcagacgggatgtggagaagtggggccccttcgatctggtgtacggcagcacccaacccctgggcagctcttgtgaccggtgccctggctggtacatgtttcagttccaccggatcctgcagtacgccctgccgagacaggagtcccagcggccattcttttggattttcatggacaacttgctgctgaccgaggatgaccaggaaactaccactcggttcctgcagaccgaagccgtgaccctgcaggacgtgagaggccgggactaccagaacgccatgcgggtgtggtccaacatccctggactgaaaagcaagcacgcacctctgacccctaaagaagaggagtacctgcaggcccaggtgcggagcagaagcaagctggacgcccctaaggtggatctgctggtgaagaattgcctcctgcccctgagagagtacttcaagtatttcagccagaatagtctgcccctgggaggcagcggcggcggcacctgcatggtgcacaggcagaccatgagctgcagcggcgccggcggcatcaccgccttcgtggccttcagggacgtggccgtggacttcacccaggaggagtggaggctgctgagccccgcccagaggaccctgcacagggaggtgatgctggagacctacaaccacctggtgagcctggagatccccagcagcaagcccaagctgatcgcccagctggagaggggcgaggagccctggaggggcggcccaagcagcggcgcccctcctcccagcggcggcaggcggcccaagcagcggcgcccctcctcccagcggcggcagcccagccggctccccaacctctaccgaggagggcacctctgagtccgccacccccgagagcggccctggcacctccaccgagcccagcgagggcagcgcacccggcagccctgccggcagccccacctccacagaggagggaaccagcaccgagcccagcgaaggcagcgccccaggcaccagcaccgagcctagtgagcaggagattaaacggatcaacaagatcagaagaagacttgtgaaagacagcaacaccaagaaggccggcaagacaggccccatgaaaaccctgctggttagagtgatgacacccgatctgagagagcggctggaaaacctgagaaagaagcctgaaaatatcccccagcccatcagcaatacatctagagccaacctgaataagctgctgaccgattacaccgaaatgaagaaggcgatcctgcatgtgtactgggaagagttccagaaggaccctgtgggcctgatgagccgggtggcccagcctgccagcaagaagatcgatcagaacaagctgaaacctgagatggacgagaagggcaacctgaccaccgccggctttgcctgctctcagtgtggccagcccctgttcgtgtacaagctggagcaggtgtctgagaagggcaaggcttacaccaactacttcggacggtgcaatgtggccgagcacgaaaagctgatcctgctggcccagctgaagcccgagaaggatagcgacgaagccgtgacatatagcctgggaaagtttgggcagagggccctggatttctacagcattcatgtgaccaaggagtccacccaccccgtgaagcccctggcccagatcgccggaaacagatacgcctccggacctgtgggaaaggccctgagcgacgcatgtatgggcacaatcgcctccttcctgtctaagtaccaggacatcatcatcgaacaccagaaggtggtgaagggcaaccagaagagactggagagcctgcgggagctggccggcaaggaaaacctggaataccctagcgtgaccctgccacctcagcctcacaccaaggagggcgttgatgcctacaacgaagtgatcgcccgggtgcgaatgtgggtgaacctgaacctgtggcagaagctgaagctaagcagagatgatgccaagcctctgctgagactgaagggattcccttcctttcctctggtcgagagacaggccaacgaagtggactggtgggacatggtgtgtaacgtgaagaagctgatcaacgagaaaaaggaggatggcaaggtgttttggcagaatctggctggctacaagagacaggaagccctgagaccatacctgagcagcgaggaagatcggaagaagggaaagaaattcgctcggtaccagctgggcgacctgctgctgcacctggaaaagaagcacggcgaggactggggaaaggtgtacgacgaggcctgggagcggattgacaagaaagtggaaggcctgagcaagcacatcaagctggaagaggaacggagaagcgaggacgcccagagcaaggccgccctgaccgactggctgcgggctaaggccagcttcgtgatcgagggcctgaaggaggccgacaaggacgagttctgcagatgcgagctgaagctgcagaagtggtacggggacctgcggggaaagcccttcgccatcgaagccgagaacagcatcctggacatcagcggcttcagcaagcagtacaactgtgccttcatctggcagaaggacggcgtgaagaagctgaacctgtacctgatcatcaactacttcaagggcggcaagctgcggttcaagaagatcaaacctgaagccttcgaagccaacagattctacaccgtgatcaacaaaaagagcggcgagatcgtgcccatggaggtgaacttcaacttcgacgaccccaacctgatcatcctgcctctggcctttggcaagagacagggcagagaattcatctggaacgacctgctgtccctggaaaccggcagcctgaagctggccaacggaagagtgatcgagaagacactgtacaacagaagaacccggcaggatgagcctgccctgttcgtggccctgaccttcgagcggcgggaggtcctggactcctccaatatcaaaccaatgaacctgatcggcgtggcaagaggcgaaaacatccccgccgtgatcgccctgaccgaccccgagggctgcccactgagccggtttaaggatagcctgggaaacccaacccacatcctgagaatcggcgagagctataaggagaagcagcggaccatccaggccaagaaggaggtggagcagcggagagccggcggctacagccggaagtacgccagcaaagccaagaatctggcagacgatatggtgagaaacaccgctagagatctgctgtactacgccgtgacccaggatgccatgctgatcttcgccaacctgagccggggcttcggccggcagggcaagcggaccttcatggccgagagacagtacacacggatggaggactggctgaccgccaagctggcctacgagggcctgagcaagacctacctgtccaagacactggcccagtacacctccaagacatgcagcaactgtgggtttaccatcaccagcgccgactacgacagggtgctggagaagctgaagaagacagcaacaggctggatgaccacaattaacggcaaggagctgaaggtggagggccagattacctactacaacagatacaagagacagaacgtagtcaaggacctgtccgtcgagctggatagactgagcgaagaatctgtgaacaacgacatctcctcctggacaaagggcagaagcggagaagctctgagcctcctgaagaaaagattctcccatagacccgtgcaggagaagttcgtgtgcctgaactgcggcttcgagacacacgcagccgagcaagccgccctgaacatcgccagatcctggctgttcctgcggagccaggagtacaagaaataccagacaaacaagacaaccggcaacaccgataagagagccttcgtcgagacctggcagtccttttaccggaagaagcttaaggaggtgtggaaacctgccgtgcggtctggcggatctggcggaggctccaccagccccaagaaaaagagaaaagtctaagctgccttctgcggggcttgccttctggccatgcccttcttctctcccttgcacctgtacctcttggtctttgaataaagcctgagtaggaaggctagcaaaaaaaaaaaaaaaaaaaaaaaaaaaaaaaaaaaaaaaaaaaaaaaaaaaaaaaaaaaaaaaaaaaaaaaaaaaaaaaagcccagccggctccccaacctctaccgaggagggcacctctgagtccgccacccccgagagcggccctggcacctccaccgagcccagcgagggcagcgcacccggcagccctgccggcagccccacctccacagaggagggaaccagcaccgagcccagcgaaggcagcgccccaggcaccagcaccgagcctagtgagcaggagattaaacggatcaacaagatcagaagaagacttgtgaaagacagcaacaccaagaaggccggcaagacaggccccatgaaaaccctgctggttagagtgatgacacccgatctgagagagcggctggaaaacctgagaaagaagcctgaaaatatcccccagcccatcagcaatacatctagagccaacctgaataagctgctgaccgattacaccgaaatgaagaaggcgatcctgcatgtgtactgggaagagttccagaaggaccctgtgggcctgatgagccgggtggcccagcctgccagcaagaagatcgatcagaacaagctgaaacctgagatggacgagaagggcaacctgaccaccgccggctttgcctgctctcagtgtggccagcccctgttcgtgtacaagctggagcaggtgtctgagaagggcaaggcttacaccaactacttcggacggtgcaatgtggccgagcacgaaaagctgatcctgctggcccagctgaagcccgagaaggatagcgacgaagccgtgacatatagcctgggaaagtttgggcagagggccctggatttctacagcattcatgtgaccaaggagtccacccaccccgtgaagcccctggcccagatcgccggaaacagatacgcctccggacctgtgggaaaggccctgagcgacgcatgtatgggcacaatcgcctccttcctgtctaagtaccaggacatcatcatcgaacaccagaaggtggtgaagggcaaccagaagagactggagagcctgcgggagctggccggcaaggaaaacctggaataccctagcgtgaccctgccacctcagcctcacaccaaggagggcgttgatgcctacaacgaagtgatcgcccgggtgcgaatgtgggtgaacctgaacctgtggcagaagctgaagctaagcagagatgatgccaagcctctgctgagactgaagggattcccttcctttcctctggtcgagagacaggccaacgaagtggactggtgggacatggtgtgtaacgtgaagaagctgatcaacgagaaaaaggaggatggcaaggtgttttggcagaatctggctggctacaagagacaggaagccctgagaccatacctgagcagcgaggaagatcggaagaagggaaagaaattcgctcggtaccagctgggcgacctgctgctgcacctggaaaagaagcacggcgaggactggggaaaggtgtacgacgaggcctgggagcggattgacaagaaagtggaaggcctgagcaagcacatcaagctggaagaggaacggagaagcgaggacgcccagagcaaggccgccctgaccgactggctgcgggctaaggccagcttcgtgatcgagggcctgaaggaggccgacaaggacgagttctgcagatgcgagctgaagctgcagaagtggtacggggacctgcggggaaagcccttcgccatcgaagccgagaacagcatcctggacatcagcggcttcagcaagcagtacaactgtgccttcatctggcagaaggacggcgtgaagaagctgaacctgtacctgatcatcaactacttcaagggcggcaagctgcggttcaagaagatcaaacctgaagccttcgaagccaacagattctacaccgtgatcaacaaaaagagcggcgagatcgtgcccatggaggtgaacttcaacttcgacgaccccaacctgatcatcctgcctctggcctttggcaagagacagggcagagaattcatctggaacgacctgctgtccctggaaaccggcagcctgaagctggccaacggaagagtgatcgagaagacactgtacaacagaagaacccggcaggatgagcctgccctgttcgtggccctgaccttcgagcggcgggaggtcctggactcctccaatatcaaaccaatgaacctgatcggcgtggcaagaggcgaaaacatccccgccgtgatcgccctgaccgaccccgagggctgcccactgagccggtttaaggatagcctgggaaacccaacccacatcctgagaatcggcgagagctataaggagaagcagcggaccatccaggccaagaaggaggtggagcagcggagagccggcggctacagccggaagtacgccagcaaagccaagaatctggcagacgatatggtgagaaacaccgctagagatctgctgtactacgccgtgacccaggatgccatgctgatcttcgccaacctgagccggggcttcggccggcagggcaagcggaccttcatggccgagagacagtacacacggatggaggactggctgaccgccaagctggcctacgagggcctgagcaagacctacctgtccaagacactggcccagtacacctccaagacatgcagcaactgtgggtttaccatcaccagcgccgactacgacagggtgctggagaagctgaagaagacagcaacaggctggatgaccacaattaacggcaaggagctgaaggtggagggccagattacctactacaacagatacaagagacagaacgtagtcaaggacctgtccgtcgagctggatagactgagcgaagaatctgtgaacaacgacatctcctcctggacaaagggcagaagcggagaagctctgagcctcctgaagaaaagattctcccatagacccgtgcaggagaagttcgtgtgcctgaactgcggcttcgagacacacgcagccgagcaagccgccctgaacatcgccagatcctggctgttcctgcggagccaggagtacaagaaataccagacaaacaagacaaccggcaacaccgataagagagccttcgtcgagacctggcagtccttttaccggaagaagcttaaggaggtgtggaaacctgccgtgcggtctggcggatctggcggaggctccaccagccccaagaaaaagagaaaagtctaagctgccttctgcggggcttgccttctggccatgcccttcttctctcccttgcacctgtacctcttggtctttgaataaagcctgagtaggaaggctagcaaaaaaaaaaaaaaaaaaaaaaaaaaaaaaaaaaaaaaaaaaaaaaaaaaaaaaaaaaaaaaaaaaaaaaaaaaaaaaaa

SEQ ID NO: 9288 - RNA, 8787 nt, synthetic construct
  source 1..8787: mol_type = other RNA
aggaaataagagagaaaagaagagtaagaagaaatataagagccaccatggcccctaagaagaagcgtaaagtgagccggatgaaccacgaccaggagttcgacccccctaaggtgtaccctcccgtccccgccgagaagagaaagcccatccgggtcctgagcctgttcgatggcatcgccaccggtctgctggtgctgaaggacctgggcatccaggtggataggtacattgcctccgaggtgtgcgaggactccatcaccgtgggaatggtgcgtcatcagggcaagatcatgtacgtgggcgacgtgcggagcgtgacacagaagcatatccaggagtggggccctttcgacctggtgatcggcggcagcccttgcaatgacctgagcatcgtgaacccagcccggaagggcctgtacgagggaaccggcagactgttcttcgagttttacagactgctgcacgacgcccggcctaaggaaggcgacgaccggcccttcttttggctgttcgagaatgtggtggccatgggagtcagcgacaagcgggatattagccggttcctggagagcaaccccgtgatgatcgatgccaaggaagtgagcgccgcccaccgggccagatacttctggggcaatctgcctggcatgaacagacccctggccagcaccgtgaacgacaagctggagctgcaggagtgcctggagcacggccggatcgccaagttcagcaaggtgagaaccatcaccacccgaagcaacagcatcaaacaaggcaaggaccagcactttcctgtgttcatgaacgagaaggaggacatcctgtggtgtaccgagatggagagagtgttcgggttcccagtccactacacagatgtcagcaacatgtctagactggccagacagagactgctgggaagaagctggtccgtccctgtgatcagacacctgttcgcccctctgaaggagtacttcgcctgcgtgagcagcggcaacagcaacgccaacagccggggccccagcttctctagcggcctggtgccactgtccctgagagggagccacatgggccccatggagatctacaaaaccgtgagcgcctggaagcggcagcctgtgcgcgtgctgagcctgtttcggaatatcgataaagtcctgaaaagcctgggattcctggagagcggctctggctccggcggtggcaccctgaagtacgtggaggatgtgacaaacgtggtcagacgggatgtggagaagtggggccccttcgatctggtgtacggcagcacccaacccctgggcagctcttgtgaccggtgccctggctggtacatgtttcagttccaccggatcctgcagtacgccctgccgagacaggagtcccagcggccattcttttggattttcatggacaacttgctgctgaccgaggatgaccaggaaactaccactcggttcctgcagaccgaagccgtgaccctgcaggacgtgagaggccgggactaccagaacgccatgcgggtgtggtccaacatccctggactgaaaagcaagcacgcacctctgacccctaaagaagaggagtacctgcaggcccaggtgcggagcagaagcaagctggacgcccctaaggtggatctgctggtgaagaattgcctcctgcccctgagagagtacttcaagtatttcagccagaatagtctgcccctgggaggcagcggcggcggcagccagagcctggtgaccttcggcgacgtggccgtggacttcagccaggaggagtgggagtggctgaacagcgcccagaggaacctgtacaggagcgtgatgctggagaactacaggaacctggtgagcctgggcctgtgcgtgagcaagcccgacatgatcagcagcctggagcagaggaaggagccctggatggtgaagaggaagctgaccaggggcaggtgccccgacctgaagaccgtgggcggcccaagcagcggcgcccctcctcccagcggcggcaggcggcccaagcagcggcgcccctcctcccagcggcggcagcccagccggctccccaacctctaccgaggagggcacctctgagtccgccacccccgagagcggccctggcacctccaccgagcccagcgagggcagcgcacccggcagccctgccggcagccccacctccacagaggagggaaccagcaccgagcccagcgaaggcagcgccccaggcaccagcaccgagcctagtgagcaggagattaaacggatcaacaagatcagaagaagacttgtgaaagacagcaacaccaagaaggccggcaagacaggccccatgaaaaccctgctggttagagtgatgacacccgatctgagagagcggctggaaaacctgagaaagaagcctgaaaatatcccccagcccatcagcaatacatctagagccaacctgaataagctgctgaccgattacaccgaaatgaagaaggcgatcctgcatgtgtactgggaagagttccagaaggaccctgtgggcctgatgagccgggtggcccagcctgccagcaagaagatcgatcagaacaagctgaaacctgagatggacgagaagggcaacctgaccaccgccggctttgcctgctctcagtgtggccagcccctgttcgtgtacaagctggagcaggtgtctgagaagggcaaggcttacaccaactacttcggacggtgcaatgtggccgagcacgaaaagctgatcctgctggcccagctgaagcccgagaaggatagcgacgaagccgtgacatatagcctgggaaagtttgggcagagggccctggatttctacagcattcatgtgaccaaggagtccacccaccccgtgaagcccctggcccagatcgccggaaacagatacgcctccggacctgtgggaaaggccctgagcgacgcatgtatgggcacaatcgcctccttcctgtctaagtaccaggacatcatcatcgaacaccagaaggtggtgaagggcaaccagaagagactggagagcctgcgggagctggccggcaaggaaaacctggaataccctagcgtgaccctgccacctcagcctcacaccaaggagggcgttgatgcctacaacgaagtgatcgcccgggtgcgaatgtgggtgaacctgaacctgtggcagaagctgaagctaagcagagatgatgccaagcctctgctgagactgaagggattcccttcctttcctctggtcgagagacaggccaacgaagtggactggtgggacatggtgtgtaacgtgaagaagctgatcaacgagaaaaaggaggatggcaaggtgttttggcagaatctggctggctacaagagacaggaagccctgagaccatacctgagcagcgaggaagatcggaagaagggaaagaaattcgctcggtaccagctgggcgacctgctgctgcacctggaaaagaagcacggcgaggactggggaaaggtgtacgacgaggcctgggagcggattgacaagaaagtggaaggcctgagcaagcacatcaagctggaagaggaacggagaagcgaggacgcccagagcaaggccgccctgaccgactggctgcgggctaaggccagcttcgtgatcgagggcctgaaggaggccgacaaggacgagttctgcagatgcgagctgaagctgcagaagtggtacggggacctgcggggaaagcccttcgccatcgaagccgagaacagcatcctggacatcagcggcttcagcaagcagtacaactgtgccttcatctggcagaaggacggcgtgaagaagctgaacctgtacctgatcatcaactacttcaagggcggcaagctgcggttcaagaagatcaaacctgaagccttcgaagccaacagattctacaccgtgatcaacaaaaagagcggcgagatcgtgcccatggaggtgaacttcaacttcgacgaccccaacctgatcatcctgcctctggcctttggcaagagacagggcagagaattcatctggaacgacctgctgtccctggaaaccggcagcctgaagctggccaacggaagagtgatcgagaagacactgtacaacagaagaacccggcaggatgagcctgccctgttcgtggccctgaccttcgagcggcgggaggtcctggactcctccaatatcaaaccaatgaacctgatcggcgtggcaagaggcgaaaacatccccgccgtgatcgccctgaccgaccccgagggctgcccactgagccggtttaaggatagcctgggaaacccaacccacatcctgagaatcggcgagagctataaggagaagcagcggaccatccaggccaagaaggaggtggagcagcggagagccggcggctacagccggaagtacgccagcaaagccaagaatctggcagacgatatggtgagaaacaccgctagagatctgctgtactacgccgtgacccaggatgccatgctgatcttcgccaacctgagccggggcttcggccggcagggcaagcggaccttcatggccgagagacagtacacacggatggaggactggctgaccgccaagctggcctacgagggcctgagcaagacctacctgtccaagacactggcccagtacacctccaagacatgcagcaactgtgggtttaccatcaccagcgccgactacgacagggtgctggagaagctgaagaagacagcaacaggctggatgaccacaattaacggcaaggagctgaaggtggagggccagattacctactacaacagatacaagagacagaacgtagtcaaggacctgtccgtcgagctggatagactgagcgaagaatctgtgaacaacgacatctcctcctggacaaagggcagaagcggagaagctctgagcctcctgaagaaaagattctcccatagacccgtgcaggagaagttcgtgtgcctgaactgcggcttcgagacacacgcagccgagcaagccgccctgaacatcgccagatcctggctgttcctgcggagccaggagtacaagaaataccagacaaacaagacaaccggcaacaccgataagagagccttcgtcgagacctggcagtccttttaccggaagaagcttaaggaggtgtggaaacctgccgtgcggtctggcggatctggcggaggctccaccagccccaagaaaaagagaaaagtctaagctgccttctgcggggcttgccttctggccatgcccttcttctctcccttgcacctgtacctcttggtctttgaataaagcctgagtaggaaggctagcaaaaaaaaaaaaaaaaaaaaaaaaaaaaaaaaaaaaaaaaaaaaaaaaaaaaaaaaaaaaaaaaaaaaaaaaaaaaaaaagcccagccggctccccaacctctaccgaggagggcacctctgagtccgccacccccgagagcggccctggcacctccaccgagcccagcgagggcagcgcacccggcagccctgccggcagccccacctccacagaggagggaaccagcaccgagcccagcgaaggcagcgccccaggcaccagcaccgagcctagtgagcaggagattaaacggatcaacaagatcagaagaagacttgtgaaagacagcaacaccaagaaggccggcaagacaggccccatgaaaaccctgctggttagagtgatgacacccgatctgagagagcggctggaaaacctgagaaagaagcctgaaaatatcccccagcccatcagcaatacatctagagccaacctgaataagctgctgaccgattacaccgaaatgaagaaggcgatcctgcatgtgtactgggaagagttccagaaggaccctgtgggcctgatgagccgggtggcccagcctgccagcaagaagatcgatcagaacaagctgaaacctgagatggacgagaagggcaacctgaccaccgccggctttgcctgctctcagtgtggccagcccctgttcgtgtacaagctggagcaggtgtctgagaagggcaaggcttacaccaactacttcggacggtgcaatgtggccgagcacgaaaagctgatcctgctggcccagctgaagcccgagaaggatagcgacgaagccgtgacatatagcctgggaaagtttgggcagagggccctggatttctacagcattcatgtgaccaaggagtccacccaccccgtgaagcccctggcccagatcgccggaaacagatacgcctccggacctgtgggaaaggccctgagcgacgcatgtatgggcacaatcgcctccttcctgtctaagtaccaggacatcatcatcgaacaccagaaggtggtgaagggcaaccagaagagactggagagcctgcgggagctggccggcaaggaaaacctggaataccctagcgtgaccctgccacctcagcctcacaccaaggagggcgttgatgcctacaacgaagtgatcgcccgggtgcgaatgtgggtgaacctgaacctgtggcagaagctgaagctaagcagagatgatgccaagcctctgctgagactgaagggattcccttcctttcctctggtcgagagacaggccaacgaagtggactggtgggacatggtgtgtaacgtgaagaagctgatcaacgagaaaaaggaggatggcaaggtgttttggcagaatctggctggctacaagagacaggaagccctgagaccatacctgagcagcgaggaagatcggaagaagggaaagaaattcgctcggtaccagctgggcgacctgctgctgcacctggaaaagaagcacggcgaggactggggaaaggtgtacgacgaggcctgggagcggattgacaagaaagtggaaggcctgagcaagcacatcaagctggaagaggaacggagaagcgaggacgcccagagcaaggccgccctgaccgactggctgcgggctaaggccagcttcgtgatcgagggcctgaaggaggccgacaaggacgagttctgcagatgcgagctgaagctgcagaagtggtacggggacctgcggggaaagcccttcgccatcgaagccgagaacagcatcctggacatcagcggcttcagcaagcagtacaactgtgccttcatctggcagaaggacggcgtgaagaagctgaacctgtacctgatcatcaactacttcaagggcggcaagctgcggttcaagaagatcaaacctgaagccttcgaagccaacagattctacaccgtgatcaacaaaaagagcggcgagatcgtgcccatggaggtgaacttcaacttcgacgaccccaacctgatcatcctgcctctggcctttggcaagagacagggcagagaattcatctggaacgacctgctgtccctggaaaccggcagcctgaagctggccaacggaagagtgatcgagaagacactgtacaacagaagaacccggcaggatgagcctgccctgttcgtggccctgaccttcgagcggcgggaggtcctggactcctccaatatcaaaccaatgaacctgatcggcgtggcaagaggcgaaaacatccccgccgtgatcgccctgaccgaccccgagggctgcccactgagccggtttaaggatagcctgggaaacccaacccacatcctgagaatcggcgagagctataaggagaagcagcggaccatccaggccaagaaggaggtggagcagcggagagccggcggctacagccggaagtacgccagcaaagccaagaatctggcagacgatatggtgagaaacaccgctagagatctgctgtactacgccgtgacccaggatgccatgctgatcttcgccaacctgagccggggcttcggccggcagggcaagcggaccttcatggccgagagacagtacacacggatggaggactggctgaccgccaagctggcctacgagggcctgagcaagacctacctgtccaagacactggcccagtacacctccaagacatgcagcaactgtgggtttaccatcaccagcgccgactacgacagggtgctggagaagctgaagaagacagcaacaggctggatgaccacaattaacggcaaggagctgaaggtggagggccagattacctactacaacagatacaagagacagaacgtagtcaaggacctgtccgtcgagctggatagactgagcgaagaatctgtgaacaacgacatctcctcctggacaaagggcagaagcggagaagctctgagcctcctgaagaaaagattctcccatagacccgtgcaggagaagttcgtgtgcctgaactgcggcttcgagacacacgcagccgagcaagccgccctgaacatcgccagatcctggctgttcctgcggagccaggagtacaagaaataccagacaaacaagacaaccggcaacaccgataagagagccttcgtcgagacctggcagtccttttaccggaagaagcttaaggaggtgtggaaacctgccgtgcggtctggcggatctggcggaggctccaccagccccaagaaaaagagaaaagtctaagctgccttctgcggggcttgccttctggccatgcccttcttctctcccttgcacctgtacctcttggtctttgaataaagcctgagtaggaaggctagcaaaaaaaaaaaaaaaaaaaaaaaaaaaaaaaaaaaaaaaaaaaaaaaaaaaaaaaaaaaaaaaaaaaaaaaaaaaaaaaa

SEQ ID NO: 9289 - RNA, 8787 nt, synthetic construct
  source 1..8787: mol_type = other RNA
aggaaataagagagaaaagaagagtaagaagaaatataagagccaccatggcccctaagaagaagcgtaaagtgagccggatgaaccacgaccaggagttcgacccccctaaggtgtaccctcccgtccccgccgagaagagaaagcccatccgggtcctgagcctgttcgatggcatcgccaccggtctgctggtgctgaaggacctgggcatccaggtggataggtacattgcctccgaggtgtgcgaggactccatcaccgtgggaatggtgcgtcatcagggcaagatcatgtacgtgggcgacgtgcggagcgtgacacagaagcatatccaggagtggggccctttcgacctggtgatcggcggcagcccttgcaatgacctgagcatcgtgaacccagcccggaagggcctgtacgagggaaccggcagactgttcttcgagttttacagactgctgcacgacgcccggcctaaggaaggcgacgaccggcccttcttttggctgttcgagaatgtggtggccatgggagtcagcgacaagcgggatattagccggttcctggagagcaaccccgtgatgatcgatgccaaggaagtgagcgccgcccaccgggccagatacttctggggcaatctgcctggcatgaacagacccctggccagcaccgtgaacgacaagctggagctgcaggagtgcctggagcacggccggatcgccaagttcagcaaggtgagaaccatcaccacccgaagcaacagcatcaaacaaggcaaggaccagcactttcctgtgttcatgaacgagaaggaggacatcctgtggtgtaccgagatggagagagtgttcgggttcccagtccactacacagatgtcagcaacatgtctagactggccagacagagactgctgggaagaagctggtccgtccctgtgatcagacacctgttcgcccctctgaaggagtacttcgcctgcgtgagcagcggcaacagcaacgccaacagccggggccccagcttctctagcggcctggtgccactgtccctgagagggagccacatgggccccatggagatctacaaaaccgtgagcgcctggaagcggcagcctgtgcgcgtgctgagcctgtttcggaatatcgataaagtcctgaaaagcctgggattcctggagagcggctctggctccggcggtggcaccctgaagtacgtggaggatgtgacaaacgtggtcagacgggatgtggagaagtggggccccttcgatctggtgtacggcagcacccaacccctgggcagctcttgtgaccggtgccctggctggtacatgtttcagttccaccggatcctgcagtacgccctgccgagacaggagtcccagcggccattcttttggattttcatggacaacttgctgctgaccgaggatgaccaggaaactaccactcggttcctgcagaccgaagccgtgaccctgcaggacgtgagaggccgggactaccagaacgccatgcgggtgtggtccaacatccctggactgaaaagcaagcacgcacctctgacccctaaagaagaggagtacctgcaggcccaggtgcggagcagaagcaagctggacgcccctaaggtggatctgctggtgaagaattgcctcctgcccctgagagagtacttcaagtatttcagccagaatagtctgcccctgggaggcagcggcggcggcagccaggagcccgtgagcttcgccgacgtggccgtgtacttcagcagggaggagtgggccctgctggaccccgcccagagggtgctgtacagggacgtgatgctggagacctacgagtgcatcgccagcctggcctgccccgcccccaagcccgccgtgatcagcatgctggagggcgaggaggacccctggatccccgaggacatggccggcgacctgggccccggcgagcccgtgagggagggcggcccaagcagcggcgcccctcctcccagcggcggcaggcggcccaagcagcggcgcccctcctcccagcggcggcagcccagccggctccccaacctctaccgaggagggcacctctgagtccgccacccccgagagcggccctggcacctccaccgagcccagcgagggcagcgcacccggcagccctgccggcagccccacctccacagaggagggaaccagcaccgagcccagcgaaggcagcgccccaggcaccagcaccgagcctagtgagcaggagattaaacggatcaacaagatcagaagaagacttgtgaaagacagcaacaccaagaaggccggcaagacaggccccatgaaaaccctgctggttagagtgatgacacccgatctgagagagcggctggaaaacctgagaaagaagcctgaaaatatcccccagcccatcagcaatacatctagagccaacctgaataagctgctgaccgattacaccgaaatgaagaaggcgatcctgcatgtgtactgggaagagttccagaaggaccctgtgggcctgatgagccgggtggcccagcctgccagcaagaagatcgatcagaacaagctgaaacctgagatggacgagaagggcaacctgaccaccgccggctttgcctgctctcagtgtggccagcccctgttcgtgtacaagctggagcaggtgtctgagaagggcaaggcttacaccaactacttcggacggtgcaatgtggccgagcacgaaaagctgatcctgctggcccagctgaagcccgagaaggatagcgacgaagccgtgacatatagcctgggaaagtttgggcagagggccctggatttctacagcattcatgtgaccaaggagtccacccaccccgtgaagcccctggcccagatcgccggaaacagatacgcctccggacctgtgggaaaggccctgagcgacgcatgtatgggcacaatcgcctccttcctgtctaagtaccaggacatcatcatcgaacaccagaaggtggtgaagggcaaccagaagagactggagagcctgcgggagctggccggcaaggaaaacctggaataccctagcgtgaccctgccacctcagcctcacaccaaggagggcgttgatgcctacaacgaagtgatcgcccgggtgcgaatgtgggtgaacctgaacctgtggcagaagctgaagctaagcagagatgatgccaagcctctgctgagactgaagggattcccttcctttcctctggtcgagagacaggccaacgaagtggactggtgggacatggtgtgtaacgtgaagaagctgatcaacgagaaaaaggaggatggcaaggtgttttggcagaatctggctggctacaagagacaggaagccctgagaccatacctgagcagcgaggaagatcggaagaagggaaagaaattcgctcggtaccagctgggcgacctgctgctgcacctggaaaagaagcacggcgaggactggggaaaggtgtacgacgaggcctgggagcggattgacaagaaagtggaaggcctgagcaagcacatcaagctggaagaggaacggagaagcgaggacgcccagagcaaggccgccctgaccgactggctgcgggctaaggccagcttcgtgatcgagggcctgaaggaggccgacaaggacgagttctgcagatgcgagctgaagctgcagaagtggtacggggacctgcggggaaagcccttcgccatcgaagccgagaacagcatcctggacatcagcggcttcagcaagcagtacaactgtgccttcatctggcagaaggacggcgtgaagaagctgaacctgtacctgatcatcaactacttcaagggcggcaagctgcggttcaagaagatcaaacctgaagccttcgaagccaacagattctacaccgtgatcaacaaaaagagcggcgagatcgtgcccatggaggtgaacttcaacttcgacgaccccaacctgatcatcctgcctctggcctttggcaagagacagggcagagaattcatctggaacgacctgctgtccctggaaaccggcagcctgaagctggccaacggaagagtgatcgagaagacactgtacaacagaagaacccggcaggatgagcctgccctgttcgtggccctgaccttcgagcggcgggaggtcctggactcctccaatatcaaaccaatgaacctgatcggcgtggcaagaggcgaaaacatccccgccgtgatcgccctgaccgaccccgagggctgcccactgagccggtttaaggatagcctgggaaacccaacccacatcctgagaatcggcgagagctataaggagaagcagcggaccatccaggccaagaaggaggtggagcagcggagagccggcggctacagccggaagtacgccagcaaagccaagaatctggcagacgatatggtgagaaacaccgctagagatctgctgtactacgccgtgacccaggatgccatgctgatcttcgccaacctgagccggggcttcggccggcagggcaagcggaccttcatggccgagagacagtacacacggatggaggactggctgaccgccaagctggcctacgagggcctgagcaagacctacctgtccaagacactggcccagtacacctccaagacatgcagcaactgtgggtttaccatcaccagcgccgactacgacagggtgctggagaagctgaagaagacagcaacaggctggatgaccacaattaacggcaaggagctgaaggtggagggccagattacctactacaacagatacaagagacagaacgtagtcaaggacctgtccgtcgagctggatagactgagcgaagaatctgtgaacaacgacatctcctcctggacaaagggcagaagcggagaagctctgagcctcctgaagaaaagattctcccatagacccgtgcaggagaagttcgtgtgcctgaactgcggcttcgagacacacgcagccgagcaagccgccctgaacatcgccagatcctggctgttcctgcggagccaggagtacaagaaataccagacaaacaagacaaccggcaacaccgataagagagccttcgtcgagacctggcagtccttttaccggaagaagcttaaggaggtgtggaaacctgccgtgcggtctggcggatctggcggaggctccaccagccccaagaaaaagagaaaagtctaagctgccttctgcggggcttgccttctggccatgcccttcttctctcccttgcacctgtacctcttggtctttgaataaagcctgagtaggaaggctagcaaaaaaaaaaaaaaaaaaaaaaaaaaaaaaaaaaaaaaaaaaaaaaaaaaaaaaaaaaaaaaaaaaaaaaaaaaaaaaaagcccagccggctccccaacctctaccgaggagggcacctctgagtccgccacccccgagagcggccctggcacctccaccgagcccagcgagggcagcgcacccggcagccctgccggcagccccacctccacagaggagggaaccagcaccgagcccagcgaaggcagcgccccaggcaccagcaccgagcctagtgagcaggagattaaacggatcaacaagatcagaagaagacttgtgaaagacagcaacaccaagaaggccggcaagacaggccccatgaaaaccctgctggttagagtgatgacacccgatctgagagagcggctggaaaacctgagaaagaagcctgaaaatatcccccagcccatcagcaatacatctagagccaacctgaataagctgctgaccgattacaccgaaatgaagaaggcgatcctgcatgtgtactgggaagagttccagaaggaccctgtgggcctgatgagccgggtggcccagcctgccagcaagaagatcgatcagaacaagctgaaacctgagatggacgagaagggcaacctgaccaccgccggctttgcctgctctcagtgtggccagcccctgttcgtgtacaagctggagcaggtgtctgagaagggcaaggcttacaccaactacttcggacggtgcaatgtggccgagcacgaaaagctgatcctgctggcccagctgaagcccgagaaggatagcgacgaagccgtgacatatagcctgggaaagtttgggcagagggccctggatttctacagcattcatgtgaccaaggagtccacccaccccgtgaagcccctggcccagatcgccggaaacagatacgcctccggacctgtgggaaaggccctgagcgacgcatgtatgggcacaatcgcctccttcctgtctaagtaccaggacatcatcatcgaacaccagaaggtggtgaagggcaaccagaagagactggagagcctgcgggagctggccggcaaggaaaacctggaataccctagcgtgaccctgccacctcagcctcacaccaaggagggcgttgatgcctacaacgaagtgatcgcccgggtgcgaatgtgggtgaacctgaacctgtggcagaagctgaagctaagcagagatgatgccaagcctctgctgagactgaagggattcccttcctttcctctggtcgagagacaggccaacgaagtggactggtgggacatggtgtgtaacgtgaagaagctgatcaacgagaaaaaggaggatggcaaggtgttttggcagaatctggctggctacaagagacaggaagccctgagaccatacctgagcagcgaggaagatcggaagaagggaaagaaattcgctcggtaccagctgggcgacctgctgctgcacctggaaaagaagcacggcgaggactggggaaaggtgtacgacgaggcctgggagcggattgacaagaaagtggaaggcctgagcaagcacatcaagctggaagaggaacggagaagcgaggacgcccagagcaaggccgccctgaccgactggctgcgggctaaggccagcttcgtgatcgagggcctgaaggaggccgacaaggacgagttctgcagatgcgagctgaagctgcagaagtggtacggggacctgcggggaaagcccttcgccatcgaagccgagaacagcatcctggacatcagcggcttcagcaagcagtacaactgtgccttcatctggcagaaggacggcgtgaagaagctgaacctgtacctgatcatcaactacttcaagggcggcaagctgcggttcaagaagatcaaacctgaagccttcgaagccaacagattctacaccgtgatcaacaaaaagagcggcgagatcgtgcccatggaggtgaacttcaacttcgacgaccccaacctgatcatcctgcctctggcctttggcaagagacagggcagagaattcatctggaacgacctgctgtccctggaaaccggcagcctgaagctggccaacggaagagtgatcgagaagacactgtacaacagaagaacccggcaggatgagcctgccctgttcgtggccctgaccttcgagcggcgggaggtcctggactcctccaatatcaaaccaatgaacctgatcggcgtggcaagaggcgaaaacatccccgccgtgatcgccctgaccgaccccgagggctgcccactgagccggtttaaggatagcctgggaaacccaacccacatcctgagaatcggcgagagctataaggagaagcagcggaccatccaggccaagaaggaggtggagcagcggagagccggcggctacagccggaagtacgccagcaaagccaagaatctggcagacgatatggtgagaaacaccgctagagatctgctgtactacgccgtgacccaggatgccatgctgatcttcgccaacctgagccggggcttcggccggcagggcaagcggaccttcatggccgagagacagtacacacggatggaggactggctgaccgccaagctggcctacgagggcctgagcaagacctacctgtccaagacactggcccagtacacctccaagacatgcagcaactgtgggtttaccatcaccagcgccgactacgacagggtgctggagaagctgaagaagacagcaacaggctggatgaccacaattaacggcaaggagctgaaggtggagggccagattacctactacaacagatacaagagacagaacgtagtcaaggacctgtccgtcgagctggatagactgagcgaagaatctgtgaacaacgacatctcctcctggacaaagggcagaagcggagaagctctgagcctcctgaagaaaagattctcccatagacccgtgcaggagaagttcgtgtgcctgaactgcggcttcgagacacacgcagccgagcaagccgccctgaacatcgccagatcctggctgttcctgcggagccaggagtacaagaaataccagacaaacaagacaaccggcaacaccgataagagagccttcgtcgagacctggcagtccttttaccggaagaagcttaaggaggtgtggaaacctgccgtgcggtctggcggatctggcggaggctccaccagccccaagaaaaagagaaaagtctaagctgccttctgcggggcttgccttctggccatgcccttcttctctcccttgcacctgtacctcttggtctttgaataaagcctgagtaggaaggctagcaaaaaaaaaaaaaaaaaaaaaaaaaaaaaaaaaaaaaaaaaaaaaaaaaaaaaaaaaaaaaaaaaaaaaaaaaaaaaaaa

SEQ ID NO: 9290 - RNA, 8787 nt, synthetic construct
  source 1..8787: mol_type = other RNA
aggaaataagagagaaaagaagagtaagaagaaatataagagccaccatggcccctaagaagaagcgtaaagtgagccggatgaaccacgaccaggagttcgacccccctaaggtgtaccctcccgtccccgccgagaagagaaagcccatccgggtcctgagcctgttcgatggcatcgccaccggtctgctggtgctgaaggacctgggcatccaggtggataggtacattgcctccgaggtgtgcgaggactccatcaccgtgggaatggtgcgtcatcagggcaagatcatgtacgtgggcgacgtgcggagcgtgacacagaagcatatccaggagtggggccctttcgacctggtgatcggcggcagcccttgcaatgacctgagcatcgtgaacccagcccggaagggcctgtacgagggaaccggcagactgttcttcgagttttacagactgctgcacgacgcccggcctaaggaaggcgacgaccggcccttcttttggctgttcgagaatgtggtggccatgggagtcagcgacaagcgggatattagccggttcctggagagcaaccccgtgatgatcgatgccaaggaagtgagcgccgcccaccgggccagatacttctggggcaatctgcctggcatgaacagacccctggccagcaccgtgaacgacaagctggagctgcaggagtgcctggagcacggccggatcgccaagttcagcaaggtgagaaccatcaccacccgaagcaacagcatcaaacaaggcaaggaccagcactttcctgtgttcatgaacgagaaggaggacatcctgtggtgtaccgagatggagagagtgttcgggttcccagtccactacacagatgtcagcaacatgtctagactggccagacagagactgctgggaagaagctggtccgtccctgtgatcagacacctgttcgcccctctgaaggagtacttcgcctgcgtgagcagcggcaacagcaacgccaacagccggggccccagcttctctagcggcctggtgccactgtccctgagagggagccacatgggccccatggagatctacaaaaccgtgagcgcctggaagcggcagcctgtgcgcgtgctgagcctgtttcggaatatcgataaagtcctgaaaagcctgggattcctggagagcggctctggctccggcggtggcaccctgaagtacgtggaggatgtgacaaacgtggtcagacgggatgtggagaagtggggccccttcgatctggtgtacggcagcacccaacccctgggcagctcttgtgaccggtgccctggctggtacatgtttcagttccaccggatcctgcagtacgccctgccgagacaggagtcccagcggccattcttttggattttcatggacaacttgctgctgaccgaggatgaccaggaaactaccactcggttcctgcagaccgaagccgtgaccctgcaggacgtgagaggccgggactaccagaacgccatgcgggtgtggtccaacatccctggactgaaaagcaagcacgcacctctgacccctaaagaagaggagtacctgcaggcccaggtgcggagcagaagcaagctggacgcccctaaggtggatctgctggtgaagaattgcctcctgcccctgagagagtacttcaagtatttcagccagaatagtctgcccctgggaggcagcggcggcggcttccagggcagcgtgaccttcagggacgtggccatcgacttcagccaggaggagtgggagtggctgcagcccgcccagagggacctgtacaggcacgtgatgctggagaactacggccacctggtgagcctgggcctggacatcagcaagccctacgtggtgagcctgctggagcagggcagggagccctggctggtgaagggcgacgtgaggagggaccccttcagcgtgagcgagagcaacggcggcccaagcagcggcgcccctcctcccagcggcggcaggcggcccaagcagcggcgcccctcctcccagcggcggcagcccagccggctccccaacctctaccgaggagggcacctctgagtccgccacccccgagagcggccctggcacctccaccgagcccagcgagggcagcgcacccggcagccctgccggcagccccacctccacagaggagggaaccagcaccgagcccagcgaaggcagcgccccaggcaccagcaccgagcctagtgagcaggagattaaacggatcaacaagatcagaagaagacttgtgaaagacagcaacaccaagaaggccggcaagacaggccccatgaaaaccctgctggttagagtgatgacacccgatctgagagagcggctggaaaacctgagaaagaagcctgaaaatatcccccagcccatcagcaatacatctagagccaacctgaataagctgctgaccgattacaccgaaatgaagaaggcgatcctgcatgtgtactgggaagagttccagaaggaccctgtgggcctgatgagccgggtggcccagcctgccagcaagaagatcgatcagaacaagctgaaacctgagatggacgagaagggcaacctgaccaccgccggctttgcctgctctcagtgtggccagcccctgttcgtgtacaagctggagcaggtgtctgagaagggcaaggcttacaccaactacttcggacggtgcaatgtggccgagcacgaaaagctgatcctgctggcccagctgaagcccgagaaggatagcgacgaagccgtgacatatagcctgggaaagtttgggcagagggccctggatttctacagcattcatgtgaccaaggagtccacccaccccgtgaagcccctggcccagatcgccggaaacagatacgcctccggacctgtgggaaaggccctgagcgacgcatgtatgggcacaatcgcctccttcctgtctaagtaccaggacatcatcatcgaacaccagaaggtggtgaagggcaaccagaagagactggagagcctgcgggagctggccggcaaggaaaacctggaataccctagcgtgaccctgccacctcagcctcacaccaaggagggcgttgatgcctacaacgaagtgatcgcccgggtgcgaatgtgggtgaacctgaacctgtggcagaagctgaagctaagcagagatgatgccaagcctctgctgagactgaagggattcccttcctttcctctggtcgagagacaggccaacgaagtggactggtgggacatggtgtgtaacgtgaagaagctgatcaacgagaaaaaggaggatggcaaggtgttttggcagaatctggctggctacaagagacaggaagccctgagaccatacctgagcagcgaggaagatcggaagaagggaaagaaattcgctcggtaccagctgggcgacctgctgctgcacctggaaaagaagcacggcgaggactggggaaaggtgtacgacgaggcctgggagcggattgacaagaaagtggaaggcctgagcaagcacatcaagctggaagaggaacggagaagcgaggacgcccagagcaaggccgccctgaccgactggctgcgggctaaggccagcttcgtgatcgagggcctgaaggaggccgacaaggacgagttctgcagatgcgagctgaagctgcagaagtggtacggggacctgcggggaaagcccttcgccatcgaagccgagaacagcatcctggacatcagcggcttcagcaagcagtacaactgtgccttcatctggcagaaggacggcgtgaagaagctgaacctgtacctgatcatcaactacttcaagggcggcaagctgcggttcaagaagatcaaacctgaagccttcgaagccaacagattctacaccgtgatcaacaaaaagagcggcgagatcgtgcccatggaggtgaacttcaacttcgacgaccccaacctgatcatcctgcctctggcctttggcaagagacagggcagagaattcatctggaacgacctgctgtccctggaaaccggcagcctgaagctggccaacggaagagtgatcgagaagacactgtacaacagaagaacccggcaggatgagcctgccctgttcgtggccctgaccttcgagcggcgggaggtcctggactcctccaatatcaaaccaatgaacctgatcggcgtggcaagaggcgaaaacatccccgccgtgatcgccctgaccgaccccgagggctgcccactgagccggtttaaggatagcctgggaaacccaacccacatcctgagaatcggcgagagctataaggagaagcagcggaccatccaggccaagaaggaggtggagcagcggagagccggcggctacagccggaagtacgccagcaaagccaagaatctggcagacgatatggtgagaaacaccgctagagatctgctgtactacgccgtgacccaggatgccatgctgatcttcgccaacctgagccggggcttcggccggcagggcaagcggaccttcatggccgagagacagtacacacggatggaggactggctgaccgccaagctggcctacgagggcctgagcaagacctacctgtccaagacactggcccagtacacctccaagacatgcagcaactgtgggtttaccatcaccagcgccgactacgacagggtgctggagaagctgaagaagacagcaacaggctggatgaccacaattaacggcaaggagctgaaggtggagggccagattacctactacaacagatacaagagacagaacgtagtcaaggacctgtccgtcgagctggatagactgagcgaagaatctgtgaacaacgacatctcctcctggacaaagggcagaagcggagaagctctgagcctcctgaagaaaagattctcccatagacccgtgcaggagaagttcgtgtgcctgaactgcggcttcgagacacacgcagccgagcaagccgccctgaacatcgccagatcctggctgttcctgcggagccaggagtacaagaaataccagacaaacaagacaaccggcaacaccgataagagagccttcgtcgagacctggcagtccttttaccggaagaagcttaaggaggtgtggaaacctgccgtgcggtctggcggatctggcggaggctccaccagccccaagaaaaagagaaaagtctaagctgccttctgcggggcttgccttctggccatgcccttcttctctcccttgcacctgtacctcttggtctttgaataaagcctgagtaggaaggctagcaaaaaaaaaaaaaaaaaaaaaaaaaaaaaaaaaaaaaaaaaaaaaaaaaaaaaaaaaaaaaaaaaaaaaaaaaaaaaaaagcccagccggctccccaacctctaccgaggagggcacctctgagtccgccacccccgagagcggccctggcacctccaccgagcccagcgagggcagcgcacccggcagccctgccggcagccccacctccacagaggagggaaccagcaccgagcccagcgaaggcagcgccccaggcaccagcaccgagcctagtgagcaggagattaaacggatcaacaagatcagaagaagacttgtgaaagacagcaacaccaagaaggccggcaagacaggccccatgaaaaccctgctggttagagtgatgacacccgatctgagagagcggctggaaaacctgagaaagaagcctgaaaatatcccccagcccatcagcaatacatctagagccaacctgaataagctgctgaccgattacaccgaaatgaagaaggcgatcctgcatgtgtactgggaagagttccagaaggaccctgtgggcctgatgagccgggtggcccagcctgccagcaagaagatcgatcagaacaagctgaaacctgagatggacgagaagggcaacctgaccaccgccggctttgcctgctctcagtgtggccagcccctgttcgtgtacaagctggagcaggtgtctgagaagggcaaggcttacaccaactacttcggacggtgcaatgtggccgagcacgaaaagctgatcctgctggcccagctgaagcccgagaaggatagcgacgaagccgtgacatatagcctgggaaagtttgggcagagggccctggatttctacagcattcatgtgaccaaggagtccacccaccccgtgaagcccctggcccagatcgccggaaacagatacgcctccggacctgtgggaaaggccctgagcgacgcatgtatgggcacaatcgcctccttcctgtctaagtaccaggacatcatcatcgaacaccagaaggtggtgaagggcaaccagaagagactggagagcctgcgggagctggccggcaaggaaaacctggaataccctagcgtgaccctgccacctcagcctcacaccaaggagggcgttgatgcctacaacgaagtgatcgcccgggtgcgaatgtgggtgaacctgaacctgtggcagaagctgaagctaagcagagatgatgccaagcctctgctgagactgaagggattcccttcctttcctctggtcgagagacaggccaacgaagtggactggtgggacatggtgtgtaacgtgaagaagctgatcaacgagaaaaaggaggatggcaaggtgttttggcagaatctggctggctacaagagacaggaagccctgagaccatacctgagcagcgaggaagatcggaagaagggaaagaaattcgctcggtaccagctgggcgacctgctgctgcacctggaaaagaagcacggcgaggactggggaaaggtgtacgacgaggcctgggagcggattgacaagaaagtggaaggcctgagcaagcacatcaagctggaagaggaacggagaagcgaggacgcccagagcaaggccgccctgaccgactggctgcgggctaaggccagcttcgtgatcgagggcctgaaggaggccgacaaggacgagttctgcagatgcgagctgaagctgcagaagtggtacggggacctgcggggaaagcccttcgccatcgaagccgagaacagcatcctggacatcagcggcttcagcaagcagtacaactgtgccttcatctggcagaaggacggcgtgaagaagctgaacctgtacctgatcatcaactacttcaagggcggcaagctgcggttcaagaagatcaaacctgaagccttcgaagccaacagattctacaccgtgatcaacaaaaagagcggcgagatcgtgcccatggaggtgaacttcaacttcgacgaccccaacctgatcatcctgcctctggcctttggcaagagacagggcagagaattcatctggaacgacctgctgtccctggaaaccggcagcctgaagctggccaacggaagagtgatcgagaagacactgtacaacagaagaacccggcaggatgagcctgccctgttcgtggccctgaccttcgagcggcgggaggtcctggactcctccaatatcaaaccaatgaacctgatcggcgtggcaagaggcgaaaacatccccgccgtgatcgccctgaccgaccccgagggctgcccactgagccggtttaaggatagcctgggaaacccaacccacatcctgagaatcggcgagagctataaggagaagcagcggaccatccaggccaagaaggaggtggagcagcggagagccggcggctacagccggaagtacgccagcaaagccaagaatctggcagacgatatggtgagaaacaccgctagagatctgctgtactacgccgtgacccaggatgccatgctgatcttcgccaacctgagccggggcttcggccggcagggcaagcggaccttcatggccgagagacagtacacacggatggaggactggctgaccgccaagctggcctacgagggcctgagcaagacctacctgtccaagacactggcccagtacacctccaagacatgcagcaactgtgggtttaccatcaccagcgccgactacgacagggtgctggagaagctgaagaagacagcaacaggctggatgaccacaattaacggcaaggagctgaaggtggagggccagattacctactacaacagatacaagagacagaacgtagtcaaggacctgtccgtcgagctggatagactgagcgaagaatctgtgaacaacgacatctcctcctggacaaagggcagaagcggagaagctctgagcctcctgaagaaaagattctcccatagacccgtgcaggagaagttcgtgtgcctgaactgcggcttcgagacacacgcagccgagcaagccgccctgaacatcgccagatcctggctgttcctgcggagccaggagtacaagaaataccagacaaacaagacaaccggcaacaccgataagagagccttcgtcgagacctggcagtccttttaccggaagaagcttaaggaggtgtggaaacctgccgtgcggtctggcggatctggcggaggctccaccagccccaagaaaaagagaaaagtctaagctgccttctgcggggcttgccttctggccatgcccttcttctctcccttgcacctgtacctcttggtctttgaataaagcctgagtaggaaggctagcaaaaaaaaaaaaaaaaaaaaaaaaaaaaaaaaaaaaaaaaaaaaaaaaaaaaaaaaaaaaaaaaaaaaaaaaaaaaaaaa

SEQ ID NO: 9291 - RNA, 8787 nt, synthetic construct
  source 1..8787: mol_type = other RNA
aggaaataagagagaaaagaagagtaagaagaaatataagagccaccatggcccctaagaagaagcgtaaagtgagccggatgaaccacgaccaggagttcgacccccctaaggtgtaccctcccgtccccgccgagaagagaaagcccatccgggtcctgagcctgttcgatggcatcgccaccggtctgctggtgctgaaggacctgggcatccaggtggataggtacattgcctccgaggtgtgcgaggactccatcaccgtgggaatggtgcgtcatcagggcaagatcatgtacgtgggcgacgtgcggagcgtgacacagaagcatatccaggagtggggccctttcgacctggtgatcggcggcagcccttgcaatgacctgagcatcgtgaacccagcccggaagggcctgtacgagggaaccggcagactgttcttcgagttttacagactgctgcacgacgcccggcctaaggaaggcgacgaccggcccttcttttggctgttcgagaatgtggtggccatgggagtcagcgacaagcgggatattagccggttcctggagagcaaccccgtgatgatcgatgccaaggaagtgagcgccgcccaccgggccagatacttctggggcaatctgcctggcatgaacagacccctggccagcaccgtgaacgacaagctggagctgcaggagtgcctggagcacggccggatcgccaagttcagcaaggtgagaaccatcaccacccgaagcaacagcatcaaacaaggcaaggaccagcactttcctgtgttcatgaacgagaaggaggacatcctgtggtgtaccgagatggagagagtgttcgggttcccagtccactacacagatgtcagcaacatgtctagactggccagacagagactgctgggaagaagctggtccgtccctgtgatcagacacctgttcgcccctctgaaggagtacttcgcctgcgtgagcagcggcaacagcaacgccaacagccggggccccagcttctctagcggcctggtgccactgtccctgagagggagccacatgggccccatggagatctacaaaaccgtgagcgcctggaagcggcagcctgtgcgcgtgctgagcctgtttcggaatatcgataaagtcctgaaaagcctgggattcctggagagcggctctggctccggcggtggcaccctgaagtacgtggaggatgtgacaaacgtggtcagacgggatgtggagaagtggggccccttcgatctggtgtacggcagcacccaacccctgggcagctcttgtgaccggtgccctggctggtacatgtttcagttccaccggatcctgcagtacgccctgccgagacaggagtcccagcggccattcttttggattttcatggacaacttgctgctgaccgaggatgaccaggaaactaccactcggttcctgcagaccgaagccgtgaccctgcaggacgtgagaggccgggactaccagaacgccatgcgggtgtggtccaacatccctggactgaaaagcaagcacgcacctctgacccctaaagaagaggagtacctgcaggcccaggtgcggagcagaagcaagctggacgcccctaaggtggatctgctggtgaagaattgcctcctgcccctgagagagtacttcaagtatttcagccagaatagtctgcccctgggaggcagcggcggcggcagccagggcctggtgaccttcggcgacgtggccgtggtgttcagccaggaggagtgggagtggctgagcagcgagcagaggagcctgtactggagggtgatgctggacaactacaggaacctggccagcctgggcctgtgcgccagcaagcccgacatgatcgccctgctggagcagggcaaggacccctgcgtgctgaagaggaagaccgccaggggcctgaggcccgacctggaggccgtgggcggcccaagcagcggcgcccctcctcccagcggcggcaggcggcccaagcagcggcgcccctcctcccagcggcggcagcccagccggctccccaacctctaccgaggagggcacctctgagtccgccacccccgagagcggccctggcacctccaccgagcccagcgagggcagcgcacccggcagccctgccggcagccccacctccacagaggagggaaccagcaccgagcccagcgaaggcagcgccccaggcaccagcaccgagcctagtgagcaggagattaaacggatcaacaagatcagaagaagacttgtgaaagacagcaacaccaagaaggccggcaagacaggccccatgaaaaccctgctggttagagtgatgacacccgatctgagagagcggctggaaaacctgagaaagaagcctgaaaatatcccccagcccatcagcaatacatctagagccaacctgaataagctgctgaccgattacaccgaaatgaagaaggcgatcctgcatgtgtactgggaagagttccagaaggaccctgtgggcctgatgagccgggtggcccagcctgccagcaagaagatcgatcagaacaagctgaaacctgagatggacgagaagggcaacctgaccaccgccggctttgcctgctctcagtgtggccagcccctgttcgtgtacaagctggagcaggtgtctgagaagggcaaggcttacaccaactacttcggacggtgcaatgtggccgagcacgaaaagctgatcctgctggcccagctgaagcccgagaaggatagcgacgaagccgtgacatatagcctgggaaagtttgggcagagggccctggatttctacagcattcatgtgaccaaggagtccacccaccccgtgaagcccctggcccagatcgccggaaacagatacgcctccggacctgtgggaaaggccctgagcgacgcatgtatgggcacaatcgcctccttcctgtctaagtaccaggacatcatcatcgaacaccagaaggtggtgaagggcaaccagaagagactggagagcctgcgggagctggccggcaaggaaaacctggaataccctagcgtgaccctgccacctcagcctcacaccaaggagggcgttgatgcctacaacgaagtgatcgcccgggtgcgaatgtgggtgaacctgaacctgtggcagaagctgaagctaagcagagatgatgccaagcctctgctgagactgaagggattcccttcctttcctctggtcgagagacaggccaacgaagtggactggtgggacatggtgtgtaacgtgaagaagctgatcaacgagaaaaaggaggatggcaaggtgttttggcagaatctggctggctacaagagacaggaagccctgagaccatacctgagcagcgaggaagatcggaagaagggaaagaaattcgctcggtaccagctgggcgacctgctgctgcacctggaaaagaagcacggcgaggactggggaaaggtgtacgacgaggcctgggagcggattgacaagaaagtggaaggcctgagcaagcacatcaagctggaagaggaacggagaagcgaggacgcccagagcaaggccgccctgaccgactggctgcgggctaaggccagcttcgtgatcgagggcctgaaggaggccgacaaggacgagttctgcagatgcgagctgaagctgcagaagtggtacggggacctgcggggaaagcccttcgccatcgaagccgagaacagcatcctggacatcagcggcttcagcaagcagtacaactgtgccttcatctggcagaaggacggcgtgaagaagctgaacctgtacctgatcatcaactacttcaagggcggcaagctgcggttcaagaagatcaaacctgaagccttcgaagccaacagattctacaccgtgatcaacaaaaagagcggcgagatcgtgcccatggaggtgaacttcaacttcgacgaccccaacctgatcatcctgcctctggcctttggcaagagacagggcagagaattcatctggaacgacctgctgtccctggaaaccggcagcctgaagctggccaacggaagagtgatcgagaagacactgtacaacagaagaacccggcaggatgagcctgccctgttcgtggccctgaccttcgagcggcgggaggtcctggactcctccaatatcaaaccaatgaacctgatcggcgtggcaagaggcgaaaacatccccgccgtgatcgccctgaccgaccccgagggctgcccactgagccggtttaaggatagcctgggaaacccaacccacatcctgagaatcggcgagagctataaggagaagcagcggaccatccaggccaagaaggaggtggagcagcggagagccggcggctacagccggaagtacgccagcaaagccaagaatctggcagacgatatggtgagaaacaccgctagagatctgctgtactacgccgtgacccaggatgccatgctgatcttcgccaacctgagccggggcttcggccggcagggcaagcggaccttcatggccgagagacagtacacacggatggaggactggctgaccgccaagctggcctacgagggcctgagcaagacctacctgtccaagacactggcccagtacacctccaagacatgcagcaactgtgggtttaccatcaccagcgccgactacgacagggtgctggagaagctgaagaagacagcaacaggctggatgaccacaattaacggcaaggagctgaaggtggagggccagattacctactacaacagatacaagagacagaacgtagtcaaggacctgtccgtcgagctggatagactgagcgaagaatctgtgaacaacgacatctcctcctggacaaagggcagaagcggagaagctctgagcctcctgaagaaaagattctcccatagacccgtgcaggagaagttcgtgtgcctgaactgcggcttcgagacacacgcagccgagcaagccgccctgaacatcgccagatcctggctgttcctgcggagccaggagtacaagaaataccagacaaacaagacaaccggcaacaccgataagagagccttcgtcgagacctggcagtccttttaccggaagaagcttaaggaggtgtggaaacctgccgtgcggtctggcggatctggcggaggctccaccagccccaagaaaaagagaaaagtctaagctgccttctgcggggcttgccttctggccatgcccttcttctctcccttgcacctgtacctcttggtctttgaataaagcctgagtaggaaggctagcaaaaaaaaaaaaaaaaaaaaaaaaaaaaaaaaaaaaaaaaaaaaaaaaaaaaaaaaaaaaaaaaaaaaaaaaaaaaaaaagcccagccggctccccaacctctaccgaggagggcacctctgagtccgccacccccgagagcggccctggcacctccaccgagcccagcgagggcagcgcacccggcagccctgccggcagccccacctccacagaggagggaaccagcaccgagcccagcgaaggcagcgccccaggcaccagcaccgagcctagtgagcaggagattaaacggatcaacaagatcagaagaagacttgtgaaagacagcaacaccaagaaggccggcaagacaggccccatgaaaaccctgctggttagagtgatgacacccgatctgagagagcggctggaaaacctgagaaagaagcctgaaaatatcccccagcccatcagcaatacatctagagccaacctgaataagctgctgaccgattacaccgaaatgaagaaggcgatcctgcatgtgtactgggaagagttccagaaggaccctgtgggcctgatgagccgggtggcccagcctgccagcaagaagatcgatcagaacaagctgaaacctgagatggacgagaagggcaacctgaccaccgccggctttgcctgctctcagtgtggccagcccctgttcgtgtacaagctggagcaggtgtctgagaagggcaaggcttacaccaactacttcggacggtgcaatgtggccgagcacgaaaagctgatcctgctggcccagctgaagcccgagaaggatagcgacgaagccgtgacatatagcctgggaaagtttgggcagagggccctggatttctacagcattcatgtgaccaaggagtccacccaccccgtgaagcccctggcccagatcgccggaaacagatacgcctccggacctgtgggaaaggccctgagcgacgcatgtatgggcacaatcgcctccttcctgtctaagtaccaggacatcatcatcgaacaccagaaggtggtgaagggcaaccagaagagactggagagcctgcgggagctggccggcaaggaaaacctggaataccctagcgtgaccctgccacctcagcctcacaccaaggagggcgttgatgcctacaacgaagtgatcgcccgggtgcgaatgtgggtgaacctgaacctgtggcagaagctgaagctaagcagagatgatgccaagcctctgctgagactgaagggattcccttcctttcctctggtcgagagacaggccaacgaagtggactggtgggacatggtgtgtaacgtgaagaagctgatcaacgagaaaaaggaggatggcaaggtgttttggcagaatctggctggctacaagagacaggaagccctgagaccatacctgagcagcgaggaagatcggaagaagggaaagaaattcgctcggtaccagctgggcgacctgctgctgcacctggaaaagaagcacggcgaggactggggaaaggtgtacgacgaggcctgggagcggattgacaagaaagtggaaggcctgagcaagcacatcaagctggaagaggaacggagaagcgaggacgcccagagcaaggccgccctgaccgactggctgcgggctaaggccagcttcgtgatcgagggcctgaaggaggccgacaaggacgagttctgcagatgcgagctgaagctgcagaagtggtacggggacctgcggggaaagcccttcgccatcgaagccgagaacagcatcctggacatcagcggcttcagcaagcagtacaactgtgccttcatctggcagaaggacggcgtgaagaagctgaacctgtacctgatcatcaactacttcaagggcggcaagctgcggttcaagaagatcaaacctgaagccttcgaagccaacagattctacaccgtgatcaacaaaaagagcggcgagatcgtgcccatggaggtgaacttcaacttcgacgaccccaacctgatcatcctgcctctggcctttggcaagagacagggcagagaattcatctggaacgacctgctgtccctggaaaccggcagcctgaagctggccaacggaagagtgatcgagaagacactgtacaacagaagaacccggcaggatgagcctgccctgttcgtggccctgaccttcgagcggcgggaggtcctggactcctccaatatcaaaccaatgaacctgatcggcgtggcaagaggcgaaaacatccccgccgtgatcgccctgaccgaccccgagggctgcccactgagccggtttaaggatagcctgggaaacccaacccacatcctgagaatcggcgagagctataaggagaagcagcggaccatccaggccaagaaggaggtggagcagcggagagccggcggctacagccggaagtacgccagcaaagccaagaatctggcagacgatatggtgagaaacaccgctagagatctgctgtactacgccgtgacccaggatgccatgctgatcttcgccaacctgagccggggcttcggccggcagggcaagcggaccttcatggccgagagacagtacacacggatggaggactggctgaccgccaagctggcctacgagggcctgagcaagacctacctgtccaagacactggcccagtacacctccaagacatgcagcaactgtgggtttaccatcaccagcgccgactacgacagggtgctggagaagctgaagaagacagcaacaggctggatgaccacaattaacggcaaggagctgaaggtggagggccagattacctactacaacagatacaagagacagaacgtagtcaaggacctgtccgtcgagctggatagactgagcgaagaatctgtgaacaacgacatctcctcctggacaaagggcagaagcggagaagctctgagcctcctgaagaaaagattctcccatagacccgtgcaggagaagttcgtgtgcctgaactgcggcttcgagacacacgcagccgagcaagccgccctgaacatcgccagatcctggctgttcctgcggagccaggagtacaagaaataccagacaaacaagacaaccggcaacaccgataagagagccttcgtcgagacctggcagtccttttaccggaagaagcttaaggaggtgtggaaacctgccgtgcggtctggcggatctggcggaggctccaccagccccaagaaaaagagaaaagtctaagctgccttctgcggggcttgccttctggccatgcccttcttctctcccttgcacctgtacctcttggtctttgaataaagcctgagtaggaaggctagcaaaaaaaaaaaaaaaaaaaaaaaaaaaaaaaaaaaaaaaaaaaaaaaaaaaaaaaaaaaaaaaaaaaaaaaaaaaaaaaa

SEQ ID NO: 9292 - RNA, 8787 nt, synthetic construct
  source 1..8787: mol_type = other RNA
aggaaataagagagaaaagaagagtaagaagaaatataagagccaccatggcccctaagaagaagcgtaaagtgagccggatgaaccacgaccaggagttcgacccccctaaggtgtaccctcccgtccccgccgagaagagaaagcccatccgggtcctgagcctgttcgatggcatcgccaccggtctgctggtgctgaaggacctgggcatccaggtggataggtacattgcctccgaggtgtgcgaggactccatcaccgtgggaatggtgcgtcatcagggcaagatcatgtacgtgggcgacgtgcggagcgtgacacagaagcatatccaggagtggggccctttcgacctggtgatcggcggcagcccttgcaatgacctgagcatcgtgaacccagcccggaagggcctgtacgagggaaccggcagactgttcttcgagttttacagactgctgcacgacgcccggcctaaggaaggcgacgaccggcccttcttttggctgttcgagaatgtggtggccatgggagtcagcgacaagcgggatattagccggttcctggagagcaaccccgtgatgatcgatgccaaggaagtgagcgccgcccaccgggccagatacttctggggcaatctgcctggcatgaacagacccctggccagcaccgtgaacgacaagctggagctgcaggagtgcctggagcacggccggatcgccaagttcagcaaggtgagaaccatcaccacccgaagcaacagcatcaaacaaggcaaggaccagcactttcctgtgttcatgaacgagaaggaggacatcctgtggtgtaccgagatggagagagtgttcgggttcccagtccactacacagatgtcagcaacatgtctagactggccagacagagactgctgggaagaagctggtccgtccctgtgatcagacacctgttcgcccctctgaaggagtacttcgcctgcgtgagcagcggcaacagcaacgccaacagccggggccccagcttctctagcggcctggtgccactgtccctgagagggagccacatgggccccatggagatctacaaaaccgtgagcgcctggaagcggcagcctgtgcgcgtgctgagcctgtttcggaatatcgataaagtcctgaaaagcctgggattcctggagagcggctctggctccggcggtggcaccctgaagtacgtggaggatgtgacaaacgtggtcagacgggatgtggagaagtggggccccttcgatctggtgtacggcagcacccaacccctgggcagctcttgtgaccggtgccctggctggtacatgtttcagttccaccggatcctgcagtacgccctgccgagacaggagtcccagcggccattcttttggattttcatggacaacttgctgctgaccgaggatgaccaggaaactaccactcggttcctgcagaccgaagccgtgaccctgcaggacgtgagaggccgggactaccagaacgccatgcgggtgtggtccaacatccctggactgaaaagcaagcacgcacctctgacccctaaagaagaggagtacctgcaggcccaggtgcggagcagaagcaagctggacgcccctaaggtggatctgctggtgaagaattgcctcctgcccctgagagagtacttcaagtatttcagccagaatagtctgcccctgggaggcagcggcggcggcatgctgcagaccgcctggaggcaggagcccgtgaccttcgaggacgtggccgtgtacttcacccagaacgagtgggccagcctggacagcgtgcagagggccctgtacagggaggtgatgctggagaactacgccaacgtggccagcctggccttccccttcaccacccccgtgctggtgagccagctggagcagggcgagctgccctggggcctggacccctgggagcccatgggcagggagggcggcccaagcagcggcgcccctcctcccagcggcggcaggcggcccaagcagcggcgcccctcctcccagcggcggcagcccagccggctccccaacctctaccgaggagggcacctctgagtccgccacccccgagagcggccctggcacctccaccgagcccagcgagggcagcgcacccggcagccctgccggcagccccacctccacagaggagggaaccagcaccgagcccagcgaaggcagcgccccaggcaccagcaccgagcctagtgagcaggagattaaacggatcaacaagatcagaagaagacttgtgaaagacagcaacaccaagaaggccggcaagacaggccccatgaaaaccctgctggttagagtgatgacacccgatctgagagagcggctggaaaacctgagaaagaagcctgaaaatatcccccagcccatcagcaatacatctagagccaacctgaataagctgctgaccgattacaccgaaatgaagaaggcgatcctgcatgtgtactgggaagagttccagaaggaccctgtgggcctgatgagccgggtggcccagcctgccagcaagaagatcgatcagaacaagctgaaacctgagatggacgagaagggcaacctgaccaccgccggctttgcctgctctcagtgtggccagcccctgttcgtgtacaagctggagcaggtgtctgagaagggcaaggcttacaccaactacttcggacggtgcaatgtggccgagcacgaaaagctgatcctgctggcccagctgaagcccgagaaggatagcgacgaagccgtgacatatagcctgggaaagtttgggcagagggccctggatttctacagcattcatgtgaccaaggagtccacccaccccgtgaagcccctggcccagatcgccggaaacagatacgcctccggacctgtgggaaaggccctgagcgacgcatgtatgggcacaatcgcctccttcctgtctaagtaccaggacatcatcatcgaacaccagaaggtggtgaagggcaaccagaagagactggagagcctgcgggagctggccggcaaggaaaacctggaataccctagcgtgaccctgccacctcagcctcacaccaaggagggcgttgatgcctacaacgaagtgatcgcccgggtgcgaatgtgggtgaacctgaacctgtggcagaagctgaagctaagcagagatgatgccaagcctctgctgagactgaagggattcccttcctttcctctggtcgagagacaggccaacgaagtggactggtgggacatggtgtgtaacgtgaagaagctgatcaacgagaaaaaggaggatggcaaggtgttttggcagaatctggctggctacaagagacaggaagccctgagaccatacctgagcagcgaggaagatcggaagaagggaaagaaattcgctcggtaccagctgggcgacctgctgctgcacctggaaaagaagcacggcgaggactggggaaaggtgtacgacgaggcctgggagcggattgacaagaaagtggaaggcctgagcaagcacatcaagctggaagaggaacggagaagcgaggacgcccagagcaaggccgccctgaccgactggctgcgggctaaggccagcttcgtgatcgagggcctgaaggaggccgacaaggacgagttctgcagatgcgagctgaagctgcagaagtggtacggggacctgcggggaaagcccttcgccatcgaagccgagaacagcatcctggacatcagcggcttcagcaagcagtacaactgtgccttcatctggcagaaggacggcgtgaagaagctgaacctgtacctgatcatcaactacttcaagggcggcaagctgcggttcaagaagatcaaacctgaagccttcgaagccaacagattctacaccgtgatcaacaaaaagagcggcgagatcgtgcccatggaggtgaacttcaacttcgacgaccccaacctgatcatcctgcctctggcctttggcaagagacagggcagagaattcatctggaacgacctgctgtccctggaaaccggcagcctgaagctggccaacggaagagtgatcgagaagacactgtacaacagaagaacccggcaggatgagcctgccctgttcgtggccctgaccttcgagcggcgggaggtcctggactcctccaatatcaaaccaatgaacctgatcggcgtggcaagaggcgaaaacatccccgccgtgatcgccctgaccgaccccgagggctgcccactgagccggtttaaggatagcctgggaaacccaacccacatcctgagaatcggcgagagctataaggagaagcagcggaccatccaggccaagaaggaggtggagcagcggagagccggcggctacagccggaagtacgccagcaaagccaagaatctggcagacgatatggtgagaaacaccgctagagatctgctgtactacgccgtgacccaggatgccatgctgatcttcgccaacctgagccggggcttcggccggcagggcaagcggaccttcatggccgagagacagtacacacggatggaggactggctgaccgccaagctggcctacgagggcctgagcaagacctacctgtccaagacactggcccagtacacctccaagacatgcagcaactgtgggtttaccatcaccagcgccgactacgacagggtgctggagaagctgaagaagacagcaacaggctggatgaccacaattaacggcaaggagctgaaggtggagggccagattacctactacaacagatacaagagacagaacgtagtcaaggacctgtccgtcgagctggatagactgagcgaagaatctgtgaacaacgacatctcctcctggacaaagggcagaagcggagaagctctgagcctcctgaagaaaagattctcccatagacccgtgcaggagaagttcgtgtgcctgaactgcggcttcgagacacacgcagccgagcaagccgccctgaacatcgccagatcctggctgttcctgcggagccaggagtacaagaaataccagacaaacaagacaaccggcaacaccgataagagagccttcgtcgagacctggcagtccttttaccggaagaagcttaaggaggtgtggaaacctgccgtgcggtctggcggatctggcggaggctccaccagccccaagaaaaagagaaaagtctaagctgccttctgcggggcttgccttctggccatgcccttcttctctcccttgcacctgtacctcttggtctttgaataaagcctgagtaggaaggctagcaaaaaaaaaaaaaaaaaaaaaaaaaaaaaaaaaaaaaaaaaaaaaaaaaaaaaaaaaaaaaaaaaaaaaaaaaaaaaaaagcccagccggctccccaacctctaccgaggagggcacctctgagtccgccacccccgagagcggccctggcacctccaccgagcccagcgagggcagcgcacccggcagccctgccggcagccccacctccacagaggagggaaccagcaccgagcccagcgaaggcagcgccccaggcaccagcaccgagcctagtgagcaggagattaaacggatcaacaagatcagaagaagacttgtgaaagacagcaacaccaagaaggccggcaagacaggccccatgaaaaccctgctggttagagtgatgacacccgatctgagagagcggctggaaaacctgagaaagaagcctgaaaatatcccccagcccatcagcaatacatctagagccaacctgaataagctgctgaccgattacaccgaaatgaagaaggcgatcctgcatgtgtactgggaagagttccagaaggaccctgtgggcctgatgagccgggtggcccagcctgccagcaagaagatcgatcagaacaagctgaaacctgagatggacgagaagggcaacctgaccaccgccggctttgcctgctctcagtgtggccagcccctgttcgtgtacaagctggagcaggtgtctgagaagggcaaggcttacaccaactacttcggacggtgcaatgtggccgagcacgaaaagctgatcctgctggcccagctgaagcccgagaaggatagcgacgaagccgtgacatatagcctgggaaagtttgggcagagggccctggatttctacagcattcatgtgaccaaggagtccacccaccccgtgaagcccctggcccagatcgccggaaacagatacgcctccggacctgtgggaaaggccctgagcgacgcatgtatgggcacaatcgcctccttcctgtctaagtaccaggacatcatcatcgaacaccagaaggtggtgaagggcaaccagaagagactggagagcctgcgggagctggccggcaaggaaaacctggaataccctagcgtgaccctgccacctcagcctcacaccaaggagggcgttgatgcctacaacgaagtgatcgcccgggtgcgaatgtgggtgaacctgaacctgtggcagaagctgaagctaagcagagatgatgccaagcctctgctgagactgaagggattcccttcctttcctctggtcgagagacaggccaacgaagtggactggtgggacatggtgtgtaacgtgaagaagctgatcaacgagaaaaaggaggatggcaaggtgttttggcagaatctggctggctacaagagacaggaagccctgagaccatacctgagcagcgaggaagatcggaagaagggaaagaaattcgctcggtaccagctgggcgacctgctgctgcacctggaaaagaagcacggcgaggactggggaaaggtgtacgacgaggcctgggagcggattgacaagaaagtggaaggcctgagcaagcacatcaagctggaagaggaacggagaagcgaggacgcccagagcaaggccgccctgaccgactggctgcgggctaaggccagcttcgtgatcgagggcctgaaggaggccgacaaggacgagttctgcagatgcgagctgaagctgcagaagtggtacggggacctgcggggaaagcccttcgccatcgaagccgagaacagcatcctggacatcagcggcttcagcaagcagtacaactgtgccttcatctggcagaaggacggcgtgaagaagctgaacctgtacctgatcatcaactacttcaagggcggcaagctgcggttcaagaagatcaaacctgaagccttcgaagccaacagattctacaccgtgatcaacaaaaagagcggcgagatcgtgcccatggaggtgaacttcaacttcgacgaccccaacctgatcatcctgcctctggcctttggcaagagacagggcagagaattcatctggaacgacctgctgtccctggaaaccggcagcctgaagctggccaacggaagagtgatcgagaagacactgtacaacagaagaacccggcaggatgagcctgccctgttcgtggccctgaccttcgagcggcgggaggtcctggactcctccaatatcaaaccaatgaacctgatcggcgtggcaagaggcgaaaacatccccgccgtgatcgccctgaccgaccccgagggctgcccactgagccggtttaaggatagcctgggaaacccaacccacatcctgagaatcggcgagagctataaggagaagcagcggaccatccaggccaagaaggaggtggagcagcggagagccggcggctacagccggaagtacgccagcaaagccaagaatctggcagacgatatggtgagaaacaccgctagagatctgctgtactacgccgtgacccaggatgccatgctgatcttcgccaacctgagccggggcttcggccggcagggcaagcggaccttcatggccgagagacagtacacacggatggaggactggctgaccgccaagctggcctacgagggcctgagcaagacctacctgtccaagacactggcccagtacacctccaagacatgcagcaactgtgggtttaccatcaccagcgccgactacgacagggtgctggagaagctgaagaagacagcaacaggctggatgaccacaattaacggcaaggagctgaaggtggagggccagattacctactacaacagatacaagagacagaacgtagtcaaggacctgtccgtcgagctggatagactgagcgaagaatctgtgaacaacgacatctcctcctggacaaagggcagaagcggagaagctctgagcctcctgaagaaaagattctcccatagacccgtgcaggagaagttcgtgtgcctgaactgcggcttcgagacacacgcagccgagcaagccgccctgaacatcgccagatcctggctgttcctgcggagccaggagtacaagaaataccagacaaacaagacaaccggcaacaccgataagagagccttcgtcgagacctggcagtccttttaccggaagaagcttaaggaggtgtggaaacctgccgtgcggtctggcggatctggcggaggctccaccagccccaagaaaaagagaaaagtctaagctgccttctgcggggcttgccttctggccatgcccttcttctctcccttgcacctgtacctcttggtctttgaataaagcctgagtaggaaggctagcaaaaaaaaaaaaaaaaaaaaaaaaaaaaaaaaaaaaaaaaaaaaaaaaaaaaaaaaaaaaaaaaaaaaaaaaaaaaaaaa

SEQ ID NO: 9293 - RNA, 8787 nt, synthetic construct
  source 1..8787: mol_type = other RNA
aggaaataagagagaaaagaagagtaagaagaaatataagagccaccatggcccctaagaagaagcgtaaagtgagccggatgaaccacgaccaggagttcgacccccctaaggtgtaccctcccgtccccgccgagaagagaaagcccatccgggtcctgagcctgttcgatggcatcgccaccggtctgctggtgctgaaggacctgggcatccaggtggataggtacattgcctccgaggtgtgcgaggactccatcaccgtgggaatggtgcgtcatcagggcaagatcatgtacgtgggcgacgtgcggagcgtgacacagaagcatatccaggagtggggccctttcgacctggtgatcggcggcagcccttgcaatgacctgagcatcgtgaacccagcccggaagggcctgtacgagggaaccggcagactgttcttcgagttttacagactgctgcacgacgcccggcctaaggaaggcgacgaccggcccttcttttggctgttcgagaatgtggtggccatgggagtcagcgacaagcgggatattagccggttcctggagagcaaccccgtgatgatcgatgccaaggaagtgagcgccgcccaccgggccagatacttctggggcaatctgcctggcatgaacagacccctggccagcaccgtgaacgacaagctggagctgcaggagtgcctggagcacggccggatcgccaagttcagcaaggtgagaaccatcaccacccgaagcaacagcatcaaacaaggcaaggaccagcactttcctgtgttcatgaacgagaaggaggacatcctgtggtgtaccgagatggagagagtgttcgggttcccagtccactacacagatgtcagcaacatgtctagactggccagacagagactgctgggaagaagctggtccgtccctgtgatcagacacctgttcgcccctctgaaggagtacttcgcctgcgtgagcagcggcaacagcaacgccaacagccggggccccagcttctctagcggcctggtgccactgtccctgagagggagccacatgggccccatggagatctacaaaaccgtgagcgcctggaagcggcagcctgtgcgcgtgctgagcctgtttcggaatatcgataaagtcctgaaaagcctgggattcctggagagcggctctggctccggcggtggcaccctgaagtacgtggaggatgtgacaaacgtggtcagacgggatgtggagaagtggggccccttcgatctggtgtacggcagcacccaacccctgggcagctcttgtgaccggtgccctggctggtacatgtttcagttccaccggatcctgcagtacgccctgccgagacaggagtcccagcggccattcttttggattttcatggacaacttgctgctgaccgaggatgaccaggaaactaccactcggttcctgcagaccgaagccgtgaccctgcaggacgtgagaggccgggactaccagaacgccatgcgggtgtggtccaacatccctggactgaaaagcaagcacgcacctctgacccctaaagaagaggagtacctgcaggcccaggtgcggagcagaagcaagctggacgcccctaaggtggatctgctggtgaagaattgcctcctgcccctgagagagtacttcaagtatttcagccagaatagtctgcccctgggaggcagcggcggcggcaggcccagggccgtgaagttcgccgacgtggccgtgtacttcagcaccgaggagtggggctgcctgaggcccgcccagagggccctgtacagggacgtgatgagggagacctacggccacctgggcgccctgggctgcgccggccccaagcccgccctgatcagctggctggagaggaacaccgacgactgggagcccgccgccctggacccccaggagtgccccaagagggtgaccgtgcagggcggcccaagcagcggcgcccctcctcccagcggcggcaggcggcccaagcagcggcgcccctcctcccagcggcggcagcccagccggctccccaacctctaccgaggagggcacctctgagtccgccacccccgagagcggccctggcacctccaccgagcccagcgagggcagcgcacccggcagccctgccggcagccccacctccacagaggagggaaccagcaccgagcccagcgaaggcagcgccccaggcaccagcaccgagcctagtgagcaggagattaaacggatcaacaagatcagaagaagacttgtgaaagacagcaacaccaagaaggccggcaagacaggccccatgaaaaccctgctggttagagtgatgacacccgatctgagagagcggctggaaaacctgagaaagaagcctgaaaatatcccccagcccatcagcaatacatctagagccaacctgaataagctgctgaccgattacaccgaaatgaagaaggcgatcctgcatgtgtactgggaagagttccagaaggaccctgtgggcctgatgagccgggtggcccagcctgccagcaagaagatcgatcagaacaagctgaaacctgagatggacgagaagggcaacctgaccaccgccggctttgcctgctctcagtgtggccagcccctgttcgtgtacaagctggagcaggtgtctgagaagggcaaggcttacaccaactacttcggacggtgcaatgtggccgagcacgaaaagctgatcctgctggcccagctgaagcccgagaaggatagcgacgaagccgtgacatatagcctgggaaagtttgggcagagggccctggatttctacagcattcatgtgaccaaggagtccacccaccccgtgaagcccctggcccagatcgccggaaacagatacgcctccggacctgtgggaaaggccctgagcgacgcatgtatgggcacaatcgcctccttcctgtctaagtaccaggacatcatcatcgaacaccagaaggtggtgaagggcaaccagaagagactggagagcctgcgggagctggccggcaaggaaaacctggaataccctagcgtgaccctgccacctcagcctcacaccaaggagggcgttgatgcctacaacgaagtgatcgcccgggtgcgaatgtgggtgaacctgaacctgtggcagaagctgaagctaagcagagatgatgccaagcctctgctgagactgaagggattcccttcctttcctctggtcgagagacaggccaacgaagtggactggtgggacatggtgtgtaacgtgaagaagctgatcaacgagaaaaaggaggatggcaaggtgttttggcagaatctggctggctacaagagacaggaagccctgagaccatacctgagcagcgaggaagatcggaagaagggaaagaaattcgctcggtaccagctgggcgacctgctgctgcacctggaaaagaagcacggcgaggactggggaaaggtgtacgacgaggcctgggagcggattgacaagaaagtggaaggcctgagcaagcacatcaagctggaagaggaacggagaagcgaggacgcccagagcaaggccgccctgaccgactggctgcgggctaaggccagcttcgtgatcgagggcctgaaggaggccgacaaggacgagttctgcagatgcgagctgaagctgcagaagtggtacggggacctgcggggaaagcccttcgccatcgaagccgagaacagcatcctggacatcagcggcttcagcaagcagtacaactgtgccttcatctggcagaaggacggcgtgaagaagctgaacctgtacctgatcatcaactacttcaagggcggcaagctgcggttcaagaagatcaaacctgaagccttcgaagccaacagattctacaccgtgatcaacaaaaagagcggcgagatcgtgcccatggaggtgaacttcaacttcgacgaccccaacctgatcatcctgcctctggcctttggcaagagacagggcagagaattcatctggaacgacctgctgtccctggaaaccggcagcctgaagctggccaacggaagagtgatcgagaagacactgtacaacagaagaacccggcaggatgagcctgccctgttcgtggccctgaccttcgagcggcgggaggtcctggactcctccaatatcaaaccaatgaacctgatcggcgtggcaagaggcgaaaacatccccgccgtgatcgccctgaccgaccccgagggctgcccactgagccggtttaaggatagcctgggaaacccaacccacatcctgagaatcggcgagagctataaggagaagcagcggaccatccaggccaagaaggaggtggagcagcggagagccggcggctacagccggaagtacgccagcaaagccaagaatctggcagacgatatggtgagaaacaccgctagagatctgctgtactacgccgtgacccaggatgccatgctgatcttcgccaacctgagccggggcttcggccggcagggcaagcggaccttcatggccgagagacagtacacacggatggaggactggctgaccgccaagctggcctacgagggcctgagcaagacctacctgtccaagacactggcccagtacacctccaagacatgcagcaactgtgggtttaccatcaccagcgccgactacgacagggtgctggagaagctgaagaagacagcaacaggctggatgaccacaattaacggcaaggagctgaaggtggagggccagattacctactacaacagatacaagagacagaacgtagtcaaggacctgtccgtcgagctggatagactgagcgaagaatctgtgaacaacgacatctcctcctggacaaagggcagaagcggagaagctctgagcctcctgaagaaaagattctcccatagacccgtgcaggagaagttcgtgtgcctgaactgcggcttcgagacacacgcagccgagcaagccgccctgaacatcgccagatcctggctgttcctgcggagccaggagtacaagaaataccagacaaacaagacaaccggcaacaccgataagagagccttcgtcgagacctggcagtccttttaccggaagaagcttaaggaggtgtggaaacctgccgtgcggtctggcggatctggcggaggctccaccagccccaagaaaaagagaaaagtctaagctgccttctgcggggcttgccttctggccatgcccttcttctctcccttgcacctgtacctcttggtctttgaataaagcctgagtaggaaggctagcaaaaaaaaaaaaaaaaaaaaaaaaaaaaaaaaaaaaaaaaaaaaaaaaaaaaaaaaaaaaaaaaaaaaaaaaaaaaaaaagcccagccggctccccaacctctaccgaggagggcacctctgagtccgccacccccgagagcggccctggcacctccaccgagcccagcgagggcagcgcacccggcagccctgccggcagccccacctccacagaggagggaaccagcaccgagcccagcgaaggcagcgccccaggcaccagcaccgagcctagtgagcaggagattaaacggatcaacaagatcagaagaagacttgtgaaagacagcaacaccaagaaggccggcaagacaggccccatgaaaaccctgctggttagagtgatgacacccgatctgagagagcggctggaaaacctgagaaagaagcctgaaaatatcccccagcccatcagcaatacatctagagccaacctgaataagctgctgaccgattacaccgaaatgaagaaggcgatcctgcatgtgtactgggaagagttccagaaggaccctgtgggcctgatgagccgggtggcccagcctgccagcaagaagatcgatcagaacaagctgaaacctgagatggacgagaagggcaacctgaccaccgccggctttgcctgctctcagtgtggccagcccctgttcgtgtacaagctggagcaggtgtctgagaagggcaaggcttacaccaactacttcggacggtgcaatgtggccgagcacgaaaagctgatcctgctggcccagctgaagcccgagaaggatagcgacgaagccgtgacatatagcctgggaaagtttgggcagagggccctggatttctacagcattcatgtgaccaaggagtccacccaccccgtgaagcccctggcccagatcgccggaaacagatacgcctccggacctgtgggaaaggccctgagcgacgcatgtatgggcacaatcgcctccttcctgtctaagtaccaggacatcatcatcgaacaccagaaggtggtgaagggcaaccagaagagactggagagcctgcgggagctggccggcaaggaaaacctggaataccctagcgtgaccctgccacctcagcctcacaccaaggagggcgttgatgcctacaacgaagtgatcgcccgggtgcgaatgtgggtgaacctgaacctgtggcagaagctgaagctaagcagagatgatgccaagcctctgctgagactgaagggattcccttcctttcctctggtcgagagacaggccaacgaagtggactggtgggacatggtgtgtaacgtgaagaagctgatcaacgagaaaaaggaggatggcaaggtgttttggcagaatctggctggctacaagagacaggaagccctgagaccatacctgagcagcgaggaagatcggaagaagggaaagaaattcgctcggtaccagctgggcgacctgctgctgcacctggaaaagaagcacggcgaggactggggaaaggtgtacgacgaggcctgggagcggattgacaagaaagtggaaggcctgagcaagcacatcaagctggaagaggaacggagaagcgaggacgcccagagcaaggccgccctgaccgactggctgcgggctaaggccagcttcgtgatcgagggcctgaaggaggccgacaaggacgagttctgcagatgcgagctgaagctgcagaagtggtacggggacctgcggggaaagcccttcgccatcgaagccgagaacagcatcctggacatcagcggcttcagcaagcagtacaactgtgccttcatctggcagaaggacggcgtgaagaagctgaacctgtacctgatcatcaactacttcaagggcggcaagctgcggttcaagaagatcaaacctgaagccttcgaagccaacagattctacaccgtgatcaacaaaaagagcggcgagatcgtgcccatggaggtgaacttcaacttcgacgaccccaacctgatcatcctgcctctggcctttggcaagagacagggcagagaattcatctggaacgacctgctgtccctggaaaccggcagcctgaagctggccaacggaagagtgatcgagaagacactgtacaacagaagaacccggcaggatgagcctgccctgttcgtggccctgaccttcgagcggcgggaggtcctggactcctccaatatcaaaccaatgaacctgatcggcgtggcaagaggcgaaaacatccccgccgtgatcgccctgaccgaccccgagggctgcccactgagccggtttaaggatagcctgggaaacccaacccacatcctgagaatcggcgagagctataaggagaagcagcggaccatccaggccaagaaggaggtggagcagcggagagccggcggctacagccggaagtacgccagcaaagccaagaatctggcagacgatatggtgagaaacaccgctagagatctgctgtactacgccgtgacccaggatgccatgctgatcttcgccaacctgagccggggcttcggccggcagggcaagcggaccttcatggccgagagacagtacacacggatggaggactggctgaccgccaagctggcctacgagggcctgagcaagacctacctgtccaagacactggcccagtacacctccaagacatgcagcaactgtgggtttaccatcaccagcgccgactacgacagggtgctggagaagctgaagaagacagcaacaggctggatgaccacaattaacggcaaggagctgaaggtggagggccagattacctactacaacagatacaagagacagaacgtagtcaaggacctgtccgtcgagctggatagactgagcgaagaatctgtgaacaacgacatctcctcctggacaaagggcagaagcggagaagctctgagcctcctgaagaaaagattctcccatagacccgtgcaggagaagttcgtgtgcctgaactgcggcttcgagacacacgcagccgagcaagccgccctgaacatcgccagatcctggctgttcctgcggagccaggagtacaagaaataccagacaaacaagacaaccggcaacaccgataagagagccttcgtcgagacctggcagtccttttaccggaagaagcttaaggaggtgtggaaacctgccgtgcggtctggcggatctggcggaggctccaccagccccaagaaaaagagaaaagtctaagctgccttctgcggggcttgccttctggccatgcccttcttctctcccttgcacctgtacctcttggtctttgaataaagcctgagtaggaaggctagcaaaaaaaaaaaaaaaaaaaaaaaaaaaaaaaaaaaaaaaaaaaaaaaaaaaaaaaaaaaaaaaaaaaaaaaaaaaaaaaa

SEQ ID NO: 9294 - RNA, 8787 nt, synthetic construct
  source 1..8787: mol_type = other RNA
aggaaataagagagaaaagaagagtaagaagaaatataagagccaccatggcccctaagaagaagcgtaaagtgagccggatgaaccacgaccaggagttcgacccccctaaggtgtaccctcccgtccccgccgagaagagaaagcccatccgggtcctgagcctgttcgatggcatcgccaccggtctgctggtgctgaaggacctgggcatccaggtggataggtacattgcctccgaggtgtgcgaggactccatcaccgtgggaatggtgcgtcatcagggcaagatcatgtacgtgggcgacgtgcggagcgtgacacagaagcatatccaggagtggggccctttcgacctggtgatcggcggcagcccttgcaatgacctgagcatcgtgaacccagcccggaagggcctgtacgagggaaccggcagactgttcttcgagttttacagactgctgcacgacgcccggcctaaggaaggcgacgaccggcccttcttttggctgttcgagaatgtggtggccatgggagtcagcgacaagcgggatattagccggttcctggagagcaaccccgtgatgatcgatgccaaggaagtgagcgccgcccaccgggccagatacttctggggcaatctgcctggcatgaacagacccctggccagcaccgtgaacgacaagctggagctgcaggagtgcctggagcacggccggatcgccaagttcagcaaggtgagaaccatcaccacccgaagcaacagcatcaaacaaggcaaggaccagcactttcctgtgttcatgaacgagaaggaggacatcctgtggtgtaccgagatggagagagtgttcgggttcccagtccactacacagatgtcagcaacatgtctagactggccagacagagactgctgggaagaagctggtccgtccctgtgatcagacacctgttcgcccctctgaaggagtacttcgcctgcgtgagcagcggcaacagcaacgccaacagccggggccccagcttctctagcggcctggtgccactgtccctgagagggagccacatgggccccatggagatctacaaaaccgtgagcgcctggaagcggcagcctgtgcgcgtgctgagcctgtttcggaatatcgataaagtcctgaaaagcctgggattcctggagagcggctctggctccggcggtggcaccctgaagtacgtggaggatgtgacaaacgtggtcagacgggatgtggagaagtggggccccttcgatctggtgtacggcagcacccaacccctgggcagctcttgtgaccggtgccctggctggtacatgtttcagttccaccggatcctgcagtacgccctgccgagacaggagtcccagcggccattcttttggattttcatggacaacttgctgctgaccgaggatgaccaggaaactaccactcggttcctgcagaccgaagccgtgaccctgcaggacgtgagaggccgggactaccagaacgccatgcgggtgtggtccaacatccctggactgaaaagcaagcacgcacctctgacccctaaagaagaggagtacctgcaggcccaggtgcggagcagaagcaagctggacgcccctaaggtggatctgctggtgaagaattgcctcctgcccctgagagagtacttcaagtatttcagccagaatagtctgcccctgggaggcagcggcggcggcttccaggaggccgtgaccttcaacgacgtggccgtggtgttcagcgaggaggagctgggcctgctggacagcacccagaggaagctgtacagggacgtgatgctggagaacttcaggaacctggtgagcctgggccacagcagcagcaagcccgacatgatcagccagctggagagggaggaggagaagctgtgcatgaaggagatcaggaccgagaggggcggcaggaaccccaacgaggccggcggcccaagcagcggcgcccctcctcccagcggcggcaggcggcccaagcagcggcgcccctcctcccagcggcggcagcccagccggctccccaacctctaccgaggagggcacctctgagtccgccacccccgagagcggccctggcacctccaccgagcccagcgagggcagcgcacccggcagccctgccggcagccccacctccacagaggagggaaccagcaccgagcccagcgaaggcagcgccccaggcaccagcaccgagcctagtgagcaggagattaaacggatcaacaagatcagaagaagacttgtgaaagacagcaacaccaagaaggccggcaagacaggccccatgaaaaccctgctggttagagtgatgacacccgatctgagagagcggctggaaaacctgagaaagaagcctgaaaatatcccccagcccatcagcaatacatctagagccaacctgaataagctgctgaccgattacaccgaaatgaagaaggcgatcctgcatgtgtactgggaagagttccagaaggaccctgtgggcctgatgagccgggtggcccagcctgccagcaagaagatcgatcagaacaagctgaaacctgagatggacgagaagggcaacctgaccaccgccggctttgcctgctctcagtgtggccagcccctgttcgtgtacaagctggagcaggtgtctgagaagggcaaggcttacaccaactacttcggacggtgcaatgtggccgagcacgaaaagctgatcctgctggcccagctgaagcccgagaaggatagcgacgaagccgtgacatatagcctgggaaagtttgggcagagggccctggatttctacagcattcatgtgaccaaggagtccacccaccccgtgaagcccctggcccagatcgccggaaacagatacgcctccggacctgtgggaaaggccctgagcgacgcatgtatgggcacaatcgcctccttcctgtctaagtaccaggacatcatcatcgaacaccagaaggtggtgaagggcaaccagaagagactggagagcctgcgggagctggccggcaaggaaaacctggaataccctagcgtgaccctgccacctcagcctcacaccaaggagggcgttgatgcctacaacgaagtgatcgcccgggtgcgaatgtgggtgaacctgaacctgtggcagaagctgaagctaagcagagatgatgccaagcctctgctgagactgaagggattcccttcctttcctctggtcgagagacaggccaacgaagtggactggtgggacatggtgtgtaacgtgaagaagctgatcaacgagaaaaaggaggatggcaaggtgttttggcagaatctggctggctacaagagacaggaagccctgagaccatacctgagcagcgaggaagatcggaagaagggaaagaaattcgctcggtaccagctgggcgacctgctgctgcacctggaaaagaagcacggcgaggactggggaaaggtgtacgacgaggcctgggagcggattgacaagaaagtggaaggcctgagcaagcacatcaagctggaagaggaacggagaagcgaggacgcccagagcaaggccgccctgaccgactggctgcgggctaaggccagcttcgtgatcgagggcctgaaggaggccgacaaggacgagttctgcagatgcgagctgaagctgcagaagtggtacggggacctgcggggaaagcccttcgccatcgaagccgagaacagcatcctggacatcagcggcttcagcaagcagtacaactgtgccttcatctggcagaaggacggcgtgaagaagctgaacctgtacctgatcatcaactacttcaagggcggcaagctgcggttcaagaagatcaaacctgaagccttcgaagccaacagattctacaccgtgatcaacaaaaagagcggcgagatcgtgcccatggaggtgaacttcaacttcgacgaccccaacctgatcatcctgcctctggcctttggcaagagacagggcagagaattcatctggaacgacctgctgtccctggaaaccggcagcctgaagctggccaacggaagagtgatcgagaagacactgtacaacagaagaacccggcaggatgagcctgccctgttcgtggccctgaccttcgagcggcgggaggtcctggactcctccaatatcaaaccaatgaacctgatcggcgtggcaagaggcgaaaacatccccgccgtgatcgccctgaccgaccccgagggctgcccactgagccggtttaaggatagcctgggaaacccaacccacatcctgagaatcggcgagagctataaggagaagcagcggaccatccaggccaagaaggaggtggagcagcggagagccggcggctacagccggaagtacgccagcaaagccaagaatctggcagacgatatggtgagaaacaccgctagagatctgctgtactacgccgtgacccaggatgccatgctgatcttcgccaacctgagccggggcttcggccggcagggcaagcggaccttcatggccgagagacagtacacacggatggaggactggctgaccgccaagctggcctacgagggcctgagcaagacctacctgtccaagacactggcccagtacacctccaagacatgcagcaactgtgggtttaccatcaccagcgccgactacgacagggtgctggagaagctgaagaagacagcaacaggctggatgaccacaattaacggcaaggagctgaaggtggagggccagattacctactacaacagatacaagagacagaacgtagtcaaggacctgtccgtcgagctggatagactgagcgaagaatctgtgaacaacgacatctcctcctggacaaagggcagaagcggagaagctctgagcctcctgaagaaaagattctcccatagacccgtgcaggagaagttcgtgtgcctgaactgcggcttcgagacacacgcagccgagcaagccgccctgaacatcgccagatcctggctgttcctgcggagccaggagtacaagaaataccagacaaacaagacaaccggcaacaccgataagagagccttcgtcgagacctggcagtccttttaccggaagaagcttaaggaggtgtggaaacctgccgtgcggtctggcggatctggcggaggctccaccagccccaagaaaaagagaaaagtctaagctgccttctgcggggcttgccttctggccatgcccttcttctctcccttgcacctgtacctcttggtctttgaataaagcctgagtaggaaggctagcaaaaaaaaaaaaaaaaaaaaaaaaaaaaaaaaaaaaaaaaaaaaaaaaaaaaaaaaaaaaaaaaaaaaaaaaaaaaaaaagcccagccggctccccaacctctaccgaggagggcacctctgagtccgccacccccgagagcggccctggcacctccaccgagcccagcgagggcagcgcacccggcagccctgccggcagccccacctccacagaggagggaaccagcaccgagcccagcgaaggcagcgccccaggcaccagcaccgagcctagtgagcaggagattaaacggatcaacaagatcagaagaagacttgtgaaagacagcaacaccaagaaggccggcaagacaggccccatgaaaaccctgctggttagagtgatgacacccgatctgagagagcggctggaaaacctgagaaagaagcctgaaaatatcccccagcccatcagcaatacatctagagccaacctgaataagctgctgaccgattacaccgaaatgaagaaggcgatcctgcatgtgtactgggaagagttccagaaggaccctgtgggcctgatgagccgggtggcccagcctgccagcaagaagatcgatcagaacaagctgaaacctgagatggacgagaagggcaacctgaccaccgccggctttgcctgctctcagtgtggccagcccctgttcgtgtacaagctggagcaggtgtctgagaagggcaaggcttacaccaactacttcggacggtgcaatgtggccgagcacgaaaagctgatcctgctggcccagctgaagcccgagaaggatagcgacgaagccgtgacatatagcctgggaaagtttgggcagagggccctggatttctacagcattcatgtgaccaaggagtccacccaccccgtgaagcccctggcccagatcgccggaaacagatacgcctccggacctgtgggaaaggccctgagcgacgcatgtatgggcacaatcgcctccttcctgtctaagtaccaggacatcatcatcgaacaccagaaggtggtgaagggcaaccagaagagactggagagcctgcgggagctggccggcaaggaaaacctggaataccctagcgtgaccctgccacctcagcctcacaccaaggagggcgttgatgcctacaacgaagtgatcgcccgggtgcgaatgtgggtgaacctgaacctgtggcagaagctgaagctaagcagagatgatgccaagcctctgctgagactgaagggattcccttcctttcctctggtcgagagacaggccaacgaagtggactggtgggacatggtgtgtaacgtgaagaagctgatcaacgagaaaaaggaggatggcaaggtgttttggcagaatctggctggctacaagagacaggaagccctgagaccatacctgagcagcgaggaagatcggaagaagggaaagaaattcgctcggtaccagctgggcgacctgctgctgcacctggaaaagaagcacggcgaggactggggaaaggtgtacgacgaggcctgggagcggattgacaagaaagtggaaggcctgagcaagcacatcaagctggaagaggaacggagaagcgaggacgcccagagcaaggccgccctgaccgactggctgcgggctaaggccagcttcgtgatcgagggcctgaaggaggccgacaaggacgagttctgcagatgcgagctgaagctgcagaagtggtacggggacctgcggggaaagcccttcgccatcgaagccgagaacagcatcctggacatcagcggcttcagcaagcagtacaactgtgccttcatctggcagaaggacggcgtgaagaagctgaacctgtacctgatcatcaactacttcaagggcggcaagctgcggttcaagaagatcaaacctgaagccttcgaagccaacagattctacaccgtgatcaacaaaaagagcggcgagatcgtgcccatggaggtgaacttcaacttcgacgaccccaacctgatcatcctgcctctggcctttggcaagagacagggcagagaattcatctggaacgacctgctgtccctggaaaccggcagcctgaagctggccaacggaagagtgatcgagaagacactgtacaacagaagaacccggcaggatgagcctgccctgttcgtggccctgaccttcgagcggcgggaggtcctggactcctccaatatcaaaccaatgaacctgatcggcgtggcaagaggcgaaaacatccccgccgtgatcgccctgaccgaccccgagggctgcccactgagccggtttaaggatagcctgggaaacccaacccacatcctgagaatcggcgagagctataaggagaagcagcggaccatccaggccaagaaggaggtggagcagcggagagccggcggctacagccggaagtacgccagcaaagccaagaatctggcagacgatatggtgagaaacaccgctagagatctgctgtactacgccgtgacccaggatgccatgctgatcttcgccaacctgagccggggcttcggccggcagggcaagcggaccttcatggccgagagacagtacacacggatggaggactggctgaccgccaagctggcctacgagggcctgagcaagacctacctgtccaagacactggcccagtacacctccaagacatgcagcaactgtgggtttaccatcaccagcgccgactacgacagggtgctggagaagctgaagaagacagcaacaggctggatgaccacaattaacggcaaggagctgaaggtggagggccagattacctactacaacagatacaagagacagaacgtagtcaaggacctgtccgtcgagctggatagactgagcgaagaatctgtgaacaacgacatctcctcctggacaaagggcagaagcggagaagctctgagcctcctgaagaaaagattctcccatagacccgtgcaggagaagttcgtgtgcctgaactgcggcttcgagacacacgcagccgagcaagccgccctgaacatcgccagatcctggctgttcctgcggagccaggagtacaagaaataccagacaaacaagacaaccggcaacaccgataagagagccttcgtcgagacctggcagtccttttaccggaagaagcttaaggaggtgtggaaacctgccgtgcggtctggcggatctggcggaggctccaccagccccaagaaaaagagaaaagtctaagctgccttctgcggggcttgccttctggccatgcccttcttctctcccttgcacctgtacctcttggtctttgaataaagcctgagtaggaaggctagcaaaaaaaaaaaaaaaaaaaaaaaaaaaaaaaaaaaaaaaaaaaaaaaaaaaaaaaaaaaaaaaaaaaaaaaaaaaaaaaa

SEQ ID NO: 9295 - RNA, 8787 nt, synthetic construct
  source 1..8787: mol_type = other RNA
aggaaataagagagaaaagaagagtaagaagaaatataagagccaccatggcccctaagaagaagcgtaaagtgagccggatgaaccacgaccaggagttcgacccccctaaggtgtaccctcccgtccccgccgagaagagaaagcccatccgggtcctgagcctgttcgatggcatcgccaccggtctgctggtgctgaaggacctgggcatccaggtggataggtacattgcctccgaggtgtgcgaggactccatcaccgtgggaatggtgcgtcatcagggcaagatcatgtacgtgggcgacgtgcggagcgtgacacagaagcatatccaggagtggggccctttcgacctggtgatcggcggcagcccttgcaatgacctgagcatcgtgaacccagcccggaagggcctgtacgagggaaccggcagactgttcttcgagttttacagactgctgcacgacgcccggcctaaggaaggcgacgaccggcccttcttttggctgttcgagaatgtggtggccatgggagtcagcgacaagcgggatattagccggttcctggagagcaaccccgtgatgatcgatgccaaggaagtgagcgccgcccaccgggccagatacttctggggcaatctgcctggcatgaacagacccctggccagcaccgtgaacgacaagctggagctgcaggagtgcctggagcacggccggatcgccaagttcagcaaggtgagaaccatcaccacccgaagcaacagcatcaaacaaggcaaggaccagcactttcctgtgttcatgaacgagaaggaggacatcctgtggtgtaccgagatggagagagtgttcgggttcccagtccactacacagatgtcagcaacatgtctagactggccagacagagactgctgggaagaagctggtccgtccctgtgatcagacacctgttcgcccctctgaaggagtacttcgcctgcgtgagcagcggcaacagcaacgccaacagccggggccccagcttctctagcggcctggtgccactgtccctgagagggagccacatgggccccatggagatctacaaaaccgtgagcgcctggaagcggcagcctgtgcgcgtgctgagcctgtttcggaatatcgataaagtcctgaaaagcctgggattcctggagagcggctctggctccggcggtggcaccctgaagtacgtggaggatgtgacaaacgtggtcagacgggatgtggagaagtggggccccttcgatctggtgtacggcagcacccaacccctgggcagctcttgtgaccggtgccctggctggtacatgtttcagttccaccggatcctgcagtacgccctgccgagacaggagtcccagcggccattcttttggattttcatggacaacttgctgctgaccgaggatgaccaggaaactaccactcggttcctgcagaccgaagccgtgaccctgcaggacgtgagaggccgggactaccagaacgccatgcgggtgtggtccaacatccctggactgaaaagcaagcacgcacctctgacccctaaagaagaggagtacctgcaggcccaggtgcggagcagaagcaagctggacgcccctaaggtggatctgctggtgaagaattgcctcctgcccctgagagagtacttcaagtatttcagccagaatagtctgcccctgggaggcagcggcggcggcgcccacggcagcgtgatgttcagcgacgtgagcgtggtgttcagccaggaggagtgggactacctggacgtggagcagagggacctgtacagggacgtgatgctggagaactacaacaacctggtgagcctgggctgcttcatcagcaagcccgacgtgatcagcctgctggagcagggcaaggagccctggaaggtggtgaggaaggagaggaggaggtaccccgacctggagaccaggcacggcggcccaagcagcggcgcccctcctcccagcggcggcaggcggcccaagcagcggcgcccctcctcccagcggcggcagcccagccggctccccaacctctaccgaggagggcacctctgagtccgccacccccgagagcggccctggcacctccaccgagcccagcgagggcagcgcacccggcagccctgccggcagccccacctccacagaggagggaaccagcaccgagcccagcgaaggcagcgccccaggcaccagcaccgagcctagtgagcaggagattaaacggatcaacaagatcagaagaagacttgtgaaagacagcaacaccaagaaggccggcaagacaggccccatgaaaaccctgctggttagagtgatgacacccgatctgagagagcggctggaaaacctgagaaagaagcctgaaaatatcccccagcccatcagcaatacatctagagccaacctgaataagctgctgaccgattacaccgaaatgaagaaggcgatcctgcatgtgtactgggaagagttccagaaggaccctgtgggcctgatgagccgggtggcccagcctgccagcaagaagatcgatcagaacaagctgaaacctgagatggacgagaagggcaacctgaccaccgccggctttgcctgctctcagtgtggccagcccctgttcgtgtacaagctggagcaggtgtctgagaagggcaaggcttacaccaactacttcggacggtgcaatgtggccgagcacgaaaagctgatcctgctggcccagctgaagcccgagaaggatagcgacgaagccgtgacatatagcctgggaaagtttgggcagagggccctggatttctacagcattcatgtgaccaaggagtccacccaccccgtgaagcccctggcccagatcgccggaaacagatacgcctccggacctgtgggaaaggccctgagcgacgcatgtatgggcacaatcgcctccttcctgtctaagtaccaggacatcatcatcgaacaccagaaggtggtgaagggcaaccagaagagactggagagcctgcgggagctggccggcaaggaaaacctggaataccctagcgtgaccctgccacctcagcctcacaccaaggagggcgttgatgcctacaacgaagtgatcgcccgggtgcgaatgtgggtgaacctgaacctgtggcagaagctgaagctaagcagagatgatgccaagcctctgctgagactgaagggattcccttcctttcctctggtcgagagacaggccaacgaagtggactggtgggacatggtgtgtaacgtgaagaagctgatcaacgagaaaaaggaggatggcaaggtgttttggcagaatctggctggctacaagagacaggaagccctgagaccatacctgagcagcgaggaagatcggaagaagggaaagaaattcgctcggtaccagctgggcgacctgctgctgcacctggaaaagaagcacggcgaggactggggaaaggtgtacgacgaggcctgggagcggattgacaagaaagtggaaggcctgagcaagcacatcaagctggaagaggaacggagaagcgaggacgcccagagcaaggccgccctgaccgactggctgcgggctaaggccagcttcgtgatcgagggcctgaaggaggccgacaaggacgagttctgcagatgcgagctgaagctgcagaagtggtacggggacctgcggggaaagcccttcgccatcgaagccgagaacagcatcctggacatcagcggcttcagcaagcagtacaactgtgccttcatctggcagaaggacggcgtgaagaagctgaacctgtacctgatcatcaactacttcaagggcggcaagctgcggttcaagaagatcaaacctgaagccttcgaagccaacagattctacaccgtgatcaacaaaaagagcggcgagatcgtgcccatggaggtgaacttcaacttcgacgaccccaacctgatcatcctgcctctggcctttggcaagagacagggcagagaattcatctggaacgacctgctgtccctggaaaccggcagcctgaagctggccaacggaagagtgatcgagaagacactgtacaacagaagaacccggcaggatgagcctgccctgttcgtggccctgaccttcgagcggcgggaggtcctggactcctccaatatcaaaccaatgaacctgatcggcgtggcaagaggcgaaaacatccccgccgtgatcgccctgaccgaccccgagggctgcccactgagccggtttaaggatagcctgggaaacccaacccacatcctgagaatcggcgagagctataaggagaagcagcggaccatccaggccaagaaggaggtggagcagcggagagccggcggctacagccggaagtacgccagcaaagccaagaatctggcagacgatatggtgagaaacaccgctagagatctgctgtactacgccgtgacccaggatgccatgctgatcttcgccaacctgagccggggcttcggccggcagggcaagcggaccttcatggccgagagacagtacacacggatggaggactggctgaccgccaagctggcctacgagggcctgagcaagacctacctgtccaagacactggcccagtacacctccaagacatgcagcaactgtgggtttaccatcaccagcgccgactacgacagggtgctggagaagctgaagaagacagcaacaggctggatgaccacaattaacggcaaggagctgaaggtggagggccagattacctactacaacagatacaagagacagaacgtagtcaaggacctgtccgtcgagctggatagactgagcgaagaatctgtgaacaacgacatctcctcctggacaaagggcagaagcggagaagctctgagcctcctgaagaaaagattctcccatagacccgtgcaggagaagttcgtgtgcctgaactgcggcttcgagacacacgcagccgagcaagccgccctgaacatcgccagatcctggctgttcctgcggagccaggagtacaagaaataccagacaaacaagacaaccggcaacaccgataagagagccttcgtcgagacctggcagtccttttaccggaagaagcttaaggaggtgtggaaacctgccgtgcggtctggcggatctggcggaggctccaccagccccaagaaaaagagaaaagtctaagctgccttctgcggggcttgccttctggccatgcccttcttctctcccttgcacctgtacctcttggtctttgaataaagcctgagtaggaaggctagcaaaaaaaaaaaaaaaaaaaaaaaaaaaaaaaaaaaaaaaaaaaaaaaaaaaaaaaaaaaaaaaaaaaaaaaaaaaaaaaagcccagccggctccccaacctctaccgaggagggcacctctgagtccgccacccccgagagcggccctggcacctccaccgagcccagcgagggcagcgcacccggcagccctgccggcagccccacctccacagaggagggaaccagcaccgagcccagcgaaggcagcgccccaggcaccagcaccgagcctagtgagcaggagattaaacggatcaacaagatcagaagaagacttgtgaaagacagcaacaccaagaaggccggcaagacaggccccatgaaaaccctgctggttagagtgatgacacccgatctgagagagcggctggaaaacctgagaaagaagcctgaaaatatcccccagcccatcagcaatacatctagagccaacctgaataagctgctgaccgattacaccgaaatgaagaaggcgatcctgcatgtgtactgggaagagttccagaaggaccctgtgggcctgatgagccgggtggcccagcctgccagcaagaagatcgatcagaacaagctgaaacctgagatggacgagaagggcaacctgaccaccgccggctttgcctgctctcagtgtggccagcccctgttcgtgtacaagctggagcaggtgtctgagaagggcaaggcttacaccaactacttcggacggtgcaatgtggccgagcacgaaaagctgatcctgctggcccagctgaagcccgagaaggatagcgacgaagccgtgacatatagcctgggaaagtttgggcagagggccctggatttctacagcattcatgtgaccaaggagtccacccaccccgtgaagcccctggcccagatcgccggaaacagatacgcctccggacctgtgggaaaggccctgagcgacgcatgtatgggcacaatcgcctccttcctgtctaagtaccaggacatcatcatcgaacaccagaaggtggtgaagggcaaccagaagagactggagagcctgcgggagctggccggcaaggaaaacctggaataccctagcgtgaccctgccacctcagcctcacaccaaggagggcgttgatgcctacaacgaagtgatcgcccgggtgcgaatgtgggtgaacctgaacctgtggcagaagctgaagctaagcagagatgatgccaagcctctgctgagactgaagggattcccttcctttcctctggtcgagagacaggccaacgaagtggactggtgggacatggtgtgtaacgtgaagaagctgatcaacgagaaaaaggaggatggcaaggtgttttggcagaatctggctggctacaagagacaggaagccctgagaccatacctgagcagcgaggaagatcggaagaagggaaagaaattcgctcggtaccagctgggcgacctgctgctgcacctggaaaagaagcacggcgaggactggggaaaggtgtacgacgaggcctgggagcggattgacaagaaagtggaaggcctgagcaagcacatcaagctggaagaggaacggagaagcgaggacgcccagagcaaggccgccctgaccgactggctgcgggctaaggccagcttcgtgatcgagggcctgaaggaggccgacaaggacgagttctgcagatgcgagctgaagctgcagaagtggtacggggacctgcggggaaagcccttcgccatcgaagccgagaacagcatcctggacatcagcggcttcagcaagcagtacaactgtgccttcatctggcagaaggacggcgtgaagaagctgaacctgtacctgatcatcaactacttcaagggcggcaagctgcggttcaagaagatcaaacctgaagccttcgaagccaacagattctacaccgtgatcaacaaaaagagcggcgagatcgtgcccatggaggtgaacttcaacttcgacgaccccaacctgatcatcctgcctctggcctttggcaagagacagggcagagaattcatctggaacgacctgctgtccctggaaaccggcagcctgaagctggccaacggaagagtgatcgagaagacactgtacaacagaagaacccggcaggatgagcctgccctgttcgtggccctgaccttcgagcggcgggaggtcctggactcctccaatatcaaaccaatgaacctgatcggcgtggcaagaggcgaaaacatccccgccgtgatcgccctgaccgaccccgagggctgcccactgagccggtttaaggatagcctgggaaacccaacccacatcctgagaatcggcgagagctataaggagaagcagcggaccatccaggccaagaaggaggtggagcagcggagagccggcggctacagccggaagtacgccagcaaagccaagaatctggcagacgatatggtgagaaacaccgctagagatctgctgtactacgccgtgacccaggatgccatgctgatcttcgccaacctgagccggggcttcggccggcagggcaagcggaccttcatggccgagagacagtacacacggatggaggactggctgaccgccaagctggcctacgagggcctgagcaagacctacctgtccaagacactggcccagtacacctccaagacatgcagcaactgtgggtttaccatcaccagcgccgactacgacagggtgctggagaagctgaagaagacagcaacaggctggatgaccacaattaacggcaaggagctgaaggtggagggccagattacctactacaacagatacaagagacagaacgtagtcaaggacctgtccgtcgagctggatagactgagcgaagaatctgtgaacaacgacatctcctcctggacaaagggcagaagcggagaagctctgagcctcctgaagaaaagattctcccatagacccgtgcaggagaagttcgtgtgcctgaactgcggcttcgagacacacgcagccgagcaagccgccctgaacatcgccagatcctggctgttcctgcggagccaggagtacaagaaataccagacaaacaagacaaccggcaacaccgataagagagccttcgtcgagacctggcagtccttttaccggaagaagcttaaggaggtgtggaaacctgccgtgcggtctggcggatctggcggaggctccaccagccccaagaaaaagagaaaagtctaagctgccttctgcggggcttgccttctggccatgcccttcttctctcccttgcacctgtacctcttggtctttgaataaagcctgagtaggaaggctagcaaaaaaaaaaaaaaaaaaaaaaaaaaaaaaaaaaaaaaaaaaaaaaaaaaaaaaaaaaaaaaaaaaaaaaaaaaaaaaaa

SEQ ID NO: 9296 - RNA, 8787 nt, synthetic construct
  source 1..8787: mol_type = other RNA
aggaaataagagagaaaagaagagtaagaagaaatataagagccaccatggcccctaagaagaagcgtaaagtgagccggatgaaccacgaccaggagttcgacccccctaaggtgtaccctcccgtccccgccgagaagagaaagcccatccgggtcctgagcctgttcgatggcatcgccaccggtctgctggtgctgaaggacctgggcatccaggtggataggtacattgcctccgaggtgtgcgaggactccatcaccgtgggaatggtgcgtcatcagggcaagatcatgtacgtgggcgacgtgcggagcgtgacacagaagcatatccaggagtggggccctttcgacctggtgatcggcggcagcccttgcaatgacctgagcatcgtgaacccagcccggaagggcctgtacgagggaaccggcagactgttcttcgagttttacagactgctgcacgacgcccggcctaaggaaggcgacgaccggcccttcttttggctgttcgagaatgtggtggccatgggagtcagcgacaagcgggatattagccggttcctggagagcaaccccgtgatgatcgatgccaaggaagtgagcgccgcccaccgggccagatacttctggggcaatctgcctggcatgaacagacccctggccagcaccgtgaacgacaagctggagctgcaggagtgcctggagcacggccggatcgccaagttcagcaaggtgagaaccatcaccacccgaagcaacagcatcaaacaaggcaaggaccagcactttcctgtgttcatgaacgagaaggaggacatcctgtggtgtaccgagatggagagagtgttcgggttcccagtccactacacagatgtcagcaacatgtctagactggccagacagagactgctgggaagaagctggtccgtccctgtgatcagacacctgttcgcccctctgaaggagtacttcgcctgcgtgagcagcggcaacagcaacgccaacagccggggccccagcttctctagcggcctggtgccactgtccctgagagggagccacatgggccccatggagatctacaaaaccgtgagcgcctggaagcggcagcctgtgcgcgtgctgagcctgtttcggaatatcgataaagtcctgaaaagcctgggattcctggagagcggctctggctccggcggtggcaccctgaagtacgtggaggatgtgacaaacgtggtcagacgggatgtggagaagtggggccccttcgatctggtgtacggcagcacccaacccctgggcagctcttgtgaccggtgccctggctggtacatgtttcagttccaccggatcctgcagtacgccctgccgagacaggagtcccagcggccattcttttggattttcatggacaacttgctgctgaccgaggatgaccaggaaactaccactcggttcctgcagaccgaagccgtgaccctgcaggacgtgagaggccgggactaccagaacgccatgcgggtgtggtccaacatccctggactgaaaagcaagcacgcacctctgacccctaaagaagaggagtacctgcaggcccaggtgcggagcagaagcaagctggacgcccctaaggtggatctgctggtgaagaattgcctcctgcccctgagagagtacttcaagtatttcagccagaatagtctgcccctgggaggcagcggcggcggcgtgcagggcagcgtgagcttcgaggacgtggccgtgggcttcagccaggaggagtggcagatcctgggccccagccagaaggccctgtactgggacgtgatgctggagaactactgcaacctggtgagcgtgggctaccaggcccccacccccaacagcctgttccagctggagcagggcggccccccctggaccgtggagggcgccgccctgagccccacctgcagcggcaagaagctgtacggcggcccaagcagcggcgcccctcctcccagcggcggcaggcggcccaagcagcggcgcccctcctcccagcggcggcagcccagccggctccccaacctctaccgaggagggcacctctgagtccgccacccccgagagcggccctggcacctccaccgagcccagcgagggcagcgcacccggcagccctgccggcagccccacctccacagaggagggaaccagcaccgagcccagcgaaggcagcgccccaggcaccagcaccgagcctagtgagcaggagattaaacggatcaacaagatcagaagaagacttgtgaaagacagcaacaccaagaaggccggcaagacaggccccatgaaaaccctgctggttagagtgatgacacccgatctgagagagcggctggaaaacctgagaaagaagcctgaaaatatcccccagcccatcagcaatacatctagagccaacctgaataagctgctgaccgattacaccgaaatgaagaaggcgatcctgcatgtgtactgggaagagttccagaaggaccctgtgggcctgatgagccgggtggcccagcctgccagcaagaagatcgatcagaacaagctgaaacctgagatggacgagaagggcaacctgaccaccgccggctttgcctgctctcagtgtggccagcccctgttcgtgtacaagctggagcaggtgtctgagaagggcaaggcttacaccaactacttcggacggtgcaatgtggccgagcacgaaaagctgatcctgctggcccagctgaagcccgagaaggatagcgacgaagccgtgacatatagcctgggaaagtttgggcagagggccctggatttctacagcattcatgtgaccaaggagtccacccaccccgtgaagcccctggcccagatcgccggaaacagatacgcctccggacctgtgggaaaggccctgagcgacgcatgtatgggcacaatcgcctccttcctgtctaagtaccaggacatcatcatcgaacaccagaaggtggtgaagggcaaccagaagagactggagagcctgcgggagctggccggcaaggaaaacctggaataccctagcgtgaccctgccacctcagcctcacaccaaggagggcgttgatgcctacaacgaagtgatcgcccgggtgcgaatgtgggtgaacctgaacctgtggcagaagctgaagctaagcagagatgatgccaagcctctgctgagactgaagggattcccttcctttcctctggtcgagagacaggccaacgaagtggactggtgggacatggtgtgtaacgtgaagaagctgatcaacgagaaaaaggaggatggcaaggtgttttggcagaatctggctggctacaagagacaggaagccctgagaccatacctgagcagcgaggaagatcggaagaagggaaagaaattcgctcggtaccagctgggcgacctgctgctgcacctggaaaagaagcacggcgaggactggggaaaggtgtacgacgaggcctgggagcggattgacaagaaagtggaaggcctgagcaagcacatcaagctggaagaggaacggagaagcgaggacgcccagagcaaggccgccctgaccgactggctgcgggctaaggccagcttcgtgatcgagggcctgaaggaggccgacaaggacgagttctgcagatgcgagctgaagctgcagaagtggtacggggacctgcggggaaagcccttcgccatcgaagccgagaacagcatcctggacatcagcggcttcagcaagcagtacaactgtgccttcatctggcagaaggacggcgtgaagaagctgaacctgtacctgatcatcaactacttcaagggcggcaagctgcggttcaagaagatcaaacctgaagccttcgaagccaacagattctacaccgtgatcaacaaaaagagcggcgagatcgtgcccatggaggtgaacttcaacttcgacgaccccaacctgatcatcctgcctctggcctttggcaagagacagggcagagaattcatctggaacgacctgctgtccctggaaaccggcagcctgaagctggccaacggaagagtgatcgagaagacactgtacaacagaagaacccggcaggatgagcctgccctgttcgtggccctgaccttcgagcggcgggaggtcctggactcctccaatatcaaaccaatgaacctgatcggcgtggcaagaggcgaaaacatccccgccgtgatcgccctgaccgaccccgagggctgcccactgagccggtttaaggatagcctgggaaacccaacccacatcctgagaatcggcgagagctataaggagaagcagcggaccatccaggccaagaaggaggtggagcagcggagagccggcggctacagccggaagtacgccagcaaagccaagaatctggcagacgatatggtgagaaacaccgctagagatctgctgtactacgccgtgacccaggatgccatgctgatcttcgccaacctgagccggggcttcggccggcagggcaagcggaccttcatggccgagagacagtacacacggatggaggactggctgaccgccaagctggcctacgagggcctgagcaagacctacctgtccaagacactggcccagtacacctccaagacatgcagcaactgtgggtttaccatcaccagcgccgactacgacagggtgctggagaagctgaagaagacagcaacaggctggatgaccacaattaacggcaaggagctgaaggtggagggccagattacctactacaacagatacaagagacagaacgtagtcaaggacctgtccgtcgagctggatagactgagcgaagaatctgtgaacaacgacatctcctcctggacaaagggcagaagcggagaagctctgagcctcctgaagaaaagattctcccatagacccgtgcaggagaagttcgtgtgcctgaactgcggcttcgagacacacgcagccgagcaagccgccctgaacatcgccagatcctggctgttcctgcggagccaggagtacaagaaataccagacaaacaagacaaccggcaacaccgataagagagccttcgtcgagacctggcagtccttttaccggaagaagcttaaggaggtgtggaaacctgccgtgcggtctggcggatctggcggaggctccaccagccccaagaaaaagagaaaagtctaagctgccttctgcggggcttgccttctggccatgcccttcttctctcccttgcacctgtacctcttggtctttgaataaagcctgagtaggaaggctagcaaaaaaaaaaaaaaaaaaaaaaaaaaaaaaaaaaaaaaaaaaaaaaaaaaaaaaaaaaaaaaaaaaaaaaaaaaaaaaaagcccagccggctccccaacctctaccgaggagggcacctctgagtccgccacccccgagagcggccctggcacctccaccgagcccagcgagggcagcgcacccggcagccctgccggcagccccacctccacagaggagggaaccagcaccgagcccagcgaaggcagcgccccaggcaccagcaccgagcctagtgagcaggagattaaacggatcaacaagatcagaagaagacttgtgaaagacagcaacaccaagaaggccggcaagacaggccccatgaaaaccctgctggttagagtgatgacacccgatctgagagagcggctggaaaacctgagaaagaagcctgaaaatatcccccagcccatcagcaatacatctagagccaacctgaataagctgctgaccgattacaccgaaatgaagaaggcgatcctgcatgtgtactgggaagagttccagaaggaccctgtgggcctgatgagccgggtggcccagcctgccagcaagaagatcgatcagaacaagctgaaacctgagatggacgagaagggcaacctgaccaccgccggctttgcctgctctcagtgtggccagcccctgttcgtgtacaagctggagcaggtgtctgagaagggcaaggcttacaccaactacttcggacggtgcaatgtggccgagcacgaaaagctgatcctgctggcccagctgaagcccgagaaggatagcgacgaagccgtgacatatagcctgggaaagtttgggcagagggccctggatttctacagcattcatgtgaccaaggagtccacccaccccgtgaagcccctggcccagatcgccggaaacagatacgcctccggacctgtgggaaaggccctgagcgacgcatgtatgggcacaatcgcctccttcctgtctaagtaccaggacatcatcatcgaacaccagaaggtggtgaagggcaaccagaagagactggagagcctgcgggagctggccggcaaggaaaacctggaataccctagcgtgaccctgccacctcagcctcacaccaaggagggcgttgatgcctacaacgaagtgatcgcccgggtgcgaatgtgggtgaacctgaacctgtggcagaagctgaagctaagcagagatgatgccaagcctctgctgagactgaagggattcccttcctttcctctggtcgagagacaggccaacgaagtggactggtgggacatggtgtgtaacgtgaagaagctgatcaacgagaaaaaggaggatggcaaggtgttttggcagaatctggctggctacaagagacaggaagccctgagaccatacctgagcagcgaggaagatcggaagaagggaaagaaattcgctcggtaccagctgggcgacctgctgctgcacctggaaaagaagcacggcgaggactggggaaaggtgtacgacgaggcctgggagcggattgacaagaaagtggaaggcctgagcaagcacatcaagctggaagaggaacggagaagcgaggacgcccagagcaaggccgccctgaccgactggctgcgggctaaggccagcttcgtgatcgagggcctgaaggaggccgacaaggacgagttctgcagatgcgagctgaagctgcagaagtggtacggggacctgcggggaaagcccttcgccatcgaagccgagaacagcatcctggacatcagcggcttcagcaagcagtacaactgtgccttcatctggcagaaggacggcgtgaagaagctgaacctgtacctgatcatcaactacttcaagggcggcaagctgcggttcaagaagatcaaacctgaagccttcgaagccaacagattctacaccgtgatcaacaaaaagagcggcgagatcgtgcccatggaggtgaacttcaacttcgacgaccccaacctgatcatcctgcctctggcctttggcaagagacagggcagagaattcatctggaacgacctgctgtccctggaaaccggcagcctgaagctggccaacggaagagtgatcgagaagacactgtacaacagaagaacccggcaggatgagcctgccctgttcgtggccctgaccttcgagcggcgggaggtcctggactcctccaatatcaaaccaatgaacctgatcggcgtggcaagaggcgaaaacatccccgccgtgatcgccctgaccgaccccgagggctgcccactgagccggtttaaggatagcctgggaaacccaacccacatcctgagaatcggcgagagctataaggagaagcagcggaccatccaggccaagaaggaggtggagcagcggagagccggcggctacagccggaagtacgccagcaaagccaagaatctggcagacgatatggtgagaaacaccgctagagatctgctgtactacgccgtgacccaggatgccatgctgatcttcgccaacctgagccggggcttcggccggcagggcaagcggaccttcatggccgagagacagtacacacggatggaggactggctgaccgccaagctggcctacgagggcctgagcaagacctacctgtccaagacactggcccagtacacctccaagacatgcagcaactgtgggtttaccatcaccagcgccgactacgacagggtgctggagaagctgaagaagacagcaacaggctggatgaccacaattaacggcaaggagctgaaggtggagggccagattacctactacaacagatacaagagacagaacgtagtcaaggacctgtccgtcgagctggatagactgagcgaagaatctgtgaacaacgacatctcctcctggacaaagggcagaagcggagaagctctgagcctcctgaagaaaagattctcccatagacccgtgcaggagaagttcgtgtgcctgaactgcggcttcgagacacacgcagccgagcaagccgccctgaacatcgccagatcctggctgttcctgcggagccaggagtacaagaaataccagacaaacaagacaaccggcaacaccgataagagagccttcgtcgagacctggcagtccttttaccggaagaagcttaaggaggtgtggaaacctgccgtgcggtctggcggatctggcggaggctccaccagccccaagaaaaagagaaaagtctaagctgccttctgcggggcttgccttctggccatgcccttcttctctcccttgcacctgtacctcttggtctttgaataaagcctgagtaggaaggctagcaaaaaaaaaaaaaaaaaaaaaaaaaaaaaaaaaaaaaaaaaaaaaaaaaaaaaaaaaaaaaaaaaaaaaaaaaaaaaaaa

SEQ ID NO: 9297 - RNA, 8787 nt, synthetic construct
  source 1..8787: mol_type = other RNA
aggaaataagagagaaaagaagagtaagaagaaatataagagccaccatggcccctaagaagaagcgtaaagtgagccggatgaaccacgaccaggagttcgacccccctaaggtgtaccctcccgtccccgccgagaagagaaagcccatccgggtcctgagcctgttcgatggcatcgccaccggtctgctggtgctgaaggacctgggcatccaggtggataggtacattgcctccgaggtgtgcgaggactccatcaccgtgggaatggtgcgtcatcagggcaagatcatgtacgtgggcgacgtgcggagcgtgacacagaagcatatccaggagtggggccctttcgacctggtgatcggcggcagcccttgcaatgacctgagcatcgtgaacccagcccggaagggcctgtacgagggaaccggcagactgttcttcgagttttacagactgctgcacgacgcccggcctaaggaaggcgacgaccggcccttcttttggctgttcgagaatgtggtggccatgggagtcagcgacaagcgggatattagccggttcctggagagcaaccccgtgatgatcgatgccaaggaagtgagcgccgcccaccgggccagatacttctggggcaatctgcctggcatgaacagacccctggccagcaccgtgaacgacaagctggagctgcaggagtgcctggagcacggccggatcgccaagttcagcaaggtgagaaccatcaccacccgaagcaacagcatcaaacaaggcaaggaccagcactttcctgtgttcatgaacgagaaggaggacatcctgtggtgtaccgagatggagagagtgttcgggttcccagtccactacacagatgtcagcaacatgtctagactggccagacagagactgctgggaagaagctggtccgtccctgtgatcagacacctgttcgcccctctgaaggagtacttcgcctgcgtgagcagcggcaacagcaacgccaacagccggggccccagcttctctagcggcctggtgccactgtccctgagagggagccacatgggccccatggagatctacaaaaccgtgagcgcctggaagcggcagcctgtgcgcgtgctgagcctgtttcggaatatcgataaagtcctgaaaagcctgggattcctggagagcggctctggctccggcggtggcaccctgaagtacgtggaggatgtgacaaacgtggtcagacgggatgtggagaagtggggccccttcgatctggtgtacggcagcacccaacccctgggcagctcttgtgaccggtgccctggctggtacatgtttcagttccaccggatcctgcagtacgccctgccgagacaggagtcccagcggccattcttttggattttcatggacaacttgctgctgaccgaggatgaccaggaaactaccactcggttcctgcagaccgaagccgtgaccctgcaggacgtgagaggccgggactaccagaacgccatgcgggtgtggtccaacatccctggactgaaaagcaagcacgcacctctgacccctaaagaagaggagtacctgcaggcccaggtgcggagcagaagcaagctggacgcccctaaggtggatctgctggtgaagaattgcctcctgcccctgagagagtacttcaagtatttcagccagaatagtctgcccctgggaggcagcggcggcggcctggtgcccgtgaccttcgaggacgtggccgtgtacttcagcagggaggagtggggcctgctggacgacatgcagaggaccttctacagggacgtgatgaaggagaactaccagaccgtggtgagcctgcccggcagcagcatccccaagcccgacgtgatcagccagatggagaggggcgaggagccctgggtgcccgacctgcagaagctgggcccccaccagacccccgagaaccccctgggcggcccaagcagcggcgcccctcctcccagcggcggcaggcggcccaagcagcggcgcccctcctcccagcggcggcagcccagccggctccccaacctctaccgaggagggcacctctgagtccgccacccccgagagcggccctggcacctccaccgagcccagcgagggcagcgcacccggcagccctgccggcagccccacctccacagaggagggaaccagcaccgagcccagcgaaggcagcgccccaggcaccagcaccgagcctagtgagcaggagattaaacggatcaacaagatcagaagaagacttgtgaaagacagcaacaccaagaaggccggcaagacaggccccatgaaaaccctgctggttagagtgatgacacccgatctgagagagcggctggaaaacctgagaaagaagcctgaaaatatcccccagcccatcagcaatacatctagagccaacctgaataagctgctgaccgattacaccgaaatgaagaaggcgatcctgcatgtgtactgggaagagttccagaaggaccctgtgggcctgatgagccgggtggcccagcctgccagcaagaagatcgatcagaacaagctgaaacctgagatggacgagaagggcaacctgaccaccgccggctttgcctgctctcagtgtggccagcccctgttcgtgtacaagctggagcaggtgtctgagaagggcaaggcttacaccaactacttcggacggtgcaatgtggccgagcacgaaaagctgatcctgctggcccagctgaagcccgagaaggatagcgacgaagccgtgacatatagcctgggaaagtttgggcagagggccctggatttctacagcattcatgtgaccaaggagtccacccaccccgtgaagcccctggcccagatcgccggaaacagatacgcctccggacctgtgggaaaggccctgagcgacgcatgtatgggcacaatcgcctccttcctgtctaagtaccaggacatcatcatcgaacaccagaaggtggtgaagggcaaccagaagagactggagagcctgcgggagctggccggcaaggaaaacctggaataccctagcgtgaccctgccacctcagcctcacaccaaggagggcgttgatgcctacaacgaagtgatcgcccgggtgcgaatgtgggtgaacctgaacctgtggcagaagctgaagctaagcagagatgatgccaagcctctgctgagactgaagggattcccttcctttcctctggtcgagagacaggccaacgaagtggactggtgggacatggtgtgtaacgtgaagaagctgatcaacgagaaaaaggaggatggcaaggtgttttggcagaatctggctggctacaagagacaggaagccctgagaccatacctgagcagcgaggaagatcggaagaagggaaagaaattcgctcggtaccagctgggcgacctgctgctgcacctggaaaagaagcacggcgaggactggggaaaggtgtacgacgaggcctgggagcggattgacaagaaagtggaaggcctgagcaagcacatcaagctggaagaggaacggagaagcgaggacgcccagagcaaggccgccctgaccgactggctgcgggctaaggccagcttcgtgatcgagggcctgaaggaggccgacaaggacgagttctgcagatgcgagctgaagctgcagaagtggtacggggacctgcggggaaagcccttcgccatcgaagccgagaacagcatcctggacatcagcggcttcagcaagcagtacaactgtgccttcatctggcagaaggacggcgtgaagaagctgaacctgtacctgatcatcaactacttcaagggcggcaagctgcggttcaagaagatcaaacctgaagccttcgaagccaacagattctacaccgtgatcaacaaaaagagcggcgagatcgtgcccatggaggtgaacttcaacttcgacgaccccaacctgatcatcctgcctctggcctttggcaagagacagggcagagaattcatctggaacgacctgctgtccctggaaaccggcagcctgaagctggccaacggaagagtgatcgagaagacactgtacaacagaagaacccggcaggatgagcctgccctgttcgtggccctgaccttcgagcggcgggaggtcctggactcctccaatatcaaaccaatgaacctgatcggcgtggcaagaggcgaaaacatccccgccgtgatcgccctgaccgaccccgagggctgcccactgagccggtttaaggatagcctgggaaacccaacccacatcctgagaatcggcgagagctataaggagaagcagcggaccatccaggccaagaaggaggtggagcagcggagagccggcggctacagccggaagtacgccagcaaagccaagaatctggcagacgatatggtgagaaacaccgctagagatctgctgtactacgccgtgacccaggatgccatgctgatcttcgccaacctgagccggggcttcggccggcagggcaagcggaccttcatggccgagagacagtacacacggatggaggactggctgaccgccaagctggcctacgagggcctgagcaagacctacctgtccaagacactggcccagtacacctccaagacatgcagcaactgtgggtttaccatcaccagcgccgactacgacagggtgctggagaagctgaagaagacagcaacaggctggatgaccacaattaacggcaaggagctgaaggtggagggccagattacctactacaacagatacaagagacagaacgtagtcaaggacctgtccgtcgagctggatagactgagcgaagaatctgtgaacaacgacatctcctcctggacaaagggcagaagcggagaagctctgagcctcctgaagaaaagattctcccatagacccgtgcaggagaagttcgtgtgcctgaactgcggcttcgagacacacgcagccgagcaagccgccctgaacatcgccagatcctggctgttcctgcggagccaggagtacaagaaataccagacaaacaagacaaccggcaacaccgataagagagccttcgtcgagacctggcagtccttttaccggaagaagcttaaggaggtgtggaaacctgccgtgcggtctggcggatctggcggaggctccaccagccccaagaaaaagagaaaagtctaagctgccttctgcggggcttgccttctggccatgcccttcttctctcccttgcacctgtacctcttggtctttgaataaagcctgagtaggaaggctagcaaaaaaaaaaaaaaaaaaaaaaaaaaaaaaaaaaaaaaaaaaaaaaaaaaaaaaaaaaaaaaaaaaaaaaaaaaaaaaaagcccagccggctccccaacctctaccgaggagggcacctctgagtccgccacccccgagagcggccctggcacctccaccgagcccagcgagggcagcgcacccggcagccctgccggcagccccacctccacagaggagggaaccagcaccgagcccagcgaaggcagcgccccaggcaccagcaccgagcctagtgagcaggagattaaacggatcaacaagatcagaagaagacttgtgaaagacagcaacaccaagaaggccggcaagacaggccccatgaaaaccctgctggttagagtgatgacacccgatctgagagagcggctggaaaacctgagaaagaagcctgaaaatatcccccagcccatcagcaatacatctagagccaacctgaataagctgctgaccgattacaccgaaatgaagaaggcgatcctgcatgtgtactgggaagagttccagaaggaccctgtgggcctgatgagccgggtggcccagcctgccagcaagaagatcgatcagaacaagctgaaacctgagatggacgagaagggcaacctgaccaccgccggctttgcctgctctcagtgtggccagcccctgttcgtgtacaagctggagcaggtgtctgagaagggcaaggcttacaccaactacttcggacggtgcaatgtggccgagcacgaaaagctgatcctgctggcccagctgaagcccgagaaggatagcgacgaagccgtgacatatagcctgggaaagtttgggcagagggccctggatttctacagcattcatgtgaccaaggagtccacccaccccgtgaagcccctggcccagatcgccggaaacagatacgcctccggacctgtgggaaaggccctgagcgacgcatgtatgggcacaatcgcctccttcctgtctaagtaccaggacatcatcatcgaacaccagaaggtggtgaagggcaaccagaagagactggagagcctgcgggagctggccggcaaggaaaacctggaataccctagcgtgaccctgccacctcagcctcacaccaaggagggcgttgatgcctacaacgaagtgatcgcccgggtgcgaatgtgggtgaacctgaacctgtggcagaagctgaagctaagcagagatgatgccaagcctctgctgagactgaagggattcccttcctttcctctggtcgagagacaggccaacgaagtggactggtgggacatggtgtgtaacgtgaagaagctgatcaacgagaaaaaggaggatggcaaggtgttttggcagaatctggctggctacaagagacaggaagccctgagaccatacctgagcagcgaggaagatcggaagaagggaaagaaattcgctcggtaccagctgggcgacctgctgctgcacctggaaaagaagcacggcgaggactggggaaaggtgtacgacgaggcctgggagcggattgacaagaaagtggaaggcctgagcaagcacatcaagctggaagaggaacggagaagcgaggacgcccagagcaaggccgccctgaccgactggctgcgggctaaggccagcttcgtgatcgagggcctgaaggaggccgacaaggacgagttctgcagatgcgagctgaagctgcagaagtggtacggggacctgcggggaaagcccttcgccatcgaagccgagaacagcatcctggacatcagcggcttcagcaagcagtacaactgtgccttcatctggcagaaggacggcgtgaagaagctgaacctgtacctgatcatcaactacttcaagggcggcaagctgcggttcaagaagatcaaacctgaagccttcgaagccaacagattctacaccgtgatcaacaaaaagagcggcgagatcgtgcccatggaggtgaacttcaacttcgacgaccccaacctgatcatcctgcctctggcctttggcaagagacagggcagagaattcatctggaacgacctgctgtccctggaaaccggcagcctgaagctggccaacggaagagtgatcgagaagacactgtacaacagaagaacccggcaggatgagcctgccctgttcgtggccctgaccttcgagcggcgggaggtcctggactcctccaatatcaaaccaatgaacctgatcggcgtggcaagaggcgaaaacatccccgccgtgatcgccctgaccgaccccgagggctgcccactgagccggtttaaggatagcctgggaaacccaacccacatcctgagaatcggcgagagctataaggagaagcagcggaccatccaggccaagaaggaggtggagcagcggagagccggcggctacagccggaagtacgccagcaaagccaagaatctggcagacgatatggtgagaaacaccgctagagatctgctgtactacgccgtgacccaggatgccatgctgatcttcgccaacctgagccggggcttcggccggcagggcaagcggaccttcatggccgagagacagtacacacggatggaggactggctgaccgccaagctggcctacgagggcctgagcaagacctacctgtccaagacactggcccagtacacctccaagacatgcagcaactgtgggtttaccatcaccagcgccgactacgacagggtgctggagaagctgaagaagacagcaacaggctggatgaccacaattaacggcaaggagctgaaggtggagggccagattacctactacaacagatacaagagacagaacgtagtcaaggacctgtccgtcgagctggatagactgagcgaagaatctgtgaacaacgacatctcctcctggacaaagggcagaagcggagaagctctgagcctcctgaagaaaagattctcccatagacccgtgcaggagaagttcgtgtgcctgaactgcggcttcgagacacacgcagccgagcaagccgccctgaacatcgccagatcctggctgttcctgcggagccaggagtacaagaaataccagacaaacaagacaaccggcaacaccgataagagagccttcgtcgagacctggcagtccttttaccggaagaagcttaaggaggtgtggaaacctgccgtgcggtctggcggatctggcggaggctccaccagccccaagaaaaagagaaaagtctaagctgccttctgcggggcttgccttctggccatgcccttcttctctcccttgcacctgtacctcttggtctttgaataaagcctgagtaggaaggctagcaaaaaaaaaaaaaaaaaaaaaaaaaaaaaaaaaaaaaaaaaaaaaaaaaaaaaaaaaaaaaaaaaaaaaaaaaaaaaaaa

SEQ ID NO: 9298 - RNA, 8787 nt, synthetic construct
  source 1..8787: mol_type = other RNA
aggaaataagagagaaaagaagagtaagaagaaatataagagccaccatggcccctaagaagaagcgtaaagtgagccggatgaaccacgaccaggagttcgacccccctaaggtgtaccctcccgtccccgccgagaagagaaagcccatccgggtcctgagcctgttcgatggcatcgccaccggtctgctggtgctgaaggacctgggcatccaggtggataggtacattgcctccgaggtgtgcgaggactccatcaccgtgggaatggtgcgtcatcagggcaagatcatgtacgtgggcgacgtgcggagcgtgacacagaagcatatccaggagtggggccctttcgacctggtgatcggcggcagcccttgcaatgacctgagcatcgtgaacccagcccggaagggcctgtacgagggaaccggcagactgttcttcgagttttacagactgctgcacgacgcccggcctaaggaaggcgacgaccggcccttcttttggctgttcgagaatgtggtggccatgggagtcagcgacaagcgggatattagccggttcctggagagcaaccccgtgatgatcgatgccaaggaagtgagcgccgcccaccgggccagatacttctggggcaatctgcctggcatgaacagacccctggccagcaccgtgaacgacaagctggagctgcaggagtgcctggagcacggccggatcgccaagttcagcaaggtgagaaccatcaccacccgaagcaacagcatcaaacaaggcaaggaccagcactttcctgtgttcatgaacgagaaggaggacatcctgtggtgtaccgagatggagagagtgttcgggttcccagtccactacacagatgtcagcaacatgtctagactggccagacagagactgctgggaagaagctggtccgtccctgtgatcagacacctgttcgcccctctgaaggagtacttcgcctgcgtgagcagcggcaacagcaacgccaacagccggggccccagcttctctagcggcctggtgccactgtccctgagagggagccacatgggccccatggagatctacaaaaccgtgagcgcctggaagcggcagcctgtgcgcgtgctgagcctgtttcggaatatcgataaagtcctgaaaagcctgggattcctggagagcggctctggctccggcggtggcaccctgaagtacgtggaggatgtgacaaacgtggtcagacgggatgtggagaagtggggccccttcgatctggtgtacggcagcacccaacccctgggcagctcttgtgaccggtgccctggctggtacatgtttcagttccaccggatcctgcagtacgccctgccgagacaggagtcccagcggccattcttttggattttcatggacaacttgctgctgaccgaggatgaccaggaaactaccactcggttcctgcagaccgaagccgtgaccctgcaggacgtgagaggccgggactaccagaacgccatgcgggtgtggtccaacatccctggactgaaaagcaagcacgcacctctgacccctaaagaagaggagtacctgcaggcccaggtgcggagcagaagcaagctggacgcccctaaggtggatctgctggtgaagaattgcctcctgcccctgagagagtacttcaagtatttcagccagaatagtctgcccctgggaggcagcggcggcggcatggtgaccttcgaggacgtggccgtgcacttcaccaagaccgagtggaccggcctgagccccgcccagagggccctgtacaggagcgtgatgctggagaacttcggcaacctgaccgccctgggctaccccgtgcccaagcccgccctgatcagcctgctggagggcggcgacatggcctggggcctggaggcccaggacgaccccctggccgagaccaccaagaacgtgtgcaaggacgtgggcggcccaagcagcggcgcccctcctcccagcggcggcaggcggcccaagcagcggcgcccctcctcccagcggcggcagcccagccggctccccaacctctaccgaggagggcacctctgagtccgccacccccgagagcggccctggcacctccaccgagcccagcgagggcagcgcacccggcagccctgccggcagccccacctccacagaggagggaaccagcaccgagcccagcgaaggcagcgccccaggcaccagcaccgagcctagtgagcaggagattaaacggatcaacaagatcagaagaagacttgtgaaagacagcaacaccaagaaggccggcaagacaggccccatgaaaaccctgctggttagagtgatgacacccgatctgagagagcggctggaaaacctgagaaagaagcctgaaaatatcccccagcccatcagcaatacatctagagccaacctgaataagctgctgaccgattacaccgaaatgaagaaggcgatcctgcatgtgtactgggaagagttccagaaggaccctgtgggcctgatgagccgggtggcccagcctgccagcaagaagatcgatcagaacaagctgaaacctgagatggacgagaagggcaacctgaccaccgccggctttgcctgctctcagtgtggccagcccctgttcgtgtacaagctggagcaggtgtctgagaagggcaaggcttacaccaactacttcggacggtgcaatgtggccgagcacgaaaagctgatcctgctggcccagctgaagcccgagaaggatagcgacgaagccgtgacatatagcctgggaaagtttgggcagagggccctggatttctacagcattcatgtgaccaaggagtccacccaccccgtgaagcccctggcccagatcgccggaaacagatacgcctccggacctgtgggaaaggccctgagcgacgcatgtatgggcacaatcgcctccttcctgtctaagtaccaggacatcatcatcgaacaccagaaggtggtgaagggcaaccagaagagactggagagcctgcgggagctggccggcaaggaaaacctggaataccctagcgtgaccctgccacctcagcctcacaccaaggagggcgttgatgcctacaacgaagtgatcgcccgggtgcgaatgtgggtgaacctgaacctgtggcagaagctgaagctaagcagagatgatgccaagcctctgctgagactgaagggattcccttcctttcctctggtcgagagacaggccaacgaagtggactggtgggacatggtgtgtaacgtgaagaagctgatcaacgagaaaaaggaggatggcaaggtgttttggcagaatctggctggctacaagagacaggaagccctgagaccatacctgagcagcgaggaagatcggaagaagggaaagaaattcgctcggtaccagctgggcgacctgctgctgcacctggaaaagaagcacggcgaggactggggaaaggtgtacgacgaggcctgggagcggattgacaagaaagtggaaggcctgagcaagcacatcaagctggaagaggaacggagaagcgaggacgcccagagcaaggccgccctgaccgactggctgcgggctaaggccagcttcgtgatcgagggcctgaaggaggccgacaaggacgagttctgcagatgcgagctgaagctgcagaagtggtacggggacctgcggggaaagcccttcgccatcgaagccgagaacagcatcctggacatcagcggcttcagcaagcagtacaactgtgccttcatctggcagaaggacggcgtgaagaagctgaacctgtacctgatcatcaactacttcaagggcggcaagctgcggttcaagaagatcaaacctgaagccttcgaagccaacagattctacaccgtgatcaacaaaaagagcggcgagatcgtgcccatggaggtgaacttcaacttcgacgaccccaacctgatcatcctgcctctggcctttggcaagagacagggcagagaattcatctggaacgacctgctgtccctggaaaccggcagcctgaagctggccaacggaagagtgatcgagaagacactgtacaacagaagaacccggcaggatgagcctgccctgttcgtggccctgaccttcgagcggcgggaggtcctggactcctccaatatcaaaccaatgaacctgatcggcgtggcaagaggcgaaaacatccccgccgtgatcgccctgaccgaccccgagggctgcccactgagccggtttaaggatagcctgggaaacccaacccacatcctgagaatcggcgagagctataaggagaagcagcggaccatccaggccaagaaggaggtggagcagcggagagccggcggctacagccggaagtacgccagcaaagccaagaatctggcagacgatatggtgagaaacaccgctagagatctgctgtactacgccgtgacccaggatgccatgctgatcttcgccaacctgagccggggcttcggccggcagggcaagcggaccttcatggccgagagacagtacacacggatggaggactggctgaccgccaagctggcctacgagggcctgagcaagacctacctgtccaagacactggcccagtacacctccaagacatgcagcaactgtgggtttaccatcaccagcgccgactacgacagggtgctggagaagctgaagaagacagcaacaggctggatgaccacaattaacggcaaggagctgaaggtggagggccagattacctactacaacagatacaagagacagaacgtagtcaaggacctgtccgtcgagctggatagactgagcgaagaatctgtgaacaacgacatctcctcctggacaaagggcagaagcggagaagctctgagcctcctgaagaaaagattctcccatagacccgtgcaggagaagttcgtgtgcctgaactgcggcttcgagacacacgcagccgagcaagccgccctgaacatcgccagatcctggctgttcctgcggagccaggagtacaagaaataccagacaaacaagacaaccggcaacaccgataagagagccttcgtcgagacctggcagtccttttaccggaagaagcttaaggaggtgtggaaacctgccgtgcggtctggcggatctggcggaggctccaccagccccaagaaaaagagaaaagtctaagctgccttctgcggggcttgccttctggccatgcccttcttctctcccttgcacctgtacctcttggtctttgaataaagcctgagtaggaaggctagcaaaaaaaaaaaaaaaaaaaaaaaaaaaaaaaaaaaaaaaaaaaaaaaaaaaaaaaaaaaaaaaaaaaaaaaaaaaaaaaagcccagccggctccccaacctctaccgaggagggcacctctgagtccgccacccccgagagcggccctggcacctccaccgagcccagcgagggcagcgcacccggcagccctgccggcagccccacctccacagaggagggaaccagcaccgagcccagcgaaggcagcgccccaggcaccagcaccgagcctagtgagcaggagattaaacggatcaacaagatcagaagaagacttgtgaaagacagcaacaccaagaaggccggcaagacaggccccatgaaaaccctgctggttagagtgatgacacccgatctgagagagcggctggaaaacctgagaaagaagcctgaaaatatcccccagcccatcagcaatacatctagagccaacctgaataagctgctgaccgattacaccgaaatgaagaaggcgatcctgcatgtgtactgggaagagttccagaaggaccctgtgggcctgatgagccgggtggcccagcctgccagcaagaagatcgatcagaacaagctgaaacctgagatggacgagaagggcaacctgaccaccgccggctttgcctgctctcagtgtggccagcccctgttcgtgtacaagctggagcaggtgtctgagaagggcaaggcttacaccaactacttcggacggtgcaatgtggccgagcacgaaaagctgatcctgctggcccagctgaagcccgagaaggatagcgacgaagccgtgacatatagcctgggaaagtttgggcagagggccctggatttctacagcattcatgtgaccaaggagtccacccaccccgtgaagcccctggcccagatcgccggaaacagatacgcctccggacctgtgggaaaggccctgagcgacgcatgtatgggcacaatcgcctccttcctgtctaagtaccaggacatcatcatcgaacaccagaaggtggtgaagggcaaccagaagagactggagagcctgcgggagctggccggcaaggaaaacctggaataccctagcgtgaccctgccacctcagcctcacaccaaggagggcgttgatgcctacaacgaagtgatcgcccgggtgcgaatgtgggtgaacctgaacctgtggcagaagctgaagctaagcagagatgatgccaagcctctgctgagactgaagggattcccttcctttcctctggtcgagagacaggccaacgaagtggactggtgggacatggtgtgtaacgtgaagaagctgatcaacgagaaaaaggaggatggcaaggtgttttggcagaatctggctggctacaagagacaggaagccctgagaccatacctgagcagcgaggaagatcggaagaagggaaagaaattcgctcggtaccagctgggcgacctgctgctgcacctggaaaagaagcacggcgaggactggggaaaggtgtacgacgaggcctgggagcggattgacaagaaagtggaaggcctgagcaagcacatcaagctggaagaggaacggagaagcgaggacgcccagagcaaggccgccctgaccgactggctgcgggctaaggccagcttcgtgatcgagggcctgaaggaggccgacaaggacgagttctgcagatgcgagctgaagctgcagaagtggtacggggacctgcggggaaagcccttcgccatcgaagccgagaacagcatcctggacatcagcggcttcagcaagcagtacaactgtgccttcatctggcagaaggacggcgtgaagaagctgaacctgtacctgatcatcaactacttcaagggcggcaagctgcggttcaagaagatcaaacctgaagccttcgaagccaacagattctacaccgtgatcaacaaaaagagcggcgagatcgtgcccatggaggtgaacttcaacttcgacgaccccaacctgatcatcctgcctctggcctttggcaagagacagggcagagaattcatctggaacgacctgctgtccctggaaaccggcagcctgaagctggccaacggaagagtgatcgagaagacactgtacaacagaagaacccggcaggatgagcctgccctgttcgtggccctgaccttcgagcggcgggaggtcctggactcctccaatatcaaaccaatgaacctgatcggcgtggcaagaggcgaaaacatccccgccgtgatcgccctgaccgaccccgagggctgcccactgagccggtttaaggatagcctgggaaacccaacccacatcctgagaatcggcgagagctataaggagaagcagcggaccatccaggccaagaaggaggtggagcagcggagagccggcggctacagccggaagtacgccagcaaagccaagaatctggcagacgatatggtgagaaacaccgctagagatctgctgtactacgccgtgacccaggatgccatgctgatcttcgccaacctgagccggggcttcggccggcagggcaagcggaccttcatggccgagagacagtacacacggatggaggactggctgaccgccaagctggcctacgagggcctgagcaagacctacctgtccaagacactggcccagtacacctccaagacatgcagcaactgtgggtttaccatcaccagcgccgactacgacagggtgctggagaagctgaagaagacagcaacaggctggatgaccacaattaacggcaaggagctgaaggtggagggccagattacctactacaacagatacaagagacagaacgtagtcaaggacctgtccgtcgagctggatagactgagcgaagaatctgtgaacaacgacatctcctcctggacaaagggcagaagcggagaagctctgagcctcctgaagaaaagattctcccatagacccgtgcaggagaagttcgtgtgcctgaactgcggcttcgagacacacgcagccgagcaagccgccctgaacatcgccagatcctggctgttcctgcggagccaggagtacaagaaataccagacaaacaagacaaccggcaacaccgataagagagccttcgtcgagacctggcagtccttttaccggaagaagcttaaggaggtgtggaaacctgccgtgcggtctggcggatctggcggaggctccaccagccccaagaaaaagagaaaagtctaagctgccttctgcggggcttgccttctggccatgcccttcttctctcccttgcacctgtacctcttggtctttgaataaagcctgagtaggaaggctagcaaaaaaaaaaaaaaaaaaaaaaaaaaaaaaaaaaaaaaaaaaaaaaaaaaaaaaaaaaaaaaaaaaaaaaaaaaaaaaaa

SEQ ID NO: 9299 - RNA, 8787 nt, synthetic construct
  source 1..8787: mol_type = other RNA
aggaaataagagagaaaagaagagtaagaagaaatataagagccaccatggcccctaagaagaagcgtaaagtgagccggatgaaccacgaccaggagttcgacccccctaaggtgtaccctcccgtccccgccgagaagagaaagcccatccgggtcctgagcctgttcgatggcatcgccaccggtctgctggtgctgaaggacctgggcatccaggtggataggtacattgcctccgaggtgtgcgaggactccatcaccgtgggaatggtgcgtcatcagggcaagatcatgtacgtgggcgacgtgcggagcgtgacacagaagcatatccaggagtggggccctttcgacctggtgatcggcggcagcccttgcaatgacctgagcatcgtgaacccagcccggaagggcctgtacgagggaaccggcagactgttcttcgagttttacagactgctgcacgacgcccggcctaaggaaggcgacgaccggcccttcttttggctgttcgagaatgtggtggccatgggagtcagcgacaagcgggatattagccggttcctggagagcaaccccgtgatgatcgatgccaaggaagtgagcgccgcccaccgggccagatacttctggggcaatctgcctggcatgaacagacccctggccagcaccgtgaacgacaagctggagctgcaggagtgcctggagcacggccggatcgccaagttcagcaaggtgagaaccatcaccacccgaagcaacagcatcaaacaaggcaaggaccagcactttcctgtgttcatgaacgagaaggaggacatcctgtggtgtaccgagatggagagagtgttcgggttcccagtccactacacagatgtcagcaacatgtctagactggccagacagagactgctgggaagaagctggtccgtccctgtgatcagacacctgttcgcccctctgaaggagtacttcgcctgcgtgagcagcggcaacagcaacgccaacagccggggccccagcttctctagcggcctggtgccactgtccctgagagggagccacatgggccccatggagatctacaaaaccgtgagcgcctggaagcggcagcctgtgcgcgtgctgagcctgtttcggaatatcgataaagtcctgaaaagcctgggattcctggagagcggctctggctccggcggtggcaccctgaagtacgtggaggatgtgacaaacgtggtcagacgggatgtggagaagtggggccccttcgatctggtgtacggcagcacccaacccctgggcagctcttgtgaccggtgccctggctggtacatgtttcagttccaccggatcctgcagtacgccctgccgagacaggagtcccagcggccattcttttggattttcatggacaacttgctgctgaccgaggatgaccaggaaactaccactcggttcctgcagaccgaagccgtgaccctgcaggacgtgagaggccgggactaccagaacgccatgcgggtgtggtccaacatccctggactgaaaagcaagcacgcacctctgacccctaaagaagaggagtacctgcaggcccaggtgcggagcagaagcaagctggacgcccctaaggtggatctgctggtgaagaattgcctcctgcccctgagagagtacttcaagtatttcagccagaatagtctgcccctgggaggcagcggcggcggcaacagccagggcctgctgaccttcagggacgtggccatcgagttcagccaggaggagctgaggtgcctgaaccacagccagtgggagctgtacagggacgtgatgttcgagaactacggccacctgctgttcctgggcctggtggtgagcaagcccgacctggtgatcttcctggagcagaagaaggacgtgtgggccgtgaagaggaaggagaccgtggccacccaccccggcaggtgggagggcggcccaagcagcggcgcccctcctcccagcggcggcaggcggcccaagcagcggcgcccctcctcccagcggcggcagcccagccggctccccaacctctaccgaggagggcacctctgagtccgccacccccgagagcggccctggcacctccaccgagcccagcgagggcagcgcacccggcagccctgccggcagccccacctccacagaggagggaaccagcaccgagcccagcgaaggcagcgccccaggcaccagcaccgagcctagtgagcaggagattaaacggatcaacaagatcagaagaagacttgtgaaagacagcaacaccaagaaggccggcaagacaggccccatgaaaaccctgctggttagagtgatgacacccgatctgagagagcggctggaaaacctgagaaagaagcctgaaaatatcccccagcccatcagcaatacatctagagccaacctgaataagctgctgaccgattacaccgaaatgaagaaggcgatcctgcatgtgtactgggaagagttccagaaggaccctgtgggcctgatgagccgggtggcccagcctgccagcaagaagatcgatcagaacaagctgaaacctgagatggacgagaagggcaacctgaccaccgccggctttgcctgctctcagtgtggccagcccctgttcgtgtacaagctggagcaggtgtctgagaagggcaaggcttacaccaactacttcggacggtgcaatgtggccgagcacgaaaagctgatcctgctggcccagctgaagcccgagaaggatagcgacgaagccgtgacatatagcctgggaaagtttgggcagagggccctggatttctacagcattcatgtgaccaaggagtccacccaccccgtgaagcccctggcccagatcgccggaaacagatacgcctccggacctgtgggaaaggccctgagcgacgcatgtatgggcacaatcgcctccttcctgtctaagtaccaggacatcatcatcgaacaccagaaggtggtgaagggcaaccagaagagactggagagcctgcgggagctggccggcaaggaaaacctggaataccctagcgtgaccctgccacctcagcctcacaccaaggagggcgttgatgcctacaacgaagtgatcgcccgggtgcgaatgtgggtgaacctgaacctgtggcagaagctgaagctaagcagagatgatgccaagcctctgctgagactgaagggattcccttcctttcctctggtcgagagacaggccaacgaagtggactggtgggacatggtgtgtaacgtgaagaagctgatcaacgagaaaaaggaggatggcaaggtgttttggcagaatctggctggctacaagagacaggaagccctgagaccatacctgagcagcgaggaagatcggaagaagggaaagaaattcgctcggtaccagctgggcgacctgctgctgcacctggaaaagaagcacggcgaggactggggaaaggtgtacgacgaggcctgggagcggattgacaagaaagtggaaggcctgagcaagcacatcaagctggaagaggaacggagaagcgaggacgcccagagcaaggccgccctgaccgactggctgcgggctaaggccagcttcgtgatcgagggcctgaaggaggccgacaaggacgagttctgcagatgcgagctgaagctgcagaagtggtacggggacctgcggggaaagcccttcgccatcgaagccgagaacagcatcctggacatcagcggcttcagcaagcagtacaactgtgccttcatctggcagaaggacggcgtgaagaagctgaacctgtacctgatcatcaactacttcaagggcggcaagctgcggttcaagaagatcaaacctgaagccttcgaagccaacagattctacaccgtgatcaacaaaaagagcggcgagatcgtgcccatggaggtgaacttcaacttcgacgaccccaacctgatcatcctgcctctggcctttggcaagagacagggcagagaattcatctggaacgacctgctgtccctggaaaccggcagcctgaagctggccaacggaagagtgatcgagaagacactgtacaacagaagaacccggcaggatgagcctgccctgttcgtggccctgaccttcgagcggcgggaggtcctggactcctccaatatcaaaccaatgaacctgatcggcgtggcaagaggcgaaaacatccccgccgtgatcgccctgaccgaccccgagggctgcccactgagccggtttaaggatagcctgggaaacccaacccacatcctgagaatcggcgagagctataaggagaagcagcggaccatccaggccaagaaggaggtggagcagcggagagccggcggctacagccggaagtacgccagcaaagccaagaatctggcagacgatatggtgagaaacaccgctagagatctgctgtactacgccgtgacccaggatgccatgctgatcttcgccaacctgagccggggcttcggccggcagggcaagcggaccttcatggccgagagacagtacacacggatggaggactggctgaccgccaagctggcctacgagggcctgagcaagacctacctgtccaagacactggcccagtacacctccaagacatgcagcaactgtgggtttaccatcaccagcgccgactacgacagggtgctggagaagctgaagaagacagcaacaggctggatgaccacaattaacggcaaggagctgaaggtggagggccagattacctactacaacagatacaagagacagaacgtagtcaaggacctgtccgtcgagctggatagactgagcgaagaatctgtgaacaacgacatctcctcctggacaaagggcagaagcggagaagctctgagcctcctgaagaaaagattctcccatagacccgtgcaggagaagttcgtgtgcctgaactgcggcttcgagacacacgcagccgagcaagccgccctgaacatcgccagatcctggctgttcctgcggagccaggagtacaagaaataccagacaaacaagacaaccggcaacaccgataagagagccttcgtcgagacctggcagtccttttaccggaagaagcttaaggaggtgtggaaacctgccgtgcggtctggcggatctggcggaggctccaccagccccaagaaaaagagaaaagtctaagctgccttctgcggggcttgccttctggccatgcccttcttctctcccttgcacctgtacctcttggtctttgaataaagcctgagtaggaaggctagcaaaaaaaaaaaaaaaaaaaaaaaaaaaaaaaaaaaaaaaaaaaaaaaaaaaaaaaaaaaaaaaaaaaaaaaaaaaaaaaagcccagccggctccccaacctctaccgaggagggcacctctgagtccgccacccccgagagcggccctggcacctccaccgagcccagcgagggcagcgcacccggcagccctgccggcagccccacctccacagaggagggaaccagcaccgagcccagcgaaggcagcgccccaggcaccagcaccgagcctagtgagcaggagattaaacggatcaacaagatcagaagaagacttgtgaaagacagcaacaccaagaaggccggcaagacaggccccatgaaaaccctgctggttagagtgatgacacccgatctgagagagcggctggaaaacctgagaaagaagcctgaaaatatcccccagcccatcagcaatacatctagagccaacctgaataagctgctgaccgattacaccgaaatgaagaaggcgatcctgcatgtgtactgggaagagttccagaaggaccctgtgggcctgatgagccgggtggcccagcctgccagcaagaagatcgatcagaacaagctgaaacctgagatggacgagaagggcaacctgaccaccgccggctttgcctgctctcagtgtggccagcccctgttcgtgtacaagctggagcaggtgtctgagaagggcaaggcttacaccaactacttcggacggtgcaatgtggccgagcacgaaaagctgatcctgctggcccagctgaagcccgagaaggatagcgacgaagccgtgacatatagcctgggaaagtttgggcagagggccctggatttctacagcattcatgtgaccaaggagtccacccaccccgtgaagcccctggcccagatcgccggaaacagatacgcctccggacctgtgggaaaggccctgagcgacgcatgtatgggcacaatcgcctccttcctgtctaagtaccaggacatcatcatcgaacaccagaaggtggtgaagggcaaccagaagagactggagagcctgcgggagctggccggcaaggaaaacctggaataccctagcgtgaccctgccacctcagcctcacaccaaggagggcgttgatgcctacaacgaagtgatcgcccgggtgcgaatgtgggtgaacctgaacctgtggcagaagctgaagctaagcagagatgatgccaagcctctgctgagactgaagggattcccttcctttcctctggtcgagagacaggccaacgaagtggactggtgggacatggtgtgtaacgtgaagaagctgatcaacgagaaaaaggaggatggcaaggtgttttggcagaatctggctggctacaagagacaggaagccctgagaccatacctgagcagcgaggaagatcggaagaagggaaagaaattcgctcggtaccagctgggcgacctgctgctgcacctggaaaagaagcacggcgaggactggggaaaggtgtacgacgaggcctgggagcggattgacaagaaagtggaaggcctgagcaagcacatcaagctggaagaggaacggagaagcgaggacgcccagagcaaggccgccctgaccgactggctgcgggctaaggccagcttcgtgatcgagggcctgaaggaggccgacaaggacgagttctgcagatgcgagctgaagctgcagaagtggtacggggacctgcggggaaagcccttcgccatcgaagccgagaacagcatcctggacatcagcggcttcagcaagcagtacaactgtgccttcatctggcagaaggacggcgtgaagaagctgaacctgtacctgatcatcaactacttcaagggcggcaagctgcggttcaagaagatcaaacctgaagccttcgaagccaacagattctacaccgtgatcaacaaaaagagcggcgagatcgtgcccatggaggtgaacttcaacttcgacgaccccaacctgatcatcctgcctctggcctttggcaagagacagggcagagaattcatctggaacgacctgctgtccctggaaaccggcagcctgaagctggccaacggaagagtgatcgagaagacactgtacaacagaagaacccggcaggatgagcctgccctgttcgtggccctgaccttcgagcggcgggaggtcctggactcctccaatatcaaaccaatgaacctgatcggcgtggcaagaggcgaaaacatccccgccgtgatcgccctgaccgaccccgagggctgcccactgagccggtttaaggatagcctgggaaacccaacccacatcctgagaatcggcgagagctataaggagaagcagcggaccatccaggccaagaaggaggtggagcagcggagagccggcggctacagccggaagtacgccagcaaagccaagaatctggcagacgatatggtgagaaacaccgctagagatctgctgtactacgccgtgacccaggatgccatgctgatcttcgccaacctgagccggggcttcggccggcagggcaagcggaccttcatggccgagagacagtacacacggatggaggactggctgaccgccaagctggcctacgagggcctgagcaagacctacctgtccaagacactggcccagtacacctccaagacatgcagcaactgtgggtttaccatcaccagcgccgactacgacagggtgctggagaagctgaagaagacagcaacaggctggatgaccacaattaacggcaaggagctgaaggtggagggccagattacctactacaacagatacaagagacagaacgtagtcaaggacctgtccgtcgagctggatagactgagcgaagaatctgtgaacaacgacatctcctcctggacaaagggcagaagcggagaagctctgagcctcctgaagaaaagattctcccatagacccgtgcaggagaagttcgtgtgcctgaactgcggcttcgagacacacgcagccgagcaagccgccctgaacatcgccagatcctggctgttcctgcggagccaggagtacaagaaataccagacaaacaagacaaccggcaacaccgataagagagccttcgtcgagacctggcagtccttttaccggaagaagcttaaggaggtgtggaaacctgccgtgcggtctggcggatctggcggaggctccaccagccccaagaaaaagagaaaagtctaagctgccttctgcggggcttgccttctggccatgcccttcttctctcccttgcacctgtacctcttggtctttgaataaagcctgagtaggaaggctagcaaaaaaaaaaaaaaaaaaaaaaaaaaaaaaaaaaaaaaaaaaaaaaaaaaaaaaaaaaaaaaaaaaaaaaaaaaaaaaaa

SEQ ID NO: 9300 - RNA, 8787 nt, synthetic construct
  source 1..8787: mol_type = other RNA
aggaaataagagagaaaagaagagtaagaagaaatataagagccaccatggcccctaagaagaagcgtaaagtgagccggatgaaccacgaccaggagttcgacccccctaaggtgtaccctcccgtccccgccgagaagagaaagcccatccgggtcctgagcctgttcgatggcatcgccaccggtctgctggtgctgaaggacctgggcatccaggtggataggtacattgcctccgaggtgtgcgaggactccatcaccgtgggaatggtgcgtcatcagggcaagatcatgtacgtgggcgacgtgcggagcgtgacacagaagcatatccaggagtggggccctttcgacctggtgatcggcggcagcccttgcaatgacctgagcatcgtgaacccagcccggaagggcctgtacgagggaaccggcagactgttcttcgagttttacagactgctgcacgacgcccggcctaaggaaggcgacgaccggcccttcttttggctgttcgagaatgtggtggccatgggagtcagcgacaagcgggatattagccggttcctggagagcaaccccgtgatgatcgatgccaaggaagtgagcgccgcccaccgggccagatacttctggggcaatctgcctggcatgaacagacccctggccagcaccgtgaacgacaagctggagctgcaggagtgcctggagcacggccggatcgccaagttcagcaaggtgagaaccatcaccacccgaagcaacagcatcaaacaaggcaaggaccagcactttcctgtgttcatgaacgagaaggaggacatcctgtggtgtaccgagatggagagagtgttcgggttcccagtccactacacagatgtcagcaacatgtctagactggccagacagagactgctgggaagaagctggtccgtccctgtgatcagacacctgttcgcccctctgaaggagtacttcgcctgcgtgagcagcggcaacagcaacgccaacagccggggccccagcttctctagcggcctggtgccactgtccctgagagggagccacatgggccccatggagatctacaaaaccgtgagcgcctggaagcggcagcctgtgcgcgtgctgagcctgtttcggaatatcgataaagtcctgaaaagcctgggattcctggagagcggctctggctccggcggtggcaccctgaagtacgtggaggatgtgacaaacgtggtcagacgggatgtggagaagtggggccccttcgatctggtgtacggcagcacccaacccctgggcagctcttgtgaccggtgccctggctggtacatgtttcagttccaccggatcctgcagtacgccctgccgagacaggagtcccagcggccattcttttggattttcatggacaacttgctgctgaccgaggatgaccaggaaactaccactcggttcctgcagaccgaagccgtgaccctgcaggacgtgagaggccgggactaccagaacgccatgcgggtgtggtccaacatccctggactgaaaagcaagcacgcacctctgacccctaaagaagaggagtacctgcaggcccaggtgcggagcagaagcaagctggacgcccctaaggtggatctgctggtgaagaattgcctcctgcccctgagagagtacttcaagtatttcagccagaatagtctgcccctgggaggcagcggcggcggcatgatccaggcccaggagagcatcaccctggaggacgtggccgtggacttcacctgggaggagtggcagctgctgggcgccgcccagaaggacctgtacagggacgtgatgctggagaactacagcaacctggtggccgtgggctaccaggccagcaagcccgacgccctgttcaagctggagcagggcgagcagccctggaccaccgaggacggcatccacagcggcgcctgcagcgacatgggcggcccaagcagcggcgcccctcctcccagcggcggcaggcggcccaagcagcggcgcccctcctcccagcggcggcagcccagccggctccccaacctctaccgaggagggcacctctgagtccgccacccccgagagcggccctggcacctccaccgagcccagcgagggcagcgcacccggcagccctgccggcagccccacctccacagaggagggaaccagcaccgagcccagcgaaggcagcgccccaggcaccagcaccgagcctagtgagcaggagattaaacggatcaacaagatcagaagaagacttgtgaaagacagcaacaccaagaaggccggcaagacaggccccatgaaaaccctgctggttagagtgatgacacccgatctgagagagcggctggaaaacctgagaaagaagcctgaaaatatcccccagcccatcagcaatacatctagagccaacctgaataagctgctgaccgattacaccgaaatgaagaaggcgatcctgcatgtgtactgggaagagttccagaaggaccctgtgggcctgatgagccgggtggcccagcctgccagcaagaagatcgatcagaacaagctgaaacctgagatggacgagaagggcaacctgaccaccgccggctttgcctgctctcagtgtggccagcccctgttcgtgtacaagctggagcaggtgtctgagaagggcaaggcttacaccaactacttcggacggtgcaatgtggccgagcacgaaaagctgatcctgctggcccagctgaagcccgagaaggatagcgacgaagccgtgacatatagcctgggaaagtttgggcagagggccctggatttctacagcattcatgtgaccaaggagtccacccaccccgtgaagcccctggcccagatcgccggaaacagatacgcctccggacctgtgggaaaggccctgagcgacgcatgtatgggcacaatcgcctccttcctgtctaagtaccaggacatcatcatcgaacaccagaaggtggtgaagggcaaccagaagagactggagagcctgcgggagctggccggcaaggaaaacctggaataccctagcgtgaccctgccacctcagcctcacaccaaggagggcgttgatgcctacaacgaagtgatcgcccgggtgcgaatgtgggtgaacctgaacctgtggcagaagctgaagctaagcagagatgatgccaagcctctgctgagactgaagggattcccttcctttcctctggtcgagagacaggccaacgaagtggactggtgggacatggtgtgtaacgtgaagaagctgatcaacgagaaaaaggaggatggcaaggtgttttggcagaatctggctggctacaagagacaggaagccctgagaccatacctgagcagcgaggaagatcggaagaagggaaagaaattcgctcggtaccagctgggcgacctgctgctgcacctggaaaagaagcacggcgaggactggggaaaggtgtacgacgaggcctgggagcggattgacaagaaagtggaaggcctgagcaagcacatcaagctggaagaggaacggagaagcgaggacgcccagagcaaggccgccctgaccgactggctgcgggctaaggccagcttcgtgatcgagggcctgaaggaggccgacaaggacgagttctgcagatgcgagctgaagctgcagaagtggtacggggacctgcggggaaagcccttcgccatcgaagccgagaacagcatcctggacatcagcggcttcagcaagcagtacaactgtgccttcatctggcagaaggacggcgtgaagaagctgaacctgtacctgatcatcaactacttcaagggcggcaagctgcggttcaagaagatcaaacctgaagccttcgaagccaacagattctacaccgtgatcaacaaaaagagcggcgagatcgtgcccatggaggtgaacttcaacttcgacgaccccaacctgatcatcctgcctctggcctttggcaagagacagggcagagaattcatctggaacgacctgctgtccctggaaaccggcagcctgaagctggccaacggaagagtgatcgagaagacactgtacaacagaagaacccggcaggatgagcctgccctgttcgtggccctgaccttcgagcggcgggaggtcctggactcctccaatatcaaaccaatgaacctgatcggcgtggcaagaggcgaaaacatccccgccgtgatcgccctgaccgaccccgagggctgcccactgagccggtttaaggatagcctgggaaacccaacccacatcctgagaatcggcgagagctataaggagaagcagcggaccatccaggccaagaaggaggtggagcagcggagagccggcggctacagccggaagtacgccagcaaagccaagaatctggcagacgatatggtgagaaacaccgctagagatctgctgtactacgccgtgacccaggatgccatgctgatcttcgccaacctgagccggggcttcggccggcagggcaagcggaccttcatggccgagagacagtacacacggatggaggactggctgaccgccaagctggcctacgagggcctgagcaagacctacctgtccaagacactggcccagtacacctccaagacatgcagcaactgtgggtttaccatcaccagcgccgactacgacagggtgctggagaagctgaagaagacagcaacaggctggatgaccacaattaacggcaaggagctgaaggtggagggccagattacctactacaacagatacaagagacagaacgtagtcaaggacctgtccgtcgagctggatagactgagcgaagaatctgtgaacaacgacatctcctcctggacaaagggcagaagcggagaagctctgagcctcctgaagaaaagattctcccatagacccgtgcaggagaagttcgtgtgcctgaactgcggcttcgagacacacgcagccgagcaagccgccctgaacatcgccagatcctggctgttcctgcggagccaggagtacaagaaataccagacaaacaagacaaccggcaacaccgataagagagccttcgtcgagacctggcagtccttttaccggaagaagcttaaggaggtgtggaaacctgccgtgcggtctggcggatctggcggaggctccaccagccccaagaaaaagagaaaagtctaagctgccttctgcggggcttgccttctggccatgcccttcttctctcccttgcacctgtacctcttggtctttgaataaagcctgagtaggaaggctagcaaaaaaaaaaaaaaaaaaaaaaaaaaaaaaaaaaaaaaaaaaaaaaaaaaaaaaaaaaaaaaaaaaaaaaaaaaaaaaaagcccagccggctccccaacctctaccgaggagggcacctctgagtccgccacccccgagagcggccctggcacctccaccgagcccagcgagggcagcgcacccggcagccctgccggcagccccacctccacagaggagggaaccagcaccgagcccagcgaaggcagcgccccaggcaccagcaccgagcctagtgagcaggagattaaacggatcaacaagatcagaagaagacttgtgaaagacagcaacaccaagaaggccggcaagacaggccccatgaaaaccctgctggttagagtgatgacacccgatctgagagagcggctggaaaacctgagaaagaagcctgaaaatatcccccagcccatcagcaatacatctagagccaacctgaataagctgctgaccgattacaccgaaatgaagaaggcgatcctgcatgtgtactgggaagagttccagaaggaccctgtgggcctgatgagccgggtggcccagcctgccagcaagaagatcgatcagaacaagctgaaacctgagatggacgagaagggcaacctgaccaccgccggctttgcctgctctcagtgtggccagcccctgttcgtgtacaagctggagcaggtgtctgagaagggcaaggcttacaccaactacttcggacggtgcaatgtggccgagcacgaaaagctgatcctgctggcccagctgaagcccgagaaggatagcgacgaagccgtgacatatagcctgggaaagtttgggcagagggccctggatttctacagcattcatgtgaccaaggagtccacccaccccgtgaagcccctggcccagatcgccggaaacagatacgcctccggacctgtgggaaaggccctgagcgacgcatgtatgggcacaatcgcctccttcctgtctaagtaccaggacatcatcatcgaacaccagaaggtggtgaagggcaaccagaagagactggagagcctgcgggagctggccggcaaggaaaacctggaataccctagcgtgaccctgccacctcagcctcacaccaaggagggcgttgatgcctacaacgaagtgatcgcccgggtgcgaatgtgggtgaacctgaacctgtggcagaagctgaagctaagcagagatgatgccaagcctctgctgagactgaagggattcccttcctttcctctggtcgagagacaggccaacgaagtggactggtgggacatggtgtgtaacgtgaagaagctgatcaacgagaaaaaggaggatggcaaggtgttttggcagaatctggctggctacaagagacaggaagccctgagaccatacctgagcagcgaggaagatcggaagaagggaaagaaattcgctcggtaccagctgggcgacctgctgctgcacctggaaaagaagcacggcgaggactggggaaaggtgtacgacgaggcctgggagcggattgacaagaaagtggaaggcctgagcaagcacatcaagctggaagaggaacggagaagcgaggacgcccagagcaaggccgccctgaccgactggctgcgggctaaggccagcttcgtgatcgagggcctgaaggaggccgacaaggacgagttctgcagatgcgagctgaagctgcagaagtggtacggggacctgcggggaaagcccttcgccatcgaagccgagaacagcatcctggacatcagcggcttcagcaagcagtacaactgtgccttcatctggcagaaggacggcgtgaagaagctgaacctgtacctgatcatcaactacttcaagggcggcaagctgcggttcaagaagatcaaacctgaagccttcgaagccaacagattctacaccgtgatcaacaaaaagagcggcgagatcgtgcccatggaggtgaacttcaacttcgacgaccccaacctgatcatcctgcctctggcctttggcaagagacagggcagagaattcatctggaacgacctgctgtccctggaaaccggcagcctgaagctggccaacggaagagtgatcgagaagacactgtacaacagaagaacccggcaggatgagcctgccctgttcgtggccctgaccttcgagcggcgggaggtcctggactcctccaatatcaaaccaatgaacctgatcggcgtggcaagaggcgaaaacatccccgccgtgatcgccctgaccgaccccgagggctgcccactgagccggtttaaggatagcctgggaaacccaacccacatcctgagaatcggcgagagctataaggagaagcagcggaccatccaggccaagaaggaggtggagcagcggagagccggcggctacagccggaagtacgccagcaaagccaagaatctggcagacgatatggtgagaaacaccgctagagatctgctgtactacgccgtgacccaggatgccatgctgatcttcgccaacctgagccggggcttcggccggcagggcaagcggaccttcatggccgagagacagtacacacggatggaggactggctgaccgccaagctggcctacgagggcctgagcaagacctacctgtccaagacactggcccagtacacctccaagacatgcagcaactgtgggtttaccatcaccagcgccgactacgacagggtgctggagaagctgaagaagacagcaacaggctggatgaccacaattaacggcaaggagctgaaggtggagggccagattacctactacaacagatacaagagacagaacgtagtcaaggacctgtccgtcgagctggatagactgagcgaagaatctgtgaacaacgacatctcctcctggacaaagggcagaagcggagaagctctgagcctcctgaagaaaagattctcccatagacccgtgcaggagaagttcgtgtgcctgaactgcggcttcgagacacacgcagccgagcaagccgccctgaacatcgccagatcctggctgttcctgcggagccaggagtacaagaaataccagacaaacaagacaaccggcaacaccgataagagagccttcgtcgagacctggcagtccttttaccggaagaagcttaaggaggtgtggaaacctgccgtgcggtctggcggatctggcggaggctccaccagccccaagaaaaagagaaaagtctaagctgccttctgcggggcttgccttctggccatgcccttcttctctcccttgcacctgtacctcttggtctttgaataaagcctgagtaggaaggctagcaaaaaaaaaaaaaaaaaaaaaaaaaaaaaaaaaaaaaaaaaaaaaaaaaaaaaaaaaaaaaaaaaaaaaaaaaaaaaaaa

SEQ ID NO: 9301 - RNA, 8787 nt, synthetic construct
  source 1..8787: mol_type = other RNA
aggaaataagagagaaaagaagagtaagaagaaatataagagccaccatggcccctaagaagaagcgtaaagtgagccggatgaaccacgaccaggagttcgacccccctaaggtgtaccctcccgtccccgccgagaagagaaagcccatccgggtcctgagcctgttcgatggcatcgccaccggtctgctggtgctgaaggacctgggcatccaggtggataggtacattgcctccgaggtgtgcgaggactccatcaccgtgggaatggtgcgtcatcagggcaagatcatgtacgtgggcgacgtgcggagcgtgacacagaagcatatccaggagtggggccctttcgacctggtgatcggcggcagcccttgcaatgacctgagcatcgtgaacccagcccggaagggcctgtacgagggaaccggcagactgttcttcgagttttacagactgctgcacgacgcccggcctaaggaaggcgacgaccggcccttcttttggctgttcgagaatgtggtggccatgggagtcagcgacaagcgggatattagccggttcctggagagcaaccccgtgatgatcgatgccaaggaagtgagcgccgcccaccgggccagatacttctggggcaatctgcctggcatgaacagacccctggccagcaccgtgaacgacaagctggagctgcaggagtgcctggagcacggccggatcgccaagttcagcaaggtgagaaccatcaccacccgaagcaacagcatcaaacaaggcaaggaccagcactttcctgtgttcatgaacgagaaggaggacatcctgtggtgtaccgagatggagagagtgttcgggttcccagtccactacacagatgtcagcaacatgtctagactggccagacagagactgctgggaagaagctggtccgtccctgtgatcagacacctgttcgcccctctgaaggagtacttcgcctgcgtgagcagcggcaacagcaacgccaacagccggggccccagcttctctagcggcctggtgccactgtccctgagagggagccacatgggccccatggagatctacaaaaccgtgagcgcctggaagcggcagcctgtgcgcgtgctgagcctgtttcggaatatcgataaagtcctgaaaagcctgggattcctggagagcggctctggctccggcggtggcaccctgaagtacgtggaggatgtgacaaacgtggtcagacgggatgtggagaagtggggccccttcgatctggtgtacggcagcacccaacccctgggcagctcttgtgaccggtgccctggctggtacatgtttcagttccaccggatcctgcagtacgccctgccgagacaggagtcccagcggccattcttttggattttcatggacaacttgctgctgaccgaggatgaccaggaaactaccactcggttcctgcagaccgaagccgtgaccctgcaggacgtgagaggccgggactaccagaacgccatgcgggtgtggtccaacatccctggactgaaaagcaagcacgcacctctgacccctaaagaagaggagtacctgcaggcccaggtgcggagcagaagcaagctggacgcccctaaggtggatctgctggtgaagaattgcctcctgcccctgagagagtacttcaagtatttcagccagaatagtctgcccctgggaggcagcggcggcggcgagccctgggccatcaccttcgccgacgtggccgtgtacttcagccccgaggagtggggctgcctgcagcccacccagagggccctgtacagggacgtgatgagggacacctacgtgctgctgagcgccctgggcggcggcggcgccaagcccgccctgatcagctgggtggagagggaggccgagctgtgggaccccgacgcccaggaccccgaggtgcccaagtggcccaccgaggccgacggcggcccaagcagcggcgcccctcctcccagcggcggcaggcggcccaagcagcggcgcccctcctcccagcggcggcagcccagccggctccccaacctctaccgaggagggcacctctgagtccgccacccccgagagcggccctggcacctccaccgagcccagcgagggcagcgcacccggcagccctgccggcagccccacctccacagaggagggaaccagcaccgagcccagcgaaggcagcgccccaggcaccagcaccgagcctagtgagcaggagattaaacggatcaacaagatcagaagaagacttgtgaaagacagcaacaccaagaaggccggcaagacaggccccatgaaaaccctgctggttagagtgatgacacccgatctgagagagcggctggaaaacctgagaaagaagcctgaaaatatcccccagcccatcagcaatacatctagagccaacctgaataagctgctgaccgattacaccgaaatgaagaaggcgatcctgcatgtgtactgggaagagttccagaaggaccctgtgggcctgatgagccgggtggcccagcctgccagcaagaagatcgatcagaacaagctgaaacctgagatggacgagaagggcaacctgaccaccgccggctttgcctgctctcagtgtggccagcccctgttcgtgtacaagctggagcaggtgtctgagaagggcaaggcttacaccaactacttcggacggtgcaatgtggccgagcacgaaaagctgatcctgctggcccagctgaagcccgagaaggatagcgacgaagccgtgacatatagcctgggaaagtttgggcagagggccctggatttctacagcattcatgtgaccaaggagtccacccaccccgtgaagcccctggcccagatcgccggaaacagatacgcctccggacctgtgggaaaggccctgagcgacgcatgtatgggcacaatcgcctccttcctgtctaagtaccaggacatcatcatcgaacaccagaaggtggtgaagggcaaccagaagagactggagagcctgcgggagctggccggcaaggaaaacctggaataccctagcgtgaccctgccacctcagcctcacaccaaggagggcgttgatgcctacaacgaagtgatcgcccgggtgcgaatgtgggtgaacctgaacctgtggcagaagctgaagctaagcagagatgatgccaagcctctgctgagactgaagggattcccttcctttcctctggtcgagagacaggccaacgaagtggactggtgggacatggtgtgtaacgtgaagaagctgatcaacgagaaaaaggaggatggcaaggtgttttggcagaatctggctggctacaagagacaggaagccctgagaccatacctgagcagcgaggaagatcggaagaagggaaagaaattcgctcggtaccagctgggcgacctgctgctgcacctggaaaagaagcacggcgaggactggggaaaggtgtacgacgaggcctgggagcggattgacaagaaagtggaaggcctgagcaagcacatcaagctggaagaggaacggagaagcgaggacgcccagagcaaggccgccctgaccgactggctgcgggctaaggccagcttcgtgatcgagggcctgaaggaggccgacaaggacgagttctgcagatgcgagctgaagctgcagaagtggtacggggacctgcggggaaagcccttcgccatcgaagccgagaacagcatcctggacatcagcggcttcagcaagcagtacaactgtgccttcatctggcagaaggacggcgtgaagaagctgaacctgtacctgatcatcaactacttcaagggcggcaagctgcggttcaagaagatcaaacctgaagccttcgaagccaacagattctacaccgtgatcaacaaaaagagcggcgagatcgtgcccatggaggtgaacttcaacttcgacgaccccaacctgatcatcctgcctctggcctttggcaagagacagggcagagaattcatctggaacgacctgctgtccctggaaaccggcagcctgaagctggccaacggaagagtgatcgagaagacactgtacaacagaagaacccggcaggatgagcctgccctgttcgtggccctgaccttcgagcggcgggaggtcctggactcctccaatatcaaaccaatgaacctgatcggcgtggcaagaggcgaaaacatccccgccgtgatcgccctgaccgaccccgagggctgcccactgagccggtttaaggatagcctgggaaacccaacccacatcctgagaatcggcgagagctataaggagaagcagcggaccatccaggccaagaaggaggtggagcagcggagagccggcggctacagccggaagtacgccagcaaagccaagaatctggcagacgatatggtgagaaacaccgctagagatctgctgtactacgccgtgacccaggatgccatgctgatcttcgccaacctgagccggggcttcggccggcagggcaagcggaccttcatggccgagagacagtacacacggatggaggactggctgaccgccaagctggcctacgagggcctgagcaagacctacctgtccaagacactggcccagtacacctccaagacatgcagcaactgtgggtttaccatcaccagcgccgactacgacagggtgctggagaagctgaagaagacagcaacaggctggatgaccacaattaacggcaaggagctgaaggtggagggccagattacctactacaacagatacaagagacagaacgtagtcaaggacctgtccgtcgagctggatagactgagcgaagaatctgtgaacaacgacatctcctcctggacaaagggcagaagcggagaagctctgagcctcctgaagaaaagattctcccatagacccgtgcaggagaagttcgtgtgcctgaactgcggcttcgagacacacgcagccgagcaagccgccctgaacatcgccagatcctggctgttcctgcggagccaggagtacaagaaataccagacaaacaagacaaccggcaacaccgataagagagccttcgtcgagacctggcagtccttttaccggaagaagcttaaggaggtgtggaaacctgccgtgcggtctggcggatctggcggaggctccaccagccccaagaaaaagagaaaagtctaagctgccttctgcggggcttgccttctggccatgcccttcttctctcccttgcacctgtacctcttggtctttgaataaagcctgagtaggaaggctagcaaaaaaaaaaaaaaaaaaaaaaaaaaaaaaaaaaaaaaaaaaaaaaaaaaaaaaaaaaaaaaaaaaaaaaaaaaaaaaaagcccagccggctccccaacctctaccgaggagggcacctctgagtccgccacccccgagagcggccctggcacctccaccgagcccagcgagggcagcgcacccggcagccctgccggcagccccacctccacagaggagggaaccagcaccgagcccagcgaaggcagcgccccaggcaccagcaccgagcctagtgagcaggagattaaacggatcaacaagatcagaagaagacttgtgaaagacagcaacaccaagaaggccggcaagacaggccccatgaaaaccctgctggttagagtgatgacacccgatctgagagagcggctggaaaacctgagaaagaagcctgaaaatatcccccagcccatcagcaatacatctagagccaacctgaataagctgctgaccgattacaccgaaatgaagaaggcgatcctgcatgtgtactgggaagagttccagaaggaccctgtgggcctgatgagccgggtggcccagcctgccagcaagaagatcgatcagaacaagctgaaacctgagatggacgagaagggcaacctgaccaccgccggctttgcctgctctcagtgtggccagcccctgttcgtgtacaagctggagcaggtgtctgagaagggcaaggcttacaccaactacttcggacggtgcaatgtggccgagcacgaaaagctgatcctgctggcccagctgaagcccgagaaggatagcgacgaagccgtgacatatagcctgggaaagtttgggcagagggccctggatttctacagcattcatgtgaccaaggagtccacccaccccgtgaagcccctggcccagatcgccggaaacagatacgcctccggacctgtgggaaaggccctgagcgacgcatgtatgggcacaatcgcctccttcctgtctaagtaccaggacatcatcatcgaacaccagaaggtggtgaagggcaaccagaagagactggagagcctgcgggagctggccggcaaggaaaacctggaataccctagcgtgaccctgccacctcagcctcacaccaaggagggcgttgatgcctacaacgaagtgatcgcccgggtgcgaatgtgggtgaacctgaacctgtggcagaagctgaagctaagcagagatgatgccaagcctctgctgagactgaagggattcccttcctttcctctggtcgagagacaggccaacgaagtggactggtgggacatggtgtgtaacgtgaagaagctgatcaacgagaaaaaggaggatggcaaggtgttttggcagaatctggctggctacaagagacaggaagccctgagaccatacctgagcagcgaggaagatcggaagaagggaaagaaattcgctcggtaccagctgggcgacctgctgctgcacctggaaaagaagcacggcgaggactggggaaaggtgtacgacgaggcctgggagcggattgacaagaaagtggaaggcctgagcaagcacatcaagctggaagaggaacggagaagcgaggacgcccagagcaaggccgccctgaccgactggctgcgggctaaggccagcttcgtgatcgagggcctgaaggaggccgacaaggacgagttctgcagatgcgagctgaagctgcagaagtggtacggggacctgcggggaaagcccttcgccatcgaagccgagaacagcatcctggacatcagcggcttcagcaagcagtacaactgtgccttcatctggcagaaggacggcgtgaagaagctgaacctgtacctgatcatcaactacttcaagggcggcaagctgcggttcaagaagatcaaacctgaagccttcgaagccaacagattctacaccgtgatcaacaaaaagagcggcgagatcgtgcccatggaggtgaacttcaacttcgacgaccccaacctgatcatcctgcctctggcctttggcaagagacagggcagagaattcatctggaacgacctgctgtccctggaaaccggcagcctgaagctggccaacggaagagtgatcgagaagacactgtacaacagaagaacccggcaggatgagcctgccctgttcgtggccctgaccttcgagcggcgggaggtcctggactcctccaatatcaaaccaatgaacctgatcggcgtggcaagaggcgaaaacatccccgccgtgatcgccctgaccgaccccgagggctgcccactgagccggtttaaggatagcctgggaaacccaacccacatcctgagaatcggcgagagctataaggagaagcagcggaccatccaggccaagaaggaggtggagcagcggagagccggcggctacagccggaagtacgccagcaaagccaagaatctggcagacgatatggtgagaaacaccgctagagatctgctgtactacgccgtgacccaggatgccatgctgatcttcgccaacctgagccggggcttcggccggcagggcaagcggaccttcatggccgagagacagtacacacggatggaggactggctgaccgccaagctggcctacgagggcctgagcaagacctacctgtccaagacactggcccagtacacctccaagacatgcagcaactgtgggtttaccatcaccagcgccgactacgacagggtgctggagaagctgaagaagacagcaacaggctggatgaccacaattaacggcaaggagctgaaggtggagggccagattacctactacaacagatacaagagacagaacgtagtcaaggacctgtccgtcgagctggatagactgagcgaagaatctgtgaacaacgacatctcctcctggacaaagggcagaagcggagaagctctgagcctcctgaagaaaagattctcccatagacccgtgcaggagaagttcgtgtgcctgaactgcggcttcgagacacacgcagccgagcaagccgccctgaacatcgccagatcctggctgttcctgcggagccaggagtacaagaaataccagacaaacaagacaaccggcaacaccgataagagagccttcgtcgagacctggcagtccttttaccggaagaagcttaaggaggtgtggaaacctgccgtgcggtctggcggatctggcggaggctccaccagccccaagaaaaagagaaaagtctaagctgccttctgcggggcttgccttctggccatgcccttcttctctcccttgcacctgtacctcttggtctttgaataaagcctgagtaggaaggctagcaaaaaaaaaaaaaaaaaaaaaaaaaaaaaaaaaaaaaaaaaaaaaaaaaaaaaaaaaaaaaaaaaaaaaaaaaaaaaaaa

SEQ ID NO: 9302 - RNA, 8787 nt, synthetic construct
  source 1..8787: mol_type = other RNA
aggaaataagagagaaaagaagagtaagaagaaatataagagccaccatggcccctaagaagaagcgtaaagtgagccggatgaaccacgaccaggagttcgacccccctaaggtgtaccctcccgtccccgccgagaagagaaagcccatccgggtcctgagcctgttcgatggcatcgccaccggtctgctggtgctgaaggacctgggcatccaggtggataggtacattgcctccgaggtgtgcgaggactccatcaccgtgggaatggtgcgtcatcagggcaagatcatgtacgtgggcgacgtgcggagcgtgacacagaagcatatccaggagtggggccctttcgacctggtgatcggcggcagcccttgcaatgacctgagcatcgtgaacccagcccggaagggcctgtacgagggaaccggcagactgttcttcgagttttacagactgctgcacgacgcccggcctaaggaaggcgacgaccggcccttcttttggctgttcgagaatgtggtggccatgggagtcagcgacaagcgggatattagccggttcctggagagcaaccccgtgatgatcgatgccaaggaagtgagcgccgcccaccgggccagatacttctggggcaatctgcctggcatgaacagacccctggccagcaccgtgaacgacaagctggagctgcaggagtgcctggagcacggccggatcgccaagttcagcaaggtgagaaccatcaccacccgaagcaacagcatcaaacaaggcaaggaccagcactttcctgtgttcatgaacgagaaggaggacatcctgtggtgtaccgagatggagagagtgttcgggttcccagtccactacacagatgtcagcaacatgtctagactggccagacagagactgctgggaagaagctggtccgtccctgtgatcagacacctgttcgcccctctgaaggagtacttcgcctgcgtgagcagcggcaacagcaacgccaacagccggggccccagcttctctagcggcctggtgccactgtccctgagagggagccacatgggccccatggagatctacaaaaccgtgagcgcctggaagcggcagcctgtgcgcgtgctgagcctgtttcggaatatcgataaagtcctgaaaagcctgggattcctggagagcggctctggctccggcggtggcaccctgaagtacgtggaggatgtgacaaacgtggtcagacgggatgtggagaagtggggccccttcgatctggtgtacggcagcacccaacccctgggcagctcttgtgaccggtgccctggctggtacatgtttcagttccaccggatcctgcagtacgccctgccgagacaggagtcccagcggccattcttttggattttcatggacaacttgctgctgaccgaggatgaccaggaaactaccactcggttcctgcagaccgaagccgtgaccctgcaggacgtgagaggccgggactaccagaacgccatgcgggtgtggtccaacatccctggactgaaaagcaagcacgcacctctgacccctaaagaagaggagtacctgcaggcccaggtgcggagcagaagcaagctggacgcccctaaggtggatctgctggtgaagaattgcctcctgcccctgagagagtacttcaagtatttcagccagaatagtctgcccctgggaggcagcggcggcggcagccaggagcccgtgagcttcgaggaggtggccgtgtacttcagcagggaggagtgggccctgctggaccccgcccagagggccctgtacagggacgtgatgctggagacctacgagtgcgtggccagcctggcccccctgcccgcccccaagcccatggtgatcagcctgctggaggagggcgaggagccctggatccccgacgtgggcagccccgaggccgtggccggcgacgtgagccccggcggcccaagcagcggcgcccctcctcccagcggcggcaggcggcccaagcagcggcgcccctcctcccagcggcggcagcccagccggctccccaacctctaccgaggagggcacctctgagtccgccacccccgagagcggccctggcacctccaccgagcccagcgagggcagcgcacccggcagccctgccggcagccccacctccacagaggagggaaccagcaccgagcccagcgaaggcagcgccccaggcaccagcaccgagcctagtgagcaggagattaaacggatcaacaagatcagaagaagacttgtgaaagacagcaacaccaagaaggccggcaagacaggccccatgaaaaccctgctggttagagtgatgacacccgatctgagagagcggctggaaaacctgagaaagaagcctgaaaatatcccccagcccatcagcaatacatctagagccaacctgaataagctgctgaccgattacaccgaaatgaagaaggcgatcctgcatgtgtactgggaagagttccagaaggaccctgtgggcctgatgagccgggtggcccagcctgccagcaagaagatcgatcagaacaagctgaaacctgagatggacgagaagggcaacctgaccaccgccggctttgcctgctctcagtgtggccagcccctgttcgtgtacaagctggagcaggtgtctgagaagggcaaggcttacaccaactacttcggacggtgcaatgtggccgagcacgaaaagctgatcctgctggcccagctgaagcccgagaaggatagcgacgaagccgtgacatatagcctgggaaagtttgggcagagggccctggatttctacagcattcatgtgaccaaggagtccacccaccccgtgaagcccctggcccagatcgccggaaacagatacgcctccggacctgtgggaaaggccctgagcgacgcatgtatgggcacaatcgcctccttcctgtctaagtaccaggacatcatcatcgaacaccagaaggtggtgaagggcaaccagaagagactggagagcctgcgggagctggccggcaaggaaaacctggaataccctagcgtgaccctgccacctcagcctcacaccaaggagggcgttgatgcctacaacgaagtgatcgcccgggtgcgaatgtgggtgaacctgaacctgtggcagaagctgaagctaagcagagatgatgccaagcctctgctgagactgaagggattcccttcctttcctctggtcgagagacaggccaacgaagtggactggtgggacatggtgtgtaacgtgaagaagctgatcaacgagaaaaaggaggatggcaaggtgttttggcagaatctggctggctacaagagacaggaagccctgagaccatacctgagcagcgaggaagatcggaagaagggaaagaaattcgctcggtaccagctgggcgacctgctgctgcacctggaaaagaagcacggcgaggactggggaaaggtgtacgacgaggcctgggagcggattgacaagaaagtggaaggcctgagcaagcacatcaagctggaagaggaacggagaagcgaggacgcccagagcaaggccgccctgaccgactggctgcgggctaaggccagcttcgtgatcgagggcctgaaggaggccgacaaggacgagttctgcagatgcgagctgaagctgcagaagtggtacggggacctgcggggaaagcccttcgccatcgaagccgagaacagcatcctggacatcagcggcttcagcaagcagtacaactgtgccttcatctggcagaaggacggcgtgaagaagctgaacctgtacctgatcatcaactacttcaagggcggcaagctgcggttcaagaagatcaaacctgaagccttcgaagccaacagattctacaccgtgatcaacaaaaagagcggcgagatcgtgcccatggaggtgaacttcaacttcgacgaccccaacctgatcatcctgcctctggcctttggcaagagacagggcagagaattcatctggaacgacctgctgtccctggaaaccggcagcctgaagctggccaacggaagagtgatcgagaagacactgtacaacagaagaacccggcaggatgagcctgccctgttcgtggccctgaccttcgagcggcgggaggtcctggactcctccaatatcaaaccaatgaacctgatcggcgtggcaagaggcgaaaacatccccgccgtgatcgccctgaccgaccccgagggctgcccactgagccggtttaaggatagcctgggaaacccaacccacatcctgagaatcggcgagagctataaggagaagcagcggaccatccaggccaagaaggaggtggagcagcggagagccggcggctacagccggaagtacgccagcaaagccaagaatctggcagacgatatggtgagaaacaccgctagagatctgctgtactacgccgtgacccaggatgccatgctgatcttcgccaacctgagccggggcttcggccggcagggcaagcggaccttcatggccgagagacagtacacacggatggaggactggctgaccgccaagctggcctacgagggcctgagcaagacctacctgtccaagacactggcccagtacacctccaagacatgcagcaactgtgggtttaccatcaccagcgccgactacgacagggtgctggagaagctgaagaagacagcaacaggctggatgaccacaattaacggcaaggagctgaaggtggagggccagattacctactacaacagatacaagagacagaacgtagtcaaggacctgtccgtcgagctggatagactgagcgaagaatctgtgaacaacgacatctcctcctggacaaagggcagaagcggagaagctctgagcctcctgaagaaaagattctcccatagacccgtgcaggagaagttcgtgtgcctgaactgcggcttcgagacacacgcagccgagcaagccgccctgaacatcgccagatcctggctgttcctgcggagccaggagtacaagaaataccagacaaacaagacaaccggcaacaccgataagagagccttcgtcgagacctggcagtccttttaccggaagaagcttaaggaggtgtggaaacctgccgtgcggtctggcggatctggcggaggctccaccagccccaagaaaaagagaaaagtctaagctgccttctgcggggcttgccttctggccatgcccttcttctctcccttgcacctgtacctcttggtctttgaataaagcctgagtaggaaggctagcaaaaaaaaaaaaaaaaaaaaaaaaaaaaaaaaaaaaaaaaaaaaaaaaaaaaaaaaaaaaaaaaaaaaaaaaaaaaaaaagcccagccggctccccaacctctaccgaggagggcacctctgagtccgccacccccgagagcggccctggcacctccaccgagcccagcgagggcagcgcacccggcagccctgccggcagccccacctccacagaggagggaaccagcaccgagcccagcgaaggcagcgccccaggcaccagcaccgagcctagtgagcaggagattaaacggatcaacaagatcagaagaagacttgtgaaagacagcaacaccaagaaggccggcaagacaggccccatgaaaaccctgctggttagagtgatgacacccgatctgagagagcggctggaaaacctgagaaagaagcctgaaaatatcccccagcccatcagcaatacatctagagccaacctgaataagctgctgaccgattacaccgaaatgaagaaggcgatcctgcatgtgtactgggaagagttccagaaggaccctgtgggcctgatgagccgggtggcccagcctgccagcaagaagatcgatcagaacaagctgaaacctgagatggacgagaagggcaacctgaccaccgccggctttgcctgctctcagtgtggccagcccctgttcgtgtacaagctggagcaggtgtctgagaagggcaaggcttacaccaactacttcggacggtgcaatgtggccgagcacgaaaagctgatcctgctggcccagctgaagcccgagaaggatagcgacgaagccgtgacatatagcctgggaaagtttgggcagagggccctggatttctacagcattcatgtgaccaaggagtccacccaccccgtgaagcccctggcccagatcgccggaaacagatacgcctccggacctgtgggaaaggccctgagcgacgcatgtatgggcacaatcgcctccttcctgtctaagtaccaggacatcatcatcgaacaccagaaggtggtgaagggcaaccagaagagactggagagcctgcgggagctggccggcaaggaaaacctggaataccctagcgtgaccctgccacctcagcctcacaccaaggagggcgttgatgcctacaacgaagtgatcgcccgggtgcgaatgtgggtgaacctgaacctgtggcagaagctgaagctaagcagagatgatgccaagcctctgctgagactgaagggattcccttcctttcctctggtcgagagacaggccaacgaagtggactggtgggacatggtgtgtaacgtgaagaagctgatcaacgagaaaaaggaggatggcaaggtgttttggcagaatctggctggctacaagagacaggaagccctgagaccatacctgagcagcgaggaagatcggaagaagggaaagaaattcgctcggtaccagctgggcgacctgctgctgcacctggaaaagaagcacggcgaggactggggaaaggtgtacgacgaggcctgggagcggattgacaagaaagtggaaggcctgagcaagcacatcaagctggaagaggaacggagaagcgaggacgcccagagcaaggccgccctgaccgactggctgcgggctaaggccagcttcgtgatcgagggcctgaaggaggccgacaaggacgagttctgcagatgcgagctgaagctgcagaagtggtacggggacctgcggggaaagcccttcgccatcgaagccgagaacagcatcctggacatcagcggcttcagcaagcagtacaactgtgccttcatctggcagaaggacggcgtgaagaagctgaacctgtacctgatcatcaactacttcaagggcggcaagctgcggttcaagaagatcaaacctgaagccttcgaagccaacagattctacaccgtgatcaacaaaaagagcggcgagatcgtgcccatggaggtgaacttcaacttcgacgaccccaacctgatcatcctgcctctggcctttggcaagagacagggcagagaattcatctggaacgacctgctgtccctggaaaccggcagcctgaagctggccaacggaagagtgatcgagaagacactgtacaacagaagaacccggcaggatgagcctgccctgttcgtggccctgaccttcgagcggcgggaggtcctggactcctccaatatcaaaccaatgaacctgatcggcgtggcaagaggcgaaaacatccccgccgtgatcgccctgaccgaccccgagggctgcccactgagccggtttaaggatagcctgggaaacccaacccacatcctgagaatcggcgagagctataaggagaagcagcggaccatccaggccaagaaggaggtggagcagcggagagccggcggctacagccggaagtacgccagcaaagccaagaatctggcagacgatatggtgagaaacaccgctagagatctgctgtactacgccgtgacccaggatgccatgctgatcttcgccaacctgagccggggcttcggccggcagggcaagcggaccttcatggccgagagacagtacacacggatggaggactggctgaccgccaagctggcctacgagggcctgagcaagacctacctgtccaagacactggcccagtacacctccaagacatgcagcaactgtgggtttaccatcaccagcgccgactacgacagggtgctggagaagctgaagaagacagcaacaggctggatgaccacaattaacggcaaggagctgaaggtggagggccagattacctactacaacagatacaagagacagaacgtagtcaaggacctgtccgtcgagctggatagactgagcgaagaatctgtgaacaacgacatctcctcctggacaaagggcagaagcggagaagctctgagcctcctgaagaaaagattctcccatagacccgtgcaggagaagttcgtgtgcctgaactgcggcttcgagacacacgcagccgagcaagccgccctgaacatcgccagatcctggctgttcctgcggagccaggagtacaagaaataccagacaaacaagacaaccggcaacaccgataagagagccttcgtcgagacctggcagtccttttaccggaagaagcttaaggaggtgtggaaacctgccgtgcggtctggcggatctggcggaggctccaccagccccaagaaaaagagaaaagtctaagctgccttctgcggggcttgccttctggccatgcccttcttctctcccttgcacctgtacctcttggtctttgaataaagcctgagtaggaaggctagcaaaaaaaaaaaaaaaaaaaaaaaaaaaaaaaaaaaaaaaaaaaaaaaaaaaaaaaaaaaaaaaaaaaaaaaaaaaaaaaa

SEQ ID NO: 9303 - RNA, 8787 nt, synthetic construct
  source 1..8787: mol_type = other RNA
aggaaataagagagaaaagaagagtaagaagaaatataagagccaccatggcccctaagaagaagcgtaaagtgagccggatgaaccacgaccaggagttcgacccccctaaggtgtaccctcccgtccccgccgagaagagaaagcccatccgggtcctgagcctgttcgatggcatcgccaccggtctgctggtgctgaaggacctgggcatccaggtggataggtacattgcctccgaggtgtgcgaggactccatcaccgtgggaatggtgcgtcatcagggcaagatcatgtacgtgggcgacgtgcggagcgtgacacagaagcatatccaggagtggggccctttcgacctggtgatcggcggcagcccttgcaatgacctgagcatcgtgaacccagcccggaagggcctgtacgagggaaccggcagactgttcttcgagttttacagactgctgcacgacgcccggcctaaggaaggcgacgaccggcccttcttttggctgttcgagaatgtggtggccatgggagtcagcgacaagcgggatattagccggttcctggagagcaaccccgtgatgatcgatgccaaggaagtgagcgccgcccaccgggccagatacttctggggcaatctgcctggcatgaacagacccctggccagcaccgtgaacgacaagctggagctgcaggagtgcctggagcacggccggatcgccaagttcagcaaggtgagaaccatcaccacccgaagcaacagcatcaaacaaggcaaggaccagcactttcctgtgttcatgaacgagaaggaggacatcctgtggtgtaccgagatggagagagtgttcgggttcccagtccactacacagatgtcagcaacatgtctagactggccagacagagactgctgggaagaagctggtccgtccctgtgatcagacacctgttcgcccctctgaaggagtacttcgcctgcgtgagcagcggcaacagcaacgccaacagccggggccccagcttctctagcggcctggtgccactgtccctgagagggagccacatgggccccatggagatctacaaaaccgtgagcgcctggaagcggcagcctgtgcgcgtgctgagcctgtttcggaatatcgataaagtcctgaaaagcctgggattcctggagagcggctctggctccggcggtggcaccctgaagtacgtggaggatgtgacaaacgtggtcagacgggatgtggagaagtggggccccttcgatctggtgtacggcagcacccaacccctgggcagctcttgtgaccggtgccctggctggtacatgtttcagttccaccggatcctgcagtacgccctgccgagacaggagtcccagcggccattcttttggattttcatggacaacttgctgctgaccgaggatgaccaggaaactaccactcggttcctgcagaccgaagccgtgaccctgcaggacgtgagaggccgggactaccagaacgccatgcgggtgtggtccaacatccctggactgaaaagcaagcacgcacctctgacccctaaagaagaggagtacctgcaggcccaggtgcggagcagaagcaagctggacgcccctaaggtggatctgctggtgaagaattgcctcctgcccctgagagagtacttcaagtatttcagccagaatagtctgcccctgggaggcagcggcggcggcgcccaggcccccctgagcttcgaggacgtggccgtgagcttcagcagggaggagtggaggctgctggtgcccgcccagaaggacctgtacagggacgtgatgctggagaactacaggaacctggtgagcgtgggctaccaggccagcgagcccggcagcctgttccagctggagcacgccggccccctgagggccgtggagggcgccgcccccaggcccccctgccccgaggagatctgggagggcggcccaagcagcggcgcccctcctcccagcggcggcaggcggcccaagcagcggcgcccctcctcccagcggcggcagcccagccggctccccaacctctaccgaggagggcacctctgagtccgccacccccgagagcggccctggcacctccaccgagcccagcgagggcagcgcacccggcagccctgccggcagccccacctccacagaggagggaaccagcaccgagcccagcgaaggcagcgccccaggcaccagcaccgagcctagtgagcaggagattaaacggatcaacaagatcagaagaagacttgtgaaagacagcaacaccaagaaggccggcaagacaggccccatgaaaaccctgctggttagagtgatgacacccgatctgagagagcggctggaaaacctgagaaagaagcctgaaaatatcccccagcccatcagcaatacatctagagccaacctgaataagctgctgaccgattacaccgaaatgaagaaggcgatcctgcatgtgtactgggaagagttccagaaggaccctgtgggcctgatgagccgggtggcccagcctgccagcaagaagatcgatcagaacaagctgaaacctgagatggacgagaagggcaacctgaccaccgccggctttgcctgctctcagtgtggccagcccctgttcgtgtacaagctggagcaggtgtctgagaagggcaaggcttacaccaactacttcggacggtgcaatgtggccgagcacgaaaagctgatcctgctggcccagctgaagcccgagaaggatagcgacgaagccgtgacatatagcctgggaaagtttgggcagagggccctggatttctacagcattcatgtgaccaaggagtccacccaccccgtgaagcccctggcccagatcgccggaaacagatacgcctccggacctgtgggaaaggccctgagcgacgcatgtatgggcacaatcgcctccttcctgtctaagtaccaggacatcatcatcgaacaccagaaggtggtgaagggcaaccagaagagactggagagcctgcgggagctggccggcaaggaaaacctggaataccctagcgtgaccctgccacctcagcctcacaccaaggagggcgttgatgcctacaacgaagtgatcgcccgggtgcgaatgtgggtgaacctgaacctgtggcagaagctgaagctaagcagagatgatgccaagcctctgctgagactgaagggattcccttcctttcctctggtcgagagacaggccaacgaagtggactggtgggacatggtgtgtaacgtgaagaagctgatcaacgagaaaaaggaggatggcaaggtgttttggcagaatctggctggctacaagagacaggaagccctgagaccatacctgagcagcgaggaagatcggaagaagggaaagaaattcgctcggtaccagctgggcgacctgctgctgcacctggaaaagaagcacggcgaggactggggaaaggtgtacgacgaggcctgggagcggattgacaagaaagtggaaggcctgagcaagcacatcaagctggaagaggaacggagaagcgaggacgcccagagcaaggccgccctgaccgactggctgcgggctaaggccagcttcgtgatcgagggcctgaaggaggccgacaaggacgagttctgcagatgcgagctgaagctgcagaagtggtacggggacctgcggggaaagcccttcgccatcgaagccgagaacagcatcctggacatcagcggcttcagcaagcagtacaactgtgccttcatctggcagaaggacggcgtgaagaagctgaacctgtacctgatcatcaactacttcaagggcggcaagctgcggttcaagaagatcaaacctgaagccttcgaagccaacagattctacaccgtgatcaacaaaaagagcggcgagatcgtgcccatggaggtgaacttcaacttcgacgaccccaacctgatcatcctgcctctggcctttggcaagagacagggcagagaattcatctggaacgacctgctgtccctggaaaccggcagcctgaagctggccaacggaagagtgatcgagaagacactgtacaacagaagaacccggcaggatgagcctgccctgttcgtggccctgaccttcgagcggcgggaggtcctggactcctccaatatcaaaccaatgaacctgatcggcgtggcaagaggcgaaaacatccccgccgtgatcgccctgaccgaccccgagggctgcccactgagccggtttaaggatagcctgggaaacccaacccacatcctgagaatcggcgagagctataaggagaagcagcggaccatccaggccaagaaggaggtggagcagcggagagccggcggctacagccggaagtacgccagcaaagccaagaatctggcagacgatatggtgagaaacaccgctagagatctgctgtactacgccgtgacccaggatgccatgctgatcttcgccaacctgagccggggcttcggccggcagggcaagcggaccttcatggccgagagacagtacacacggatggaggactggctgaccgccaagctggcctacgagggcctgagcaagacctacctgtccaagacactggcccagtacacctccaagacatgcagcaactgtgggtttaccatcaccagcgccgactacgacagggtgctggagaagctgaagaagacagcaacaggctggatgaccacaattaacggcaaggagctgaaggtggagggccagattacctactacaacagatacaagagacagaacgtagtcaaggacctgtccgtcgagctggatagactgagcgaagaatctgtgaacaacgacatctcctcctggacaaagggcagaagcggagaagctctgagcctcctgaagaaaagattctcccatagacccgtgcaggagaagttcgtgtgcctgaactgcggcttcgagacacacgcagccgagcaagccgccctgaacatcgccagatcctggctgttcctgcggagccaggagtacaagaaataccagacaaacaagacaaccggcaacaccgataagagagccttcgtcgagacctggcagtccttttaccggaagaagcttaaggaggtgtggaaacctgccgtgcggtctggcggatctggcggaggctccaccagccccaagaaaaagagaaaagtctaagctgccttctgcggggcttgccttctggccatgcccttcttctctcccttgcacctgtacctcttggtctttgaataaagcctgagtaggaaggctagcaaaaaaaaaaaaaaaaaaaaaaaaaaaaaaaaaaaaaaaaaaaaaaaaaaaaaaaaaaaaaaaaaaaaaaaaaaaaaaaagcccagccggctccccaacctctaccgaggagggcacctctgagtccgccacccccgagagcggccctggcacctccaccgagcccagcgagggcagcgcacccggcagccctgccggcagccccacctccacagaggagggaaccagcaccgagcccagcgaaggcagcgccccaggcaccagcaccgagcctagtgagcaggagattaaacggatcaacaagatcagaagaagacttgtgaaagacagcaacaccaagaaggccggcaagacaggccccatgaaaaccctgctggttagagtgatgacacccgatctgagagagcggctggaaaacctgagaaagaagcctgaaaatatcccccagcccatcagcaatacatctagagccaacctgaataagctgctgaccgattacaccgaaatgaagaaggcgatcctgcatgtgtactgggaagagttccagaaggaccctgtgggcctgatgagccgggtggcccagcctgccagcaagaagatcgatcagaacaagctgaaacctgagatggacgagaagggcaacctgaccaccgccggctttgcctgctctcagtgtggccagcccctgttcgtgtacaagctggagcaggtgtctgagaagggcaaggcttacaccaactacttcggacggtgcaatgtggccgagcacgaaaagctgatcctgctggcccagctgaagcccgagaaggatagcgacgaagccgtgacatatagcctgggaaagtttgggcagagggccctggatttctacagcattcatgtgaccaaggagtccacccaccccgtgaagcccctggcccagatcgccggaaacagatacgcctccggacctgtgggaaaggccctgagcgacgcatgtatgggcacaatcgcctccttcctgtctaagtaccaggacatcatcatcgaacaccagaaggtggtgaagggcaaccagaagagactggagagcctgcgggagctggccggcaaggaaaacctggaataccctagcgtgaccctgccacctcagcctcacaccaaggagggcgttgatgcctacaacgaagtgatcgcccgggtgcgaatgtgggtgaacctgaacctgtggcagaagctgaagctaagcagagatgatgccaagcctctgctgagactgaagggattcccttcctttcctctggtcgagagacaggccaacgaagtggactggtgggacatggtgtgtaacgtgaagaagctgatcaacgagaaaaaggaggatggcaaggtgttttggcagaatctggctggctacaagagacaggaagccctgagaccatacctgagcagcgaggaagatcggaagaagggaaagaaattcgctcggtaccagctgggcgacctgctgctgcacctggaaaagaagcacggcgaggactggggaaaggtgtacgacgaggcctgggagcggattgacaagaaagtggaaggcctgagcaagcacatcaagctggaagaggaacggagaagcgaggacgcccagagcaaggccgccctgaccgactggctgcgggctaaggccagcttcgtgatcgagggcctgaaggaggccgacaaggacgagttctgcagatgcgagctgaagctgcagaagtggtacggggacctgcggggaaagcccttcgccatcgaagccgagaacagcatcctggacatcagcggcttcagcaagcagtacaactgtgccttcatctggcagaaggacggcgtgaagaagctgaacctgtacctgatcatcaactacttcaagggcggcaagctgcggttcaagaagatcaaacctgaagccttcgaagccaacagattctacaccgtgatcaacaaaaagagcggcgagatcgtgcccatggaggtgaacttcaacttcgacgaccccaacctgatcatcctgcctctggcctttggcaagagacagggcagagaattcatctggaacgacctgctgtccctggaaaccggcagcctgaagctggccaacggaagagtgatcgagaagacactgtacaacagaagaacccggcaggatgagcctgccctgttcgtggccctgaccttcgagcggcgggaggtcctggactcctccaatatcaaaccaatgaacctgatcggcgtggcaagaggcgaaaacatccccgccgtgatcgccctgaccgaccccgagggctgcccactgagccggtttaaggatagcctgggaaacccaacccacatcctgagaatcggcgagagctataaggagaagcagcggaccatccaggccaagaaggaggtggagcagcggagagccggcggctacagccggaagtacgccagcaaagccaagaatctggcagacgatatggtgagaaacaccgctagagatctgctgtactacgccgtgacccaggatgccatgctgatcttcgccaacctgagccggggcttcggccggcagggcaagcggaccttcatggccgagagacagtacacacggatggaggactggctgaccgccaagctggcctacgagggcctgagcaagacctacctgtccaagacactggcccagtacacctccaagacatgcagcaactgtgggtttaccatcaccagcgccgactacgacagggtgctggagaagctgaagaagacagcaacaggctggatgaccacaattaacggcaaggagctgaaggtggagggccagattacctactacaacagatacaagagacagaacgtagtcaaggacctgtccgtcgagctggatagactgagcgaagaatctgtgaacaacgacatctcctcctggacaaagggcagaagcggagaagctctgagcctcctgaagaaaagattctcccatagacccgtgcaggagaagttcgtgtgcctgaactgcggcttcgagacacacgcagccgagcaagccgccctgaacatcgccagatcctggctgttcctgcggagccaggagtacaagaaataccagacaaacaagacaaccggcaacaccgataagagagccttcgtcgagacctggcagtccttttaccggaagaagcttaaggaggtgtggaaacctgccgtgcggtctggcggatctggcggaggctccaccagccccaagaaaaagagaaaagtctaagctgccttctgcggggcttgccttctggccatgcccttcttctctcccttgcacctgtacctcttggtctttgaataaagcctgagtaggaaggctagcaaaaaaaaaaaaaaaaaaaaaaaaaaaaaaaaaaaaaaaaaaaaaaaaaaaaaaaaaaaaaaaaaaaaaaaaaaaaaaaa

SEQ ID NO: 9304 - RNA, 8787 nt, synthetic construct
  source 1..8787: mol_type = other RNA
aggaaataagagagaaaagaagagtaagaagaaatataagagccaccatggcccctaagaagaagcgtaaagtgagccggatgaaccacgaccaggagttcgacccccctaaggtgtaccctcccgtccccgccgagaagagaaagcccatccgggtcctgagcctgttcgatggcatcgccaccggtctgctggtgctgaaggacctgggcatccaggtggataggtacattgcctccgaggtgtgcgaggactccatcaccgtgggaatggtgcgtcatcagggcaagatcatgtacgtgggcgacgtgcggagcgtgacacagaagcatatccaggagtggggccctttcgacctggtgatcggcggcagcccttgcaatgacctgagcatcgtgaacccagcccggaagggcctgtacgagggaaccggcagactgttcttcgagttttacagactgctgcacgacgcccggcctaaggaaggcgacgaccggcccttcttttggctgttcgagaatgtggtggccatgggagtcagcgacaagcgggatattagccggttcctggagagcaaccccgtgatgatcgatgccaaggaagtgagcgccgcccaccgggccagatacttctggggcaatctgcctggcatgaacagacccctggccagcaccgtgaacgacaagctggagctgcaggagtgcctggagcacggccggatcgccaagttcagcaaggtgagaaccatcaccacccgaagcaacagcatcaaacaaggcaaggaccagcactttcctgtgttcatgaacgagaaggaggacatcctgtggtgtaccgagatggagagagtgttcgggttcccagtccactacacagatgtcagcaacatgtctagactggccagacagagactgctgggaagaagctggtccgtccctgtgatcagacacctgttcgcccctctgaaggagtacttcgcctgcgtgagcagcggcaacagcaacgccaacagccggggccccagcttctctagcggcctggtgccactgtccctgagagggagccacatgggccccatggagatctacaaaaccgtgagcgcctggaagcggcagcctgtgcgcgtgctgagcctgtttcggaatatcgataaagtcctgaaaagcctgggattcctggagagcggctctggctccggcggtggcaccctgaagtacgtggaggatgtgacaaacgtggtcagacgggatgtggagaagtggggccccttcgatctggtgtacggcagcacccaacccctgggcagctcttgtgaccggtgccctggctggtacatgtttcagttccaccggatcctgcagtacgccctgccgagacaggagtcccagcggccattcttttggattttcatggacaacttgctgctgaccgaggatgaccaggaaactaccactcggttcctgcagaccgaagccgtgaccctgcaggacgtgagaggccgggactaccagaacgccatgcgggtgtggtccaacatccctggactgaaaagcaagcacgcacctctgacccctaaagaagaggagtacctgcaggcccaggtgcggagcagaagcaagctggacgcccctaaggtggatctgctggtgaagaattgcctcctgcccctgagagagtacttcaagtatttcagccagaatagtctgcccctgggaggcagcggcggcggcccccaggagcccgtgaccttcgccgacgtggccgtgctgttcacccccgaggagtggctgttcctggacagcgcccagaagagcctgtacagggacgtgatgctggagaactacaggaacctggccagcgtgggcgaccagctgtgcaagaccaagatgagcagccacatggagcagagggaggagctgtgcgtgaccgagaggggcgtgttccccggcgcccacctgggcccccacctgcagggcggcccaagcagcggcgcccctcctcccagcggcggcaggcggcccaagcagcggcgcccctcctcccagcggcggcagcccagccggctccccaacctctaccgaggagggcacctctgagtccgccacccccgagagcggccctggcacctccaccgagcccagcgagggcagcgcacccggcagccctgccggcagccccacctccacagaggagggaaccagcaccgagcccagcgaaggcagcgccccaggcaccagcaccgagcctagtgagcaggagattaaacggatcaacaagatcagaagaagacttgtgaaagacagcaacaccaagaaggccggcaagacaggccccatgaaaaccctgctggttagagtgatgacacccgatctgagagagcggctggaaaacctgagaaagaagcctgaaaatatcccccagcccatcagcaatacatctagagccaacctgaataagctgctgaccgattacaccgaaatgaagaaggcgatcctgcatgtgtactgggaagagttccagaaggaccctgtgggcctgatgagccgggtggcccagcctgccagcaagaagatcgatcagaacaagctgaaacctgagatggacgagaagggcaacctgaccaccgccggctttgcctgctctcagtgtggccagcccctgttcgtgtacaagctggagcaggtgtctgagaagggcaaggcttacaccaactacttcggacggtgcaatgtggccgagcacgaaaagctgatcctgctggcccagctgaagcccgagaaggatagcgacgaagccgtgacatatagcctgggaaagtttgggcagagggccctggatttctacagcattcatgtgaccaaggagtccacccaccccgtgaagcccctggcccagatcgccggaaacagatacgcctccggacctgtgggaaaggccctgagcgacgcatgtatgggcacaatcgcctccttcctgtctaagtaccaggacatcatcatcgaacaccagaaggtggtgaagggcaaccagaagagactggagagcctgcgggagctggccggcaaggaaaacctggaataccctagcgtgaccctgccacctcagcctcacaccaaggagggcgttgatgcctacaacgaagtgatcgcccgggtgcgaatgtgggtgaacctgaacctgtggcagaagctgaagctaagcagagatgatgccaagcctctgctgagactgaagggattcccttcctttcctctggtcgagagacaggccaacgaagtggactggtgggacatggtgtgtaacgtgaagaagctgatcaacgagaaaaaggaggatggcaaggtgttttggcagaatctggctggctacaagagacaggaagccctgagaccatacctgagcagcgaggaagatcggaagaagggaaagaaattcgctcggtaccagctgggcgacctgctgctgcacctggaaaagaagcacggcgaggactggggaaaggtgtacgacgaggcctgggagcggattgacaagaaagtggaaggcctgagcaagcacatcaagctggaagaggaacggagaagcgaggacgcccagagcaaggccgccctgaccgactggctgcgggctaaggccagcttcgtgatcgagggcctgaaggaggccgacaaggacgagttctgcagatgcgagctgaagctgcagaagtggtacggggacctgcggggaaagcccttcgccatcgaagccgagaacagcatcctggacatcagcggcttcagcaagcagtacaactgtgccttcatctggcagaaggacggcgtgaagaagctgaacctgtacctgatcatcaactacttcaagggcggcaagctgcggttcaagaagatcaaacctgaagccttcgaagccaacagattctacaccgtgatcaacaaaaagagcggcgagatcgtgcccatggaggtgaacttcaacttcgacgaccccaacctgatcatcctgcctctggcctttggcaagagacagggcagagaattcatctggaacgacctgctgtccctggaaaccggcagcctgaagctggccaacggaagagtgatcgagaagacactgtacaacagaagaacccggcaggatgagcctgccctgttcgtggccctgaccttcgagcggcgggaggtcctggactcctccaatatcaaaccaatgaacctgatcggcgtggcaagaggcgaaaacatccccgccgtgatcgccctgaccgaccccgagggctgcccactgagccggtttaaggatagcctgggaaacccaacccacatcctgagaatcggcgagagctataaggagaagcagcggaccatccaggccaagaaggaggtggagcagcggagagccggcggctacagccggaagtacgccagcaaagccaagaatctggcagacgatatggtgagaaacaccgctagagatctgctgtactacgccgtgacccaggatgccatgctgatcttcgccaacctgagccggggcttcggccggcagggcaagcggaccttcatggccgagagacagtacacacggatggaggactggctgaccgccaagctggcctacgagggcctgagcaagacctacctgtccaagacactggcccagtacacctccaagacatgcagcaactgtgggtttaccatcaccagcgccgactacgacagggtgctggagaagctgaagaagacagcaacaggctggatgaccacaattaacggcaaggagctgaaggtggagggccagattacctactacaacagatacaagagacagaacgtagtcaaggacctgtccgtcgagctggatagactgagcgaagaatctgtgaacaacgacatctcctcctggacaaagggcagaagcggagaagctctgagcctcctgaagaaaagattctcccatagacccgtgcaggagaagttcgtgtgcctgaactgcggcttcgagacacacgcagccgagcaagccgccctgaacatcgccagatcctggctgttcctgcggagccaggagtacaagaaataccagacaaacaagacaaccggcaacaccgataagagagccttcgtcgagacctggcagtccttttaccggaagaagcttaaggaggtgtggaaacctgccgtgcggtctggcggatctggcggaggctccaccagccccaagaaaaagagaaaagtctaagctgccttctgcggggcttgccttctggccatgcccttcttctctcccttgcacctgtacctcttggtctttgaataaagcctgagtaggaaggctagcaaaaaaaaaaaaaaaaaaaaaaaaaaaaaaaaaaaaaaaaaaaaaaaaaaaaaaaaaaaaaaaaaaaaaaaaaaaaaaaagcccagccggctccccaacctctaccgaggagggcacctctgagtccgccacccccgagagcggccctggcacctccaccgagcccagcgagggcagcgcacccggcagccctgccggcagccccacctccacagaggagggaaccagcaccgagcccagcgaaggcagcgccccaggcaccagcaccgagcctagtgagcaggagattaaacggatcaacaagatcagaagaagacttgtgaaagacagcaacaccaagaaggccggcaagacaggccccatgaaaaccctgctggttagagtgatgacacccgatctgagagagcggctggaaaacctgagaaagaagcctgaaaatatcccccagcccatcagcaatacatctagagccaacctgaataagctgctgaccgattacaccgaaatgaagaaggcgatcctgcatgtgtactgggaagagttccagaaggaccctgtgggcctgatgagccgggtggcccagcctgccagcaagaagatcgatcagaacaagctgaaacctgagatggacgagaagggcaacctgaccaccgccggctttgcctgctctcagtgtggccagcccctgttcgtgtacaagctggagcaggtgtctgagaagggcaaggcttacaccaactacttcggacggtgcaatgtggccgagcacgaaaagctgatcctgctggcccagctgaagcccgagaaggatagcgacgaagccgtgacatatagcctgggaaagtttgggcagagggccctggatttctacagcattcatgtgaccaaggagtccacccaccccgtgaagcccctggcccagatcgccggaaacagatacgcctccggacctgtgggaaaggccctgagcgacgcatgtatgggcacaatcgcctccttcctgtctaagtaccaggacatcatcatcgaacaccagaaggtggtgaagggcaaccagaagagactggagagcctgcgggagctggccggcaaggaaaacctggaataccctagcgtgaccctgccacctcagcctcacaccaaggagggcgttgatgcctacaacgaagtgatcgcccgggtgcgaatgtgggtgaacctgaacctgtggcagaagctgaagctaagcagagatgatgccaagcctctgctgagactgaagggattcccttcctttcctctggtcgagagacaggccaacgaagtggactggtgggacatggtgtgtaacgtgaagaagctgatcaacgagaaaaaggaggatggcaaggtgttttggcagaatctggctggctacaagagacaggaagccctgagaccatacctgagcagcgaggaagatcggaagaagggaaagaaattcgctcggtaccagctgggcgacctgctgctgcacctggaaaagaagcacggcgaggactggggaaaggtgtacgacgaggcctgggagcggattgacaagaaagtggaaggcctgagcaagcacatcaagctggaagaggaacggagaagcgaggacgcccagagcaaggccgccctgaccgactggctgcgggctaaggccagcttcgtgatcgagggcctgaaggaggccgacaaggacgagttctgcagatgcgagctgaagctgcagaagtggtacggggacctgcggggaaagcccttcgccatcgaagccgagaacagcatcctggacatcagcggcttcagcaagcagtacaactgtgccttcatctggcagaaggacggcgtgaagaagctgaacctgtacctgatcatcaactacttcaagggcggcaagctgcggttcaagaagatcaaacctgaagccttcgaagccaacagattctacaccgtgatcaacaaaaagagcggcgagatcgtgcccatggaggtgaacttcaacttcgacgaccccaacctgatcatcctgcctctggcctttggcaagagacagggcagagaattcatctggaacgacctgctgtccctggaaaccggcagcctgaagctggccaacggaagagtgatcgagaagacactgtacaacagaagaacccggcaggatgagcctgccctgttcgtggccctgaccttcgagcggcgggaggtcctggactcctccaatatcaaaccaatgaacctgatcggcgtggcaagaggcgaaaacatccccgccgtgatcgccctgaccgaccccgagggctgcccactgagccggtttaaggatagcctgggaaacccaacccacatcctgagaatcggcgagagctataaggagaagcagcggaccatccaggccaagaaggaggtggagcagcggagagccggcggctacagccggaagtacgccagcaaagccaagaatctggcagacgatatggtgagaaacaccgctagagatctgctgtactacgccgtgacccaggatgccatgctgatcttcgccaacctgagccggggcttcggccggcagggcaagcggaccttcatggccgagagacagtacacacggatggaggactggctgaccgccaagctggcctacgagggcctgagcaagacctacctgtccaagacactggcccagtacacctccaagacatgcagcaactgtgggtttaccatcaccagcgccgactacgacagggtgctggagaagctgaagaagacagcaacaggctggatgaccacaattaacggcaaggagctgaaggtggagggccagattacctactacaacagatacaagagacagaacgtagtcaaggacctgtccgtcgagctggatagactgagcgaagaatctgtgaacaacgacatctcctcctggacaaagggcagaagcggagaagctctgagcctcctgaagaaaagattctcccatagacccgtgcaggagaagttcgtgtgcctgaactgcggcttcgagacacacgcagccgagcaagccgccctgaacatcgccagatcctggctgttcctgcggagccaggagtacaagaaataccagacaaacaagacaaccggcaacaccgataagagagccttcgtcgagacctggcagtccttttaccggaagaagcttaaggaggtgtggaaacctgccgtgcggtctggcggatctggcggaggctccaccagccccaagaaaaagagaaaagtctaagctgccttctgcggggcttgccttctggccatgcccttcttctctcccttgcacctgtacctcttggtctttgaataaagcctgagtaggaaggctagcaaaaaaaaaaaaaaaaaaaaaaaaaaaaaaaaaaaaaaaaaaaaaaaaaaaaaaaaaaaaaaaaaaaaaaaaaaaaaaaa

SEQ ID NO: 9305 - RNA, 8787 nt, synthetic construct
  source 1..8787: mol_type = other RNA
aggaaataagagagaaaagaagagtaagaagaaatataagagccaccatggcccctaagaagaagcgtaaagtgagccggatgaaccacgaccaggagttcgacccccctaaggtgtaccctcccgtccccgccgagaagagaaagcccatccgggtcctgagcctgttcgatggcatcgccaccggtctgctggtgctgaaggacctgggcatccaggtggataggtacattgcctccgaggtgtgcgaggactccatcaccgtgggaatggtgcgtcatcagggcaagatcatgtacgtgggcgacgtgcggagcgtgacacagaagcatatccaggagtggggccctttcgacctggtgatcggcggcagcccttgcaatgacctgagcatcgtgaacccagcccggaagggcctgtacgagggaaccggcagactgttcttcgagttttacagactgctgcacgacgcccggcctaaggaaggcgacgaccggcccttcttttggctgttcgagaatgtggtggccatgggagtcagcgacaagcgggatattagccggttcctggagagcaaccccgtgatgatcgatgccaaggaagtgagcgccgcccaccgggccagatacttctggggcaatctgcctggcatgaacagacccctggccagcaccgtgaacgacaagctggagctgcaggagtgcctggagcacggccggatcgccaagttcagcaaggtgagaaccatcaccacccgaagcaacagcatcaaacaaggcaaggaccagcactttcctgtgttcatgaacgagaaggaggacatcctgtggtgtaccgagatggagagagtgttcgggttcccagtccactacacagatgtcagcaacatgtctagactggccagacagagactgctgggaagaagctggtccgtccctgtgatcagacacctgttcgcccctctgaaggagtacttcgcctgcgtgagcagcggcaacagcaacgccaacagccggggccccagcttctctagcggcctggtgccactgtccctgagagggagccacatgggccccatggagatctacaaaaccgtgagcgcctggaagcggcagcctgtgcgcgtgctgagcctgtttcggaatatcgataaagtcctgaaaagcctgggattcctggagagcggctctggctccggcggtggcaccctgaagtacgtggaggatgtgacaaacgtggtcagacgggatgtggagaagtggggccccttcgatctggtgtacggcagcacccaacccctgggcagctcttgtgaccggtgccctggctggtacatgtttcagttccaccggatcctgcagtacgccctgccgagacaggagtcccagcggccattcttttggattttcatggacaacttgctgctgaccgaggatgaccaggaaactaccactcggttcctgcagaccgaagccgtgaccctgcaggacgtgagaggccgggactaccagaacgccatgcgggtgtggtccaacatccctggactgaaaagcaagcacgcacctctgacccctaaagaagaggagtacctgcaggcccaggtgcggagcagaagcaagctggacgcccctaaggtggatctgctggtgaagaattgcctcctgcccctgagagagtacttcaagtatttcagccagaatagtctgcccctgggaggcagcggcggcggcatggccttcgaggacgtggccgtgtacttcagccaggaggagtggggcctgctggacaccgcccagagggccctgtacaggcacgtgatgctggagaacttcaccctggtgagcagcctgggcctgagcaccagcaggcccagggtggtggtgcagctggagaggggcgaggagccctgggtgcccagcaggatcgacagcacccccgccaggaacgcccagggcaggaggaaccccggcagcggcggcccaagcagcggcgcccctcctcccagcggcggcaggcggcccaagcagcggcgcccctcctcccagcggcggcagcccagccggctccccaacctctaccgaggagggcacctctgagtccgccacccccgagagcggccctggcacctccaccgagcccagcgagggcagcgcacccggcagccctgccggcagccccacctccacagaggagggaaccagcaccgagcccagcgaaggcagcgccccaggcaccagcaccgagcctagtgagcaggagattaaacggatcaacaagatcagaagaagacttgtgaaagacagcaacaccaagaaggccggcaagacaggccccatgaaaaccctgctggttagagtgatgacacccgatctgagagagcggctggaaaacctgagaaagaagcctgaaaatatcccccagcccatcagcaatacatctagagccaacctgaataagctgctgaccgattacaccgaaatgaagaaggcgatcctgcatgtgtactgggaagagttccagaaggaccctgtgggcctgatgagccgggtggcccagcctgccagcaagaagatcgatcagaacaagctgaaacctgagatggacgagaagggcaacctgaccaccgccggctttgcctgctctcagtgtggccagcccctgttcgtgtacaagctggagcaggtgtctgagaagggcaaggcttacaccaactacttcggacggtgcaatgtggccgagcacgaaaagctgatcctgctggcccagctgaagcccgagaaggatagcgacgaagccgtgacatatagcctgggaaagtttgggcagagggccctggatttctacagcattcatgtgaccaaggagtccacccaccccgtgaagcccctggcccagatcgccggaaacagatacgcctccggacctgtgggaaaggccctgagcgacgcatgtatgggcacaatcgcctccttcctgtctaagtaccaggacatcatcatcgaacaccagaaggtggtgaagggcaaccagaagagactggagagcctgcgggagctggccggcaaggaaaacctggaataccctagcgtgaccctgccacctcagcctcacaccaaggagggcgttgatgcctacaacgaagtgatcgcccgggtgcgaatgtgggtgaacctgaacctgtggcagaagctgaagctaagcagagatgatgccaagcctctgctgagactgaagggattcccttcctttcctctggtcgagagacaggccaacgaagtggactggtgggacatggtgtgtaacgtgaagaagctgatcaacgagaaaaaggaggatggcaaggtgttttggcagaatctggctggctacaagagacaggaagccctgagaccatacctgagcagcgaggaagatcggaagaagggaaagaaattcgctcggtaccagctgggcgacctgctgctgcacctggaaaagaagcacggcgaggactggggaaaggtgtacgacgaggcctgggagcggattgacaagaaagtggaaggcctgagcaagcacatcaagctggaagaggaacggagaagcgaggacgcccagagcaaggccgccctgaccgactggctgcgggctaaggccagcttcgtgatcgagggcctgaaggaggccgacaaggacgagttctgcagatgcgagctgaagctgcagaagtggtacggggacctgcggggaaagcccttcgccatcgaagccgagaacagcatcctggacatcagcggcttcagcaagcagtacaactgtgccttcatctggcagaaggacggcgtgaagaagctgaacctgtacctgatcatcaactacttcaagggcggcaagctgcggttcaagaagatcaaacctgaagccttcgaagccaacagattctacaccgtgatcaacaaaaagagcggcgagatcgtgcccatggaggtgaacttcaacttcgacgaccccaacctgatcatcctgcctctggcctttggcaagagacagggcagagaattcatctggaacgacctgctgtccctggaaaccggcagcctgaagctggccaacggaagagtgatcgagaagacactgtacaacagaagaacccggcaggatgagcctgccctgttcgtggccctgaccttcgagcggcgggaggtcctggactcctccaatatcaaaccaatgaacctgatcggcgtggcaagaggcgaaaacatccccgccgtgatcgccctgaccgaccccgagggctgcccactgagccggtttaaggatagcctgggaaacccaacccacatcctgagaatcggcgagagctataaggagaagcagcggaccatccaggccaagaaggaggtggagcagcggagagccggcggctacagccggaagtacgccagcaaagccaagaatctggcagacgatatggtgagaaacaccgctagagatctgctgtactacgccgtgacccaggatgccatgctgatcttcgccaacctgagccggggcttcggccggcagggcaagcggaccttcatggccgagagacagtacacacggatggaggactggctgaccgccaagctggcctacgagggcctgagcaagacctacctgtccaagacactggcccagtacacctccaagacatgcagcaactgtgggtttaccatcaccagcgccgactacgacagggtgctggagaagctgaagaagacagcaacaggctggatgaccacaattaacggcaaggagctgaaggtggagggccagattacctactacaacagatacaagagacagaacgtagtcaaggacctgtccgtcgagctggatagactgagcgaagaatctgtgaacaacgacatctcctcctggacaaagggcagaagcggagaagctctgagcctcctgaagaaaagattctcccatagacccgtgcaggagaagttcgtgtgcctgaactgcggcttcgagacacacgcagccgagcaagccgccctgaacatcgccagatcctggctgttcctgcggagccaggagtacaagaaataccagacaaacaagacaaccggcaacaccgataagagagccttcgtcgagacctggcagtccttttaccggaagaagcttaaggaggtgtggaaacctgccgtgcggtctggcggatctggcggaggctccaccagccccaagaaaaagagaaaagtctaagctgccttctgcggggcttgccttctggccatgcccttcttctctcccttgcacctgtacctcttggtctttgaataaagcctgagtaggaaggctagcaaaaaaaaaaaaaaaaaaaaaaaaaaaaaaaaaaaaaaaaaaaaaaaaaaaaaaaaaaaaaaaaaaaaaaaaaaaaaaaagcccagccggctccccaacctctaccgaggagggcacctctgagtccgccacccccgagagcggccctggcacctccaccgagcccagcgagggcagcgcacccggcagccctgccggcagccccacctccacagaggagggaaccagcaccgagcccagcgaaggcagcgccccaggcaccagcaccgagcctagtgagcaggagattaaacggatcaacaagatcagaagaagacttgtgaaagacagcaacaccaagaaggccggcaagacaggccccatgaaaaccctgctggttagagtgatgacacccgatctgagagagcggctggaaaacctgagaaagaagcctgaaaatatcccccagcccatcagcaatacatctagagccaacctgaataagctgctgaccgattacaccgaaatgaagaaggcgatcctgcatgtgtactgggaagagttccagaaggaccctgtgggcctgatgagccgggtggcccagcctgccagcaagaagatcgatcagaacaagctgaaacctgagatggacgagaagggcaacctgaccaccgccggctttgcctgctctcagtgtggccagcccctgttcgtgtacaagctggagcaggtgtctgagaagggcaaggcttacaccaactacttcggacggtgcaatgtggccgagcacgaaaagctgatcctgctggcccagctgaagcccgagaaggatagcgacgaagccgtgacatatagcctgggaaagtttgggcagagggccctggatttctacagcattcatgtgaccaaggagtccacccaccccgtgaagcccctggcccagatcgccggaaacagatacgcctccggacctgtgggaaaggccctgagcgacgcatgtatgggcacaatcgcctccttcctgtctaagtaccaggacatcatcatcgaacaccagaaggtggtgaagggcaaccagaagagactggagagcctgcgggagctggccggcaaggaaaacctggaataccctagcgtgaccctgccacctcagcctcacaccaaggagggcgttgatgcctacaacgaagtgatcgcccgggtgcgaatgtgggtgaacctgaacctgtggcagaagctgaagctaagcagagatgatgccaagcctctgctgagactgaagggattcccttcctttcctctggtcgagagacaggccaacgaagtggactggtgggacatggtgtgtaacgtgaagaagctgatcaacgagaaaaaggaggatggcaaggtgttttggcagaatctggctggctacaagagacaggaagccctgagaccatacctgagcagcgaggaagatcggaagaagggaaagaaattcgctcggtaccagctgggcgacctgctgctgcacctggaaaagaagcacggcgaggactggggaaaggtgtacgacgaggcctgggagcggattgacaagaaagtggaaggcctgagcaagcacatcaagctggaagaggaacggagaagcgaggacgcccagagcaaggccgccctgaccgactggctgcgggctaaggccagcttcgtgatcgagggcctgaaggaggccgacaaggacgagttctgcagatgcgagctgaagctgcagaagtggtacggggacctgcggggaaagcccttcgccatcgaagccgagaacagcatcctggacatcagcggcttcagcaagcagtacaactgtgccttcatctggcagaaggacggcgtgaagaagctgaacctgtacctgatcatcaactacttcaagggcggcaagctgcggttcaagaagatcaaacctgaagccttcgaagccaacagattctacaccgtgatcaacaaaaagagcggcgagatcgtgcccatggaggtgaacttcaacttcgacgaccccaacctgatcatcctgcctctggcctttggcaagagacagggcagagaattcatctggaacgacctgctgtccctggaaaccggcagcctgaagctggccaacggaagagtgatcgagaagacactgtacaacagaagaacccggcaggatgagcctgccctgttcgtggccctgaccttcgagcggcgggaggtcctggactcctccaatatcaaaccaatgaacctgatcggcgtggcaagaggcgaaaacatccccgccgtgatcgccctgaccgaccccgagggctgcccactgagccggtttaaggatagcctgggaaacccaacccacatcctgagaatcggcgagagctataaggagaagcagcggaccatccaggccaagaaggaggtggagcagcggagagccggcggctacagccggaagtacgccagcaaagccaagaatctggcagacgatatggtgagaaacaccgctagagatctgctgtactacgccgtgacccaggatgccatgctgatcttcgccaacctgagccggggcttcggccggcagggcaagcggaccttcatggccgagagacagtacacacggatggaggactggctgaccgccaagctggcctacgagggcctgagcaagacctacctgtccaagacactggcccagtacacctccaagacatgcagcaactgtgggtttaccatcaccagcgccgactacgacagggtgctggagaagctgaagaagacagcaacaggctggatgaccacaattaacggcaaggagctgaaggtggagggccagattacctactacaacagatacaagagacagaacgtagtcaaggacctgtccgtcgagctggatagactgagcgaagaatctgtgaacaacgacatctcctcctggacaaagggcagaagcggagaagctctgagcctcctgaagaaaagattctcccatagacccgtgcaggagaagttcgtgtgcctgaactgcggcttcgagacacacgcagccgagcaagccgccctgaacatcgccagatcctggctgttcctgcggagccaggagtacaagaaataccagacaaacaagacaaccggcaacaccgataagagagccttcgtcgagacctggcagtccttttaccggaagaagcttaaggaggtgtggaaacctgccgtgcggtctggcggatctggcggaggctccaccagccccaagaaaaagagaaaagtctaagctgccttctgcggggcttgccttctggccatgcccttcttctctcccttgcacctgtacctcttggtctttgaataaagcctgagtaggaaggctagcaaaaaaaaaaaaaaaaaaaaaaaaaaaaaaaaaaaaaaaaaaaaaaaaaaaaaaaaaaaaaaaaaaaaaaaaaaaaaaaa

SEQ ID NO: 9306 - RNA, 8787 nt, synthetic construct
  source 1..8787: mol_type = other RNA
aggaaataagagagaaaagaagagtaagaagaaatataagagccaccatggcccctaagaagaagcgtaaagtgagccggatgaaccacgaccaggagttcgacccccctaaggtgtaccctcccgtccccgccgagaagagaaagcccatccgggtcctgagcctgttcgatggcatcgccaccggtctgctggtgctgaaggacctgggcatccaggtggataggtacattgcctccgaggtgtgcgaggactccatcaccgtgggaatggtgcgtcatcagggcaagatcatgtacgtgggcgacgtgcggagcgtgacacagaagcatatccaggagtggggccctttcgacctggtgatcggcggcagcccttgcaatgacctgagcatcgtgaacccagcccggaagggcctgtacgagggaaccggcagactgttcttcgagttttacagactgctgcacgacgcccggcctaaggaaggcgacgaccggcccttcttttggctgttcgagaatgtggtggccatgggagtcagcgacaagcgggatattagccggttcctggagagcaaccccgtgatgatcgatgccaaggaagtgagcgccgcccaccgggccagatacttctggggcaatctgcctggcatgaacagacccctggccagcaccgtgaacgacaagctggagctgcaggagtgcctggagcacggccggatcgccaagttcagcaaggtgagaaccatcaccacccgaagcaacagcatcaaacaaggcaaggaccagcactttcctgtgttcatgaacgagaaggaggacatcctgtggtgtaccgagatggagagagtgttcgggttcccagtccactacacagatgtcagcaacatgtctagactggccagacagagactgctgggaagaagctggtccgtccctgtgatcagacacctgttcgcccctctgaaggagtacttcgcctgcgtgagcagcggcaacagcaacgccaacagccggggccccagcttctctagcggcctggtgccactgtccctgagagggagccacatgggccccatggagatctacaaaaccgtgagcgcctggaagcggcagcctgtgcgcgtgctgagcctgtttcggaatatcgataaagtcctgaaaagcctgggattcctggagagcggctctggctccggcggtggcaccctgaagtacgtggaggatgtgacaaacgtggtcagacgggatgtggagaagtggggccccttcgatctggtgtacggcagcacccaacccctgggcagctcttgtgaccggtgccctggctggtacatgtttcagttccaccggatcctgcagtacgccctgccgagacaggagtcccagcggccattcttttggattttcatggacaacttgctgctgaccgaggatgaccaggaaactaccactcggttcctgcagaccgaagccgtgaccctgcaggacgtgagaggccgggactaccagaacgccatgcgggtgtggtccaacatccctggactgaaaagcaagcacgcacctctgacccctaaagaagaggagtacctgcaggcccaggtgcggagcagaagcaagctggacgcccctaaggtggatctgctggtgaagaattgcctcctgcccctgagagagtacttcaagtatttcagccagaatagtctgcccctgggaggcagcggcggcggcagccaggccagcgtgagcttcaaggacgtgaacgtggagttcacccaggacgagtggcagcagatgggccccgcccagaggaacctgtacagggacgtgatgctggagaactacagcaacctggtgagcgtgggctactgcatcttcaagcccaaggtgatcttcaggctggagcagggcgaggagccctggagcagcgaggaggagttcagcagccagaggaggcccaagaactacagggacggcggcccaagcagcggcgcccctcctcccagcggcggcaggcggcccaagcagcggcgcccctcctcccagcggcggcagcccagccggctccccaacctctaccgaggagggcacctctgagtccgccacccccgagagcggccctggcacctccaccgagcccagcgagggcagcgcacccggcagccctgccggcagccccacctccacagaggagggaaccagcaccgagcccagcgaaggcagcgccccaggcaccagcaccgagcctagtgagcaggagattaaacggatcaacaagatcagaagaagacttgtgaaagacagcaacaccaagaaggccggcaagacaggccccatgaaaaccctgctggttagagtgatgacacccgatctgagagagcggctggaaaacctgagaaagaagcctgaaaatatcccccagcccatcagcaatacatctagagccaacctgaataagctgctgaccgattacaccgaaatgaagaaggcgatcctgcatgtgtactgggaagagttccagaaggaccctgtgggcctgatgagccgggtggcccagcctgccagcaagaagatcgatcagaacaagctgaaacctgagatggacgagaagggcaacctgaccaccgccggctttgcctgctctcagtgtggccagcccctgttcgtgtacaagctggagcaggtgtctgagaagggcaaggcttacaccaactacttcggacggtgcaatgtggccgagcacgaaaagctgatcctgctggcccagctgaagcccgagaaggatagcgacgaagccgtgacatatagcctgggaaagtttgggcagagggccctggatttctacagcattcatgtgaccaaggagtccacccaccccgtgaagcccctggcccagatcgccggaaacagatacgcctccggacctgtgggaaaggccctgagcgacgcatgtatgggcacaatcgcctccttcctgtctaagtaccaggacatcatcatcgaacaccagaaggtggtgaagggcaaccagaagagactggagagcctgcgggagctggccggcaaggaaaacctggaataccctagcgtgaccctgccacctcagcctcacaccaaggagggcgttgatgcctacaacgaagtgatcgcccgggtgcgaatgtgggtgaacctgaacctgtggcagaagctgaagctaagcagagatgatgccaagcctctgctgagactgaagggattcccttcctttcctctggtcgagagacaggccaacgaagtggactggtgggacatggtgtgtaacgtgaagaagctgatcaacgagaaaaaggaggatggcaaggtgttttggcagaatctggctggctacaagagacaggaagccctgagaccatacctgagcagcgaggaagatcggaagaagggaaagaaattcgctcggtaccagctgggcgacctgctgctgcacctggaaaagaagcacggcgaggactggggaaaggtgtacgacgaggcctgggagcggattgacaagaaagtggaaggcctgagcaagcacatcaagctggaagaggaacggagaagcgaggacgcccagagcaaggccgccctgaccgactggctgcgggctaaggccagcttcgtgatcgagggcctgaaggaggccgacaaggacgagttctgcagatgcgagctgaagctgcagaagtggtacggggacctgcggggaaagcccttcgccatcgaagccgagaacagcatcctggacatcagcggcttcagcaagcagtacaactgtgccttcatctggcagaaggacggcgtgaagaagctgaacctgtacctgatcatcaactacttcaagggcggcaagctgcggttcaagaagatcaaacctgaagccttcgaagccaacagattctacaccgtgatcaacaaaaagagcggcgagatcgtgcccatggaggtgaacttcaacttcgacgaccccaacctgatcatcctgcctctggcctttggcaagagacagggcagagaattcatctggaacgacctgctgtccctggaaaccggcagcctgaagctggccaacggaagagtgatcgagaagacactgtacaacagaagaacccggcaggatgagcctgccctgttcgtggccctgaccttcgagcggcgggaggtcctggactcctccaatatcaaaccaatgaacctgatcggcgtggcaagaggcgaaaacatccccgccgtgatcgccctgaccgaccccgagggctgcccactgagccggtttaaggatagcctgggaaacccaacccacatcctgagaatcggcgagagctataaggagaagcagcggaccatccaggccaagaaggaggtggagcagcggagagccggcggctacagccggaagtacgccagcaaagccaagaatctggcagacgatatggtgagaaacaccgctagagatctgctgtactacgccgtgacccaggatgccatgctgatcttcgccaacctgagccggggcttcggccggcagggcaagcggaccttcatggccgagagacagtacacacggatggaggactggctgaccgccaagctggcctacgagggcctgagcaagacctacctgtccaagacactggcccagtacacctccaagacatgcagcaactgtgggtttaccatcaccagcgccgactacgacagggtgctggagaagctgaagaagacagcaacaggctggatgaccacaattaacggcaaggagctgaaggtggagggccagattacctactacaacagatacaagagacagaacgtagtcaaggacctgtccgtcgagctggatagactgagcgaagaatctgtgaacaacgacatctcctcctggacaaagggcagaagcggagaagctctgagcctcctgaagaaaagattctcccatagacccgtgcaggagaagttcgtgtgcctgaactgcggcttcgagacacacgcagccgagcaagccgccctgaacatcgccagatcctggctgttcctgcggagccaggagtacaagaaataccagacaaacaagacaaccggcaacaccgataagagagccttcgtcgagacctggcagtccttttaccggaagaagcttaaggaggtgtggaaacctgccgtgcggtctggcggatctggcggaggctccaccagccccaagaaaaagagaaaagtctaagctgccttctgcggggcttgccttctggccatgcccttcttctctcccttgcacctgtacctcttggtctttgaataaagcctgagtaggaaggctagcaaaaaaaaaaaaaaaaaaaaaaaaaaaaaaaaaaaaaaaaaaaaaaaaaaaaaaaaaaaaaaaaaaaaaaaaaaaaaaaagcccagccggctccccaacctctaccgaggagggcacctctgagtccgccacccccgagagcggccctggcacctccaccgagcccagcgagggcagcgcacccggcagccctgccggcagccccacctccacagaggagggaaccagcaccgagcccagcgaaggcagcgccccaggcaccagcaccgagcctagtgagcaggagattaaacggatcaacaagatcagaagaagacttgtgaaagacagcaacaccaagaaggccggcaagacaggccccatgaaaaccctgctggttagagtgatgacacccgatctgagagagcggctggaaaacctgagaaagaagcctgaaaatatcccccagcccatcagcaatacatctagagccaacctgaataagctgctgaccgattacaccgaaatgaagaaggcgatcctgcatgtgtactgggaagagttccagaaggaccctgtgggcctgatgagccgggtggcccagcctgccagcaagaagatcgatcagaacaagctgaaacctgagatggacgagaagggcaacctgaccaccgccggctttgcctgctctcagtgtggccagcccctgttcgtgtacaagctggagcaggtgtctgagaagggcaaggcttacaccaactacttcggacggtgcaatgtggccgagcacgaaaagctgatcctgctggcccagctgaagcccgagaaggatagcgacgaagccgtgacatatagcctgggaaagtttgggcagagggccctggatttctacagcattcatgtgaccaaggagtccacccaccccgtgaagcccctggcccagatcgccggaaacagatacgcctccggacctgtgggaaaggccctgagcgacgcatgtatgggcacaatcgcctccttcctgtctaagtaccaggacatcatcatcgaacaccagaaggtggtgaagggcaaccagaagagactggagagcctgcgggagctggccggcaaggaaaacctggaataccctagcgtgaccctgccacctcagcctcacaccaaggagggcgttgatgcctacaacgaagtgatcgcccgggtgcgaatgtgggtgaacctgaacctgtggcagaagctgaagctaagcagagatgatgccaagcctctgctgagactgaagggattcccttcctttcctctggtcgagagacaggccaacgaagtggactggtgggacatggtgtgtaacgtgaagaagctgatcaacgagaaaaaggaggatggcaaggtgttttggcagaatctggctggctacaagagacaggaagccctgagaccatacctgagcagcgaggaagatcggaagaagggaaagaaattcgctcggtaccagctgggcgacctgctgctgcacctggaaaagaagcacggcgaggactggggaaaggtgtacgacgaggcctgggagcggattgacaagaaagtggaaggcctgagcaagcacatcaagctggaagaggaacggagaagcgaggacgcccagagcaaggccgccctgaccgactggctgcgggctaaggccagcttcgtgatcgagggcctgaaggaggccgacaaggacgagttctgcagatgcgagctgaagctgcagaagtggtacggggacctgcggggaaagcccttcgccatcgaagccgagaacagcatcctggacatcagcggcttcagcaagcagtacaactgtgccttcatctggcagaaggacggcgtgaagaagctgaacctgtacctgatcatcaactacttcaagggcggcaagctgcggttcaagaagatcaaacctgaagccttcgaagccaacagattctacaccgtgatcaacaaaaagagcggcgagatcgtgcccatggaggtgaacttcaacttcgacgaccccaacctgatcatcctgcctctggcctttggcaagagacagggcagagaattcatctggaacgacctgctgtccctggaaaccggcagcctgaagctggccaacggaagagtgatcgagaagacactgtacaacagaagaacccggcaggatgagcctgccctgttcgtggccctgaccttcgagcggcgggaggtcctggactcctccaatatcaaaccaatgaacctgatcggcgtggcaagaggcgaaaacatccccgccgtgatcgccctgaccgaccccgagggctgcccactgagccggtttaaggatagcctgggaaacccaacccacatcctgagaatcggcgagagctataaggagaagcagcggaccatccaggccaagaaggaggtggagcagcggagagccggcggctacagccggaagtacgccagcaaagccaagaatctggcagacgatatggtgagaaacaccgctagagatctgctgtactacgccgtgacccaggatgccatgctgatcttcgccaacctgagccggggcttcggccggcagggcaagcggaccttcatggccgagagacagtacacacggatggaggactggctgaccgccaagctggcctacgagggcctgagcaagacctacctgtccaagacactggcccagtacacctccaagacatgcagcaactgtgggtttaccatcaccagcgccgactacgacagggtgctggagaagctgaagaagacagcaacaggctggatgaccacaattaacggcaaggagctgaaggtggagggccagattacctactacaacagatacaagagacagaacgtagtcaaggacctgtccgtcgagctggatagactgagcgaagaatctgtgaacaacgacatctcctcctggacaaagggcagaagcggagaagctctgagcctcctgaagaaaagattctcccatagacccgtgcaggagaagttcgtgtgcctgaactgcggcttcgagacacacgcagccgagcaagccgccctgaacatcgccagatcctggctgttcctgcggagccaggagtacaagaaataccagacaaacaagacaaccggcaacaccgataagagagccttcgtcgagacctggcagtccttttaccggaagaagcttaaggaggtgtggaaacctgccgtgcggtctggcggatctggcggaggctccaccagccccaagaaaaagagaaaagtctaagctgccttctgcggggcttgccttctggccatgcccttcttctctcccttgcacctgtacctcttggtctttgaataaagcctgagtaggaaggctagcaaaaaaaaaaaaaaaaaaaaaaaaaaaaaaaaaaaaaaaaaaaaaaaaaaaaaaaaaaaaaaaaaaaaaaaaaaaaaaaa

SEQ ID NO: 9307 - RNA, 8787 nt, synthetic construct
  source 1..8787: mol_type = other RNA
aggaaataagagagaaaagaagagtaagaagaaatataagagccaccatggcccctaagaagaagcgtaaagtgagccggatgaaccacgaccaggagttcgacccccctaaggtgtaccctcccgtccccgccgagaagagaaagcccatccgggtcctgagcctgttcgatggcatcgccaccggtctgctggtgctgaaggacctgggcatccaggtggataggtacattgcctccgaggtgtgcgaggactccatcaccgtgggaatggtgcgtcatcagggcaagatcatgtacgtgggcgacgtgcggagcgtgacacagaagcatatccaggagtggggccctttcgacctggtgatcggcggcagcccttgcaatgacctgagcatcgtgaacccagcccggaagggcctgtacgagggaaccggcagactgttcttcgagttttacagactgctgcacgacgcccggcctaaggaaggcgacgaccggcccttcttttggctgttcgagaatgtggtggccatgggagtcagcgacaagcgggatattagccggttcctggagagcaaccccgtgatgatcgatgccaaggaagtgagcgccgcccaccgggccagatacttctggggcaatctgcctggcatgaacagacccctggccagcaccgtgaacgacaagctggagctgcaggagtgcctggagcacggccggatcgccaagttcagcaaggtgagaaccatcaccacccgaagcaacagcatcaaacaaggcaaggaccagcactttcctgtgttcatgaacgagaaggaggacatcctgtggtgtaccgagatggagagagtgttcgggttcccagtccactacacagatgtcagcaacatgtctagactggccagacagagactgctgggaagaagctggtccgtccctgtgatcagacacctgttcgcccctctgaaggagtacttcgcctgcgtgagcagcggcaacagcaacgccaacagccggggccccagcttctctagcggcctggtgccactgtccctgagagggagccacatgggccccatggagatctacaaaaccgtgagcgcctggaagcggcagcctgtgcgcgtgctgagcctgtttcggaatatcgataaagtcctgaaaagcctgggattcctggagagcggctctggctccggcggtggcaccctgaagtacgtggaggatgtgacaaacgtggtcagacgggatgtggagaagtggggccccttcgatctggtgtacggcagcacccaacccctgggcagctcttgtgaccggtgccctggctggtacatgtttcagttccaccggatcctgcagtacgccctgccgagacaggagtcccagcggccattcttttggattttcatggacaacttgctgctgaccgaggatgaccaggaaactaccactcggttcctgcagaccgaagccgtgaccctgcaggacgtgagaggccgggactaccagaacgccatgcgggtgtggtccaacatccctggactgaaaagcaagcacgcacctctgacccctaaagaagaggagtacctgcaggcccaggtgcggagcagaagcaagctggacgcccctaaggtggatctgctggtgaagaattgcctcctgcccctgagagagtacttcaagtatttcagccagaatagtctgcccctgggaggcagcggcggcggcggccaggagagcgtgaccttcaccgacgtggccgtggacttcaccctggaggagtgggcctacctggaccacttccagaaggagctgtacaaggacgtgatgctggagaactacaggaacctgctgtgcctgggcctggccgtgagcaagcccgacgtgatcagccagctggagcagggcgacgccccctggatgagcgagggcggcgtgcccaggagcatctacagcgactgggagaccaggggcggcccaagcagcggcgcccctcctcccagcggcggcaggcggcccaagcagcggcgcccctcctcccagcggcggcagcccagccggctccccaacctctaccgaggagggcacctctgagtccgccacccccgagagcggccctggcacctccaccgagcccagcgagggcagcgcacccggcagccctgccggcagccccacctccacagaggagggaaccagcaccgagcccagcgaaggcagcgccccaggcaccagcaccgagcctagtgagcaggagattaaacggatcaacaagatcagaagaagacttgtgaaagacagcaacaccaagaaggccggcaagacaggccccatgaaaaccctgctggttagagtgatgacacccgatctgagagagcggctggaaaacctgagaaagaagcctgaaaatatcccccagcccatcagcaatacatctagagccaacctgaataagctgctgaccgattacaccgaaatgaagaaggcgatcctgcatgtgtactgggaagagttccagaaggaccctgtgggcctgatgagccgggtggcccagcctgccagcaagaagatcgatcagaacaagctgaaacctgagatggacgagaagggcaacctgaccaccgccggctttgcctgctctcagtgtggccagcccctgttcgtgtacaagctggagcaggtgtctgagaagggcaaggcttacaccaactacttcggacggtgcaatgtggccgagcacgaaaagctgatcctgctggcccagctgaagcccgagaaggatagcgacgaagccgtgacatatagcctgggaaagtttgggcagagggccctggatttctacagcattcatgtgaccaaggagtccacccaccccgtgaagcccctggcccagatcgccggaaacagatacgcctccggacctgtgggaaaggccctgagcgacgcatgtatgggcacaatcgcctccttcctgtctaagtaccaggacatcatcatcgaacaccagaaggtggtgaagggcaaccagaagagactggagagcctgcgggagctggccggcaaggaaaacctggaataccctagcgtgaccctgccacctcagcctcacaccaaggagggcgttgatgcctacaacgaagtgatcgcccgggtgcgaatgtgggtgaacctgaacctgtggcagaagctgaagctaagcagagatgatgccaagcctctgctgagactgaagggattcccttcctttcctctggtcgagagacaggccaacgaagtggactggtgggacatggtgtgtaacgtgaagaagctgatcaacgagaaaaaggaggatggcaaggtgttttggcagaatctggctggctacaagagacaggaagccctgagaccatacctgagcagcgaggaagatcggaagaagggaaagaaattcgctcggtaccagctgggcgacctgctgctgcacctggaaaagaagcacggcgaggactggggaaaggtgtacgacgaggcctgggagcggattgacaagaaagtggaaggcctgagcaagcacatcaagctggaagaggaacggagaagcgaggacgcccagagcaaggccgccctgaccgactggctgcgggctaaggccagcttcgtgatcgagggcctgaaggaggccgacaaggacgagttctgcagatgcgagctgaagctgcagaagtggtacggggacctgcggggaaagcccttcgccatcgaagccgagaacagcatcctggacatcagcggcttcagcaagcagtacaactgtgccttcatctggcagaaggacggcgtgaagaagctgaacctgtacctgatcatcaactacttcaagggcggcaagctgcggttcaagaagatcaaacctgaagccttcgaagccaacagattctacaccgtgatcaacaaaaagagcggcgagatcgtgcccatggaggtgaacttcaacttcgacgaccccaacctgatcatcctgcctctggcctttggcaagagacagggcagagaattcatctggaacgacctgctgtccctggaaaccggcagcctgaagctggccaacggaagagtgatcgagaagacactgtacaacagaagaacccggcaggatgagcctgccctgttcgtggccctgaccttcgagcggcgggaggtcctggactcctccaatatcaaaccaatgaacctgatcggcgtggcaagaggcgaaaacatccccgccgtgatcgccctgaccgaccccgagggctgcccactgagccggtttaaggatagcctgggaaacccaacccacatcctgagaatcggcgagagctataaggagaagcagcggaccatccaggccaagaaggaggtggagcagcggagagccggcggctacagccggaagtacgccagcaaagccaagaatctggcagacgatatggtgagaaacaccgctagagatctgctgtactacgccgtgacccaggatgccatgctgatcttcgccaacctgagccggggcttcggccggcagggcaagcggaccttcatggccgagagacagtacacacggatggaggactggctgaccgccaagctggcctacgagggcctgagcaagacctacctgtccaagacactggcccagtacacctccaagacatgcagcaactgtgggtttaccatcaccagcgccgactacgacagggtgctggagaagctgaagaagacagcaacaggctggatgaccacaattaacggcaaggagctgaaggtggagggccagattacctactacaacagatacaagagacagaacgtagtcaaggacctgtccgtcgagctggatagactgagcgaagaatctgtgaacaacgacatctcctcctggacaaagggcagaagcggagaagctctgagcctcctgaagaaaagattctcccatagacccgtgcaggagaagttcgtgtgcctgaactgcggcttcgagacacacgcagccgagcaagccgccctgaacatcgccagatcctggctgttcctgcggagccaggagtacaagaaataccagacaaacaagacaaccggcaacaccgataagagagccttcgtcgagacctggcagtccttttaccggaagaagcttaaggaggtgtggaaacctgccgtgcggtctggcggatctggcggaggctccaccagccccaagaaaaagagaaaagtctaagctgccttctgcggggcttgccttctggccatgcccttcttctctcccttgcacctgtacctcttggtctttgaataaagcctgagtaggaaggctagcaaaaaaaaaaaaaaaaaaaaaaaaaaaaaaaaaaaaaaaaaaaaaaaaaaaaaaaaaaaaaaaaaaaaaaaaaaaaaaaagcccagccggctccccaacctctaccgaggagggcacctctgagtccgccacccccgagagcggccctggcacctccaccgagcccagcgagggcagcgcacccggcagccctgccggcagccccacctccacagaggagggaaccagcaccgagcccagcgaaggcagcgccccaggcaccagcaccgagcctagtgagcaggagattaaacggatcaacaagatcagaagaagacttgtgaaagacagcaacaccaagaaggccggcaagacaggccccatgaaaaccctgctggttagagtgatgacacccgatctgagagagcggctggaaaacctgagaaagaagcctgaaaatatcccccagcccatcagcaatacatctagagccaacctgaataagctgctgaccgattacaccgaaatgaagaaggcgatcctgcatgtgtactgggaagagttccagaaggaccctgtgggcctgatgagccgggtggcccagcctgccagcaagaagatcgatcagaacaagctgaaacctgagatggacgagaagggcaacctgaccaccgccggctttgcctgctctcagtgtggccagcccctgttcgtgtacaagctggagcaggtgtctgagaagggcaaggcttacaccaactacttcggacggtgcaatgtggccgagcacgaaaagctgatcctgctggcccagctgaagcccgagaaggatagcgacgaagccgtgacatatagcctgggaaagtttgggcagagggccctggatttctacagcattcatgtgaccaaggagtccacccaccccgtgaagcccctggcccagatcgccggaaacagatacgcctccggacctgtgggaaaggccctgagcgacgcatgtatgggcacaatcgcctccttcctgtctaagtaccaggacatcatcatcgaacaccagaaggtggtgaagggcaaccagaagagactggagagcctgcgggagctggccggcaaggaaaacctggaataccctagcgtgaccctgccacctcagcctcacaccaaggagggcgttgatgcctacaacgaagtgatcgcccgggtgcgaatgtgggtgaacctgaacctgtggcagaagctgaagctaagcagagatgatgccaagcctctgctgagactgaagggattcccttcctttcctctggtcgagagacaggccaacgaagtggactggtgggacatggtgtgtaacgtgaagaagctgatcaacgagaaaaaggaggatggcaaggtgttttggcagaatctggctggctacaagagacaggaagccctgagaccatacctgagcagcgaggaagatcggaagaagggaaagaaattcgctcggtaccagctgggcgacctgctgctgcacctggaaaagaagcacggcgaggactggggaaaggtgtacgacgaggcctgggagcggattgacaagaaagtggaaggcctgagcaagcacatcaagctggaagaggaacggagaagcgaggacgcccagagcaaggccgccctgaccgactggctgcgggctaaggccagcttcgtgatcgagggcctgaaggaggccgacaaggacgagttctgcagatgcgagctgaagctgcagaagtggtacggggacctgcggggaaagcccttcgccatcgaagccgagaacagcatcctggacatcagcggcttcagcaagcagtacaactgtgccttcatctggcagaaggacggcgtgaagaagctgaacctgtacctgatcatcaactacttcaagggcggcaagctgcggttcaagaagatcaaacctgaagccttcgaagccaacagattctacaccgtgatcaacaaaaagagcggcgagatcgtgcccatggaggtgaacttcaacttcgacgaccccaacctgatcatcctgcctctggcctttggcaagagacagggcagagaattcatctggaacgacctgctgtccctggaaaccggcagcctgaagctggccaacggaagagtgatcgagaagacactgtacaacagaagaacccggcaggatgagcctgccctgttcgtggccctgaccttcgagcggcgggaggtcctggactcctccaatatcaaaccaatgaacctgatcggcgtggcaagaggcgaaaacatccccgccgtgatcgccctgaccgaccccgagggctgcccactgagccggtttaaggatagcctgggaaacccaacccacatcctgagaatcggcgagagctataaggagaagcagcggaccatccaggccaagaaggaggtggagcagcggagagccggcggctacagccggaagtacgccagcaaagccaagaatctggcagacgatatggtgagaaacaccgctagagatctgctgtactacgccgtgacccaggatgccatgctgatcttcgccaacctgagccggggcttcggccggcagggcaagcggaccttcatggccgagagacagtacacacggatggaggactggctgaccgccaagctggcctacgagggcctgagcaagacctacctgtccaagacactggcccagtacacctccaagacatgcagcaactgtgggtttaccatcaccagcgccgactacgacagggtgctggagaagctgaagaagacagcaacaggctggatgaccacaattaacggcaaggagctgaaggtggagggccagattacctactacaacagatacaagagacagaacgtagtcaaggacctgtccgtcgagctggatagactgagcgaagaatctgtgaacaacgacatctcctcctggacaaagggcagaagcggagaagctctgagcctcctgaagaaaagattctcccatagacccgtgcaggagaagttcgtgtgcctgaactgcggcttcgagacacacgcagccgagcaagccgccctgaacatcgccagatcctggctgttcctgcggagccaggagtacaagaaataccagacaaacaagacaaccggcaacaccgataagagagccttcgtcgagacctggcagtccttttaccggaagaagcttaaggaggtgtggaaacctgccgtgcggtctggcggatctggcggaggctccaccagccccaagaaaaagagaaaagtctaagctgccttctgcggggcttgccttctggccatgcccttcttctctcccttgcacctgtacctcttggtctttgaataaagcctgagtaggaaggctagcaaaaaaaaaaaaaaaaaaaaaaaaaaaaaaaaaaaaaaaaaaaaaaaaaaaaaaaaaaaaaaaaaaaaaaaaaaaaaaaa

SEQ ID NO: 9308 - RNA, 8796 nt, synthetic construct
  source 1..8796: mol_type = other RNA
aggaaataagagagaaaagaagagtaagaagaaatataagagccaccatggcccctaagaagaagcgtaaagtgagccggatgaaccacgaccaggagttcgacccccctaaggtgtaccctcccgtccccgccgagaagagaaagcccatccgggtcctgagcctgttcgatggcatcgccaccggtctgctggtgctgaaggacctgggcatccaggtggataggtacattgcctccgaggtgtgcgaggactccatcaccgtgggaatggtgcgtcatcagggcaagatcatgtacgtgggcgacgtgcggagcgtgacacagaagcatatccaggagtggggccctttcgacctggtgatcggcggcagcccttgcaatgacctgagcatcgtgaacccagcccggaagggcctgtacgagggaaccggcagactgttcttcgagttttacagactgctgcacgacgcccggcctaaggaaggcgacgaccggcccttcttttggctgttcgagaatgtggtggccatgggagtcagcgacaagcgggatattagccggttcctggagagcaaccccgtgatgatcgatgccaaggaagtgagcgccgcccaccgggccagatacttctggggcaatctgcctggcatgaacagacccctggccagcaccgtgaacgacaagctggagctgcaggagtgcctggagcacggccggatcgccaagttcagcaaggtgagaaccatcaccacccgaagcaacagcatcaaacaaggcaaggaccagcactttcctgtgttcatgaacgagaaggaggacatcctgtggtgtaccgagatggagagagtgttcgggttcccagtccactacacagatgtcagcaacatgtctagactggccagacagagactgctgggaagaagctggtccgtccctgtgatcagacacctgttcgcccctctgaaggagtacttcgcctgcgtgagcagcggcaacagcaacgccaacagccggggccccagcttctctagcggcctggtgccactgtccctgagagggagccacatgggccccatggagatctacaaaaccgtgagcgcctggaagcggcagcctgtgcgcgtgctgagcctgtttcggaatatcgataaagtcctgaaaagcctgggattcctggagagcggctctggctccggcggtggcaccctgaagtacgtggaggatgtgacaaacgtggtcagacgggatgtggagaagtggggccccttcgatctggtgtacggcagcacccaacccctgggcagctcttgtgaccggtgccctggctggtacatgtttcagttccaccggatcctgcagtacgccctgccgagacaggagtcccagcggccattcttttggattttcatggacaacttgctgctgaccgaggatgaccaggaaactaccactcggttcctgcagaccgaagccgtgaccctgcaggacgtgagaggccgggactaccagaacgccatgcgggtgtggtccaacatccctggactgaaaagcaagcacgcacctctgacccctaaagaagaggagtacctgcaggcccaggtgcggagcagaagcaagctggacgcccctaaggtggatctgctggtgaagaattgcctcctgcccctgagagagtacttcaagtatttcagccagaatagtctgcccctgggaggcagcggcggcggcgtgacctacgacgacgtgcacatcgacttcacctgggaggagtggaccctgctggaccccagccagaagaacctgtacaaggacgtgatgctggagacctacaggaacctgaccaccgtgggctacagctgggaggaccacctgatcgaggagcactgcaagagcagcaggaagcacgagaggcacgagaggatccccaccggcgagcagcccagcgagagcacccagagcttcagggccttcgcccaccacggcggcccaagcagcggcgcccctcctcccagcggcggcaggcggcccaagcagcggcgcccctcctcccagcggcggcagcccagccggctccccaacctctaccgaggagggcacctctgagtccgccacccccgagagcggccctggcacctccaccgagcccagcgagggcagcgcacccggcagccctgccggcagccccacctccacagaggagggaaccagcaccgagcccagcgaaggcagcgccccaggcaccagcaccgagcctagtgagcaggagattaaacggatcaacaagatcagaagaagacttgtgaaagacagcaacaccaagaaggccggcaagacaggccccatgaaaaccctgctggttagagtgatgacacccgatctgagagagcggctggaaaacctgagaaagaagcctgaaaatatcccccagcccatcagcaatacatctagagccaacctgaataagctgctgaccgattacaccgaaatgaagaaggcgatcctgcatgtgtactgggaagagttccagaaggaccctgtgggcctgatgagccgggtggcccagcctgccagcaagaagatcgatcagaacaagctgaaacctgagatggacgagaagggcaacctgaccaccgccggctttgcctgctctcagtgtggccagcccctgttcgtgtacaagctggagcaggtgtctgagaagggcaaggcttacaccaactacttcggacggtgcaatgtggccgagcacgaaaagctgatcctgctggcccagctgaagcccgagaaggatagcgacgaagccgtgacatatagcctgggaaagtttgggcagagggccctggatttctacagcattcatgtgaccaaggagtccacccaccccgtgaagcccctggcccagatcgccggaaacagatacgcctccggacctgtgggaaaggccctgagcgacgcatgtatgggcacaatcgcctccttcctgtctaagtaccaggacatcatcatcgaacaccagaaggtggtgaagggcaaccagaagagactggagagcctgcgggagctggccggcaaggaaaacctggaataccctagcgtgaccctgccacctcagcctcacaccaaggagggcgttgatgcctacaacgaagtgatcgcccgggtgcgaatgtgggtgaacctgaacctgtggcagaagctgaagctaagcagagatgatgccaagcctctgctgagactgaagggattcccttcctttcctctggtcgagagacaggccaacgaagtggactggtgggacatggtgtgtaacgtgaagaagctgatcaacgagaaaaaggaggatggcaaggtgttttggcagaatctggctggctacaagagacaggaagccctgagaccatacctgagcagcgaggaagatcggaagaagggaaagaaattcgctcggtaccagctgggcgacctgctgctgcacctggaaaagaagcacggcgaggactggggaaaggtgtacgacgaggcctgggagcggattgacaagaaagtggaaggcctgagcaagcacatcaagctggaagaggaacggagaagcgaggacgcccagagcaaggccgccctgaccgactggctgcgggctaaggccagcttcgtgatcgagggcctgaaggaggccgacaaggacgagttctgcagatgcgagctgaagctgcagaagtggtacggggacctgcggggaaagcccttcgccatcgaagccgagaacagcatcctggacatcagcggcttcagcaagcagtacaactgtgccttcatctggcagaaggacggcgtgaagaagctgaacctgtacctgatcatcaactacttcaagggcggcaagctgcggttcaagaagatcaaacctgaagccttcgaagccaacagattctacaccgtgatcaacaaaaagagcggcgagatcgtgcccatggaggtgaacttcaacttcgacgaccccaacctgatcatcctgcctctggcctttggcaagagacagggcagagaattcatctggaacgacctgctgtccctggaaaccggcagcctgaagctggccaacggaagagtgatcgagaagacactgtacaacagaagaacccggcaggatgagcctgccctgttcgtggccctgaccttcgagcggcgggaggtcctggactcctccaatatcaaaccaatgaacctgatcggcgtggcaagaggcgaaaacatccccgccgtgatcgccctgaccgaccccgagggctgcccactgagccggtttaaggatagcctgggaaacccaacccacatcctgagaatcggcgagagctataaggagaagcagcggaccatccaggccaagaaggaggtggagcagcggagagccggcggctacagccggaagtacgccagcaaagccaagaatctggcagacgatatggtgagaaacaccgctagagatctgctgtactacgccgtgacccaggatgccatgctgatcttcgccaacctgagccggggcttcggccggcagggcaagcggaccttcatggccgagagacagtacacacggatggaggactggctgaccgccaagctggcctacgagggcctgagcaagacctacctgtccaagacactggcccagtacacctccaagacatgcagcaactgtgggtttaccatcaccagcgccgactacgacagggtgctggagaagctgaagaagacagcaacaggctggatgaccacaattaacggcaaggagctgaaggtggagggccagattacctactacaacagatacaagagacagaacgtagtcaaggacctgtccgtcgagctggatagactgagcgaagaatctgtgaacaacgacatctcctcctggacaaagggcagaagcggagaagctctgagcctcctgaagaaaagattctcccatagacccgtgcaggagaagttcgtgtgcctgaactgcggcttcgagacacacgcagccgagcaagccgccctgaacatcgccagatcctggctgttcctgcggagccaggagtacaagaaataccagacaaacaagacaaccggcaacaccgataagagagccttcgtcgagacctggcagtccttttaccggaagaagcttaaggaggtgtggaaacctgccgtgcggtctggcggatctggcggaggctccaccagccccaagaaaaagagaaaagtctaagctgccttctgcggggcttgccttctggccatgcccttcttctctcccttgcacctgtacctcttggtctttgaataaagcctgagtaggaaggctagcaaaaaaaaaaaaaaaaaaaaaaaaaaaaaaaaaaaaaaaaaaaaaaaaaaaaaaaaaaaaaaaaaaaaaaaaaaaaaaaagcccagccggctccccaacctctaccgaggagggcacctctgagtccgccacccccgagagcggccctggcacctccaccgagcccagcgagggcagcgcacccggcagccctgccggcagccccacctccacagaggagggaaccagcaccgagcccagcgaaggcagcgccccaggcaccagcaccgagcctagtgagcaggagattaaacggatcaacaagatcagaagaagacttgtgaaagacagcaacaccaagaaggccggcaagacaggccccatgaaaaccctgctggttagagtgatgacacccgatctgagagagcggctggaaaacctgagaaagaagcctgaaaatatcccccagcccatcagcaatacatctagagccaacctgaataagctgctgaccgattacaccgaaatgaagaaggcgatcctgcatgtgtactgggaagagttccagaaggaccctgtgggcctgatgagccgggtggcccagcctgccagcaagaagatcgatcagaacaagctgaaacctgagatggacgagaagggcaacctgaccaccgccggctttgcctgctctcagtgtggccagcccctgttcgtgtacaagctggagcaggtgtctgagaagggcaaggcttacaccaactacttcggacggtgcaatgtggccgagcacgaaaagctgatcctgctggcccagctgaagcccgagaaggatagcgacgaagccgtgacatatagcctgggaaagtttgggcagagggccctggatttctacagcattcatgtgaccaaggagtccacccaccccgtgaagcccctggcccagatcgccggaaacagatacgcctccggacctgtgggaaaggccctgagcgacgcatgtatgggcacaatcgcctccttcctgtctaagtaccaggacatcatcatcgaacaccagaaggtggtgaagggcaaccagaagagactggagagcctgcgggagctggccggcaaggaaaacctggaataccctagcgtgaccctgccacctcagcctcacaccaaggagggcgttgatgcctacaacgaagtgatcgcccgggtgcgaatgtgggtgaacctgaacctgtggcagaagctgaagctaagcagagatgatgccaagcctctgctgagactgaagggattcccttcctttcctctggtcgagagacaggccaacgaagtggactggtgggacatggtgtgtaacgtgaagaagctgatcaacgagaaaaaggaggatggcaaggtgttttggcagaatctggctggctacaagagacaggaagccctgagaccatacctgagcagcgaggaagatcggaagaagggaaagaaattcgctcggtaccagctgggcgacctgctgctgcacctggaaaagaagcacggcgaggactggggaaaggtgtacgacgaggcctgggagcggattgacaagaaagtggaaggcctgagcaagcacatcaagctggaagaggaacggagaagcgaggacgcccagagcaaggccgccctgaccgactggctgcgggctaaggccagcttcgtgatcgagggcctgaaggaggccgacaaggacgagttctgcagatgcgagctgaagctgcagaagtggtacggggacctgcggggaaagcccttcgccatcgaagccgagaacagcatcctggacatcagcggcttcagcaagcagtacaactgtgccttcatctggcagaaggacggcgtgaagaagctgaacctgtacctgatcatcaactacttcaagggcggcaagctgcggttcaagaagatcaaacctgaagccttcgaagccaacagattctacaccgtgatcaacaaaaagagcggcgagatcgtgcccatggaggtgaacttcaacttcgacgaccccaacctgatcatcctgcctctggcctttggcaagagacagggcagagaattcatctggaacgacctgctgtccctggaaaccggcagcctgaagctggccaacggaagagtgatcgagaagacactgtacaacagaagaacccggcaggatgagcctgccctgttcgtggccctgaccttcgagcggcgggaggtcctggactcctccaatatcaaaccaatgaacctgatcggcgtggcaagaggcgaaaacatccccgccgtgatcgccctgaccgaccccgagggctgcccactgagccggtttaaggatagcctgggaaacccaacccacatcctgagaatcggcgagagctataaggagaagcagcggaccatccaggccaagaaggaggtggagcagcggagagccggcggctacagccggaagtacgccagcaaagccaagaatctggcagacgatatggtgagaaacaccgctagagatctgctgtactacgccgtgacccaggatgccatgctgatcttcgccaacctgagccggggcttcggccggcagggcaagcggaccttcatggccgagagacagtacacacggatggaggactggctgaccgccaagctggcctacgagggcctgagcaagacctacctgtccaagacactggcccagtacacctccaagacatgcagcaactgtgggtttaccatcaccagcgccgactacgacagggtgctggagaagctgaagaagacagcaacaggctggatgaccacaattaacggcaaggagctgaaggtggagggccagattacctactacaacagatacaagagacagaacgtagtcaaggacctgtccgtcgagctggatagactgagcgaagaatctgtgaacaacgacatctcctcctggacaaagggcagaagcggagaagctctgagcctcctgaagaaaagattctcccatagacccgtgcaggagaagttcgtgtgcctgaactgcggcttcgagacacacgcagccgagcaagccgccctgaacatcgccagatcctggctgttcctgcggagccaggagtacaagaaataccagacaaacaagacaaccggcaacaccgataagagagccttcgtcgagacctggcagtccttttaccggaagaagcttaaggaggtgtggaaacctgccgtgcggtctggcggatctggcggaggctccaccagccccaagaaaaagagaaaagtctaagctgccttctgcggggcttgccttctggccatgcccttcttctctcccttgcacctgtacctcttggtctttgaataaagcctgagtaggaaggctagcaaaaaaaaaaaaaaaaaaaaaaaaaaaaaaaaaaaaaaaaaaaaaaaaaaaaaaaaaaaaaaaaaaaaaaaaaaaaaaaa

SEQ ID NO: 9309 - RNA, 8787 nt, synthetic construct
  source 1..8787: mol_type = other RNA
aggaaataagagagaaaagaagagtaagaagaaatataagagccaccatggcccctaagaagaagcgtaaagtgagccggatgaaccacgaccaggagttcgacccccctaaggtgtaccctcccgtccccgccgagaagagaaagcccatccgggtcctgagcctgttcgatggcatcgccaccggtctgctggtgctgaaggacctgggcatccaggtggataggtacattgcctccgaggtgtgcgaggactccatcaccgtgggaatggtgcgtcatcagggcaagatcatgtacgtgggcgacgtgcggagcgtgacacagaagcatatccaggagtggggccctttcgacctggtgatcggcggcagcccttgcaatgacctgagcatcgtgaacccagcccggaagggcctgtacgagggaaccggcagactgttcttcgagttttacagactgctgcacgacgcccggcctaaggaaggcgacgaccggcccttcttttggctgttcgagaatgtggtggccatgggagtcagcgacaagcgggatattagccggttcctggagagcaaccccgtgatgatcgatgccaaggaagtgagcgccgcccaccgggccagatacttctggggcaatctgcctggcatgaacagacccctggccagcaccgtgaacgacaagctggagctgcaggagtgcctggagcacggccggatcgccaagttcagcaaggtgagaaccatcaccacccgaagcaacagcatcaaacaaggcaaggaccagcactttcctgtgttcatgaacgagaaggaggacatcctgtggtgtaccgagatggagagagtgttcgggttcccagtccactacacagatgtcagcaacatgtctagactggccagacagagactgctgggaagaagctggtccgtccctgtgatcagacacctgttcgcccctctgaaggagtacttcgcctgcgtgagcagcggcaacagcaacgccaacagccggggccccagcttctctagcggcctggtgccactgtccctgagagggagccacatgggccccatggagatctacaaaaccgtgagcgcctggaagcggcagcctgtgcgcgtgctgagcctgtttcggaatatcgataaagtcctgaaaagcctgggattcctggagagcggctctggctccggcggtggcaccctgaagtacgtggaggatgtgacaaacgtggtcagacgggatgtggagaagtggggccccttcgatctggtgtacggcagcacccaacccctgggcagctcttgtgaccggtgccctggctggtacatgtttcagttccaccggatcctgcagtacgccctgccgagacaggagtcccagcggccattcttttggattttcatggacaacttgctgctgaccgaggatgaccaggaaactaccactcggttcctgcagaccgaagccgtgaccctgcaggacgtgagaggccgggactaccagaacgccatgcgggtgtggtccaacatccctggactgaaaagcaagcacgcacctctgacccctaaagaagaggagtacctgcaggcccaggtgcggagcagaagcaagctggacgcccctaaggtggatctgctggtgaagaattgcctcctgcccctgagagagtacttcaagtatttcagccagaatagtctgcccctgggaggcagcggcggcggcagccaggagctgctgaccttcaaggacatcagcatcgacttcacccaggaggagtggggccagctgacccccgcccaccagaacctgtacagggaggtgatgctggagaactacagcaacctggtgagcgtggccggctaccagctgagcaagcccgtggtgatcagccagctggagaagggcgaggagccctggatgaccgagaaggagggccccggcgaccccagcagcgacctgaagagcggcggcccaagcagcggcgcccctcctcccagcggcggcaggcggcccaagcagcggcgcccctcctcccagcggcggcagcccagccggctccccaacctctaccgaggagggcacctctgagtccgccacccccgagagcggccctggcacctccaccgagcccagcgagggcagcgcacccggcagccctgccggcagccccacctccacagaggagggaaccagcaccgagcccagcgaaggcagcgccccaggcaccagcaccgagcctagtgagcaggagattaaacggatcaacaagatcagaagaagacttgtgaaagacagcaacaccaagaaggccggcaagacaggccccatgaaaaccctgctggttagagtgatgacacccgatctgagagagcggctggaaaacctgagaaagaagcctgaaaatatcccccagcccatcagcaatacatctagagccaacctgaataagctgctgaccgattacaccgaaatgaagaaggcgatcctgcatgtgtactgggaagagttccagaaggaccctgtgggcctgatgagccgggtggcccagcctgccagcaagaagatcgatcagaacaagctgaaacctgagatggacgagaagggcaacctgaccaccgccggctttgcctgctctcagtgtggccagcccctgttcgtgtacaagctggagcaggtgtctgagaagggcaaggcttacaccaactacttcggacggtgcaatgtggccgagcacgaaaagctgatcctgctggcccagctgaagcccgagaaggatagcgacgaagccgtgacatatagcctgggaaagtttgggcagagggccctggatttctacagcattcatgtgaccaaggagtccacccaccccgtgaagcccctggcccagatcgccggaaacagatacgcctccggacctgtgggaaaggccctgagcgacgcatgtatgggcacaatcgcctccttcctgtctaagtaccaggacatcatcatcgaacaccagaaggtggtgaagggcaaccagaagagactggagagcctgcgggagctggccggcaaggaaaacctggaataccctagcgtgaccctgccacctcagcctcacaccaaggagggcgttgatgcctacaacgaagtgatcgcccgggtgcgaatgtgggtgaacctgaacctgtggcagaagctgaagctaagcagagatgatgccaagcctctgctgagactgaagggattcccttcctttcctctggtcgagagacaggccaacgaagtggactggtgggacatggtgtgtaacgtgaagaagctgatcaacgagaaaaaggaggatggcaaggtgttttggcagaatctggctggctacaagagacaggaagccctgagaccatacctgagcagcgaggaagatcggaagaagggaaagaaattcgctcggtaccagctgggcgacctgctgctgcacctggaaaagaagcacggcgaggactggggaaaggtgtacgacgaggcctgggagcggattgacaagaaagtggaaggcctgagcaagcacatcaagctggaagaggaacggagaagcgaggacgcccagagcaaggccgccctgaccgactggctgcgggctaaggccagcttcgtgatcgagggcctgaaggaggccgacaaggacgagttctgcagatgcgagctgaagctgcagaagtggtacggggacctgcggggaaagcccttcgccatcgaagccgagaacagcatcctggacatcagcggcttcagcaagcagtacaactgtgccttcatctggcagaaggacggcgtgaagaagctgaacctgtacctgatcatcaactacttcaagggcggcaagctgcggttcaagaagatcaaacctgaagccttcgaagccaacagattctacaccgtgatcaacaaaaagagcggcgagatcgtgcccatggaggtgaacttcaacttcgacgaccccaacctgatcatcctgcctctggcctttggcaagagacagggcagagaattcatctggaacgacctgctgtccctggaaaccggcagcctgaagctggccaacggaagagtgatcgagaagacactgtacaacagaagaacccggcaggatgagcctgccctgttcgtggccctgaccttcgagcggcgggaggtcctggactcctccaatatcaaaccaatgaacctgatcggcgtggcaagaggcgaaaacatccccgccgtgatcgccctgaccgaccccgagggctgcccactgagccggtttaaggatagcctgggaaacccaacccacatcctgagaatcggcgagagctataaggagaagcagcggaccatccaggccaagaaggaggtggagcagcggagagccggcggctacagccggaagtacgccagcaaagccaagaatctggcagacgatatggtgagaaacaccgctagagatctgctgtactacgccgtgacccaggatgccatgctgatcttcgccaacctgagccggggcttcggccggcagggcaagcggaccttcatggccgagagacagtacacacggatggaggactggctgaccgccaagctggcctacgagggcctgagcaagacctacctgtccaagacactggcccagtacacctccaagacatgcagcaactgtgggtttaccatcaccagcgccgactacgacagggtgctggagaagctgaagaagacagcaacaggctggatgaccacaattaacggcaaggagctgaaggtggagggccagattacctactacaacagatacaagagacagaacgtagtcaaggacctgtccgtcgagctggatagactgagcgaagaatctgtgaacaacgacatctcctcctggacaaagggcagaagcggagaagctctgagcctcctgaagaaaagattctcccatagacccgtgcaggagaagttcgtgtgcctgaactgcggcttcgagacacacgcagccgagcaagccgccctgaacatcgccagatcctggctgttcctgcggagccaggagtacaagaaataccagacaaacaagacaaccggcaacaccgataagagagccttcgtcgagacctggcagtccttttaccggaagaagcttaaggaggtgtggaaacctgccgtgcggtctggcggatctggcggaggctccaccagccccaagaaaaagagaaaagtctaagctgccttctgcggggcttgccttctggccatgcccttcttctctcccttgcacctgtacctcttggtctttgaataaagcctgagtaggaaggctagcaaaaaaaaaaaaaaaaaaaaaaaaaaaaaaaaaaaaaaaaaaaaaaaaaaaaaaaaaaaaaaaaaaaaaaaaaaaaaaaagcccagccggctccccaacctctaccgaggagggcacctctgagtccgccacccccgagagcggccctggcacctccaccgagcccagcgagggcagcgcacccggcagccctgccggcagccccacctccacagaggagggaaccagcaccgagcccagcgaaggcagcgccccaggcaccagcaccgagcctagtgagcaggagattaaacggatcaacaagatcagaagaagacttgtgaaagacagcaacaccaagaaggccggcaagacaggccccatgaaaaccctgctggttagagtgatgacacccgatctgagagagcggctggaaaacctgagaaagaagcctgaaaatatcccccagcccatcagcaatacatctagagccaacctgaataagctgctgaccgattacaccgaaatgaagaaggcgatcctgcatgtgtactgggaagagttccagaaggaccctgtgggcctgatgagccgggtggcccagcctgccagcaagaagatcgatcagaacaagctgaaacctgagatggacgagaagggcaacctgaccaccgccggctttgcctgctctcagtgtggccagcccctgttcgtgtacaagctggagcaggtgtctgagaagggcaaggcttacaccaactacttcggacggtgcaatgtggccgagcacgaaaagctgatcctgctggcccagctgaagcccgagaaggatagcgacgaagccgtgacatatagcctgggaaagtttgggcagagggccctggatttctacagcattcatgtgaccaaggagtccacccaccccgtgaagcccctggcccagatcgccggaaacagatacgcctccggacctgtgggaaaggccctgagcgacgcatgtatgggcacaatcgcctccttcctgtctaagtaccaggacatcatcatcgaacaccagaaggtggtgaagggcaaccagaagagactggagagcctgcgggagctggccggcaaggaaaacctggaataccctagcgtgaccctgccacctcagcctcacaccaaggagggcgttgatgcctacaacgaagtgatcgcccgggtgcgaatgtgggtgaacctgaacctgtggcagaagctgaagctaagcagagatgatgccaagcctctgctgagactgaagggattcccttcctttcctctggtcgagagacaggccaacgaagtggactggtgggacatggtgtgtaacgtgaagaagctgatcaacgagaaaaaggaggatggcaaggtgttttggcagaatctggctggctacaagagacaggaagccctgagaccatacctgagcagcgaggaagatcggaagaagggaaagaaattcgctcggtaccagctgggcgacctgctgctgcacctggaaaagaagcacggcgaggactggggaaaggtgtacgacgaggcctgggagcggattgacaagaaagtggaaggcctgagcaagcacatcaagctggaagaggaacggagaagcgaggacgcccagagcaaggccgccctgaccgactggctgcgggctaaggccagcttcgtgatcgagggcctgaaggaggccgacaaggacgagttctgcagatgcgagctgaagctgcagaagtggtacggggacctgcggggaaagcccttcgccatcgaagccgagaacagcatcctggacatcagcggcttcagcaagcagtacaactgtgccttcatctggcagaaggacggcgtgaagaagctgaacctgtacctgatcatcaactacttcaagggcggcaagctgcggttcaagaagatcaaacctgaagccttcgaagccaacagattctacaccgtgatcaacaaaaagagcggcgagatcgtgcccatggaggtgaacttcaacttcgacgaccccaacctgatcatcctgcctctggcctttggcaagagacagggcagagaattcatctggaacgacctgctgtccctggaaaccggcagcctgaagctggccaacggaagagtgatcgagaagacactgtacaacagaagaacccggcaggatgagcctgccctgttcgtggccctgaccttcgagcggcgggaggtcctggactcctccaatatcaaaccaatgaacctgatcggcgtggcaagaggcgaaaacatccccgccgtgatcgccctgaccgaccccgagggctgcccactgagccggtttaaggatagcctgggaaacccaacccacatcctgagaatcggcgagagctataaggagaagcagcggaccatccaggccaagaaggaggtggagcagcggagagccggcggctacagccggaagtacgccagcaaagccaagaatctggcagacgatatggtgagaaacaccgctagagatctgctgtactacgccgtgacccaggatgccatgctgatcttcgccaacctgagccggggcttcggccggcagggcaagcggaccttcatggccgagagacagtacacacggatggaggactggctgaccgccaagctggcctacgagggcctgagcaagacctacctgtccaagacactggcccagtacacctccaagacatgcagcaactgtgggtttaccatcaccagcgccgactacgacagggtgctggagaagctgaagaagacagcaacaggctggatgaccacaattaacggcaaggagctgaaggtggagggccagattacctactacaacagatacaagagacagaacgtagtcaaggacctgtccgtcgagctggatagactgagcgaagaatctgtgaacaacgacatctcctcctggacaaagggcagaagcggagaagctctgagcctcctgaagaaaagattctcccatagacccgtgcaggagaagttcgtgtgcctgaactgcggcttcgagacacacgcagccgagcaagccgccctgaacatcgccagatcctggctgttcctgcggagccaggagtacaagaaataccagacaaacaagacaaccggcaacaccgataagagagccttcgtcgagacctggcagtccttttaccggaagaagcttaaggaggtgtggaaacctgccgtgcggtctggcggatctggcggaggctccaccagccccaagaaaaagagaaaagtctaagctgccttctgcggggcttgccttctggccatgcccttcttctctcccttgcacctgtacctcttggtctttgaataaagcctgagtaggaaggctagcaaaaaaaaaaaaaaaaaaaaaaaaaaaaaaaaaaaaaaaaaaaaaaaaaaaaaaaaaaaaaaaaaaaaaaaaaaaaaaaa

SEQ ID NO: 9310 - RNA, 8787 nt, synthetic construct
  source 1..8787: mol_type = other RNA
aggaaataagagagaaaagaagagtaagaagaaatataagagccaccatggcccctaagaagaagcgtaaagtgagccggatgaaccacgaccaggagttcgacccccctaaggtgtaccctcccgtccccgccgagaagagaaagcccatccgggtcctgagcctgttcgatggcatcgccaccggtctgctggtgctgaaggacctgggcatccaggtggataggtacattgcctccgaggtgtgcgaggactccatcaccgtgggaatggtgcgtcatcagggcaagatcatgtacgtgggcgacgtgcggagcgtgacacagaagcatatccaggagtggggccctttcgacctggtgatcggcggcagcccttgcaatgacctgagcatcgtgaacccagcccggaagggcctgtacgagggaaccggcagactgttcttcgagttttacagactgctgcacgacgcccggcctaaggaaggcgacgaccggcccttcttttggctgttcgagaatgtggtggccatgggagtcagcgacaagcgggatattagccggttcctggagagcaaccccgtgatgatcgatgccaaggaagtgagcgccgcccaccgggccagatacttctggggcaatctgcctggcatgaacagacccctggccagcaccgtgaacgacaagctggagctgcaggagtgcctggagcacggccggatcgccaagttcagcaaggtgagaaccatcaccacccgaagcaacagcatcaaacaaggcaaggaccagcactttcctgtgttcatgaacgagaaggaggacatcctgtggtgtaccgagatggagagagtgttcgggttcccagtccactacacagatgtcagcaacatgtctagactggccagacagagactgctgggaagaagctggtccgtccctgtgatcagacacctgttcgcccctctgaaggagtacttcgcctgcgtgagcagcggcaacagcaacgccaacagccggggccccagcttctctagcggcctggtgccactgtccctgagagggagccacatgggccccatggagatctacaaaaccgtgagcgcctggaagcggcagcctgtgcgcgtgctgagcctgtttcggaatatcgataaagtcctgaaaagcctgggattcctggagagcggctctggctccggcggtggcaccctgaagtacgtggaggatgtgacaaacgtggtcagacgggatgtggagaagtggggccccttcgatctggtgtacggcagcacccaacccctgggcagctcttgtgaccggtgccctggctggtacatgtttcagttccaccggatcctgcagtacgccctgccgagacaggagtcccagcggccattcttttggattttcatggacaacttgctgctgaccgaggatgaccaggaaactaccactcggttcctgcagaccgaagccgtgaccctgcaggacgtgagaggccgggactaccagaacgccatgcgggtgtggtccaacatccctggactgaaaagcaagcacgcacctctgacccctaaagaagaggagtacctgcaggcccaggtgcggagcagaagcaagctggacgcccctaaggtggatctgctggtgaagaattgcctcctgcccctgagagagtacttcaagtatttcagccagaatagtctgcccctgggaggcagcggcggcggcgaggagctgcccgtggtgttcgaggacgtggccgtgtacttcaccagggaggagtgggccatgctggacaagaggcagaaggagctgtacagggacgtgatgaggatgaactacgagctgctggccagcctgggccccgccgcccccaagcccgacctgatcctgaagctggagaggagggccgccccctggatcaaggaccccaacggccccaagtggggcaagggcaggccccccggcaagggcggcccaagcagcggcgcccctcctcccagcggcggcaggcggcccaagcagcggcgcccctcctcccagcggcggcagcccagccggctccccaacctctaccgaggagggcacctctgagtccgccacccccgagagcggccctggcacctccaccgagcccagcgagggcagcgcacccggcagccctgccggcagccccacctccacagaggagggaaccagcaccgagcccagcgaaggcagcgccccaggcaccagcaccgagcctagtgagcaggagattaaacggatcaacaagatcagaagaagacttgtgaaagacagcaacaccaagaaggccggcaagacaggccccatgaaaaccctgctggttagagtgatgacacccgatctgagagagcggctggaaaacctgagaaagaagcctgaaaatatcccccagcccatcagcaatacatctagagccaacctgaataagctgctgaccgattacaccgaaatgaagaaggcgatcctgcatgtgtactgggaagagttccagaaggaccctgtgggcctgatgagccgggtggcccagcctgccagcaagaagatcgatcagaacaagctgaaacctgagatggacgagaagggcaacctgaccaccgccggctttgcctgctctcagtgtggccagcccctgttcgtgtacaagctggagcaggtgtctgagaagggcaaggcttacaccaactacttcggacggtgcaatgtggccgagcacgaaaagctgatcctgctggcccagctgaagcccgagaaggatagcgacgaagccgtgacatatagcctgggaaagtttgggcagagggccctggatttctacagcattcatgtgaccaaggagtccacccaccccgtgaagcccctggcccagatcgccggaaacagatacgcctccggacctgtgggaaaggccctgagcgacgcatgtatgggcacaatcgcctccttcctgtctaagtaccaggacatcatcatcgaacaccagaaggtggtgaagggcaaccagaagagactggagagcctgcgggagctggccggcaaggaaaacctggaataccctagcgtgaccctgccacctcagcctcacaccaaggagggcgttgatgcctacaacgaagtgatcgcccgggtgcgaatgtgggtgaacctgaacctgtggcagaagctgaagctaagcagagatgatgccaagcctctgctgagactgaagggattcccttcctttcctctggtcgagagacaggccaacgaagtggactggtgggacatggtgtgtaacgtgaagaagctgatcaacgagaaaaaggaggatggcaaggtgttttggcagaatctggctggctacaagagacaggaagccctgagaccatacctgagcagcgaggaagatcggaagaagggaaagaaattcgctcggtaccagctgggcgacctgctgctgcacctggaaaagaagcacggcgaggactggggaaaggtgtacgacgaggcctgggagcggattgacaagaaagtggaaggcctgagcaagcacatcaagctggaagaggaacggagaagcgaggacgcccagagcaaggccgccctgaccgactggctgcgggctaaggccagcttcgtgatcgagggcctgaaggaggccgacaaggacgagttctgcagatgcgagctgaagctgcagaagtggtacggggacctgcggggaaagcccttcgccatcgaagccgagaacagcatcctggacatcagcggcttcagcaagcagtacaactgtgccttcatctggcagaaggacggcgtgaagaagctgaacctgtacctgatcatcaactacttcaagggcggcaagctgcggttcaagaagatcaaacctgaagccttcgaagccaacagattctacaccgtgatcaacaaaaagagcggcgagatcgtgcccatggaggtgaacttcaacttcgacgaccccaacctgatcatcctgcctctggcctttggcaagagacagggcagagaattcatctggaacgacctgctgtccctggaaaccggcagcctgaagctggccaacggaagagtgatcgagaagacactgtacaacagaagaacccggcaggatgagcctgccctgttcgtggccctgaccttcgagcggcgggaggtcctggactcctccaatatcaaaccaatgaacctgatcggcgtggcaagaggcgaaaacatccccgccgtgatcgccctgaccgaccccgagggctgcccactgagccggtttaaggatagcctgggaaacccaacccacatcctgagaatcggcgagagctataaggagaagcagcggaccatccaggccaagaaggaggtggagcagcggagagccggcggctacagccggaagtacgccagcaaagccaagaatctggcagacgatatggtgagaaacaccgctagagatctgctgtactacgccgtgacccaggatgccatgctgatcttcgccaacctgagccggggcttcggccggcagggcaagcggaccttcatggccgagagacagtacacacggatggaggactggctgaccgccaagctggcctacgagggcctgagcaagacctacctgtccaagacactggcccagtacacctccaagacatgcagcaactgtgggtttaccatcaccagcgccgactacgacagggtgctggagaagctgaagaagacagcaacaggctggatgaccacaattaacggcaaggagctgaaggtggagggccagattacctactacaacagatacaagagacagaacgtagtcaaggacctgtccgtcgagctggatagactgagcgaagaatctgtgaacaacgacatctcctcctggacaaagggcagaagcggagaagctctgagcctcctgaagaaaagattctcccatagacccgtgcaggagaagttcgtgtgcctgaactgcggcttcgagacacacgcagccgagcaagccgccctgaacatcgccagatcctggctgttcctgcggagccaggagtacaagaaataccagacaaacaagacaaccggcaacaccgataagagagccttcgtcgagacctggcagtccttttaccggaagaagcttaaggaggtgtggaaacctgccgtgcggtctggcggatctggcggaggctccaccagccccaagaaaaagagaaaagtctaagctgccttctgcggggcttgccttctggccatgcccttcttctctcccttgcacctgtacctcttggtctttgaataaagcctgagtaggaaggctagcaaaaaaaaaaaaaaaaaaaaaaaaaaaaaaaaaaaaaaaaaaaaaaaaaaaaaaaaaaaaaaaaaaaaaaaaaaaaaaaagcccagccggctccccaacctctaccgaggagggcacctctgagtccgccacccccgagagcggccctggcacctccaccgagcccagcgagggcagcgcacccggcagccctgccggcagccccacctccacagaggagggaaccagcaccgagcccagcgaaggcagcgccccaggcaccagcaccgagcctagtgagcaggagattaaacggatcaacaagatcagaagaagacttgtgaaagacagcaacaccaagaaggccggcaagacaggccccatgaaaaccctgctggttagagtgatgacacccgatctgagagagcggctggaaaacctgagaaagaagcctgaaaatatcccccagcccatcagcaatacatctagagccaacctgaataagctgctgaccgattacaccgaaatgaagaaggcgatcctgcatgtgtactgggaagagttccagaaggaccctgtgggcctgatgagccgggtggcccagcctgccagcaagaagatcgatcagaacaagctgaaacctgagatggacgagaagggcaacctgaccaccgccggctttgcctgctctcagtgtggccagcccctgttcgtgtacaagctggagcaggtgtctgagaagggcaaggcttacaccaactacttcggacggtgcaatgtggccgagcacgaaaagctgatcctgctggcccagctgaagcccgagaaggatagcgacgaagccgtgacatatagcctgggaaagtttgggcagagggccctggatttctacagcattcatgtgaccaaggagtccacccaccccgtgaagcccctggcccagatcgccggaaacagatacgcctccggacctgtgggaaaggccctgagcgacgcatgtatgggcacaatcgcctccttcctgtctaagtaccaggacatcatcatcgaacaccagaaggtggtgaagggcaaccagaagagactggagagcctgcgggagctggccggcaaggaaaacctggaataccctagcgtgaccctgccacctcagcctcacaccaaggagggcgttgatgcctacaacgaagtgatcgcccgggtgcgaatgtgggtgaacctgaacctgtggcagaagctgaagctaagcagagatgatgccaagcctctgctgagactgaagggattcccttcctttcctctggtcgagagacaggccaacgaagtggactggtgggacatggtgtgtaacgtgaagaagctgatcaacgagaaaaaggaggatggcaaggtgttttggcagaatctggctggctacaagagacaggaagccctgagaccatacctgagcagcgaggaagatcggaagaagggaaagaaattcgctcggtaccagctgggcgacctgctgctgcacctggaaaagaagcacggcgaggactggggaaaggtgtacgacgaggcctgggagcggattgacaagaaagtggaaggcctgagcaagcacatcaagctggaagaggaacggagaagcgaggacgcccagagcaaggccgccctgaccgactggctgcgggctaaggccagcttcgtgatcgagggcctgaaggaggccgacaaggacgagttctgcagatgcgagctgaagctgcagaagtggtacggggacctgcggggaaagcccttcgccatcgaagccgagaacagcatcctggacatcagcggcttcagcaagcagtacaactgtgccttcatctggcagaaggacggcgtgaagaagctgaacctgtacctgatcatcaactacttcaagggcggcaagctgcggttcaagaagatcaaacctgaagccttcgaagccaacagattctacaccgtgatcaacaaaaagagcggcgagatcgtgcccatggaggtgaacttcaacttcgacgaccccaacctgatcatcctgcctctggcctttggcaagagacagggcagagaattcatctggaacgacctgctgtccctggaaaccggcagcctgaagctggccaacggaagagtgatcgagaagacactgtacaacagaagaacccggcaggatgagcctgccctgttcgtggccctgaccttcgagcggcgggaggtcctggactcctccaatatcaaaccaatgaacctgatcggcgtggcaagaggcgaaaacatccccgccgtgatcgccctgaccgaccccgagggctgcccactgagccggtttaaggatagcctgggaaacccaacccacatcctgagaatcggcgagagctataaggagaagcagcggaccatccaggccaagaaggaggtggagcagcggagagccggcggctacagccggaagtacgccagcaaagccaagaatctggcagacgatatggtgagaaacaccgctagagatctgctgtactacgccgtgacccaggatgccatgctgatcttcgccaacctgagccggggcttcggccggcagggcaagcggaccttcatggccgagagacagtacacacggatggaggactggctgaccgccaagctggcctacgagggcctgagcaagacctacctgtccaagacactggcccagtacacctccaagacatgcagcaactgtgggtttaccatcaccagcgccgactacgacagggtgctggagaagctgaagaagacagcaacaggctggatgaccacaattaacggcaaggagctgaaggtggagggccagattacctactacaacagatacaagagacagaacgtagtcaaggacctgtccgtcgagctggatagactgagcgaagaatctgtgaacaacgacatctcctcctggacaaagggcagaagcggagaagctctgagcctcctgaagaaaagattctcccatagacccgtgcaggagaagttcgtgtgcctgaactgcggcttcgagacacacgcagccgagcaagccgccctgaacatcgccagatcctggctgttcctgcggagccaggagtacaagaaataccagacaaacaagacaaccggcaacaccgataagagagccttcgtcgagacctggcagtccttttaccggaagaagcttaaggaggtgtggaaacctgccgtgcggtctggcggatctggcggaggctccaccagccccaagaaaaagagaaaagtctaagctgccttctgcggggcttgccttctggccatgcccttcttctctcccttgcacctgtacctcttggtctttgaataaagcctgagtaggaaggctagcaaaaaaaaaaaaaaaaaaaaaaaaaaaaaaaaaaaaaaaaaaaaaaaaaaaaaaaaaaaaaaaaaaaaaaaaaaaaaaaa

SEQ ID NO: 9311 - RNA, 8787 nt, synthetic construct
  source 1..8787: mol_type = other RNA
aggaaataagagagaaaagaagagtaagaagaaatataagagccaccatggcccctaagaagaagcgtaaagtgagccggatgaaccacgaccaggagttcgacccccctaaggtgtaccctcccgtccccgccgagaagagaaagcccatccgggtcctgagcctgttcgatggcatcgccaccggtctgctggtgctgaaggacctgggcatccaggtggataggtacattgcctccgaggtgtgcgaggactccatcaccgtgggaatggtgcgtcatcagggcaagatcatgtacgtgggcgacgtgcggagcgtgacacagaagcatatccaggagtggggccctttcgacctggtgatcggcggcagcccttgcaatgacctgagcatcgtgaacccagcccggaagggcctgtacgagggaaccggcagactgttcttcgagttttacagactgctgcacgacgcccggcctaaggaaggcgacgaccggcccttcttttggctgttcgagaatgtggtggccatgggagtcagcgacaagcgggatattagccggttcctggagagcaaccccgtgatgatcgatgccaaggaagtgagcgccgcccaccgggccagatacttctggggcaatctgcctggcatgaacagacccctggccagcaccgtgaacgacaagctggagctgcaggagtgcctggagcacggccggatcgccaagttcagcaaggtgagaaccatcaccacccgaagcaacagcatcaaacaaggcaaggaccagcactttcctgtgttcatgaacgagaaggaggacatcctgtggtgtaccgagatggagagagtgttcgggttcccagtccactacacagatgtcagcaacatgtctagactggccagacagagactgctgggaagaagctggtccgtccctgtgatcagacacctgttcgcccctctgaaggagtacttcgcctgcgtgagcagcggcaacagcaacgccaacagccggggccccagcttctctagcggcctggtgccactgtccctgagagggagccacatgggccccatggagatctacaaaaccgtgagcgcctggaagcggcagcctgtgcgcgtgctgagcctgtttcggaatatcgataaagtcctgaaaagcctgggattcctggagagcggctctggctccggcggtggcaccctgaagtacgtggaggatgtgacaaacgtggtcagacgggatgtggagaagtggggccccttcgatctggtgtacggcagcacccaacccctgggcagctcttgtgaccggtgccctggctggtacatgtttcagttccaccggatcctgcagtacgccctgccgagacaggagtcccagcggccattcttttggattttcatggacaacttgctgctgaccgaggatgaccaggaaactaccactcggttcctgcagaccgaagccgtgaccctgcaggacgtgagaggccgggactaccagaacgccatgcgggtgtggtccaacatccctggactgaaaagcaagcacgcacctctgacccctaaagaagaggagtacctgcaggcccaggtgcggagcagaagcaagctggacgcccctaaggtggatctgctggtgaagaattgcctcctgcccctgagagagtacttcaagtatttcagccagaatagtctgcccctgggaggcagcggcggcggcttccaggaggccgtgaccttcaaggacgtggccgtggccttcaccgaggaggagctgggcatgctggacagcgcccagaagaagctgtacagggacgtgatgctggagaacttcaggaacctggtgagcgtgggccaccagagcttcaagcccgacatgatcagccagctggagagggaggagaagctgtggatgaaggagctgcagacccagaggggcaagcacagcggcgagtactgcgccggcggcccaagcagcggcgcccctcctcccagcggcggcaggcggcccaagcagcggcgcccctcctcccagcggcggcagcccagccggctccccaacctctaccgaggagggcacctctgagtccgccacccccgagagcggccctggcacctccaccgagcccagcgagggcagcgcacccggcagccctgccggcagccccacctccacagaggagggaaccagcaccgagcccagcgaaggcagcgccccaggcaccagcaccgagcctagtgagcaggagattaaacggatcaacaagatcagaagaagacttgtgaaagacagcaacaccaagaaggccggcaagacaggccccatgaaaaccctgctggttagagtgatgacacccgatctgagagagcggctggaaaacctgagaaagaagcctgaaaatatcccccagcccatcagcaatacatctagagccaacctgaataagctgctgaccgattacaccgaaatgaagaaggcgatcctgcatgtgtactgggaagagttccagaaggaccctgtgggcctgatgagccgggtggcccagcctgccagcaagaagatcgatcagaacaagctgaaacctgagatggacgagaagggcaacctgaccaccgccggctttgcctgctctcagtgtggccagcccctgttcgtgtacaagctggagcaggtgtctgagaagggcaaggcttacaccaactacttcggacggtgcaatgtggccgagcacgaaaagctgatcctgctggcccagctgaagcccgagaaggatagcgacgaagccgtgacatatagcctgggaaagtttgggcagagggccctggatttctacagcattcatgtgaccaaggagtccacccaccccgtgaagcccctggcccagatcgccggaaacagatacgcctccggacctgtgggaaaggccctgagcgacgcatgtatgggcacaatcgcctccttcctgtctaagtaccaggacatcatcatcgaacaccagaaggtggtgaagggcaaccagaagagactggagagcctgcgggagctggccggcaaggaaaacctggaataccctagcgtgaccctgccacctcagcctcacaccaaggagggcgttgatgcctacaacgaagtgatcgcccgggtgcgaatgtgggtgaacctgaacctgtggcagaagctgaagctaagcagagatgatgccaagcctctgctgagactgaagggattcccttcctttcctctggtcgagagacaggccaacgaagtggactggtgggacatggtgtgtaacgtgaagaagctgatcaacgagaaaaaggaggatggcaaggtgttttggcagaatctggctggctacaagagacaggaagccctgagaccatacctgagcagcgaggaagatcggaagaagggaaagaaattcgctcggtaccagctgggcgacctgctgctgcacctggaaaagaagcacggcgaggactggggaaaggtgtacgacgaggcctgggagcggattgacaagaaagtggaaggcctgagcaagcacatcaagctggaagaggaacggagaagcgaggacgcccagagcaaggccgccctgaccgactggctgcgggctaaggccagcttcgtgatcgagggcctgaaggaggccgacaaggacgagttctgcagatgcgagctgaagctgcagaagtggtacggggacctgcggggaaagcccttcgccatcgaagccgagaacagcatcctggacatcagcggcttcagcaagcagtacaactgtgccttcatctggcagaaggacggcgtgaagaagctgaacctgtacctgatcatcaactacttcaagggcggcaagctgcggttcaagaagatcaaacctgaagccttcgaagccaacagattctacaccgtgatcaacaaaaagagcggcgagatcgtgcccatggaggtgaacttcaacttcgacgaccccaacctgatcatcctgcctctggcctttggcaagagacagggcagagaattcatctggaacgacctgctgtccctggaaaccggcagcctgaagctggccaacggaagagtgatcgagaagacactgtacaacagaagaacccggcaggatgagcctgccctgttcgtggccctgaccttcgagcggcgggaggtcctggactcctccaatatcaaaccaatgaacctgatcggcgtggcaagaggcgaaaacatccccgccgtgatcgccctgaccgaccccgagggctgcccactgagccggtttaaggatagcctgggaaacccaacccacatcctgagaatcggcgagagctataaggagaagcagcggaccatccaggccaagaaggaggtggagcagcggagagccggcggctacagccggaagtacgccagcaaagccaagaatctggcagacgatatggtgagaaacaccgctagagatctgctgtactacgccgtgacccaggatgccatgctgatcttcgccaacctgagccggggcttcggccggcagggcaagcggaccttcatggccgagagacagtacacacggatggaggactggctgaccgccaagctggcctacgagggcctgagcaagacctacctgtccaagacactggcccagtacacctccaagacatgcagcaactgtgggtttaccatcaccagcgccgactacgacagggtgctggagaagctgaagaagacagcaacaggctggatgaccacaattaacggcaaggagctgaaggtggagggccagattacctactacaacagatacaagagacagaacgtagtcaaggacctgtccgtcgagctggatagactgagcgaagaatctgtgaacaacgacatctcctcctggacaaagggcagaagcggagaagctctgagcctcctgaagaaaagattctcccatagacccgtgcaggagaagttcgtgtgcctgaactgcggcttcgagacacacgcagccgagcaagccgccctgaacatcgccagatcctggctgttcctgcggagccaggagtacaagaaataccagacaaacaagacaaccggcaacaccgataagagagccttcgtcgagacctggcagtccttttaccggaagaagcttaaggaggtgtggaaacctgccgtgcggtctggcggatctggcggaggctccaccagccccaagaaaaagagaaaagtctaagctgccttctgcggggcttgccttctggccatgcccttcttctctcccttgcacctgtacctcttggtctttgaataaagcctgagtaggaaggctagcaaaaaaaaaaaaaaaaaaaaaaaaaaaaaaaaaaaaaaaaaaaaaaaaaaaaaaaaaaaaaaaaaaaaaaaaaaaaaaaagcccagccggctccccaacctctaccgaggagggcacctctgagtccgccacccccgagagcggccctggcacctccaccgagcccagcgagggcagcgcacccggcagccctgccggcagccccacctccacagaggagggaaccagcaccgagcccagcgaaggcagcgccccaggcaccagcaccgagcctagtgagcaggagattaaacggatcaacaagatcagaagaagacttgtgaaagacagcaacaccaagaaggccggcaagacaggccccatgaaaaccctgctggttagagtgatgacacccgatctgagagagcggctggaaaacctgagaaagaagcctgaaaatatcccccagcccatcagcaatacatctagagccaacctgaataagctgctgaccgattacaccgaaatgaagaaggcgatcctgcatgtgtactgggaagagttccagaaggaccctgtgggcctgatgagccgggtggcccagcctgccagcaagaagatcgatcagaacaagctgaaacctgagatggacgagaagggcaacctgaccaccgccggctttgcctgctctcagtgtggccagcccctgttcgtgtacaagctggagcaggtgtctgagaagggcaaggcttacaccaactacttcggacggtgcaatgtggccgagcacgaaaagctgatcctgctggcccagctgaagcccgagaaggatagcgacgaagccgtgacatatagcctgggaaagtttgggcagagggccctggatttctacagcattcatgtgaccaaggagtccacccaccccgtgaagcccctggcccagatcgccggaaacagatacgcctccggacctgtgggaaaggccctgagcgacgcatgtatgggcacaatcgcctccttcctgtctaagtaccaggacatcatcatcgaacaccagaaggtggtgaagggcaaccagaagagactggagagcctgcgggagctggccggcaaggaaaacctggaataccctagcgtgaccctgccacctcagcctcacaccaaggagggcgttgatgcctacaacgaagtgatcgcccgggtgcgaatgtgggtgaacctgaacctgtggcagaagctgaagctaagcagagatgatgccaagcctctgctgagactgaagggattcccttcctttcctctggtcgagagacaggccaacgaagtggactggtgggacatggtgtgtaacgtgaagaagctgatcaacgagaaaaaggaggatggcaaggtgttttggcagaatctggctggctacaagagacaggaagccctgagaccatacctgagcagcgaggaagatcggaagaagggaaagaaattcgctcggtaccagctgggcgacctgctgctgcacctggaaaagaagcacggcgaggactggggaaaggtgtacgacgaggcctgggagcggattgacaagaaagtggaaggcctgagcaagcacatcaagctggaagaggaacggagaagcgaggacgcccagagcaaggccgccctgaccgactggctgcgggctaaggccagcttcgtgatcgagggcctgaaggaggccgacaaggacgagttctgcagatgcgagctgaagctgcagaagtggtacggggacctgcggggaaagcccttcgccatcgaagccgagaacagcatcctggacatcagcggcttcagcaagcagtacaactgtgccttcatctggcagaaggacggcgtgaagaagctgaacctgtacctgatcatcaactacttcaagggcggcaagctgcggttcaagaagatcaaacctgaagccttcgaagccaacagattctacaccgtgatcaacaaaaagagcggcgagatcgtgcccatggaggtgaacttcaacttcgacgaccccaacctgatcatcctgcctctggcctttggcaagagacagggcagagaattcatctggaacgacctgctgtccctggaaaccggcagcctgaagctggccaacggaagagtgatcgagaagacactgtacaacagaagaacccggcaggatgagcctgccctgttcgtggccctgaccttcgagcggcgggaggtcctggactcctccaatatcaaaccaatgaacctgatcggcgtggcaagaggcgaaaacatccccgccgtgatcgccctgaccgaccccgagggctgcccactgagccggtttaaggatagcctgggaaacccaacccacatcctgagaatcggcgagagctataaggagaagcagcggaccatccaggccaagaaggaggtggagcagcggagagccggcggctacagccggaagtacgccagcaaagccaagaatctggcagacgatatggtgagaaacaccgctagagatctgctgtactacgccgtgacccaggatgccatgctgatcttcgccaacctgagccggggcttcggccggcagggcaagcggaccttcatggccgagagacagtacacacggatggaggactggctgaccgccaagctggcctacgagggcctgagcaagacctacctgtccaagacactggcccagtacacctccaagacatgcagcaactgtgggtttaccatcaccagcgccgactacgacagggtgctggagaagctgaagaagacagcaacaggctggatgaccacaattaacggcaaggagctgaaggtggagggccagattacctactacaacagatacaagagacagaacgtagtcaaggacctgtccgtcgagctggatagactgagcgaagaatctgtgaacaacgacatctcctcctggacaaagggcagaagcggagaagctctgagcctcctgaagaaaagattctcccatagacccgtgcaggagaagttcgtgtgcctgaactgcggcttcgagacacacgcagccgagcaagccgccctgaacatcgccagatcctggctgttcctgcggagccaggagtacaagaaataccagacaaacaagacaaccggcaacaccgataagagagccttcgtcgagacctggcagtccttttaccggaagaagcttaaggaggtgtggaaacctgccgtgcggtctggcggatctggcggaggctccaccagccccaagaaaaagagaaaagtctaagctgccttctgcggggcttgccttctggccatgcccttcttctctcccttgcacctgtacctcttggtctttgaataaagcctgagtaggaaggctagcaaaaaaaaaaaaaaaaaaaaaaaaaaaaaaaaaaaaaaaaaaaaaaaaaaaaaaaaaaaaaaaaaaaaaaaaaaaaaaaa

SEQ ID NO: 9312 - RNA, 8787 nt, synthetic construct
  source 1..8787: mol_type = other RNA
aggaaataagagagaaaagaagagtaagaagaaatataagagccaccatggcccctaagaagaagcgtaaagtgagccggatgaaccacgaccaggagttcgacccccctaaggtgtaccctcccgtccccgccgagaagagaaagcccatccgggtcctgagcctgttcgatggcatcgccaccggtctgctggtgctgaaggacctgggcatccaggtggataggtacattgcctccgaggtgtgcgaggactccatcaccgtgggaatggtgcgtcatcagggcaagatcatgtacgtgggcgacgtgcggagcgtgacacagaagcatatccaggagtggggccctttcgacctggtgatcggcggcagcccttgcaatgacctgagcatcgtgaacccagcccggaagggcctgtacgagggaaccggcagactgttcttcgagttttacagactgctgcacgacgcccggcctaaggaaggcgacgaccggcccttcttttggctgttcgagaatgtggtggccatgggagtcagcgacaagcgggatattagccggttcctggagagcaaccccgtgatgatcgatgccaaggaagtgagcgccgcccaccgggccagatacttctggggcaatctgcctggcatgaacagacccctggccagcaccgtgaacgacaagctggagctgcaggagtgcctggagcacggccggatcgccaagttcagcaaggtgagaaccatcaccacccgaagcaacagcatcaaacaaggcaaggaccagcactttcctgtgttcatgaacgagaaggaggacatcctgtggtgtaccgagatggagagagtgttcgggttcccagtccactacacagatgtcagcaacatgtctagactggccagacagagactgctgggaagaagctggtccgtccctgtgatcagacacctgttcgcccctctgaaggagtacttcgcctgcgtgagcagcggcaacagcaacgccaacagccggggccccagcttctctagcggcctggtgccactgtccctgagagggagccacatgggccccatggagatctacaaaaccgtgagcgcctggaagcggcagcctgtgcgcgtgctgagcctgtttcggaatatcgataaagtcctgaaaagcctgggattcctggagagcggctctggctccggcggtggcaccctgaagtacgtggaggatgtgacaaacgtggtcagacgggatgtggagaagtggggccccttcgatctggtgtacggcagcacccaacccctgggcagctcttgtgaccggtgccctggctggtacatgtttcagttccaccggatcctgcagtacgccctgccgagacaggagtcccagcggccattcttttggattttcatggacaacttgctgctgaccgaggatgaccaggaaactaccactcggttcctgcagaccgaagccgtgaccctgcaggacgtgagaggccgggactaccagaacgccatgcgggtgtggtccaacatccctggactgaaaagcaagcacgcacctctgacccctaaagaagaggagtacctgcaggcccaggtgcggagcagaagcaagctggacgcccctaaggtggatctgctggtgaagaattgcctcctgcccctgagagagtacttcaagtatttcagccagaatagtctgcccctgggaggcagcggcggcggcatgggccagctgaccttcaacgacgtgaccatcgagttcagcctggaggagtggcagtgcctggacaagccccagcagaacctgtacagggaggtgatgctggagaactacaggaacctggtgttcctgggcatcgccgtgagcaagcccgacctgatcacctgcctgaagcagggcaaggagccctggaacatcaggaggcacgagatggtgaccaagccccccgccatgtgcagccacttcggcggcccaagcagcggcgcccctcctcccagcggcggcaggcggcccaagcagcggcgcccctcctcccagcggcggcagcccagccggctccccaacctctaccgaggagggcacctctgagtccgccacccccgagagcggccctggcacctccaccgagcccagcgagggcagcgcacccggcagccctgccggcagccccacctccacagaggagggaaccagcaccgagcccagcgaaggcagcgccccaggcaccagcaccgagcctagtgagcaggagattaaacggatcaacaagatcagaagaagacttgtgaaagacagcaacaccaagaaggccggcaagacaggccccatgaaaaccctgctggttagagtgatgacacccgatctgagagagcggctggaaaacctgagaaagaagcctgaaaatatcccccagcccatcagcaatacatctagagccaacctgaataagctgctgaccgattacaccgaaatgaagaaggcgatcctgcatgtgtactgggaagagttccagaaggaccctgtgggcctgatgagccgggtggcccagcctgccagcaagaagatcgatcagaacaagctgaaacctgagatggacgagaagggcaacctgaccaccgccggctttgcctgctctcagtgtggccagcccctgttcgtgtacaagctggagcaggtgtctgagaagggcaaggcttacaccaactacttcggacggtgcaatgtggccgagcacgaaaagctgatcctgctggcccagctgaagcccgagaaggatagcgacgaagccgtgacatatagcctgggaaagtttgggcagagggccctggatttctacagcattcatgtgaccaaggagtccacccaccccgtgaagcccctggcccagatcgccggaaacagatacgcctccggacctgtgggaaaggccctgagcgacgcatgtatgggcacaatcgcctccttcctgtctaagtaccaggacatcatcatcgaacaccagaaggtggtgaagggcaaccagaagagactggagagcctgcgggagctggccggcaaggaaaacctggaataccctagcgtgaccctgccacctcagcctcacaccaaggagggcgttgatgcctacaacgaagtgatcgcccgggtgcgaatgtgggtgaacctgaacctgtggcagaagctgaagctaagcagagatgatgccaagcctctgctgagactgaagggattcccttcctttcctctggtcgagagacaggccaacgaagtggactggtgggacatggtgtgtaacgtgaagaagctgatcaacgagaaaaaggaggatggcaaggtgttttggcagaatctggctggctacaagagacaggaagccctgagaccatacctgagcagcgaggaagatcggaagaagggaaagaaattcgctcggtaccagctgggcgacctgctgctgcacctggaaaagaagcacggcgaggactggggaaaggtgtacgacgaggcctgggagcggattgacaagaaagtggaaggcctgagcaagcacatcaagctggaagaggaacggagaagcgaggacgcccagagcaaggccgccctgaccgactggctgcgggctaaggccagcttcgtgatcgagggcctgaaggaggccgacaaggacgagttctgcagatgcgagctgaagctgcagaagtggtacggggacctgcggggaaagcccttcgccatcgaagccgagaacagcatcctggacatcagcggcttcagcaagcagtacaactgtgccttcatctggcagaaggacggcgtgaagaagctgaacctgtacctgatcatcaactacttcaagggcggcaagctgcggttcaagaagatcaaacctgaagccttcgaagccaacagattctacaccgtgatcaacaaaaagagcggcgagatcgtgcccatggaggtgaacttcaacttcgacgaccccaacctgatcatcctgcctctggcctttggcaagagacagggcagagaattcatctggaacgacctgctgtccctggaaaccggcagcctgaagctggccaacggaagagtgatcgagaagacactgtacaacagaagaacccggcaggatgagcctgccctgttcgtggccctgaccttcgagcggcgggaggtcctggactcctccaatatcaaaccaatgaacctgatcggcgtggcaagaggcgaaaacatccccgccgtgatcgccctgaccgaccccgagggctgcccactgagccggtttaaggatagcctgggaaacccaacccacatcctgagaatcggcgagagctataaggagaagcagcggaccatccaggccaagaaggaggtggagcagcggagagccggcggctacagccggaagtacgccagcaaagccaagaatctggcagacgatatggtgagaaacaccgctagagatctgctgtactacgccgtgacccaggatgccatgctgatcttcgccaacctgagccggggcttcggccggcagggcaagcggaccttcatggccgagagacagtacacacggatggaggactggctgaccgccaagctggcctacgagggcctgagcaagacctacctgtccaagacactggcccagtacacctccaagacatgcagcaactgtgggtttaccatcaccagcgccgactacgacagggtgctggagaagctgaagaagacagcaacaggctggatgaccacaattaacggcaaggagctgaaggtggagggccagattacctactacaacagatacaagagacagaacgtagtcaaggacctgtccgtcgagctggatagactgagcgaagaatctgtgaacaacgacatctcctcctggacaaagggcagaagcggagaagctctgagcctcctgaagaaaagattctcccatagacccgtgcaggagaagttcgtgtgcctgaactgcggcttcgagacacacgcagccgagcaagccgccctgaacatcgccagatcctggctgttcctgcggagccaggagtacaagaaataccagacaaacaagacaaccggcaacaccgataagagagccttcgtcgagacctggcagtccttttaccggaagaagcttaaggaggtgtggaaacctgccgtgcggtctggcggatctggcggaggctccaccagccccaagaaaaagagaaaagtctaagctgccttctgcggggcttgccttctggccatgcccttcttctctcccttgcacctgtacctcttggtctttgaataaagcctgagtaggaaggctagcaaaaaaaaaaaaaaaaaaaaaaaaaaaaaaaaaaaaaaaaaaaaaaaaaaaaaaaaaaaaaaaaaaaaaaaaaaaaaaaagcccagccggctccccaacctctaccgaggagggcacctctgagtccgccacccccgagagcggccctggcacctccaccgagcccagcgagggcagcgcacccggcagccctgccggcagccccacctccacagaggagggaaccagcaccgagcccagcgaaggcagcgccccaggcaccagcaccgagcctagtgagcaggagattaaacggatcaacaagatcagaagaagacttgtgaaagacagcaacaccaagaaggccggcaagacaggccccatgaaaaccctgctggttagagtgatgacacccgatctgagagagcggctggaaaacctgagaaagaagcctgaaaatatcccccagcccatcagcaatacatctagagccaacctgaataagctgctgaccgattacaccgaaatgaagaaggcgatcctgcatgtgtactgggaagagttccagaaggaccctgtgggcctgatgagccgggtggcccagcctgccagcaagaagatcgatcagaacaagctgaaacctgagatggacgagaagggcaacctgaccaccgccggctttgcctgctctcagtgtggccagcccctgttcgtgtacaagctggagcaggtgtctgagaagggcaaggcttacaccaactacttcggacggtgcaatgtggccgagcacgaaaagctgatcctgctggcccagctgaagcccgagaaggatagcgacgaagccgtgacatatagcctgggaaagtttgggcagagggccctggatttctacagcattcatgtgaccaaggagtccacccaccccgtgaagcccctggcccagatcgccggaaacagatacgcctccggacctgtgggaaaggccctgagcgacgcatgtatgggcacaatcgcctccttcctgtctaagtaccaggacatcatcatcgaacaccagaaggtggtgaagggcaaccagaagagactggagagcctgcgggagctggccggcaaggaaaacctggaataccctagcgtgaccctgccacctcagcctcacaccaaggagggcgttgatgcctacaacgaagtgatcgcccgggtgcgaatgtgggtgaacctgaacctgtggcagaagctgaagctaagcagagatgatgccaagcctctgctgagactgaagggattcccttcctttcctctggtcgagagacaggccaacgaagtggactggtgggacatggtgtgtaacgtgaagaagctgatcaacgagaaaaaggaggatggcaaggtgttttggcagaatctggctggctacaagagacaggaagccctgagaccatacctgagcagcgaggaagatcggaagaagggaaagaaattcgctcggtaccagctgggcgacctgctgctgcacctggaaaagaagcacggcgaggactggggaaaggtgtacgacgaggcctgggagcggattgacaagaaagtggaaggcctgagcaagcacatcaagctggaagaggaacggagaagcgaggacgcccagagcaaggccgccctgaccgactggctgcgggctaaggccagcttcgtgatcgagggcctgaaggaggccgacaaggacgagttctgcagatgcgagctgaagctgcagaagtggtacggggacctgcggggaaagcccttcgccatcgaagccgagaacagcatcctggacatcagcggcttcagcaagcagtacaactgtgccttcatctggcagaaggacggcgtgaagaagctgaacctgtacctgatcatcaactacttcaagggcggcaagctgcggttcaagaagatcaaacctgaagccttcgaagccaacagattctacaccgtgatcaacaaaaagagcggcgagatcgtgcccatggaggtgaacttcaacttcgacgaccccaacctgatcatcctgcctctggcctttggcaagagacagggcagagaattcatctggaacgacctgctgtccctggaaaccggcagcctgaagctggccaacggaagagtgatcgagaagacactgtacaacagaagaacccggcaggatgagcctgccctgttcgtggccctgaccttcgagcggcgggaggtcctggactcctccaatatcaaaccaatgaacctgatcggcgtggcaagaggcgaaaacatccccgccgtgatcgccctgaccgaccccgagggctgcccactgagccggtttaaggatagcctgggaaacccaacccacatcctgagaatcggcgagagctataaggagaagcagcggaccatccaggccaagaaggaggtggagcagcggagagccggcggctacagccggaagtacgccagcaaagccaagaatctggcagacgatatggtgagaaacaccgctagagatctgctgtactacgccgtgacccaggatgccatgctgatcttcgccaacctgagccggggcttcggccggcagggcaagcggaccttcatggccgagagacagtacacacggatggaggactggctgaccgccaagctggcctacgagggcctgagcaagacctacctgtccaagacactggcccagtacacctccaagacatgcagcaactgtgggtttaccatcaccagcgccgactacgacagggtgctggagaagctgaagaagacagcaacaggctggatgaccacaattaacggcaaggagctgaaggtggagggccagattacctactacaacagatacaagagacagaacgtagtcaaggacctgtccgtcgagctggatagactgagcgaagaatctgtgaacaacgacatctcctcctggacaaagggcagaagcggagaagctctgagcctcctgaagaaaagattctcccatagacccgtgcaggagaagttcgtgtgcctgaactgcggcttcgagacacacgcagccgagcaagccgccctgaacatcgccagatcctggctgttcctgcggagccaggagtacaagaaataccagacaaacaagacaaccggcaacaccgataagagagccttcgtcgagacctggcagtccttttaccggaagaagcttaaggaggtgtggaaacctgccgtgcggtctggcggatctggcggaggctccaccagccccaagaaaaagagaaaagtctaagctgccttctgcggggcttgccttctggccatgcccttcttctctcccttgcacctgtacctcttggtctttgaataaagcctgagtaggaaggctagcaaaaaaaaaaaaaaaaaaaaaaaaaaaaaaaaaaaaaaaaaaaaaaaaaaaaaaaaaaaaaaaaaaaaaaaaaaaaaaaa

SEQ ID NO: 9313 - RNA, 8787 nt, synthetic construct
  source 1..8787: mol_type = other RNA
aggaaataagagagaaaagaagagtaagaagaaatataagagccaccatggcccctaagaagaagcgtaaagtgagccggatgaaccacgaccaggagttcgacccccctaaggtgtaccctcccgtccccgccgagaagagaaagcccatccgggtcctgagcctgttcgatggcatcgccaccggtctgctggtgctgaaggacctgggcatccaggtggataggtacattgcctccgaggtgtgcgaggactccatcaccgtgggaatggtgcgtcatcagggcaagatcatgtacgtgggcgacgtgcggagcgtgacacagaagcatatccaggagtggggccctttcgacctggtgatcggcggcagcccttgcaatgacctgagcatcgtgaacccagcccggaagggcctgtacgagggaaccggcagactgttcttcgagttttacagactgctgcacgacgcccggcctaaggaaggcgacgaccggcccttcttttggctgttcgagaatgtggtggccatgggagtcagcgacaagcgggatattagccggttcctggagagcaaccccgtgatgatcgatgccaaggaagtgagcgccgcccaccgggccagatacttctggggcaatctgcctggcatgaacagacccctggccagcaccgtgaacgacaagctggagctgcaggagtgcctggagcacggccggatcgccaagttcagcaaggtgagaaccatcaccacccgaagcaacagcatcaaacaaggcaaggaccagcactttcctgtgttcatgaacgagaaggaggacatcctgtggtgtaccgagatggagagagtgttcgggttcccagtccactacacagatgtcagcaacatgtctagactggccagacagagactgctgggaagaagctggtccgtccctgtgatcagacacctgttcgcccctctgaaggagtacttcgcctgcgtgagcagcggcaacagcaacgccaacagccggggccccagcttctctagcggcctggtgccactgtccctgagagggagccacatgggccccatggagatctacaaaaccgtgagcgcctggaagcggcagcctgtgcgcgtgctgagcctgtttcggaatatcgataaagtcctgaaaagcctgggattcctggagagcggctctggctccggcggtggcaccctgaagtacgtggaggatgtgacaaacgtggtcagacgggatgtggagaagtggggccccttcgatctggtgtacggcagcacccaacccctgggcagctcttgtgaccggtgccctggctggtacatgtttcagttccaccggatcctgcagtacgccctgccgagacaggagtcccagcggccattcttttggattttcatggacaacttgctgctgaccgaggatgaccaggaaactaccactcggttcctgcagaccgaagccgtgaccctgcaggacgtgagaggccgggactaccagaacgccatgcgggtgtggtccaacatccctggactgaaaagcaagcacgcacctctgacccctaaagaagaggagtacctgcaggcccaggtgcggagcagaagcaagctggacgcccctaaggtggatctgctggtgaagaattgcctcctgcccctgagagagtacttcaagtatttcagccagaatagtctgcccctgggaggcagcggcggcggcatgcccctgaaggccaggtaccaggagatggtgaccttcgaggacgtggccgtgcacttcaccaagaccgagtggaccggcctgagccccgcccagagggccctgtacaggagcgtgatgctggagaacttcggcaacctgaccgccctgggctaccccgtgcccaagcccgccctgatcagcctgctggagggcggcgacatggcctggggcctggaggcccaggacgacccccccgccgagggcggcccaagcagcggcgcccctcctcccagcggcggcaggcggcccaagcagcggcgcccctcctcccagcggcggcagcccagccggctccccaacctctaccgaggagggcacctctgagtccgccacccccgagagcggccctggcacctccaccgagcccagcgagggcagcgcacccggcagccctgccggcagccccacctccacagaggagggaaccagcaccgagcccagcgaaggcagcgccccaggcaccagcaccgagcctagtgagcaggagattaaacggatcaacaagatcagaagaagacttgtgaaagacagcaacaccaagaaggccggcaagacaggccccatgaaaaccctgctggttagagtgatgacacccgatctgagagagcggctggaaaacctgagaaagaagcctgaaaatatcccccagcccatcagcaatacatctagagccaacctgaataagctgctgaccgattacaccgaaatgaagaaggcgatcctgcatgtgtactgggaagagttccagaaggaccctgtgggcctgatgagccgggtggcccagcctgccagcaagaagatcgatcagaacaagctgaaacctgagatggacgagaagggcaacctgaccaccgccggctttgcctgctctcagtgtggccagcccctgttcgtgtacaagctggagcaggtgtctgagaagggcaaggcttacaccaactacttcggacggtgcaatgtggccgagcacgaaaagctgatcctgctggcccagctgaagcccgagaaggatagcgacgaagccgtgacatatagcctgggaaagtttgggcagagggccctggatttctacagcattcatgtgaccaaggagtccacccaccccgtgaagcccctggcccagatcgccggaaacagatacgcctccggacctgtgggaaaggccctgagcgacgcatgtatgggcacaatcgcctccttcctgtctaagtaccaggacatcatcatcgaacaccagaaggtggtgaagggcaaccagaagagactggagagcctgcgggagctggccggcaaggaaaacctggaataccctagcgtgaccctgccacctcagcctcacaccaaggagggcgttgatgcctacaacgaagtgatcgcccgggtgcgaatgtgggtgaacctgaacctgtggcagaagctgaagctaagcagagatgatgccaagcctctgctgagactgaagggattcccttcctttcctctggtcgagagacaggccaacgaagtggactggtgggacatggtgtgtaacgtgaagaagctgatcaacgagaaaaaggaggatggcaaggtgttttggcagaatctggctggctacaagagacaggaagccctgagaccatacctgagcagcgaggaagatcggaagaagggaaagaaattcgctcggtaccagctgggcgacctgctgctgcacctggaaaagaagcacggcgaggactggggaaaggtgtacgacgaggcctgggagcggattgacaagaaagtggaaggcctgagcaagcacatcaagctggaagaggaacggagaagcgaggacgcccagagcaaggccgccctgaccgactggctgcgggctaaggccagcttcgtgatcgagggcctgaaggaggccgacaaggacgagttctgcagatgcgagctgaagctgcagaagtggtacggggacctgcggggaaagcccttcgccatcgaagccgagaacagcatcctggacatcagcggcttcagcaagcagtacaactgtgccttcatctggcagaaggacggcgtgaagaagctgaacctgtacctgatcatcaactacttcaagggcggcaagctgcggttcaagaagatcaaacctgaagccttcgaagccaacagattctacaccgtgatcaacaaaaagagcggcgagatcgtgcccatggaggtgaacttcaacttcgacgaccccaacctgatcatcctgcctctggcctttggcaagagacagggcagagaattcatctggaacgacctgctgtccctggaaaccggcagcctgaagctggccaacggaagagtgatcgagaagacactgtacaacagaagaacccggcaggatgagcctgccctgttcgtggccctgaccttcgagcggcgggaggtcctggactcctccaatatcaaaccaatgaacctgatcggcgtggcaagaggcgaaaacatccccgccgtgatcgccctgaccgaccccgagggctgcccactgagccggtttaaggatagcctgggaaacccaacccacatcctgagaatcggcgagagctataaggagaagcagcggaccatccaggccaagaaggaggtggagcagcggagagccggcggctacagccggaagtacgccagcaaagccaagaatctggcagacgatatggtgagaaacaccgctagagatctgctgtactacgccgtgacccaggatgccatgctgatcttcgccaacctgagccggggcttcggccggcagggcaagcggaccttcatggccgagagacagtacacacggatggaggactggctgaccgccaagctggcctacgagggcctgagcaagacctacctgtccaagacactggcccagtacacctccaagacatgcagcaactgtgggtttaccatcaccagcgccgactacgacagggtgctggagaagctgaagaagacagcaacaggctggatgaccacaattaacggcaaggagctgaaggtggagggccagattacctactacaacagatacaagagacagaacgtagtcaaggacctgtccgtcgagctggatagactgagcgaagaatctgtgaacaacgacatctcctcctggacaaagggcagaagcggagaagctctgagcctcctgaagaaaagattctcccatagacccgtgcaggagaagttcgtgtgcctgaactgcggcttcgagacacacgcagccgagcaagccgccctgaacatcgccagatcctggctgttcctgcggagccaggagtacaagaaataccagacaaacaagacaaccggcaacaccgataagagagccttcgtcgagacctggcagtccttttaccggaagaagcttaaggaggtgtggaaacctgccgtgcggtctggcggatctggcggaggctccaccagccccaagaaaaagagaaaagtctaagctgccttctgcggggcttgccttctggccatgcccttcttctctcccttgcacctgtacctcttggtctttgaataaagcctgagtaggaaggctagcaaaaaaaaaaaaaaaaaaaaaaaaaaaaaaaaaaaaaaaaaaaaaaaaaaaaaaaaaaaaaaaaaaaaaaaaaaaaaaaagcccagccggctccccaacctctaccgaggagggcacctctgagtccgccacccccgagagcggccctggcacctccaccgagcccagcgagggcagcgcacccggcagccctgccggcagccccacctccacagaggagggaaccagcaccgagcccagcgaaggcagcgccccaggcaccagcaccgagcctagtgagcaggagattaaacggatcaacaagatcagaagaagacttgtgaaagacagcaacaccaagaaggccggcaagacaggccccatgaaaaccctgctggttagagtgatgacacccgatctgagagagcggctggaaaacctgagaaagaagcctgaaaatatcccccagcccatcagcaatacatctagagccaacctgaataagctgctgaccgattacaccgaaatgaagaaggcgatcctgcatgtgtactgggaagagttccagaaggaccctgtgggcctgatgagccgggtggcccagcctgccagcaagaagatcgatcagaacaagctgaaacctgagatggacgagaagggcaacctgaccaccgccggctttgcctgctctcagtgtggccagcccctgttcgtgtacaagctggagcaggtgtctgagaagggcaaggcttacaccaactacttcggacggtgcaatgtggccgagcacgaaaagctgatcctgctggcccagctgaagcccgagaaggatagcgacgaagccgtgacatatagcctgggaaagtttgggcagagggccctggatttctacagcattcatgtgaccaaggagtccacccaccccgtgaagcccctggcccagatcgccggaaacagatacgcctccggacctgtgggaaaggccctgagcgacgcatgtatgggcacaatcgcctccttcctgtctaagtaccaggacatcatcatcgaacaccagaaggtggtgaagggcaaccagaagagactggagagcctgcgggagctggccggcaaggaaaacctggaataccctagcgtgaccctgccacctcagcctcacaccaaggagggcgttgatgcctacaacgaagtgatcgcccgggtgcgaatgtgggtgaacctgaacctgtggcagaagctgaagctaagcagagatgatgccaagcctctgctgagactgaagggattcccttcctttcctctggtcgagagacaggccaacgaagtggactggtgggacatggtgtgtaacgtgaagaagctgatcaacgagaaaaaggaggatggcaaggtgttttggcagaatctggctggctacaagagacaggaagccctgagaccatacctgagcagcgaggaagatcggaagaagggaaagaaattcgctcggtaccagctgggcgacctgctgctgcacctggaaaagaagcacggcgaggactggggaaaggtgtacgacgaggcctgggagcggattgacaagaaagtggaaggcctgagcaagcacatcaagctggaagaggaacggagaagcgaggacgcccagagcaaggccgccctgaccgactggctgcgggctaaggccagcttcgtgatcgagggcctgaaggaggccgacaaggacgagttctgcagatgcgagctgaagctgcagaagtggtacggggacctgcggggaaagcccttcgccatcgaagccgagaacagcatcctggacatcagcggcttcagcaagcagtacaactgtgccttcatctggcagaaggacggcgtgaagaagctgaacctgtacctgatcatcaactacttcaagggcggcaagctgcggttcaagaagatcaaacctgaagccttcgaagccaacagattctacaccgtgatcaacaaaaagagcggcgagatcgtgcccatggaggtgaacttcaacttcgacgaccccaacctgatcatcctgcctctggcctttggcaagagacagggcagagaattcatctggaacgacctgctgtccctggaaaccggcagcctgaagctggccaacggaagagtgatcgagaagacactgtacaacagaagaacccggcaggatgagcctgccctgttcgtggccctgaccttcgagcggcgggaggtcctggactcctccaatatcaaaccaatgaacctgatcggcgtggcaagaggcgaaaacatccccgccgtgatcgccctgaccgaccccgagggctgcccactgagccggtttaaggatagcctgggaaacccaacccacatcctgagaatcggcgagagctataaggagaagcagcggaccatccaggccaagaaggaggtggagcagcggagagccggcggctacagccggaagtacgccagcaaagccaagaatctggcagacgatatggtgagaaacaccgctagagatctgctgtactacgccgtgacccaggatgccatgctgatcttcgccaacctgagccggggcttcggccggcagggcaagcggaccttcatggccgagagacagtacacacggatggaggactggctgaccgccaagctggcctacgagggcctgagcaagacctacctgtccaagacactggcccagtacacctccaagacatgcagcaactgtgggtttaccatcaccagcgccgactacgacagggtgctggagaagctgaagaagacagcaacaggctggatgaccacaattaacggcaaggagctgaaggtggagggccagattacctactacaacagatacaagagacagaacgtagtcaaggacctgtccgtcgagctggatagactgagcgaagaatctgtgaacaacgacatctcctcctggacaaagggcagaagcggagaagctctgagcctcctgaagaaaagattctcccatagacccgtgcaggagaagttcgtgtgcctgaactgcggcttcgagacacacgcagccgagcaagccgccctgaacatcgccagatcctggctgttcctgcggagccaggagtacaagaaataccagacaaacaagacaaccggcaacaccgataagagagccttcgtcgagacctggcagtccttttaccggaagaagcttaaggaggtgtggaaacctgccgtgcggtctggcggatctggcggaggctccaccagccccaagaaaaagagaaaagtctaagctgccttctgcggggcttgccttctggccatgcccttcttctctcccttgcacctgtacctcttggtctttgaataaagcctgagtaggaaggctagcaaaaaaaaaaaaaaaaaaaaaaaaaaaaaaaaaaaaaaaaaaaaaaaaaaaaaaaaaaaaaaaaaaaaaaaaaaaaaaaa

SEQ ID NO: 9314 - RNA, 8787 nt, synthetic construct
  source 1..8787: mol_type = other RNA
aggaaataagagagaaaagaagagtaagaagaaatataagagccaccatggcccctaagaagaagcgtaaagtgagccggatgaaccacgaccaggagttcgacccccctaaggtgtaccctcccgtccccgccgagaagagaaagcccatccgggtcctgagcctgttcgatggcatcgccaccggtctgctggtgctgaaggacctgggcatccaggtggataggtacattgcctccgaggtgtgcgaggactccatcaccgtgggaatggtgcgtcatcagggcaagatcatgtacgtgggcgacgtgcggagcgtgacacagaagcatatccaggagtggggccctttcgacctggtgatcggcggcagcccttgcaatgacctgagcatcgtgaacccagcccggaagggcctgtacgagggaaccggcagactgttcttcgagttttacagactgctgcacgacgcccggcctaaggaaggcgacgaccggcccttcttttggctgttcgagaatgtggtggccatgggagtcagcgacaagcgggatattagccggttcctggagagcaaccccgtgatgatcgatgccaaggaagtgagcgccgcccaccgggccagatacttctggggcaatctgcctggcatgaacagacccctggccagcaccgtgaacgacaagctggagctgcaggagtgcctggagcacggccggatcgccaagttcagcaaggtgagaaccatcaccacccgaagcaacagcatcaaacaaggcaaggaccagcactttcctgtgttcatgaacgagaaggaggacatcctgtggtgtaccgagatggagagagtgttcgggttcccagtccactacacagatgtcagcaacatgtctagactggccagacagagactgctgggaagaagctggtccgtccctgtgatcagacacctgttcgcccctctgaaggagtacttcgcctgcgtgagcagcggcaacagcaacgccaacagccggggccccagcttctctagcggcctggtgccactgtccctgagagggagccacatgggccccatggagatctacaaaaccgtgagcgcctggaagcggcagcctgtgcgcgtgctgagcctgtttcggaatatcgataaagtcctgaaaagcctgggattcctggagagcggctctggctccggcggtggcaccctgaagtacgtggaggatgtgacaaacgtggtcagacgggatgtggagaagtggggccccttcgatctggtgtacggcagcacccaacccctgggcagctcttgtgaccggtgccctggctggtacatgtttcagttccaccggatcctgcagtacgccctgccgagacaggagtcccagcggccattcttttggattttcatggacaacttgctgctgaccgaggatgaccaggaaactaccactcggttcctgcagaccgaagccgtgaccctgcaggacgtgagaggccgggactaccagaacgccatgcgggtgtggtccaacatccctggactgaaaagcaagcacgcacctctgacccctaaagaagaggagtacctgcaggcccaggtgcggagcagaagcaagctggacgcccctaaggtggatctgctggtgaagaattgcctcctgcccctgagagagtacttcaagtatttcagccagaatagtctgcccctgggaggcagcggcggcggcttccaggagagcgtgatgttcgaggacgtggccgtgtacttcacccagaaggagtgggccgacctggcccccgcccagagggccctgtacagggacgtgatgctggagaactacggcaacatggtgagcctggccttccccttccccaagcccgccgtgatcagcaagctggagaggggcgaggagccctggggcctggacccccaggtggtgcccaacgaggagggcctgaagggcttccccggcggcccaagcagcggcgcccctcctcccagcggcggcaggcggcccaagcagcggcgcccctcctcccagcggcggcagcccagccggctccccaacctctaccgaggagggcacctctgagtccgccacccccgagagcggccctggcacctccaccgagcccagcgagggcagcgcacccggcagccctgccggcagccccacctccacagaggagggaaccagcaccgagcccagcgaaggcagcgccccaggcaccagcaccgagcctagtgagcaggagattaaacggatcaacaagatcagaagaagacttgtgaaagacagcaacaccaagaaggccggcaagacaggccccatgaaaaccctgctggttagagtgatgacacccgatctgagagagcggctggaaaacctgagaaagaagcctgaaaatatcccccagcccatcagcaatacatctagagccaacctgaataagctgctgaccgattacaccgaaatgaagaaggcgatcctgcatgtgtactgggaagagttccagaaggaccctgtgggcctgatgagccgggtggcccagcctgccagcaagaagatcgatcagaacaagctgaaacctgagatggacgagaagggcaacctgaccaccgccggctttgcctgctctcagtgtggccagcccctgttcgtgtacaagctggagcaggtgtctgagaagggcaaggcttacaccaactacttcggacggtgcaatgtggccgagcacgaaaagctgatcctgctggcccagctgaagcccgagaaggatagcgacgaagccgtgacatatagcctgggaaagtttgggcagagggccctggatttctacagcattcatgtgaccaaggagtccacccaccccgtgaagcccctggcccagatcgccggaaacagatacgcctccggacctgtgggaaaggccctgagcgacgcatgtatgggcacaatcgcctccttcctgtctaagtaccaggacatcatcatcgaacaccagaaggtggtgaagggcaaccagaagagactggagagcctgcgggagctggccggcaaggaaaacctggaataccctagcgtgaccctgccacctcagcctcacaccaaggagggcgttgatgcctacaacgaagtgatcgcccgggtgcgaatgtgggtgaacctgaacctgtggcagaagctgaagctaagcagagatgatgccaagcctctgctgagactgaagggattcccttcctttcctctggtcgagagacaggccaacgaagtggactggtgggacatggtgtgtaacgtgaagaagctgatcaacgagaaaaaggaggatggcaaggtgttttggcagaatctggctggctacaagagacaggaagccctgagaccatacctgagcagcgaggaagatcggaagaagggaaagaaattcgctcggtaccagctgggcgacctgctgctgcacctggaaaagaagcacggcgaggactggggaaaggtgtacgacgaggcctgggagcggattgacaagaaagtggaaggcctgagcaagcacatcaagctggaagaggaacggagaagcgaggacgcccagagcaaggccgccctgaccgactggctgcgggctaaggccagcttcgtgatcgagggcctgaaggaggccgacaaggacgagttctgcagatgcgagctgaagctgcagaagtggtacggggacctgcggggaaagcccttcgccatcgaagccgagaacagcatcctggacatcagcggcttcagcaagcagtacaactgtgccttcatctggcagaaggacggcgtgaagaagctgaacctgtacctgatcatcaactacttcaagggcggcaagctgcggttcaagaagatcaaacctgaagccttcgaagccaacagattctacaccgtgatcaacaaaaagagcggcgagatcgtgcccatggaggtgaacttcaacttcgacgaccccaacctgatcatcctgcctctggcctttggcaagagacagggcagagaattcatctggaacgacctgctgtccctggaaaccggcagcctgaagctggccaacggaagagtgatcgagaagacactgtacaacagaagaacccggcaggatgagcctgccctgttcgtggccctgaccttcgagcggcgggaggtcctggactcctccaatatcaaaccaatgaacctgatcggcgtggcaagaggcgaaaacatccccgccgtgatcgccctgaccgaccccgagggctgcccactgagccggtttaaggatagcctgggaaacccaacccacatcctgagaatcggcgagagctataaggagaagcagcggaccatccaggccaagaaggaggtggagcagcggagagccggcggctacagccggaagtacgccagcaaagccaagaatctggcagacgatatggtgagaaacaccgctagagatctgctgtactacgccgtgacccaggatgccatgctgatcttcgccaacctgagccggggcttcggccggcagggcaagcggaccttcatggccgagagacagtacacacggatggaggactggctgaccgccaagctggcctacgagggcctgagcaagacctacctgtccaagacactggcccagtacacctccaagacatgcagcaactgtgggtttaccatcaccagcgccgactacgacagggtgctggagaagctgaagaagacagcaacaggctggatgaccacaattaacggcaaggagctgaaggtggagggccagattacctactacaacagatacaagagacagaacgtagtcaaggacctgtccgtcgagctggatagactgagcgaagaatctgtgaacaacgacatctcctcctggacaaagggcagaagcggagaagctctgagcctcctgaagaaaagattctcccatagacccgtgcaggagaagttcgtgtgcctgaactgcggcttcgagacacacgcagccgagcaagccgccctgaacatcgccagatcctggctgttcctgcggagccaggagtacaagaaataccagacaaacaagacaaccggcaacaccgataagagagccttcgtcgagacctggcagtccttttaccggaagaagcttaaggaggtgtggaaacctgccgtgcggtctggcggatctggcggaggctccaccagccccaagaaaaagagaaaagtctaagctgccttctgcggggcttgccttctggccatgcccttcttctctcccttgcacctgtacctcttggtctttgaataaagcctgagtaggaaggctagcaaaaaaaaaaaaaaaaaaaaaaaaaaaaaaaaaaaaaaaaaaaaaaaaaaaaaaaaaaaaaaaaaaaaaaaaaaaaaaaagcccagccggctccccaacctctaccgaggagggcacctctgagtccgccacccccgagagcggccctggcacctccaccgagcccagcgagggcagcgcacccggcagccctgccggcagccccacctccacagaggagggaaccagcaccgagcccagcgaaggcagcgccccaggcaccagcaccgagcctagtgagcaggagattaaacggatcaacaagatcagaagaagacttgtgaaagacagcaacaccaagaaggccggcaagacaggccccatgaaaaccctgctggttagagtgatgacacccgatctgagagagcggctggaaaacctgagaaagaagcctgaaaatatcccccagcccatcagcaatacatctagagccaacctgaataagctgctgaccgattacaccgaaatgaagaaggcgatcctgcatgtgtactgggaagagttccagaaggaccctgtgggcctgatgagccgggtggcccagcctgccagcaagaagatcgatcagaacaagctgaaacctgagatggacgagaagggcaacctgaccaccgccggctttgcctgctctcagtgtggccagcccctgttcgtgtacaagctggagcaggtgtctgagaagggcaaggcttacaccaactacttcggacggtgcaatgtggccgagcacgaaaagctgatcctgctggcccagctgaagcccgagaaggatagcgacgaagccgtgacatatagcctgggaaagtttgggcagagggccctggatttctacagcattcatgtgaccaaggagtccacccaccccgtgaagcccctggcccagatcgccggaaacagatacgcctccggacctgtgggaaaggccctgagcgacgcatgtatgggcacaatcgcctccttcctgtctaagtaccaggacatcatcatcgaacaccagaaggtggtgaagggcaaccagaagagactggagagcctgcgggagctggccggcaaggaaaacctggaataccctagcgtgaccctgccacctcagcctcacaccaaggagggcgttgatgcctacaacgaagtgatcgcccgggtgcgaatgtgggtgaacctgaacctgtggcagaagctgaagctaagcagagatgatgccaagcctctgctgagactgaagggattcccttcctttcctctggtcgagagacaggccaacgaagtggactggtgggacatggtgtgtaacgtgaagaagctgatcaacgagaaaaaggaggatggcaaggtgttttggcagaatctggctggctacaagagacaggaagccctgagaccatacctgagcagcgaggaagatcggaagaagggaaagaaattcgctcggtaccagctgggcgacctgctgctgcacctggaaaagaagcacggcgaggactggggaaaggtgtacgacgaggcctgggagcggattgacaagaaagtggaaggcctgagcaagcacatcaagctggaagaggaacggagaagcgaggacgcccagagcaaggccgccctgaccgactggctgcgggctaaggccagcttcgtgatcgagggcctgaaggaggccgacaaggacgagttctgcagatgcgagctgaagctgcagaagtggtacggggacctgcggggaaagcccttcgccatcgaagccgagaacagcatcctggacatcagcggcttcagcaagcagtacaactgtgccttcatctggcagaaggacggcgtgaagaagctgaacctgtacctgatcatcaactacttcaagggcggcaagctgcggttcaagaagatcaaacctgaagccttcgaagccaacagattctacaccgtgatcaacaaaaagagcggcgagatcgtgcccatggaggtgaacttcaacttcgacgaccccaacctgatcatcctgcctctggcctttggcaagagacagggcagagaattcatctggaacgacctgctgtccctggaaaccggcagcctgaagctggccaacggaagagtgatcgagaagacactgtacaacagaagaacccggcaggatgagcctgccctgttcgtggccctgaccttcgagcggcgggaggtcctggactcctccaatatcaaaccaatgaacctgatcggcgtggcaagaggcgaaaacatccccgccgtgatcgccctgaccgaccccgagggctgcccactgagccggtttaaggatagcctgggaaacccaacccacatcctgagaatcggcgagagctataaggagaagcagcggaccatccaggccaagaaggaggtggagcagcggagagccggcggctacagccggaagtacgccagcaaagccaagaatctggcagacgatatggtgagaaacaccgctagagatctgctgtactacgccgtgacccaggatgccatgctgatcttcgccaacctgagccggggcttcggccggcagggcaagcggaccttcatggccgagagacagtacacacggatggaggactggctgaccgccaagctggcctacgagggcctgagcaagacctacctgtccaagacactggcccagtacacctccaagacatgcagcaactgtgggtttaccatcaccagcgccgactacgacagggtgctggagaagctgaagaagacagcaacaggctggatgaccacaattaacggcaaggagctgaaggtggagggccagattacctactacaacagatacaagagacagaacgtagtcaaggacctgtccgtcgagctggatagactgagcgaagaatctgtgaacaacgacatctcctcctggacaaagggcagaagcggagaagctctgagcctcctgaagaaaagattctcccatagacccgtgcaggagaagttcgtgtgcctgaactgcggcttcgagacacacgcagccgagcaagccgccctgaacatcgccagatcctggctgttcctgcggagccaggagtacaagaaataccagacaaacaagacaaccggcaacaccgataagagagccttcgtcgagacctggcagtccttttaccggaagaagcttaaggaggtgtggaaacctgccgtgcggtctggcggatctggcggaggctccaccagccccaagaaaaagagaaaagtctaagctgccttctgcggggcttgccttctggccatgcccttcttctctcccttgcacctgtacctcttggtctttgaataaagcctgagtaggaaggctagcaaaaaaaaaaaaaaaaaaaaaaaaaaaaaaaaaaaaaaaaaaaaaaaaaaaaaaaaaaaaaaaaaaaaaaaaaaaaaaaa

SEQ ID NO: 9315 - RNA, 8787 nt, synthetic construct
  source 1..8787: mol_type = other RNA
aggaaataagagagaaaagaagagtaagaagaaatataagagccaccatggcccctaagaagaagcgtaaagtgagccggatgaaccacgaccaggagttcgacccccctaaggtgtaccctcccgtccccgccgagaagagaaagcccatccgggtcctgagcctgttcgatggcatcgccaccggtctgctggtgctgaaggacctgggcatccaggtggataggtacattgcctccgaggtgtgcgaggactccatcaccgtgggaatggtgcgtcatcagggcaagatcatgtacgtgggcgacgtgcggagcgtgacacagaagcatatccaggagtggggccctttcgacctggtgatcggcggcagcccttgcaatgacctgagcatcgtgaacccagcccggaagggcctgtacgagggaaccggcagactgttcttcgagttttacagactgctgcacgacgcccggcctaaggaaggcgacgaccggcccttcttttggctgttcgagaatgtggtggccatgggagtcagcgacaagcgggatattagccggttcctggagagcaaccccgtgatgatcgatgccaaggaagtgagcgccgcccaccgggccagatacttctggggcaatctgcctggcatgaacagacccctggccagcaccgtgaacgacaagctggagctgcaggagtgcctggagcacggccggatcgccaagttcagcaaggtgagaaccatcaccacccgaagcaacagcatcaaacaaggcaaggaccagcactttcctgtgttcatgaacgagaaggaggacatcctgtggtgtaccgagatggagagagtgttcgggttcccagtccactacacagatgtcagcaacatgtctagactggccagacagagactgctgggaagaagctggtccgtccctgtgatcagacacctgttcgcccctctgaaggagtacttcgcctgcgtgagcagcggcaacagcaacgccaacagccggggccccagcttctctagcggcctggtgccactgtccctgagagggagccacatgggccccatggagatctacaaaaccgtgagcgcctggaagcggcagcctgtgcgcgtgctgagcctgtttcggaatatcgataaagtcctgaaaagcctgggattcctggagagcggctctggctccggcggtggcaccctgaagtacgtggaggatgtgacaaacgtggtcagacgggatgtggagaagtggggccccttcgatctggtgtacggcagcacccaacccctgggcagctcttgtgaccggtgccctggctggtacatgtttcagttccaccggatcctgcagtacgccctgccgagacaggagtcccagcggccattcttttggattttcatggacaacttgctgctgaccgaggatgaccaggaaactaccactcggttcctgcagaccgaagccgtgaccctgcaggacgtgagaggccgggactaccagaacgccatgcgggtgtggtccaacatccctggactgaaaagcaagcacgcacctctgacccctaaagaagaggagtacctgcaggcccaggtgcggagcagaagcaagctggacgcccctaaggtggatctgctggtgaagaattgcctcctgcccctgagagagtacttcaagtatttcagccagaatagtctgcccctgggaggcagcggcggcggcatggtgttcgaggacgtggccgtgtacttcagcagggaggagtggggcctgctggacagcgcccagagggccctgtacaggcaggtgatgctggagaacttcgccctggtggccagcctgggcctgagcgccagcaggcccaggatcgtgctgcagctggagaggggcgaggagccctgggtgctgagcggcctggacgtggccctggccagggacgcccagaggaggcccggccccggcgagggcggcccaagcagcggcgcccctcctcccagcggcggcaggcggcccaagcagcggcgcccctcctcccagcggcggcagcccagccggctccccaacctctaccgaggagggcacctctgagtccgccacccccgagagcggccctggcacctccaccgagcccagcgagggcagcgcacccggcagccctgccggcagccccacctccacagaggagggaaccagcaccgagcccagcgaaggcagcgccccaggcaccagcaccgagcctagtgagcaggagattaaacggatcaacaagatcagaagaagacttgtgaaagacagcaacaccaagaaggccggcaagacaggccccatgaaaaccctgctggttagagtgatgacacccgatctgagagagcggctggaaaacctgagaaagaagcctgaaaatatcccccagcccatcagcaatacatctagagccaacctgaataagctgctgaccgattacaccgaaatgaagaaggcgatcctgcatgtgtactgggaagagttccagaaggaccctgtgggcctgatgagccgggtggcccagcctgccagcaagaagatcgatcagaacaagctgaaacctgagatggacgagaagggcaacctgaccaccgccggctttgcctgctctcagtgtggccagcccctgttcgtgtacaagctggagcaggtgtctgagaagggcaaggcttacaccaactacttcggacggtgcaatgtggccgagcacgaaaagctgatcctgctggcccagctgaagcccgagaaggatagcgacgaagccgtgacatatagcctgggaaagtttgggcagagggccctggatttctacagcattcatgtgaccaaggagtccacccaccccgtgaagcccctggcccagatcgccggaaacagatacgcctccggacctgtgggaaaggccctgagcgacgcatgtatgggcacaatcgcctccttcctgtctaagtaccaggacatcatcatcgaacaccagaaggtggtgaagggcaaccagaagagactggagagcctgcgggagctggccggcaaggaaaacctggaataccctagcgtgaccctgccacctcagcctcacaccaaggagggcgttgatgcctacaacgaagtgatcgcccgggtgcgaatgtgggtgaacctgaacctgtggcagaagctgaagctaagcagagatgatgccaagcctctgctgagactgaagggattcccttcctttcctctggtcgagagacaggccaacgaagtggactggtgggacatggtgtgtaacgtgaagaagctgatcaacgagaaaaaggaggatggcaaggtgttttggcagaatctggctggctacaagagacaggaagccctgagaccatacctgagcagcgaggaagatcggaagaagggaaagaaattcgctcggtaccagctgggcgacctgctgctgcacctggaaaagaagcacggcgaggactggggaaaggtgtacgacgaggcctgggagcggattgacaagaaagtggaaggcctgagcaagcacatcaagctggaagaggaacggagaagcgaggacgcccagagcaaggccgccctgaccgactggctgcgggctaaggccagcttcgtgatcgagggcctgaaggaggccgacaaggacgagttctgcagatgcgagctgaagctgcagaagtggtacggggacctgcggggaaagcccttcgccatcgaagccgagaacagcatcctggacatcagcggcttcagcaagcagtacaactgtgccttcatctggcagaaggacggcgtgaagaagctgaacctgtacctgatcatcaactacttcaagggcggcaagctgcggttcaagaagatcaaacctgaagccttcgaagccaacagattctacaccgtgatcaacaaaaagagcggcgagatcgtgcccatggaggtgaacttcaacttcgacgaccccaacctgatcatcctgcctctggcctttggcaagagacagggcagagaattcatctggaacgacctgctgtccctggaaaccggcagcctgaagctggccaacggaagagtgatcgagaagacactgtacaacagaagaacccggcaggatgagcctgccctgttcgtggccctgaccttcgagcggcgggaggtcctggactcctccaatatcaaaccaatgaacctgatcggcgtggcaagaggcgaaaacatccccgccgtgatcgccctgaccgaccccgagggctgcccactgagccggtttaaggatagcctgggaaacccaacccacatcctgagaatcggcgagagctataaggagaagcagcggaccatccaggccaagaaggaggtggagcagcggagagccggcggctacagccggaagtacgccagcaaagccaagaatctggcagacgatatggtgagaaacaccgctagagatctgctgtactacgccgtgacccaggatgccatgctgatcttcgccaacctgagccggggcttcggccggcagggcaagcggaccttcatggccgagagacagtacacacggatggaggactggctgaccgccaagctggcctacgagggcctgagcaagacctacctgtccaagacactggcccagtacacctccaagacatgcagcaactgtgggtttaccatcaccagcgccgactacgacagggtgctggagaagctgaagaagacagcaacaggctggatgaccacaattaacggcaaggagctgaaggtggagggccagattacctactacaacagatacaagagacagaacgtagtcaaggacctgtccgtcgagctggatagactgagcgaagaatctgtgaacaacgacatctcctcctggacaaagggcagaagcggagaagctctgagcctcctgaagaaaagattctcccatagacccgtgcaggagaagttcgtgtgcctgaactgcggcttcgagacacacgcagccgagcaagccgccctgaacatcgccagatcctggctgttcctgcggagccaggagtacaagaaataccagacaaacaagacaaccggcaacaccgataagagagccttcgtcgagacctggcagtccttttaccggaagaagcttaaggaggtgtggaaacctgccgtgcggtctggcggatctggcggaggctccaccagccccaagaaaaagagaaaagtctaagctgccttctgcggggcttgccttctggccatgcccttcttctctcccttgcacctgtacctcttggtctttgaataaagcctgagtaggaaggctagcaaaaaaaaaaaaaaaaaaaaaaaaaaaaaaaaaaaaaaaaaaaaaaaaaaaaaaaaaaaaaaaaaaaaaaaaaaaaaaaagcccagccggctccccaacctctaccgaggagggcacctctgagtccgccacccccgagagcggccctggcacctccaccgagcccagcgagggcagcgcacccggcagccctgccggcagccccacctccacagaggagggaaccagcaccgagcccagcgaaggcagcgccccaggcaccagcaccgagcctagtgagcaggagattaaacggatcaacaagatcagaagaagacttgtgaaagacagcaacaccaagaaggccggcaagacaggccccatgaaaaccctgctggttagagtgatgacacccgatctgagagagcggctggaaaacctgagaaagaagcctgaaaatatcccccagcccatcagcaatacatctagagccaacctgaataagctgctgaccgattacaccgaaatgaagaaggcgatcctgcatgtgtactgggaagagttccagaaggaccctgtgggcctgatgagccgggtggcccagcctgccagcaagaagatcgatcagaacaagctgaaacctgagatggacgagaagggcaacctgaccaccgccggctttgcctgctctcagtgtggccagcccctgttcgtgtacaagctggagcaggtgtctgagaagggcaaggcttacaccaactacttcggacggtgcaatgtggccgagcacgaaaagctgatcctgctggcccagctgaagcccgagaaggatagcgacgaagccgtgacatatagcctgggaaagtttgggcagagggccctggatttctacagcattcatgtgaccaaggagtccacccaccccgtgaagcccctggcccagatcgccggaaacagatacgcctccggacctgtgggaaaggccctgagcgacgcatgtatgggcacaatcgcctccttcctgtctaagtaccaggacatcatcatcgaacaccagaaggtggtgaagggcaaccagaagagactggagagcctgcgggagctggccggcaaggaaaacctggaataccctagcgtgaccctgccacctcagcctcacaccaaggagggcgttgatgcctacaacgaagtgatcgcccgggtgcgaatgtgggtgaacctgaacctgtggcagaagctgaagctaagcagagatgatgccaagcctctgctgagactgaagggattcccttcctttcctctggtcgagagacaggccaacgaagtggactggtgggacatggtgtgtaacgtgaagaagctgatcaacgagaaaaaggaggatggcaaggtgttttggcagaatctggctggctacaagagacaggaagccctgagaccatacctgagcagcgaggaagatcggaagaagggaaagaaattcgctcggtaccagctgggcgacctgctgctgcacctggaaaagaagcacggcgaggactggggaaaggtgtacgacgaggcctgggagcggattgacaagaaagtggaaggcctgagcaagcacatcaagctggaagaggaacggagaagcgaggacgcccagagcaaggccgccctgaccgactggctgcgggctaaggccagcttcgtgatcgagggcctgaaggaggccgacaaggacgagttctgcagatgcgagctgaagctgcagaagtggtacggggacctgcggggaaagcccttcgccatcgaagccgagaacagcatcctggacatcagcggcttcagcaagcagtacaactgtgccttcatctggcagaaggacggcgtgaagaagctgaacctgtacctgatcatcaactacttcaagggcggcaagctgcggttcaagaagatcaaacctgaagccttcgaagccaacagattctacaccgtgatcaacaaaaagagcggcgagatcgtgcccatggaggtgaacttcaacttcgacgaccccaacctgatcatcctgcctctggcctttggcaagagacagggcagagaattcatctggaacgacctgctgtccctggaaaccggcagcctgaagctggccaacggaagagtgatcgagaagacactgtacaacagaagaacccggcaggatgagcctgccctgttcgtggccctgaccttcgagcggcgggaggtcctggactcctccaatatcaaaccaatgaacctgatcggcgtggcaagaggcgaaaacatccccgccgtgatcgccctgaccgaccccgagggctgcccactgagccggtttaaggatagcctgggaaacccaacccacatcctgagaatcggcgagagctataaggagaagcagcggaccatccaggccaagaaggaggtggagcagcggagagccggcggctacagccggaagtacgccagcaaagccaagaatctggcagacgatatggtgagaaacaccgctagagatctgctgtactacgccgtgacccaggatgccatgctgatcttcgccaacctgagccggggcttcggccggcagggcaagcggaccttcatggccgagagacagtacacacggatggaggactggctgaccgccaagctggcctacgagggcctgagcaagacctacctgtccaagacactggcccagtacacctccaagacatgcagcaactgtgggtttaccatcaccagcgccgactacgacagggtgctggagaagctgaagaagacagcaacaggctggatgaccacaattaacggcaaggagctgaaggtggagggccagattacctactacaacagatacaagagacagaacgtagtcaaggacctgtccgtcgagctggatagactgagcgaagaatctgtgaacaacgacatctcctcctggacaaagggcagaagcggagaagctctgagcctcctgaagaaaagattctcccatagacccgtgcaggagaagttcgtgtgcctgaactgcggcttcgagacacacgcagccgagcaagccgccctgaacatcgccagatcctggctgttcctgcggagccaggagtacaagaaataccagacaaacaagacaaccggcaacaccgataagagagccttcgtcgagacctggcagtccttttaccggaagaagcttaaggaggtgtggaaacctgccgtgcggtctggcggatctggcggaggctccaccagccccaagaaaaagagaaaagtctaagctgccttctgcggggcttgccttctggccatgcccttcttctctcccttgcacctgtacctcttggtctttgaataaagcctgagtaggaaggctagcaaaaaaaaaaaaaaaaaaaaaaaaaaaaaaaaaaaaaaaaaaaaaaaaaaaaaaaaaaaaaaaaaaaaaaaaaaaaaaaa

SEQ ID NO: 9316 - RNA, 8787 nt, synthetic construct
  source 1..8787: mol_type = other RNA
aggaaataagagagaaaagaagagtaagaagaaatataagagccaccatggcccctaagaagaagcgtaaagtgagccggatgaaccacgaccaggagttcgacccccctaaggtgtaccctcccgtccccgccgagaagagaaagcccatccgggtcctgagcctgttcgatggcatcgccaccggtctgctggtgctgaaggacctgggcatccaggtggataggtacattgcctccgaggtgtgcgaggactccatcaccgtgggaatggtgcgtcatcagggcaagatcatgtacgtgggcgacgtgcggagcgtgacacagaagcatatccaggagtggggccctttcgacctggtgatcggcggcagcccttgcaatgacctgagcatcgtgaacccagcccggaagggcctgtacgagggaaccggcagactgttcttcgagttttacagactgctgcacgacgcccggcctaaggaaggcgacgaccggcccttcttttggctgttcgagaatgtggtggccatgggagtcagcgacaagcgggatattagccggttcctggagagcaaccccgtgatgatcgatgccaaggaagtgagcgccgcccaccgggccagatacttctggggcaatctgcctggcatgaacagacccctggccagcaccgtgaacgacaagctggagctgcaggagtgcctggagcacggccggatcgccaagttcagcaaggtgagaaccatcaccacccgaagcaacagcatcaaacaaggcaaggaccagcactttcctgtgttcatgaacgagaaggaggacatcctgtggtgtaccgagatggagagagtgttcgggttcccagtccactacacagatgtcagcaacatgtctagactggccagacagagactgctgggaagaagctggtccgtccctgtgatcagacacctgttcgcccctctgaaggagtacttcgcctgcgtgagcagcggcaacagcaacgccaacagccggggccccagcttctctagcggcctggtgccactgtccctgagagggagccacatgggccccatggagatctacaaaaccgtgagcgcctggaagcggcagcctgtgcgcgtgctgagcctgtttcggaatatcgataaagtcctgaaaagcctgggattcctggagagcggctctggctccggcggtggcaccctgaagtacgtggaggatgtgacaaacgtggtcagacgggatgtggagaagtggggccccttcgatctggtgtacggcagcacccaacccctgggcagctcttgtgaccggtgccctggctggtacatgtttcagttccaccggatcctgcagtacgccctgccgagacaggagtcccagcggccattcttttggattttcatggacaacttgctgctgaccgaggatgaccaggaaactaccactcggttcctgcagaccgaagccgtgaccctgcaggacgtgagaggccgggactaccagaacgccatgcgggtgtggtccaacatccctggactgaaaagcaagcacgcacctctgacccctaaagaagaggagtacctgcaggcccaggtgcggagcagaagcaagctggacgcccctaaggtggatctgctggtgaagaattgcctcctgcccctgagagagtacttcaagtatttcagccagaatagtctgcccctgggaggcagcggcggcggcagcgtggccttcagggacgtgatcgtggacttcacccaggaggagtggcagcagctgaagcccgcccagaaggacctgtacagggacgtgatgatggagaactactggaacctggtgagcctggacctggagaccaggcccgacaagaaggagagcgacccccaggaggacgactgggaggacaggcccagcatcgccgtggtggccgagggccccatgaggaccggcgaccagggctgcatcggcggcccaagcagcggcgcccctcctcccagcggcggcaggcggcccaagcagcggcgcccctcctcccagcggcggcagcccagccggctccccaacctctaccgaggagggcacctctgagtccgccacccccgagagcggccctggcacctccaccgagcccagcgagggcagcgcacccggcagccctgccggcagccccacctccacagaggagggaaccagcaccgagcccagcgaaggcagcgccccaggcaccagcaccgagcctagtgagcaggagattaaacggatcaacaagatcagaagaagacttgtgaaagacagcaacaccaagaaggccggcaagacaggccccatgaaaaccctgctggttagagtgatgacacccgatctgagagagcggctggaaaacctgagaaagaagcctgaaaatatcccccagcccatcagcaatacatctagagccaacctgaataagctgctgaccgattacaccgaaatgaagaaggcgatcctgcatgtgtactgggaagagttccagaaggaccctgtgggcctgatgagccgggtggcccagcctgccagcaagaagatcgatcagaacaagctgaaacctgagatggacgagaagggcaacctgaccaccgccggctttgcctgctctcagtgtggccagcccctgttcgtgtacaagctggagcaggtgtctgagaagggcaaggcttacaccaactacttcggacggtgcaatgtggccgagcacgaaaagctgatcctgctggcccagctgaagcccgagaaggatagcgacgaagccgtgacatatagcctgggaaagtttgggcagagggccctggatttctacagcattcatgtgaccaaggagtccacccaccccgtgaagcccctggcccagatcgccggaaacagatacgcctccggacctgtgggaaaggccctgagcgacgcatgtatgggcacaatcgcctccttcctgtctaagtaccaggacatcatcatcgaacaccagaaggtggtgaagggcaaccagaagagactggagagcctgcgggagctggccggcaaggaaaacctggaataccctagcgtgaccctgccacctcagcctcacaccaaggagggcgttgatgcctacaacgaagtgatcgcccgggtgcgaatgtgggtgaacctgaacctgtggcagaagctgaagctaagcagagatgatgccaagcctctgctgagactgaagggattcccttcctttcctctggtcgagagacaggccaacgaagtggactggtgggacatggtgtgtaacgtgaagaagctgatcaacgagaaaaaggaggatggcaaggtgttttggcagaatctggctggctacaagagacaggaagccctgagaccatacctgagcagcgaggaagatcggaagaagggaaagaaattcgctcggtaccagctgggcgacctgctgctgcacctggaaaagaagcacggcgaggactggggaaaggtgtacgacgaggcctgggagcggattgacaagaaagtggaaggcctgagcaagcacatcaagctggaagaggaacggagaagcgaggacgcccagagcaaggccgccctgaccgactggctgcgggctaaggccagcttcgtgatcgagggcctgaaggaggccgacaaggacgagttctgcagatgcgagctgaagctgcagaagtggtacggggacctgcggggaaagcccttcgccatcgaagccgagaacagcatcctggacatcagcggcttcagcaagcagtacaactgtgccttcatctggcagaaggacggcgtgaagaagctgaacctgtacctgatcatcaactacttcaagggcggcaagctgcggttcaagaagatcaaacctgaagccttcgaagccaacagattctacaccgtgatcaacaaaaagagcggcgagatcgtgcccatggaggtgaacttcaacttcgacgaccccaacctgatcatcctgcctctggcctttggcaagagacagggcagagaattcatctggaacgacctgctgtccctggaaaccggcagcctgaagctggccaacggaagagtgatcgagaagacactgtacaacagaagaacccggcaggatgagcctgccctgttcgtggccctgaccttcgagcggcgggaggtcctggactcctccaatatcaaaccaatgaacctgatcggcgtggcaagaggcgaaaacatccccgccgtgatcgccctgaccgaccccgagggctgcccactgagccggtttaaggatagcctgggaaacccaacccacatcctgagaatcggcgagagctataaggagaagcagcggaccatccaggccaagaaggaggtggagcagcggagagccggcggctacagccggaagtacgccagcaaagccaagaatctggcagacgatatggtgagaaacaccgctagagatctgctgtactacgccgtgacccaggatgccatgctgatcttcgccaacctgagccggggcttcggccggcagggcaagcggaccttcatggccgagagacagtacacacggatggaggactggctgaccgccaagctggcctacgagggcctgagcaagacctacctgtccaagacactggcccagtacacctccaagacatgcagcaactgtgggtttaccatcaccagcgccgactacgacagggtgctggagaagctgaagaagacagcaacaggctggatgaccacaattaacggcaaggagctgaaggtggagggccagattacctactacaacagatacaagagacagaacgtagtcaaggacctgtccgtcgagctggatagactgagcgaagaatctgtgaacaacgacatctcctcctggacaaagggcagaagcggagaagctctgagcctcctgaagaaaagattctcccatagacccgtgcaggagaagttcgtgtgcctgaactgcggcttcgagacacacgcagccgagcaagccgccctgaacatcgccagatcctggctgttcctgcggagccaggagtacaagaaataccagacaaacaagacaaccggcaacaccgataagagagccttcgtcgagacctggcagtccttttaccggaagaagcttaaggaggtgtggaaacctgccgtgcggtctggcggatctggcggaggctccaccagccccaagaaaaagagaaaagtctaagctgccttctgcggggcttgccttctggccatgcccttcttctctcccttgcacctgtacctcttggtctttgaataaagcctgagtaggaaggctagcaaaaaaaaaaaaaaaaaaaaaaaaaaaaaaaaaaaaaaaaaaaaaaaaaaaaaaaaaaaaaaaaaaaaaaaaaaaaaaaagcccagccggctccccaacctctaccgaggagggcacctctgagtccgccacccccgagagcggccctggcacctccaccgagcccagcgagggcagcgcacccggcagccctgccggcagccccacctccacagaggagggaaccagcaccgagcccagcgaaggcagcgccccaggcaccagcaccgagcctagtgagcaggagattaaacggatcaacaagatcagaagaagacttgtgaaagacagcaacaccaagaaggccggcaagacaggccccatgaaaaccctgctggttagagtgatgacacccgatctgagagagcggctggaaaacctgagaaagaagcctgaaaatatcccccagcccatcagcaatacatctagagccaacctgaataagctgctgaccgattacaccgaaatgaagaaggcgatcctgcatgtgtactgggaagagttccagaaggaccctgtgggcctgatgagccgggtggcccagcctgccagcaagaagatcgatcagaacaagctgaaacctgagatggacgagaagggcaacctgaccaccgccggctttgcctgctctcagtgtggccagcccctgttcgtgtacaagctggagcaggtgtctgagaagggcaaggcttacaccaactacttcggacggtgcaatgtggccgagcacgaaaagctgatcctgctggcccagctgaagcccgagaaggatagcgacgaagccgtgacatatagcctgggaaagtttgggcagagggccctggatttctacagcattcatgtgaccaaggagtccacccaccccgtgaagcccctggcccagatcgccggaaacagatacgcctccggacctgtgggaaaggccctgagcgacgcatgtatgggcacaatcgcctccttcctgtctaagtaccaggacatcatcatcgaacaccagaaggtggtgaagggcaaccagaagagactggagagcctgcgggagctggccggcaaggaaaacctggaataccctagcgtgaccctgccacctcagcctcacaccaaggagggcgttgatgcctacaacgaagtgatcgcccgggtgcgaatgtgggtgaacctgaacctgtggcagaagctgaagctaagcagagatgatgccaagcctctgctgagactgaagggattcccttcctttcctctggtcgagagacaggccaacgaagtggactggtgggacatggtgtgtaacgtgaagaagctgatcaacgagaaaaaggaggatggcaaggtgttttggcagaatctggctggctacaagagacaggaagccctgagaccatacctgagcagcgaggaagatcggaagaagggaaagaaattcgctcggtaccagctgggcgacctgctgctgcacctggaaaagaagcacggcgaggactggggaaaggtgtacgacgaggcctgggagcggattgacaagaaagtggaaggcctgagcaagcacatcaagctggaagaggaacggagaagcgaggacgcccagagcaaggccgccctgaccgactggctgcgggctaaggccagcttcgtgatcgagggcctgaaggaggccgacaaggacgagttctgcagatgcgagctgaagctgcagaagtggtacggggacctgcggggaaagcccttcgccatcgaagccgagaacagcatcctggacatcagcggcttcagcaagcagtacaactgtgccttcatctggcagaaggacggcgtgaagaagctgaacctgtacctgatcatcaactacttcaagggcggcaagctgcggttcaagaagatcaaacctgaagccttcgaagccaacagattctacaccgtgatcaacaaaaagagcggcgagatcgtgcccatggaggtgaacttcaacttcgacgaccccaacctgatcatcctgcctctggcctttggcaagagacagggcagagaattcatctggaacgacctgctgtccctggaaaccggcagcctgaagctggccaacggaagagtgatcgagaagacactgtacaacagaagaacccggcaggatgagcctgccctgttcgtggccctgaccttcgagcggcgggaggtcctggactcctccaatatcaaaccaatgaacctgatcggcgtggcaagaggcgaaaacatccccgccgtgatcgccctgaccgaccccgagggctgcccactgagccggtttaaggatagcctgggaaacccaacccacatcctgagaatcggcgagagctataaggagaagcagcggaccatccaggccaagaaggaggtggagcagcggagagccggcggctacagccggaagtacgccagcaaagccaagaatctggcagacgatatggtgagaaacaccgctagagatctgctgtactacgccgtgacccaggatgccatgctgatcttcgccaacctgagccggggcttcggccggcagggcaagcggaccttcatggccgagagacagtacacacggatggaggactggctgaccgccaagctggcctacgagggcctgagcaagacctacctgtccaagacactggcccagtacacctccaagacatgcagcaactgtgggtttaccatcaccagcgccgactacgacagggtgctggagaagctgaagaagacagcaacaggctggatgaccacaattaacggcaaggagctgaaggtggagggccagattacctactacaacagatacaagagacagaacgtagtcaaggacctgtccgtcgagctggatagactgagcgaagaatctgtgaacaacgacatctcctcctggacaaagggcagaagcggagaagctctgagcctcctgaagaaaagattctcccatagacccgtgcaggagaagttcgtgtgcctgaactgcggcttcgagacacacgcagccgagcaagccgccctgaacatcgccagatcctggctgttcctgcggagccaggagtacaagaaataccagacaaacaagacaaccggcaacaccgataagagagccttcgtcgagacctggcagtccttttaccggaagaagcttaaggaggtgtggaaacctgccgtgcggtctggcggatctggcggaggctccaccagccccaagaaaaagagaaaagtctaagctgccttctgcggggcttgccttctggccatgcccttcttctctcccttgcacctgtacctcttggtctttgaataaagcctgagtaggaaggctagcaaaaaaaaaaaaaaaaaaaaaaaaaaaaaaaaaaaaaaaaaaaaaaaaaaaaaaaaaaaaaaaaaaaaaaaaaaaaaaaa

SEQ ID NO: 9317 - RNA, 8787 nt, synthetic construct
  source 1..8787: mol_type = other RNA
aggaaataagagagaaaagaagagtaagaagaaatataagagccaccatggcccctaagaagaagcgtaaagtgagccggatgaaccacgaccaggagttcgacccccctaaggtgtaccctcccgtccccgccgagaagagaaagcccatccgggtcctgagcctgttcgatggcatcgccaccggtctgctggtgctgaaggacctgggcatccaggtggataggtacattgcctccgaggtgtgcgaggactccatcaccgtgggaatggtgcgtcatcagggcaagatcatgtacgtgggcgacgtgcggagcgtgacacagaagcatatccaggagtggggccctttcgacctggtgatcggcggcagcccttgcaatgacctgagcatcgtgaacccagcccggaagggcctgtacgagggaaccggcagactgttcttcgagttttacagactgctgcacgacgcccggcctaaggaaggcgacgaccggcccttcttttggctgttcgagaatgtggtggccatgggagtcagcgacaagcgggatattagccggttcctggagagcaaccccgtgatgatcgatgccaaggaagtgagcgccgcccaccgggccagatacttctggggcaatctgcctggcatgaacagacccctggccagcaccgtgaacgacaagctggagctgcaggagtgcctggagcacggccggatcgccaagttcagcaaggtgagaaccatcaccacccgaagcaacagcatcaaacaaggcaaggaccagcactttcctgtgttcatgaacgagaaggaggacatcctgtggtgtaccgagatggagagagtgttcgggttcccagtccactacacagatgtcagcaacatgtctagactggccagacagagactgctgggaagaagctggtccgtccctgtgatcagacacctgttcgcccctctgaaggagtacttcgcctgcgtgagcagcggcaacagcaacgccaacagccggggccccagcttctctagcggcctggtgccactgtccctgagagggagccacatgggccccatggagatctacaaaaccgtgagcgcctggaagcggcagcctgtgcgcgtgctgagcctgtttcggaatatcgataaagtcctgaaaagcctgggattcctggagagcggctctggctccggcggtggcaccctgaagtacgtggaggatgtgacaaacgtggtcagacgggatgtggagaagtggggccccttcgatctggtgtacggcagcacccaacccctgggcagctcttgtgaccggtgccctggctggtacatgtttcagttccaccggatcctgcagtacgccctgccgagacaggagtcccagcggccattcttttggattttcatggacaacttgctgctgaccgaggatgaccaggaaactaccactcggttcctgcagaccgaagccgtgaccctgcaggacgtgagaggccgggactaccagaacgccatgcgggtgtggtccaacatccctggactgaaaagcaagcacgcacctctgacccctaaagaagaggagtacctgcaggcccaggtgcggagcagaagcaagctggacgcccctaaggtggatctgctggtgaagaattgcctcctgcccctgagagagtacttcaagtatttcagccagaatagtctgcccctgggaggcagcggcggcggcatggacgccgtgacctacgaggacgtgcacgtgaacttcagccaggaggagtgggccctgctggaccccagccagaagagcctgtacaaggacgtgatgctggagacctactggaacctgacctgcatcggctacaagtgggaggaccacaacatcgaggaccagcaccagagcagcggcaggcacggcaggtgcatcaactgccccagcgcctacggcaagaagcagtgcaccaacctgttcggcggcccaagcagcggcgcccctcctcccagcggcggcaggcggcccaagcagcggcgcccctcctcccagcggcggcagcccagccggctccccaacctctaccgaggagggcacctctgagtccgccacccccgagagcggccctggcacctccaccgagcccagcgagggcagcgcacccggcagccctgccggcagccccacctccacagaggagggaaccagcaccgagcccagcgaaggcagcgccccaggcaccagcaccgagcctagtgagcaggagattaaacggatcaacaagatcagaagaagacttgtgaaagacagcaacaccaagaaggccggcaagacaggccccatgaaaaccctgctggttagagtgatgacacccgatctgagagagcggctggaaaacctgagaaagaagcctgaaaatatcccccagcccatcagcaatacatctagagccaacctgaataagctgctgaccgattacaccgaaatgaagaaggcgatcctgcatgtgtactgggaagagttccagaaggaccctgtgggcctgatgagccgggtggcccagcctgccagcaagaagatcgatcagaacaagctgaaacctgagatggacgagaagggcaacctgaccaccgccggctttgcctgctctcagtgtggccagcccctgttcgtgtacaagctggagcaggtgtctgagaagggcaaggcttacaccaactacttcggacggtgcaatgtggccgagcacgaaaagctgatcctgctggcccagctgaagcccgagaaggatagcgacgaagccgtgacatatagcctgggaaagtttgggcagagggccctggatttctacagcattcatgtgaccaaggagtccacccaccccgtgaagcccctggcccagatcgccggaaacagatacgcctccggacctgtgggaaaggccctgagcgacgcatgtatgggcacaatcgcctccttcctgtctaagtaccaggacatcatcatcgaacaccagaaggtggtgaagggcaaccagaagagactggagagcctgcgggagctggccggcaaggaaaacctggaataccctagcgtgaccctgccacctcagcctcacaccaaggagggcgttgatgcctacaacgaagtgatcgcccgggtgcgaatgtgggtgaacctgaacctgtggcagaagctgaagctaagcagagatgatgccaagcctctgctgagactgaagggattcccttcctttcctctggtcgagagacaggccaacgaagtggactggtgggacatggtgtgtaacgtgaagaagctgatcaacgagaaaaaggaggatggcaaggtgttttggcagaatctggctggctacaagagacaggaagccctgagaccatacctgagcagcgaggaagatcggaagaagggaaagaaattcgctcggtaccagctgggcgacctgctgctgcacctggaaaagaagcacggcgaggactggggaaaggtgtacgacgaggcctgggagcggattgacaagaaagtggaaggcctgagcaagcacatcaagctggaagaggaacggagaagcgaggacgcccagagcaaggccgccctgaccgactggctgcgggctaaggccagcttcgtgatcgagggcctgaaggaggccgacaaggacgagttctgcagatgcgagctgaagctgcagaagtggtacggggacctgcggggaaagcccttcgccatcgaagccgagaacagcatcctggacatcagcggcttcagcaagcagtacaactgtgccttcatctggcagaaggacggcgtgaagaagctgaacctgtacctgatcatcaactacttcaagggcggcaagctgcggttcaagaagatcaaacctgaagccttcgaagccaacagattctacaccgtgatcaacaaaaagagcggcgagatcgtgcccatggaggtgaacttcaacttcgacgaccccaacctgatcatcctgcctctggcctttggcaagagacagggcagagaattcatctggaacgacctgctgtccctggaaaccggcagcctgaagctggccaacggaagagtgatcgagaagacactgtacaacagaagaacccggcaggatgagcctgccctgttcgtggccctgaccttcgagcggcgggaggtcctggactcctccaatatcaaaccaatgaacctgatcggcgtggcaagaggcgaaaacatccccgccgtgatcgccctgaccgaccccgagggctgcccactgagccggtttaaggatagcctgggaaacccaacccacatcctgagaatcggcgagagctataaggagaagcagcggaccatccaggccaagaaggaggtggagcagcggagagccggcggctacagccggaagtacgccagcaaagccaagaatctggcagacgatatggtgagaaacaccgctagagatctgctgtactacgccgtgacccaggatgccatgctgatcttcgccaacctgagccggggcttcggccggcagggcaagcggaccttcatggccgagagacagtacacacggatggaggactggctgaccgccaagctggcctacgagggcctgagcaagacctacctgtccaagacactggcccagtacacctccaagacatgcagcaactgtgggtttaccatcaccagcgccgactacgacagggtgctggagaagctgaagaagacagcaacaggctggatgaccacaattaacggcaaggagctgaaggtggagggccagattacctactacaacagatacaagagacagaacgtagtcaaggacctgtccgtcgagctggatagactgagcgaagaatctgtgaacaacgacatctcctcctggacaaagggcagaagcggagaagctctgagcctcctgaagaaaagattctcccatagacccgtgcaggagaagttcgtgtgcctgaactgcggcttcgagacacacgcagccgagcaagccgccctgaacatcgccagatcctggctgttcctgcggagccaggagtacaagaaataccagacaaacaagacaaccggcaacaccgataagagagccttcgtcgagacctggcagtccttttaccggaagaagcttaaggaggtgtggaaacctgccgtgcggtctggcggatctggcggaggctccaccagccccaagaaaaagagaaaagtctaagctgccttctgcggggcttgccttctggccatgcccttcttctctcccttgcacctgtacctcttggtctttgaataaagcctgagtaggaaggctagcaaaaaaaaaaaaaaaaaaaaaaaaaaaaaaaaaaaaaaaaaaaaaaaaaaaaaaaaaaaaaaaaaaaaaaaaaaaaaaaagcccagccggctccccaacctctaccgaggagggcacctctgagtccgccacccccgagagcggccctggcacctccaccgagcccagcgagggcagcgcacccggcagccctgccggcagccccacctccacagaggagggaaccagcaccgagcccagcgaaggcagcgccccaggcaccagcaccgagcctagtgagcaggagattaaacggatcaacaagatcagaagaagacttgtgaaagacagcaacaccaagaaggccggcaagacaggccccatgaaaaccctgctggttagagtgatgacacccgatctgagagagcggctggaaaacctgagaaagaagcctgaaaatatcccccagcccatcagcaatacatctagagccaacctgaataagctgctgaccgattacaccgaaatgaagaaggcgatcctgcatgtgtactgggaagagttccagaaggaccctgtgggcctgatgagccgggtggcccagcctgccagcaagaagatcgatcagaacaagctgaaacctgagatggacgagaagggcaacctgaccaccgccggctttgcctgctctcagtgtggccagcccctgttcgtgtacaagctggagcaggtgtctgagaagggcaaggcttacaccaactacttcggacggtgcaatgtggccgagcacgaaaagctgatcctgctggcccagctgaagcccgagaaggatagcgacgaagccgtgacatatagcctgggaaagtttgggcagagggccctggatttctacagcattcatgtgaccaaggagtccacccaccccgtgaagcccctggcccagatcgccggaaacagatacgcctccggacctgtgggaaaggccctgagcgacgcatgtatgggcacaatcgcctccttcctgtctaagtaccaggacatcatcatcgaacaccagaaggtggtgaagggcaaccagaagagactggagagcctgcgggagctggccggcaaggaaaacctggaataccctagcgtgaccctgccacctcagcctcacaccaaggagggcgttgatgcctacaacgaagtgatcgcccgggtgcgaatgtgggtgaacctgaacctgtggcagaagctgaagctaagcagagatgatgccaagcctctgctgagactgaagggattcccttcctttcctctggtcgagagacaggccaacgaagtggactggtgggacatggtgtgtaacgtgaagaagctgatcaacgagaaaaaggaggatggcaaggtgttttggcagaatctggctggctacaagagacaggaagccctgagaccatacctgagcagcgaggaagatcggaagaagggaaagaaattcgctcggtaccagctgggcgacctgctgctgcacctggaaaagaagcacggcgaggactggggaaaggtgtacgacgaggcctgggagcggattgacaagaaagtggaaggcctgagcaagcacatcaagctggaagaggaacggagaagcgaggacgcccagagcaaggccgccctgaccgactggctgcgggctaaggccagcttcgtgatcgagggcctgaaggaggccgacaaggacgagttctgcagatgcgagctgaagctgcagaagtggtacggggacctgcggggaaagcccttcgccatcgaagccgagaacagcatcctggacatcagcggcttcagcaagcagtacaactgtgccttcatctggcagaaggacggcgtgaagaagctgaacctgtacctgatcatcaactacttcaagggcggcaagctgcggttcaagaagatcaaacctgaagccttcgaagccaacagattctacaccgtgatcaacaaaaagagcggcgagatcgtgcccatggaggtgaacttcaacttcgacgaccccaacctgatcatcctgcctctggcctttggcaagagacagggcagagaattcatctggaacgacctgctgtccctggaaaccggcagcctgaagctggccaacggaagagtgatcgagaagacactgtacaacagaagaacccggcaggatgagcctgccctgttcgtggccctgaccttcgagcggcgggaggtcctggactcctccaatatcaaaccaatgaacctgatcggcgtggcaagaggcgaaaacatccccgccgtgatcgccctgaccgaccccgagggctgcccactgagccggtttaaggatagcctgggaaacccaacccacatcctgagaatcggcgagagctataaggagaagcagcggaccatccaggccaagaaggaggtggagcagcggagagccggcggctacagccggaagtacgccagcaaagccaagaatctggcagacgatatggtgagaaacaccgctagagatctgctgtactacgccgtgacccaggatgccatgctgatcttcgccaacctgagccggggcttcggccggcagggcaagcggaccttcatggccgagagacagtacacacggatggaggactggctgaccgccaagctggcctacgagggcctgagcaagacctacctgtccaagacactggcccagtacacctccaagacatgcagcaactgtgggtttaccatcaccagcgccgactacgacagggtgctggagaagctgaagaagacagcaacaggctggatgaccacaattaacggcaaggagctgaaggtggagggccagattacctactacaacagatacaagagacagaacgtagtcaaggacctgtccgtcgagctggatagactgagcgaagaatctgtgaacaacgacatctcctcctggacaaagggcagaagcggagaagctctgagcctcctgaagaaaagattctcccatagacccgtgcaggagaagttcgtgtgcctgaactgcggcttcgagacacacgcagccgagcaagccgccctgaacatcgccagatcctggctgttcctgcggagccaggagtacaagaaataccagacaaacaagacaaccggcaacaccgataagagagccttcgtcgagacctggcagtccttttaccggaagaagcttaaggaggtgtggaaacctgccgtgcggtctggcggatctggcggaggctccaccagccccaagaaaaagagaaaagtctaagctgccttctgcggggcttgccttctggccatgcccttcttctctcccttgcacctgtacctcttggtctttgaataaagcctgagtaggaaggctagcaaaaaaaaaaaaaaaaaaaaaaaaaaaaaaaaaaaaaaaaaaaaaaaaaaaaaaaaaaaaaaaaaaaaaaaaaaaaaaaa

SEQ ID NO: 9318 - RNA, 8787 nt, synthetic construct
  source 1..8787: mol_type = other RNA
aggaaataagagagaaaagaagagtaagaagaaatataagagccaccatggcccctaagaagaagcgtaaagtgagccggatgaaccacgaccaggagttcgacccccctaaggtgtaccctcccgtccccgccgagaagagaaagcccatccgggtcctgagcctgttcgatggcatcgccaccggtctgctggtgctgaaggacctgggcatccaggtggataggtacattgcctccgaggtgtgcgaggactccatcaccgtgggaatggtgcgtcatcagggcaagatcatgtacgtgggcgacgtgcggagcgtgacacagaagcatatccaggagtggggccctttcgacctggtgatcggcggcagcccttgcaatgacctgagcatcgtgaacccagcccggaagggcctgtacgagggaaccggcagactgttcttcgagttttacagactgctgcacgacgcccggcctaaggaaggcgacgaccggcccttcttttggctgttcgagaatgtggtggccatgggagtcagcgacaagcgggatattagccggttcctggagagcaaccccgtgatgatcgatgccaaggaagtgagcgccgcccaccgggccagatacttctggggcaatctgcctggcatgaacagacccctggccagcaccgtgaacgacaagctggagctgcaggagtgcctggagcacggccggatcgccaagttcagcaaggtgagaaccatcaccacccgaagcaacagcatcaaacaaggcaaggaccagcactttcctgtgttcatgaacgagaaggaggacatcctgtggtgtaccgagatggagagagtgttcgggttcccagtccactacacagatgtcagcaacatgtctagactggccagacagagactgctgggaagaagctggtccgtccctgtgatcagacacctgttcgcccctctgaaggagtacttcgcctgcgtgagcagcggcaacagcaacgccaacagccggggccccagcttctctagcggcctggtgccactgtccctgagagggagccacatgggccccatggagatctacaaaaccgtgagcgcctggaagcggcagcctgtgcgcgtgctgagcctgtttcggaatatcgataaagtcctgaaaagcctgggattcctggagagcggctctggctccggcggtggcaccctgaagtacgtggaggatgtgacaaacgtggtcagacgggatgtggagaagtggggccccttcgatctggtgtacggcagcacccaacccctgggcagctcttgtgaccggtgccctggctggtacatgtttcagttccaccggatcctgcagtacgccctgccgagacaggagtcccagcggccattcttttggattttcatggacaacttgctgctgaccgaggatgaccaggaaactaccactcggttcctgcagaccgaagccgtgaccctgcaggacgtgagaggccgggactaccagaacgccatgcgggtgtggtccaacatccctggactgaaaagcaagcacgcacctctgacccctaaagaagaggagtacctgcaggcccaggtgcggagcagaagcaagctggacgcccctaaggtggatctgctggtgaagaattgcctcctgcccctgagagagtacttcaagtatttcagccagaatagtctgcccctgggaggcagcggcggcggcaacgagatggtgaccttcaaggacgtggccgtggtgttcagcggcgaggagctggagctgctggacagcgcccagtggaagctgtaccaggacgtgatgctggagaacttcaggaacctgctgagcgtgggcggcaggatccagaccgagctggagaccttccccgaggccggcccccacgaggagctgagctggcagcagatctgggagcagatcgccagcgacagcaccttcagccaggacggcggcccaagcagcggcgcccctcctcccagcggcggcaggcggcccaagcagcggcgcccctcctcccagcggcggcagcccagccggctccccaacctctaccgaggagggcacctctgagtccgccacccccgagagcggccctggcacctccaccgagcccagcgagggcagcgcacccggcagccctgccggcagccccacctccacagaggagggaaccagcaccgagcccagcgaaggcagcgccccaggcaccagcaccgagcctagtgagcaggagattaaacggatcaacaagatcagaagaagacttgtgaaagacagcaacaccaagaaggccggcaagacaggccccatgaaaaccctgctggttagagtgatgacacccgatctgagagagcggctggaaaacctgagaaagaagcctgaaaatatcccccagcccatcagcaatacatctagagccaacctgaataagctgctgaccgattacaccgaaatgaagaaggcgatcctgcatgtgtactgggaagagttccagaaggaccctgtgggcctgatgagccgggtggcccagcctgccagcaagaagatcgatcagaacaagctgaaacctgagatggacgagaagggcaacctgaccaccgccggctttgcctgctctcagtgtggccagcccctgttcgtgtacaagctggagcaggtgtctgagaagggcaaggcttacaccaactacttcggacggtgcaatgtggccgagcacgaaaagctgatcctgctggcccagctgaagcccgagaaggatagcgacgaagccgtgacatatagcctgggaaagtttgggcagagggccctggatttctacagcattcatgtgaccaaggagtccacccaccccgtgaagcccctggcccagatcgccggaaacagatacgcctccggacctgtgggaaaggccctgagcgacgcatgtatgggcacaatcgcctccttcctgtctaagtaccaggacatcatcatcgaacaccagaaggtggtgaagggcaaccagaagagactggagagcctgcgggagctggccggcaaggaaaacctggaataccctagcgtgaccctgccacctcagcctcacaccaaggagggcgttgatgcctacaacgaagtgatcgcccgggtgcgaatgtgggtgaacctgaacctgtggcagaagctgaagctaagcagagatgatgccaagcctctgctgagactgaagggattcccttcctttcctctggtcgagagacaggccaacgaagtggactggtgggacatggtgtgtaacgtgaagaagctgatcaacgagaaaaaggaggatggcaaggtgttttggcagaatctggctggctacaagagacaggaagccctgagaccatacctgagcagcgaggaagatcggaagaagggaaagaaattcgctcggtaccagctgggcgacctgctgctgcacctggaaaagaagcacggcgaggactggggaaaggtgtacgacgaggcctgggagcggattgacaagaaagtggaaggcctgagcaagcacatcaagctggaagaggaacggagaagcgaggacgcccagagcaaggccgccctgaccgactggctgcgggctaaggccagcttcgtgatcgagggcctgaaggaggccgacaaggacgagttctgcagatgcgagctgaagctgcagaagtggtacggggacctgcggggaaagcccttcgccatcgaagccgagaacagcatcctggacatcagcggcttcagcaagcagtacaactgtgccttcatctggcagaaggacggcgtgaagaagctgaacctgtacctgatcatcaactacttcaagggcggcaagctgcggttcaagaagatcaaacctgaagccttcgaagccaacagattctacaccgtgatcaacaaaaagagcggcgagatcgtgcccatggaggtgaacttcaacttcgacgaccccaacctgatcatcctgcctctggcctttggcaagagacagggcagagaattcatctggaacgacctgctgtccctggaaaccggcagcctgaagctggccaacggaagagtgatcgagaagacactgtacaacagaagaacccggcaggatgagcctgccctgttcgtggccctgaccttcgagcggcgggaggtcctggactcctccaatatcaaaccaatgaacctgatcggcgtggcaagaggcgaaaacatccccgccgtgatcgccctgaccgaccccgagggctgcccactgagccggtttaaggatagcctgggaaacccaacccacatcctgagaatcggcgagagctataaggagaagcagcggaccatccaggccaagaaggaggtggagcagcggagagccggcggctacagccggaagtacgccagcaaagccaagaatctggcagacgatatggtgagaaacaccgctagagatctgctgtactacgccgtgacccaggatgccatgctgatcttcgccaacctgagccggggcttcggccggcagggcaagcggaccttcatggccgagagacagtacacacggatggaggactggctgaccgccaagctggcctacgagggcctgagcaagacctacctgtccaagacactggcccagtacacctccaagacatgcagcaactgtgggtttaccatcaccagcgccgactacgacagggtgctggagaagctgaagaagacagcaacaggctggatgaccacaattaacggcaaggagctgaaggtggagggccagattacctactacaacagatacaagagacagaacgtagtcaaggacctgtccgtcgagctggatagactgagcgaagaatctgtgaacaacgacatctcctcctggacaaagggcagaagcggagaagctctgagcctcctgaagaaaagattctcccatagacccgtgcaggagaagttcgtgtgcctgaactgcggcttcgagacacacgcagccgagcaagccgccctgaacatcgccagatcctggctgttcctgcggagccaggagtacaagaaataccagacaaacaagacaaccggcaacaccgataagagagccttcgtcgagacctggcagtccttttaccggaagaagcttaaggaggtgtggaaacctgccgtgcggtctggcggatctggcggaggctccaccagccccaagaaaaagagaaaagtctaagctgccttctgcggggcttgccttctggccatgcccttcttctctcccttgcacctgtacctcttggtctttgaataaagcctgagtaggaaggctagcaaaaaaaaaaaaaaaaaaaaaaaaaaaaaaaaaaaaaaaaaaaaaaaaaaaaaaaaaaaaaaaaaaaaaaaaaaaaaaaagcccagccggctccccaacctctaccgaggagggcacctctgagtccgccacccccgagagcggccctggcacctccaccgagcccagcgagggcagcgcacccggcagccctgccggcagccccacctccacagaggagggaaccagcaccgagcccagcgaaggcagcgccccaggcaccagcaccgagcctagtgagcaggagattaaacggatcaacaagatcagaagaagacttgtgaaagacagcaacaccaagaaggccggcaagacaggccccatgaaaaccctgctggttagagtgatgacacccgatctgagagagcggctggaaaacctgagaaagaagcctgaaaatatcccccagcccatcagcaatacatctagagccaacctgaataagctgctgaccgattacaccgaaatgaagaaggcgatcctgcatgtgtactgggaagagttccagaaggaccctgtgggcctgatgagccgggtggcccagcctgccagcaagaagatcgatcagaacaagctgaaacctgagatggacgagaagggcaacctgaccaccgccggctttgcctgctctcagtgtggccagcccctgttcgtgtacaagctggagcaggtgtctgagaagggcaaggcttacaccaactacttcggacggtgcaatgtggccgagcacgaaaagctgatcctgctggcccagctgaagcccgagaaggatagcgacgaagccgtgacatatagcctgggaaagtttgggcagagggccctggatttctacagcattcatgtgaccaaggagtccacccaccccgtgaagcccctggcccagatcgccggaaacagatacgcctccggacctgtgggaaaggccctgagcgacgcatgtatgggcacaatcgcctccttcctgtctaagtaccaggacatcatcatcgaacaccagaaggtggtgaagggcaaccagaagagactggagagcctgcgggagctggccggcaaggaaaacctggaataccctagcgtgaccctgccacctcagcctcacaccaaggagggcgttgatgcctacaacgaagtgatcgcccgggtgcgaatgtgggtgaacctgaacctgtggcagaagctgaagctaagcagagatgatgccaagcctctgctgagactgaagggattcccttcctttcctctggtcgagagacaggccaacgaagtggactggtgggacatggtgtgtaacgtgaagaagctgatcaacgagaaaaaggaggatggcaaggtgttttggcagaatctggctggctacaagagacaggaagccctgagaccatacctgagcagcgaggaagatcggaagaagggaaagaaattcgctcggtaccagctgggcgacctgctgctgcacctggaaaagaagcacggcgaggactggggaaaggtgtacgacgaggcctgggagcggattgacaagaaagtggaaggcctgagcaagcacatcaagctggaagaggaacggagaagcgaggacgcccagagcaaggccgccctgaccgactggctgcgggctaaggccagcttcgtgatcgagggcctgaaggaggccgacaaggacgagttctgcagatgcgagctgaagctgcagaagtggtacggggacctgcggggaaagcccttcgccatcgaagccgagaacagcatcctggacatcagcggcttcagcaagcagtacaactgtgccttcatctggcagaaggacggcgtgaagaagctgaacctgtacctgatcatcaactacttcaagggcggcaagctgcggttcaagaagatcaaacctgaagccttcgaagccaacagattctacaccgtgatcaacaaaaagagcggcgagatcgtgcccatggaggtgaacttcaacttcgacgaccccaacctgatcatcctgcctctggcctttggcaagagacagggcagagaattcatctggaacgacctgctgtccctggaaaccggcagcctgaagctggccaacggaagagtgatcgagaagacactgtacaacagaagaacccggcaggatgagcctgccctgttcgtggccctgaccttcgagcggcgggaggtcctggactcctccaatatcaaaccaatgaacctgatcggcgtggcaagaggcgaaaacatccccgccgtgatcgccctgaccgaccccgagggctgcccactgagccggtttaaggatagcctgggaaacccaacccacatcctgagaatcggcgagagctataaggagaagcagcggaccatccaggccaagaaggaggtggagcagcggagagccggcggctacagccggaagtacgccagcaaagccaagaatctggcagacgatatggtgagaaacaccgctagagatctgctgtactacgccgtgacccaggatgccatgctgatcttcgccaacctgagccggggcttcggccggcagggcaagcggaccttcatggccgagagacagtacacacggatggaggactggctgaccgccaagctggcctacgagggcctgagcaagacctacctgtccaagacactggcccagtacacctccaagacatgcagcaactgtgggtttaccatcaccagcgccgactacgacagggtgctggagaagctgaagaagacagcaacaggctggatgaccacaattaacggcaaggagctgaaggtggagggccagattacctactacaacagatacaagagacagaacgtagtcaaggacctgtccgtcgagctggatagactgagcgaagaatctgtgaacaacgacatctcctcctggacaaagggcagaagcggagaagctctgagcctcctgaagaaaagattctcccatagacccgtgcaggagaagttcgtgtgcctgaactgcggcttcgagacacacgcagccgagcaagccgccctgaacatcgccagatcctggctgttcctgcggagccaggagtacaagaaataccagacaaacaagacaaccggcaacaccgataagagagccttcgtcgagacctggcagtccttttaccggaagaagcttaaggaggtgtggaaacctgccgtgcggtctggcggatctggcggaggctccaccagccccaagaaaaagagaaaagtctaagctgccttctgcggggcttgccttctggccatgcccttcttctctcccttgcacctgtacctcttggtctttgaataaagcctgagtaggaaggctagcaaaaaaaaaaaaaaaaaaaaaaaaaaaaaaaaaaaaaaaaaaaaaaaaaaaaaaaaaaaaaaaaaaaaaaaaaaaaaaaa

SEQ ID NO: 9319 - RNA, 8787 nt, synthetic construct
  source 1..8787: mol_type = other RNA
aggaaataagagagaaaagaagagtaagaagaaatataagagccaccatggcccctaagaagaagcgtaaagtgagccggatgaaccacgaccaggagttcgacccccctaaggtgtaccctcccgtccccgccgagaagagaaagcccatccgggtcctgagcctgttcgatggcatcgccaccggtctgctggtgctgaaggacctgggcatccaggtggataggtacattgcctccgaggtgtgcgaggactccatcaccgtgggaatggtgcgtcatcagggcaagatcatgtacgtgggcgacgtgcggagcgtgacacagaagcatatccaggagtggggccctttcgacctggtgatcggcggcagcccttgcaatgacctgagcatcgtgaacccagcccggaagggcctgtacgagggaaccggcagactgttcttcgagttttacagactgctgcacgacgcccggcctaaggaaggcgacgaccggcccttcttttggctgttcgagaatgtggtggccatgggagtcagcgacaagcgggatattagccggttcctggagagcaaccccgtgatgatcgatgccaaggaagtgagcgccgcccaccgggccagatacttctggggcaatctgcctggcatgaacagacccctggccagcaccgtgaacgacaagctggagctgcaggagtgcctggagcacggccggatcgccaagttcagcaaggtgagaaccatcaccacccgaagcaacagcatcaaacaaggcaaggaccagcactttcctgtgttcatgaacgagaaggaggacatcctgtggtgtaccgagatggagagagtgttcgggttcccagtccactacacagatgtcagcaacatgtctagactggccagacagagactgctgggaagaagctggtccgtccctgtgatcagacacctgttcgcccctctgaaggagtacttcgcctgcgtgagcagcggcaacagcaacgccaacagccggggccccagcttctctagcggcctggtgccactgtccctgagagggagccacatgggccccatggagatctacaaaaccgtgagcgcctggaagcggcagcctgtgcgcgtgctgagcctgtttcggaatatcgataaagtcctgaaaagcctgggattcctggagagcggctctggctccggcggtggcaccctgaagtacgtggaggatgtgacaaacgtggtcagacgggatgtggagaagtggggccccttcgatctggtgtacggcagcacccaacccctgggcagctcttgtgaccggtgccctggctggtacatgtttcagttccaccggatcctgcagtacgccctgccgagacaggagtcccagcggccattcttttggattttcatggacaacttgctgctgaccgaggatgaccaggaaactaccactcggttcctgcagaccgaagccgtgaccctgcaggacgtgagaggccgggactaccagaacgccatgcgggtgtggtccaacatccctggactgaaaagcaagcacgcacctctgacccctaaagaagaggagtacctgcaggcccaggtgcggagcagaagcaagctggacgcccctaaggtggatctgctggtgaagaattgcctcctgcccctgagagagtacttcaagtatttcagccagaatagtctgcccctgggaggcagcggcggcggcccccaggccgccatgaccttccaggacgtggccgtggacttcaccagggaggagtggaggctgctggagcccccccagaaggagctgtactgggaggtgatgctggagaactacaggaacctggtgtgcctgggcctgaccgtgagcaagcccgacgtgatcagccagctggagcagggcgaggccccctggaggctggagggcggcagcgccaggggcaggtgcctggactggggcatgaggggcggcccaagcagcggcgcccctcctcccagcggcggcaggcggcccaagcagcggcgcccctcctcccagcggcggcagcccagccggctccccaacctctaccgaggagggcacctctgagtccgccacccccgagagcggccctggcacctccaccgagcccagcgagggcagcgcacccggcagccctgccggcagccccacctccacagaggagggaaccagcaccgagcccagcgaaggcagcgccccaggcaccagcaccgagcctagtgagcaggagattaaacggatcaacaagatcagaagaagacttgtgaaagacagcaacaccaagaaggccggcaagacaggccccatgaaaaccctgctggttagagtgatgacacccgatctgagagagcggctggaaaacctgagaaagaagcctgaaaatatcccccagcccatcagcaatacatctagagccaacctgaataagctgctgaccgattacaccgaaatgaagaaggcgatcctgcatgtgtactgggaagagttccagaaggaccctgtgggcctgatgagccgggtggcccagcctgccagcaagaagatcgatcagaacaagctgaaacctgagatggacgagaagggcaacctgaccaccgccggctttgcctgctctcagtgtggccagcccctgttcgtgtacaagctggagcaggtgtctgagaagggcaaggcttacaccaactacttcggacggtgcaatgtggccgagcacgaaaagctgatcctgctggcccagctgaagcccgagaaggatagcgacgaagccgtgacatatagcctgggaaagtttgggcagagggccctggatttctacagcattcatgtgaccaaggagtccacccaccccgtgaagcccctggcccagatcgccggaaacagatacgcctccggacctgtgggaaaggccctgagcgacgcatgtatgggcacaatcgcctccttcctgtctaagtaccaggacatcatcatcgaacaccagaaggtggtgaagggcaaccagaagagactggagagcctgcgggagctggccggcaaggaaaacctggaataccctagcgtgaccctgccacctcagcctcacaccaaggagggcgttgatgcctacaacgaagtgatcgcccgggtgcgaatgtgggtgaacctgaacctgtggcagaagctgaagctaagcagagatgatgccaagcctctgctgagactgaagggattcccttcctttcctctggtcgagagacaggccaacgaagtggactggtgggacatggtgtgtaacgtgaagaagctgatcaacgagaaaaaggaggatggcaaggtgttttggcagaatctggctggctacaagagacaggaagccctgagaccatacctgagcagcgaggaagatcggaagaagggaaagaaattcgctcggtaccagctgggcgacctgctgctgcacctggaaaagaagcacggcgaggactggggaaaggtgtacgacgaggcctgggagcggattgacaagaaagtggaaggcctgagcaagcacatcaagctggaagaggaacggagaagcgaggacgcccagagcaaggccgccctgaccgactggctgcgggctaaggccagcttcgtgatcgagggcctgaaggaggccgacaaggacgagttctgcagatgcgagctgaagctgcagaagtggtacggggacctgcggggaaagcccttcgccatcgaagccgagaacagcatcctggacatcagcggcttcagcaagcagtacaactgtgccttcatctggcagaaggacggcgtgaagaagctgaacctgtacctgatcatcaactacttcaagggcggcaagctgcggttcaagaagatcaaacctgaagccttcgaagccaacagattctacaccgtgatcaacaaaaagagcggcgagatcgtgcccatggaggtgaacttcaacttcgacgaccccaacctgatcatcctgcctctggcctttggcaagagacagggcagagaattcatctggaacgacctgctgtccctggaaaccggcagcctgaagctggccaacggaagagtgatcgagaagacactgtacaacagaagaacccggcaggatgagcctgccctgttcgtggccctgaccttcgagcggcgggaggtcctggactcctccaatatcaaaccaatgaacctgatcggcgtggcaagaggcgaaaacatccccgccgtgatcgccctgaccgaccccgagggctgcccactgagccggtttaaggatagcctgggaaacccaacccacatcctgagaatcggcgagagctataaggagaagcagcggaccatccaggccaagaaggaggtggagcagcggagagccggcggctacagccggaagtacgccagcaaagccaagaatctggcagacgatatggtgagaaacaccgctagagatctgctgtactacgccgtgacccaggatgccatgctgatcttcgccaacctgagccggggcttcggccggcagggcaagcggaccttcatggccgagagacagtacacacggatggaggactggctgaccgccaagctggcctacgagggcctgagcaagacctacctgtccaagacactggcccagtacacctccaagacatgcagcaactgtgggtttaccatcaccagcgccgactacgacagggtgctggagaagctgaagaagacagcaacaggctggatgaccacaattaacggcaaggagctgaaggtggagggccagattacctactacaacagatacaagagacagaacgtagtcaaggacctgtccgtcgagctggatagactgagcgaagaatctgtgaacaacgacatctcctcctggacaaagggcagaagcggagaagctctgagcctcctgaagaaaagattctcccatagacccgtgcaggagaagttcgtgtgcctgaactgcggcttcgagacacacgcagccgagcaagccgccctgaacatcgccagatcctggctgttcctgcggagccaggagtacaagaaataccagacaaacaagacaaccggcaacaccgataagagagccttcgtcgagacctggcagtccttttaccggaagaagcttaaggaggtgtggaaacctgccgtgcggtctggcggatctggcggaggctccaccagccccaagaaaaagagaaaagtctaagctgccttctgcggggcttgccttctggccatgcccttcttctctcccttgcacctgtacctcttggtctttgaataaagcctgagtaggaaggctagcaaaaaaaaaaaaaaaaaaaaaaaaaaaaaaaaaaaaaaaaaaaaaaaaaaaaaaaaaaaaaaaaaaaaaaaaaaaaaaaagcccagccggctccccaacctctaccgaggagggcacctctgagtccgccacccccgagagcggccctggcacctccaccgagcccagcgagggcagcgcacccggcagccctgccggcagccccacctccacagaggagggaaccagcaccgagcccagcgaaggcagcgccccaggcaccagcaccgagcctagtgagcaggagattaaacggatcaacaagatcagaagaagacttgtgaaagacagcaacaccaagaaggccggcaagacaggccccatgaaaaccctgctggttagagtgatgacacccgatctgagagagcggctggaaaacctgagaaagaagcctgaaaatatcccccagcccatcagcaatacatctagagccaacctgaataagctgctgaccgattacaccgaaatgaagaaggcgatcctgcatgtgtactgggaagagttccagaaggaccctgtgggcctgatgagccgggtggcccagcctgccagcaagaagatcgatcagaacaagctgaaacctgagatggacgagaagggcaacctgaccaccgccggctttgcctgctctcagtgtggccagcccctgttcgtgtacaagctggagcaggtgtctgagaagggcaaggcttacaccaactacttcggacggtgcaatgtggccgagcacgaaaagctgatcctgctggcccagctgaagcccgagaaggatagcgacgaagccgtgacatatagcctgggaaagtttgggcagagggccctggatttctacagcattcatgtgaccaaggagtccacccaccccgtgaagcccctggcccagatcgccggaaacagatacgcctccggacctgtgggaaaggccctgagcgacgcatgtatgggcacaatcgcctccttcctgtctaagtaccaggacatcatcatcgaacaccagaaggtggtgaagggcaaccagaagagactggagagcctgcgggagctggccggcaaggaaaacctggaataccctagcgtgaccctgccacctcagcctcacaccaaggagggcgttgatgcctacaacgaagtgatcgcccgggtgcgaatgtgggtgaacctgaacctgtggcagaagctgaagctaagcagagatgatgccaagcctctgctgagactgaagggattcccttcctttcctctggtcgagagacaggccaacgaagtggactggtgggacatggtgtgtaacgtgaagaagctgatcaacgagaaaaaggaggatggcaaggtgttttggcagaatctggctggctacaagagacaggaagccctgagaccatacctgagcagcgaggaagatcggaagaagggaaagaaattcgctcggtaccagctgggcgacctgctgctgcacctggaaaagaagcacggcgaggactggggaaaggtgtacgacgaggcctgggagcggattgacaagaaagtggaaggcctgagcaagcacatcaagctggaagaggaacggagaagcgaggacgcccagagcaaggccgccctgaccgactggctgcgggctaaggccagcttcgtgatcgagggcctgaaggaggccgacaaggacgagttctgcagatgcgagctgaagctgcagaagtggtacggggacctgcggggaaagcccttcgccatcgaagccgagaacagcatcctggacatcagcggcttcagcaagcagtacaactgtgccttcatctggcagaaggacggcgtgaagaagctgaacctgtacctgatcatcaactacttcaagggcggcaagctgcggttcaagaagatcaaacctgaagccttcgaagccaacagattctacaccgtgatcaacaaaaagagcggcgagatcgtgcccatggaggtgaacttcaacttcgacgaccccaacctgatcatcctgcctctggcctttggcaagagacagggcagagaattcatctggaacgacctgctgtccctggaaaccggcagcctgaagctggccaacggaagagtgatcgagaagacactgtacaacagaagaacccggcaggatgagcctgccctgttcgtggccctgaccttcgagcggcgggaggtcctggactcctccaatatcaaaccaatgaacctgatcggcgtggcaagaggcgaaaacatccccgccgtgatcgccctgaccgaccccgagggctgcccactgagccggtttaaggatagcctgggaaacccaacccacatcctgagaatcggcgagagctataaggagaagcagcggaccatccaggccaagaaggaggtggagcagcggagagccggcggctacagccggaagtacgccagcaaagccaagaatctggcagacgatatggtgagaaacaccgctagagatctgctgtactacgccgtgacccaggatgccatgctgatcttcgccaacctgagccggggcttcggccggcagggcaagcggaccttcatggccgagagacagtacacacggatggaggactggctgaccgccaagctggcctacgagggcctgagcaagacctacctgtccaagacactggcccagtacacctccaagacatgcagcaactgtgggtttaccatcaccagcgccgactacgacagggtgctggagaagctgaagaagacagcaacaggctggatgaccacaattaacggcaaggagctgaaggtggagggccagattacctactacaacagatacaagagacagaacgtagtcaaggacctgtccgtcgagctggatagactgagcgaagaatctgtgaacaacgacatctcctcctggacaaagggcagaagcggagaagctctgagcctcctgaagaaaagattctcccatagacccgtgcaggagaagttcgtgtgcctgaactgcggcttcgagacacacgcagccgagcaagccgccctgaacatcgccagatcctggctgttcctgcggagccaggagtacaagaaataccagacaaacaagacaaccggcaacaccgataagagagccttcgtcgagacctggcagtccttttaccggaagaagcttaaggaggtgtggaaacctgccgtgcggtctggcggatctggcggaggctccaccagccccaagaaaaagagaaaagtctaagctgccttctgcggggcttgccttctggccatgcccttcttctctcccttgcacctgtacctcttggtctttgaataaagcctgagtaggaaggctagcaaaaaaaaaaaaaaaaaaaaaaaaaaaaaaaaaaaaaaaaaaaaaaaaaaaaaaaaaaaaaaaaaaaaaaaaaaaaaaaa

SEQ ID NO: 9320 - RNA, 8787 nt, synthetic construct
  source 1..8787: mol_type = other RNA
aggaaataagagagaaaagaagagtaagaagaaatataagagccaccatggcccctaagaagaagcgtaaagtgagccggatgaaccacgaccaggagttcgacccccctaaggtgtaccctcccgtccccgccgagaagagaaagcccatccgggtcctgagcctgttcgatggcatcgccaccggtctgctggtgctgaaggacctgggcatccaggtggataggtacattgcctccgaggtgtgcgaggactccatcaccgtgggaatggtgcgtcatcagggcaagatcatgtacgtgggcgacgtgcggagcgtgacacagaagcatatccaggagtggggccctttcgacctggtgatcggcggcagcccttgcaatgacctgagcatcgtgaacccagcccggaagggcctgtacgagggaaccggcagactgttcttcgagttttacagactgctgcacgacgcccggcctaaggaaggcgacgaccggcccttcttttggctgttcgagaatgtggtggccatgggagtcagcgacaagcgggatattagccggttcctggagagcaaccccgtgatgatcgatgccaaggaagtgagcgccgcccaccgggccagatacttctggggcaatctgcctggcatgaacagacccctggccagcaccgtgaacgacaagctggagctgcaggagtgcctggagcacggccggatcgccaagttcagcaaggtgagaaccatcaccacccgaagcaacagcatcaaacaaggcaaggaccagcactttcctgtgttcatgaacgagaaggaggacatcctgtggtgtaccgagatggagagagtgttcgggttcccagtccactacacagatgtcagcaacatgtctagactggccagacagagactgctgggaagaagctggtccgtccctgtgatcagacacctgttcgcccctctgaaggagtacttcgcctgcgtgagcagcggcaacagcaacgccaacagccggggccccagcttctctagcggcctggtgccactgtccctgagagggagccacatgggccccatggagatctacaaaaccgtgagcgcctggaagcggcagcctgtgcgcgtgctgagcctgtttcggaatatcgataaagtcctgaaaagcctgggattcctggagagcggctctggctccggcggtggcaccctgaagtacgtggaggatgtgacaaacgtggtcagacgggatgtggagaagtggggccccttcgatctggtgtacggcagcacccaacccctgggcagctcttgtgaccggtgccctggctggtacatgtttcagttccaccggatcctgcagtacgccctgccgagacaggagtcccagcggccattcttttggattttcatggacaacttgctgctgaccgaggatgaccaggaaactaccactcggttcctgcagaccgaagccgtgaccctgcaggacgtgagaggccgggactaccagaacgccatgcgggtgtggtccaacatccctggactgaaaagcaagcacgcacctctgacccctaaagaagaggagtacctgcaggcccaggtgcggagcagaagcaagctggacgcccctaaggtggatctgctggtgaagaattgcctcctgcccctgagagagtacttcaagtatttcagccagaatagtctgcccctgggaggcagcggcggcggcgccaagggcctgctgaccttcggcgacgtggccatcgagttcagccaggaggagtgggagtgcctgagccacacccagagggagctgtacagggacgtgatcctggagaactacggccacctgctgttcctgggcgtgatcgtgagcaagcccgacctggtgagcctgctggagcagaggaaggagccctggggcgagaagaggaacaagaccaggatccacgtgggcaagaaccccttcggcggcggcccaagcagcggcgcccctcctcccagcggcggcaggcggcccaagcagcggcgcccctcctcccagcggcggcagcccagccggctccccaacctctaccgaggagggcacctctgagtccgccacccccgagagcggccctggcacctccaccgagcccagcgagggcagcgcacccggcagccctgccggcagccccacctccacagaggagggaaccagcaccgagcccagcgaaggcagcgccccaggcaccagcaccgagcctagtgagcaggagattaaacggatcaacaagatcagaagaagacttgtgaaagacagcaacaccaagaaggccggcaagacaggccccatgaaaaccctgctggttagagtgatgacacccgatctgagagagcggctggaaaacctgagaaagaagcctgaaaatatcccccagcccatcagcaatacatctagagccaacctgaataagctgctgaccgattacaccgaaatgaagaaggcgatcctgcatgtgtactgggaagagttccagaaggaccctgtgggcctgatgagccgggtggcccagcctgccagcaagaagatcgatcagaacaagctgaaacctgagatggacgagaagggcaacctgaccaccgccggctttgcctgctctcagtgtggccagcccctgttcgtgtacaagctggagcaggtgtctgagaagggcaaggcttacaccaactacttcggacggtgcaatgtggccgagcacgaaaagctgatcctgctggcccagctgaagcccgagaaggatagcgacgaagccgtgacatatagcctgggaaagtttgggcagagggccctggatttctacagcattcatgtgaccaaggagtccacccaccccgtgaagcccctggcccagatcgccggaaacagatacgcctccggacctgtgggaaaggccctgagcgacgcatgtatgggcacaatcgcctccttcctgtctaagtaccaggacatcatcatcgaacaccagaaggtggtgaagggcaaccagaagagactggagagcctgcgggagctggccggcaaggaaaacctggaataccctagcgtgaccctgccacctcagcctcacaccaaggagggcgttgatgcctacaacgaagtgatcgcccgggtgcgaatgtgggtgaacctgaacctgtggcagaagctgaagctaagcagagatgatgccaagcctctgctgagactgaagggattcccttcctttcctctggtcgagagacaggccaacgaagtggactggtgggacatggtgtgtaacgtgaagaagctgatcaacgagaaaaaggaggatggcaaggtgttttggcagaatctggctggctacaagagacaggaagccctgagaccatacctgagcagcgaggaagatcggaagaagggaaagaaattcgctcggtaccagctgggcgacctgctgctgcacctggaaaagaagcacggcgaggactggggaaaggtgtacgacgaggcctgggagcggattgacaagaaagtggaaggcctgagcaagcacatcaagctggaagaggaacggagaagcgaggacgcccagagcaaggccgccctgaccgactggctgcgggctaaggccagcttcgtgatcgagggcctgaaggaggccgacaaggacgagttctgcagatgcgagctgaagctgcagaagtggtacggggacctgcggggaaagcccttcgccatcgaagccgagaacagcatcctggacatcagcggcttcagcaagcagtacaactgtgccttcatctggcagaaggacggcgtgaagaagctgaacctgtacctgatcatcaactacttcaagggcggcaagctgcggttcaagaagatcaaacctgaagccttcgaagccaacagattctacaccgtgatcaacaaaaagagcggcgagatcgtgcccatggaggtgaacttcaacttcgacgaccccaacctgatcatcctgcctctggcctttggcaagagacagggcagagaattcatctggaacgacctgctgtccctggaaaccggcagcctgaagctggccaacggaagagtgatcgagaagacactgtacaacagaagaacccggcaggatgagcctgccctgttcgtggccctgaccttcgagcggcgggaggtcctggactcctccaatatcaaaccaatgaacctgatcggcgtggcaagaggcgaaaacatccccgccgtgatcgccctgaccgaccccgagggctgcccactgagccggtttaaggatagcctgggaaacccaacccacatcctgagaatcggcgagagctataaggagaagcagcggaccatccaggccaagaaggaggtggagcagcggagagccggcggctacagccggaagtacgccagcaaagccaagaatctggcagacgatatggtgagaaacaccgctagagatctgctgtactacgccgtgacccaggatgccatgctgatcttcgccaacctgagccggggcttcggccggcagggcaagcggaccttcatggccgagagacagtacacacggatggaggactggctgaccgccaagctggcctacgagggcctgagcaagacctacctgtccaagacactggcccagtacacctccaagacatgcagcaactgtgggtttaccatcaccagcgccgactacgacagggtgctggagaagctgaagaagacagcaacaggctggatgaccacaattaacggcaaggagctgaaggtggagggccagattacctactacaacagatacaagagacagaacgtagtcaaggacctgtccgtcgagctggatagactgagcgaagaatctgtgaacaacgacatctcctcctggacaaagggcagaagcggagaagctctgagcctcctgaagaaaagattctcccatagacccgtgcaggagaagttcgtgtgcctgaactgcggcttcgagacacacgcagccgagcaagccgccctgaacatcgccagatcctggctgttcctgcggagccaggagtacaagaaataccagacaaacaagacaaccggcaacaccgataagagagccttcgtcgagacctggcagtccttttaccggaagaagcttaaggaggtgtggaaacctgccgtgcggtctggcggatctggcggaggctccaccagccccaagaaaaagagaaaagtctaagctgccttctgcggggcttgccttctggccatgcccttcttctctcccttgcacctgtacctcttggtctttgaataaagcctgagtaggaaggctagcaaaaaaaaaaaaaaaaaaaaaaaaaaaaaaaaaaaaaaaaaaaaaaaaaaaaaaaaaaaaaaaaaaaaaaaaaaaaaaaagcccagccggctccccaacctctaccgaggagggcacctctgagtccgccacccccgagagcggccctggcacctccaccgagcccagcgagggcagcgcacccggcagccctgccggcagccccacctccacagaggagggaaccagcaccgagcccagcgaaggcagcgccccaggcaccagcaccgagcctagtgagcaggagattaaacggatcaacaagatcagaagaagacttgtgaaagacagcaacaccaagaaggccggcaagacaggccccatgaaaaccctgctggttagagtgatgacacccgatctgagagagcggctggaaaacctgagaaagaagcctgaaaatatcccccagcccatcagcaatacatctagagccaacctgaataagctgctgaccgattacaccgaaatgaagaaggcgatcctgcatgtgtactgggaagagttccagaaggaccctgtgggcctgatgagccgggtggcccagcctgccagcaagaagatcgatcagaacaagctgaaacctgagatggacgagaagggcaacctgaccaccgccggctttgcctgctctcagtgtggccagcccctgttcgtgtacaagctggagcaggtgtctgagaagggcaaggcttacaccaactacttcggacggtgcaatgtggccgagcacgaaaagctgatcctgctggcccagctgaagcccgagaaggatagcgacgaagccgtgacatatagcctgggaaagtttgggcagagggccctggatttctacagcattcatgtgaccaaggagtccacccaccccgtgaagcccctggcccagatcgccggaaacagatacgcctccggacctgtgggaaaggccctgagcgacgcatgtatgggcacaatcgcctccttcctgtctaagtaccaggacatcatcatcgaacaccagaaggtggtgaagggcaaccagaagagactggagagcctgcgggagctggccggcaaggaaaacctggaataccctagcgtgaccctgccacctcagcctcacaccaaggagggcgttgatgcctacaacgaagtgatcgcccgggtgcgaatgtgggtgaacctgaacctgtggcagaagctgaagctaagcagagatgatgccaagcctctgctgagactgaagggattcccttcctttcctctggtcgagagacaggccaacgaagtggactggtgggacatggtgtgtaacgtgaagaagctgatcaacgagaaaaaggaggatggcaaggtgttttggcagaatctggctggctacaagagacaggaagccctgagaccatacctgagcagcgaggaagatcggaagaagggaaagaaattcgctcggtaccagctgggcgacctgctgctgcacctggaaaagaagcacggcgaggactggggaaaggtgtacgacgaggcctgggagcggattgacaagaaagtggaaggcctgagcaagcacatcaagctggaagaggaacggagaagcgaggacgcccagagcaaggccgccctgaccgactggctgcgggctaaggccagcttcgtgatcgagggcctgaaggaggccgacaaggacgagttctgcagatgcgagctgaagctgcagaagtggtacggggacctgcggggaaagcccttcgccatcgaagccgagaacagcatcctggacatcagcggcttcagcaagcagtacaactgtgccttcatctggcagaaggacggcgtgaagaagctgaacctgtacctgatcatcaactacttcaagggcggcaagctgcggttcaagaagatcaaacctgaagccttcgaagccaacagattctacaccgtgatcaacaaaaagagcggcgagatcgtgcccatggaggtgaacttcaacttcgacgaccccaacctgatcatcctgcctctggcctttggcaagagacagggcagagaattcatctggaacgacctgctgtccctggaaaccggcagcctgaagctggccaacggaagagtgatcgagaagacactgtacaacagaagaacccggcaggatgagcctgccctgttcgtggccctgaccttcgagcggcgggaggtcctggactcctccaatatcaaaccaatgaacctgatcggcgtggcaagaggcgaaaacatccccgccgtgatcgccctgaccgaccccgagggctgcccactgagccggtttaaggatagcctgggaaacccaacccacatcctgagaatcggcgagagctataaggagaagcagcggaccatccaggccaagaaggaggtggagcagcggagagccggcggctacagccggaagtacgccagcaaagccaagaatctggcagacgatatggtgagaaacaccgctagagatctgctgtactacgccgtgacccaggatgccatgctgatcttcgccaacctgagccggggcttcggccggcagggcaagcggaccttcatggccgagagacagtacacacggatggaggactggctgaccgccaagctggcctacgagggcctgagcaagacctacctgtccaagacactggcccagtacacctccaagacatgcagcaactgtgggtttaccatcaccagcgccgactacgacagggtgctggagaagctgaagaagacagcaacaggctggatgaccacaattaacggcaaggagctgaaggtggagggccagattacctactacaacagatacaagagacagaacgtagtcaaggacctgtccgtcgagctggatagactgagcgaagaatctgtgaacaacgacatctcctcctggacaaagggcagaagcggagaagctctgagcctcctgaagaaaagattctcccatagacccgtgcaggagaagttcgtgtgcctgaactgcggcttcgagacacacgcagccgagcaagccgccctgaacatcgccagatcctggctgttcctgcggagccaggagtacaagaaataccagacaaacaagacaaccggcaacaccgataagagagccttcgtcgagacctggcagtccttttaccggaagaagcttaaggaggtgtggaaacctgccgtgcggtctggcggatctggcggaggctccaccagccccaagaaaaagagaaaagtctaagctgccttctgcggggcttgccttctggccatgcccttcttctctcccttgcacctgtacctcttggtctttgaataaagcctgagtaggaaggctagcaaaaaaaaaaaaaaaaaaaaaaaaaaaaaaaaaaaaaaaaaaaaaaaaaaaaaaaaaaaaaaaaaaaaaaaaaaaaaaaa

SEQ ID NO: 9321 - RNA, 8787 nt, synthetic construct
  source 1..8787: mol_type = other RNA
aggaaataagagagaaaagaagagtaagaagaaatataagagccaccatggcccctaagaagaagcgtaaagtgagccggatgaaccacgaccaggagttcgacccccctaaggtgtaccctcccgtccccgccgagaagagaaagcccatccgggtcctgagcctgttcgatggcatcgccaccggtctgctggtgctgaaggacctgggcatccaggtggataggtacattgcctccgaggtgtgcgaggactccatcaccgtgggaatggtgcgtcatcagggcaagatcatgtacgtgggcgacgtgcggagcgtgacacagaagcatatccaggagtggggccctttcgacctggtgatcggcggcagcccttgcaatgacctgagcatcgtgaacccagcccggaagggcctgtacgagggaaccggcagactgttcttcgagttttacagactgctgcacgacgcccggcctaaggaaggcgacgaccggcccttcttttggctgttcgagaatgtggtggccatgggagtcagcgacaagcgggatattagccggttcctggagagcaaccccgtgatgatcgatgccaaggaagtgagcgccgcccaccgggccagatacttctggggcaatctgcctggcatgaacagacccctggccagcaccgtgaacgacaagctggagctgcaggagtgcctggagcacggccggatcgccaagttcagcaaggtgagaaccatcaccacccgaagcaacagcatcaaacaaggcaaggaccagcactttcctgtgttcatgaacgagaaggaggacatcctgtggtgtaccgagatggagagagtgttcgggttcccagtccactacacagatgtcagcaacatgtctagactggccagacagagactgctgggaagaagctggtccgtccctgtgatcagacacctgttcgcccctctgaaggagtacttcgcctgcgtgagcagcggcaacagcaacgccaacagccggggccccagcttctctagcggcctggtgccactgtccctgagagggagccacatgggccccatggagatctacaaaaccgtgagcgcctggaagcggcagcctgtgcgcgtgctgagcctgtttcggaatatcgataaagtcctgaaaagcctgggattcctggagagcggctctggctccggcggtggcaccctgaagtacgtggaggatgtgacaaacgtggtcagacgggatgtggagaagtggggccccttcgatctggtgtacggcagcacccaacccctgggcagctcttgtgaccggtgccctggctggtacatgtttcagttccaccggatcctgcagtacgccctgccgagacaggagtcccagcggccattcttttggattttcatggacaacttgctgctgaccgaggatgaccaggaaactaccactcggttcctgcagaccgaagccgtgaccctgcaggacgtgagaggccgggactaccagaacgccatgcgggtgtggtccaacatccctggactgaaaagcaagcacgcacctctgacccctaaagaagaggagtacctgcaggcccaggtgcggagcagaagcaagctggacgcccctaaggtggatctgctggtgaagaattgcctcctgcccctgagagagtacttcaagtatttcagccagaatagtctgcccctgggaggcagcggcggcggcgaggaggtgcccgtggtgttcgaggacgtggccgtgtacttcaccagggaggagtggggcaccctggacaagaggcagaaggagctgtacagggacgtgatgaggatgaactacgagctgctggccagcctgggccccgccgccgccaagcccgacctgatcagcaagctggagaggagggccgccccctggatcaaggaccccaacggccccaagtggggcaagggcaggccccccggcaagggcggcccaagcagcggcgcccctcctcccagcggcggcaggcggcccaagcagcggcgcccctcctcccagcggcggcagcccagccggctccccaacctctaccgaggagggcacctctgagtccgccacccccgagagcggccctggcacctccaccgagcccagcgagggcagcgcacccggcagccctgccggcagccccacctccacagaggagggaaccagcaccgagcccagcgaaggcagcgccccaggcaccagcaccgagcctagtgagcaggagattaaacggatcaacaagatcagaagaagacttgtgaaagacagcaacaccaagaaggccggcaagacaggccccatgaaaaccctgctggttagagtgatgacacccgatctgagagagcggctggaaaacctgagaaagaagcctgaaaatatcccccagcccatcagcaatacatctagagccaacctgaataagctgctgaccgattacaccgaaatgaagaaggcgatcctgcatgtgtactgggaagagttccagaaggaccctgtgggcctgatgagccgggtggcccagcctgccagcaagaagatcgatcagaacaagctgaaacctgagatggacgagaagggcaacctgaccaccgccggctttgcctgctctcagtgtggccagcccctgttcgtgtacaagctggagcaggtgtctgagaagggcaaggcttacaccaactacttcggacggtgcaatgtggccgagcacgaaaagctgatcctgctggcccagctgaagcccgagaaggatagcgacgaagccgtgacatatagcctgggaaagtttgggcagagggccctggatttctacagcattcatgtgaccaaggagtccacccaccccgtgaagcccctggcccagatcgccggaaacagatacgcctccggacctgtgggaaaggccctgagcgacgcatgtatgggcacaatcgcctccttcctgtctaagtaccaggacatcatcatcgaacaccagaaggtggtgaagggcaaccagaagagactggagagcctgcgggagctggccggcaaggaaaacctggaataccctagcgtgaccctgccacctcagcctcacaccaaggagggcgttgatgcctacaacgaagtgatcgcccgggtgcgaatgtgggtgaacctgaacctgtggcagaagctgaagctaagcagagatgatgccaagcctctgctgagactgaagggattcccttcctttcctctggtcgagagacaggccaacgaagtggactggtgggacatggtgtgtaacgtgaagaagctgatcaacgagaaaaaggaggatggcaaggtgttttggcagaatctggctggctacaagagacaggaagccctgagaccatacctgagcagcgaggaagatcggaagaagggaaagaaattcgctcggtaccagctgggcgacctgctgctgcacctggaaaagaagcacggcgaggactggggaaaggtgtacgacgaggcctgggagcggattgacaagaaagtggaaggcctgagcaagcacatcaagctggaagaggaacggagaagcgaggacgcccagagcaaggccgccctgaccgactggctgcgggctaaggccagcttcgtgatcgagggcctgaaggaggccgacaaggacgagttctgcagatgcgagctgaagctgcagaagtggtacggggacctgcggggaaagcccttcgccatcgaagccgagaacagcatcctggacatcagcggcttcagcaagcagtacaactgtgccttcatctggcagaaggacggcgtgaagaagctgaacctgtacctgatcatcaactacttcaagggcggcaagctgcggttcaagaagatcaaacctgaagccttcgaagccaacagattctacaccgtgatcaacaaaaagagcggcgagatcgtgcccatggaggtgaacttcaacttcgacgaccccaacctgatcatcctgcctctggcctttggcaagagacagggcagagaattcatctggaacgacctgctgtccctggaaaccggcagcctgaagctggccaacggaagagtgatcgagaagacactgtacaacagaagaacccggcaggatgagcctgccctgttcgtggccctgaccttcgagcggcgggaggtcctggactcctccaatatcaaaccaatgaacctgatcggcgtggcaagaggcgaaaacatccccgccgtgatcgccctgaccgaccccgagggctgcccactgagccggtttaaggatagcctgggaaacccaacccacatcctgagaatcggcgagagctataaggagaagcagcggaccatccaggccaagaaggaggtggagcagcggagagccggcggctacagccggaagtacgccagcaaagccaagaatctggcagacgatatggtgagaaacaccgctagagatctgctgtactacgccgtgacccaggatgccatgctgatcttcgccaacctgagccggggcttcggccggcagggcaagcggaccttcatggccgagagacagtacacacggatggaggactggctgaccgccaagctggcctacgagggcctgagcaagacctacctgtccaagacactggcccagtacacctccaagacatgcagcaactgtgggtttaccatcaccagcgccgactacgacagggtgctggagaagctgaagaagacagcaacaggctggatgaccacaattaacggcaaggagctgaaggtggagggccagattacctactacaacagatacaagagacagaacgtagtcaaggacctgtccgtcgagctggatagactgagcgaagaatctgtgaacaacgacatctcctcctggacaaagggcagaagcggagaagctctgagcctcctgaagaaaagattctcccatagacccgtgcaggagaagttcgtgtgcctgaactgcggcttcgagacacacgcagccgagcaagccgccctgaacatcgccagatcctggctgttcctgcggagccaggagtacaagaaataccagacaaacaagacaaccggcaacaccgataagagagccttcgtcgagacctggcagtccttttaccggaagaagcttaaggaggtgtggaaacctgccgtgcggtctggcggatctggcggaggctccaccagccccaagaaaaagagaaaagtctaagctgccttctgcggggcttgccttctggccatgcccttcttctctcccttgcacctgtacctcttggtctttgaataaagcctgagtaggaaggctagcaaaaaaaaaaaaaaaaaaaaaaaaaaaaaaaaaaaaaaaaaaaaaaaaaaaaaaaaaaaaaaaaaaaaaaaaaaaaaaaagcccagccggctccccaacctctaccgaggagggcacctctgagtccgccacccccgagagcggccctggcacctccaccgagcccagcgagggcagcgcacccggcagccctgccggcagccccacctccacagaggagggaaccagcaccgagcccagcgaaggcagcgccccaggcaccagcaccgagcctagtgagcaggagattaaacggatcaacaagatcagaagaagacttgtgaaagacagcaacaccaagaaggccggcaagacaggccccatgaaaaccctgctggttagagtgatgacacccgatctgagagagcggctggaaaacctgagaaagaagcctgaaaatatcccccagcccatcagcaatacatctagagccaacctgaataagctgctgaccgattacaccgaaatgaagaaggcgatcctgcatgtgtactgggaagagttccagaaggaccctgtgggcctgatgagccgggtggcccagcctgccagcaagaagatcgatcagaacaagctgaaacctgagatggacgagaagggcaacctgaccaccgccggctttgcctgctctcagtgtggccagcccctgttcgtgtacaagctggagcaggtgtctgagaagggcaaggcttacaccaactacttcggacggtgcaatgtggccgagcacgaaaagctgatcctgctggcccagctgaagcccgagaaggatagcgacgaagccgtgacatatagcctgggaaagtttgggcagagggccctggatttctacagcattcatgtgaccaaggagtccacccaccccgtgaagcccctggcccagatcgccggaaacagatacgcctccggacctgtgggaaaggccctgagcgacgcatgtatgggcacaatcgcctccttcctgtctaagtaccaggacatcatcatcgaacaccagaaggtggtgaagggcaaccagaagagactggagagcctgcgggagctggccggcaaggaaaacctggaataccctagcgtgaccctgccacctcagcctcacaccaaggagggcgttgatgcctacaacgaagtgatcgcccgggtgcgaatgtgggtgaacctgaacctgtggcagaagctgaagctaagcagagatgatgccaagcctctgctgagactgaagggattcccttcctttcctctggtcgagagacaggccaacgaagtggactggtgggacatggtgtgtaacgtgaagaagctgatcaacgagaaaaaggaggatggcaaggtgttttggcagaatctggctggctacaagagacaggaagccctgagaccatacctgagcagcgaggaagatcggaagaagggaaagaaattcgctcggtaccagctgggcgacctgctgctgcacctggaaaagaagcacggcgaggactggggaaaggtgtacgacgaggcctgggagcggattgacaagaaagtggaaggcctgagcaagcacatcaagctggaagaggaacggagaagcgaggacgcccagagcaaggccgccctgaccgactggctgcgggctaaggccagcttcgtgatcgagggcctgaaggaggccgacaaggacgagttctgcagatgcgagctgaagctgcagaagtggtacggggacctgcggggaaagcccttcgccatcgaagccgagaacagcatcctggacatcagcggcttcagcaagcagtacaactgtgccttcatctggcagaaggacggcgtgaagaagctgaacctgtacctgatcatcaactacttcaagggcggcaagctgcggttcaagaagatcaaacctgaagccttcgaagccaacagattctacaccgtgatcaacaaaaagagcggcgagatcgtgcccatggaggtgaacttcaacttcgacgaccccaacctgatcatcctgcctctggcctttggcaagagacagggcagagaattcatctggaacgacctgctgtccctggaaaccggcagcctgaagctggccaacggaagagtgatcgagaagacactgtacaacagaagaacccggcaggatgagcctgccctgttcgtggccctgaccttcgagcggcgggaggtcctggactcctccaatatcaaaccaatgaacctgatcggcgtggcaagaggcgaaaacatccccgccgtgatcgccctgaccgaccccgagggctgcccactgagccggtttaaggatagcctgggaaacccaacccacatcctgagaatcggcgagagctataaggagaagcagcggaccatccaggccaagaaggaggtggagcagcggagagccggcggctacagccggaagtacgccagcaaagccaagaatctggcagacgatatggtgagaaacaccgctagagatctgctgtactacgccgtgacccaggatgccatgctgatcttcgccaacctgagccggggcttcggccggcagggcaagcggaccttcatggccgagagacagtacacacggatggaggactggctgaccgccaagctggcctacgagggcctgagcaagacctacctgtccaagacactggcccagtacacctccaagacatgcagcaactgtgggtttaccatcaccagcgccgactacgacagggtgctggagaagctgaagaagacagcaacaggctggatgaccacaattaacggcaaggagctgaaggtggagggccagattacctactacaacagatacaagagacagaacgtagtcaaggacctgtccgtcgagctggatagactgagcgaagaatctgtgaacaacgacatctcctcctggacaaagggcagaagcggagaagctctgagcctcctgaagaaaagattctcccatagacccgtgcaggagaagttcgtgtgcctgaactgcggcttcgagacacacgcagccgagcaagccgccctgaacatcgccagatcctggctgttcctgcggagccaggagtacaagaaataccagacaaacaagacaaccggcaacaccgataagagagccttcgtcgagacctggcagtccttttaccggaagaagcttaaggaggtgtggaaacctgccgtgcggtctggcggatctggcggaggctccaccagccccaagaaaaagagaaaagtctaagctgccttctgcggggcttgccttctggccatgcccttcttctctcccttgcacctgtacctcttggtctttgaataaagcctgagtaggaaggctagcaaaaaaaaaaaaaaaaaaaaaaaaaaaaaaaaaaaaaaaaaaaaaaaaaaaaaaaaaaaaaaaaaaaaaaaaaaaaaaaa

SEQ ID NO: 9322 - RNA, 8787 nt, synthetic construct
  source 1..8787: mol_type = other RNA
aggaaataagagagaaaagaagagtaagaagaaatataagagccaccatggcccctaagaagaagcgtaaagtgagccggatgaaccacgaccaggagttcgacccccctaaggtgtaccctcccgtccccgccgagaagagaaagcccatccgggtcctgagcctgttcgatggcatcgccaccggtctgctggtgctgaaggacctgggcatccaggtggataggtacattgcctccgaggtgtgcgaggactccatcaccgtgggaatggtgcgtcatcagggcaagatcatgtacgtgggcgacgtgcggagcgtgacacagaagcatatccaggagtggggccctttcgacctggtgatcggcggcagcccttgcaatgacctgagcatcgtgaacccagcccggaagggcctgtacgagggaaccggcagactgttcttcgagttttacagactgctgcacgacgcccggcctaaggaaggcgacgaccggcccttcttttggctgttcgagaatgtggtggccatgggagtcagcgacaagcgggatattagccggttcctggagagcaaccccgtgatgatcgatgccaaggaagtgagcgccgcccaccgggccagatacttctggggcaatctgcctggcatgaacagacccctggccagcaccgtgaacgacaagctggagctgcaggagtgcctggagcacggccggatcgccaagttcagcaaggtgagaaccatcaccacccgaagcaacagcatcaaacaaggcaaggaccagcactttcctgtgttcatgaacgagaaggaggacatcctgtggtgtaccgagatggagagagtgttcgggttcccagtccactacacagatgtcagcaacatgtctagactggccagacagagactgctgggaagaagctggtccgtccctgtgatcagacacctgttcgcccctctgaaggagtacttcgcctgcgtgagcagcggcaacagcaacgccaacagccggggccccagcttctctagcggcctggtgccactgtccctgagagggagccacatgggccccatggagatctacaaaaccgtgagcgcctggaagcggcagcctgtgcgcgtgctgagcctgtttcggaatatcgataaagtcctgaaaagcctgggattcctggagagcggctctggctccggcggtggcaccctgaagtacgtggaggatgtgacaaacgtggtcagacgggatgtggagaagtggggccccttcgatctggtgtacggcagcacccaacccctgggcagctcttgtgaccggtgccctggctggtacatgtttcagttccaccggatcctgcagtacgccctgccgagacaggagtcccagcggccattcttttggattttcatggacaacttgctgctgaccgaggatgaccaggaaactaccactcggttcctgcagaccgaagccgtgaccctgcaggacgtgagaggccgggactaccagaacgccatgcgggtgtggtccaacatccctggactgaaaagcaagcacgcacctctgacccctaaagaagaggagtacctgcaggcccaggtgcggagcagaagcaagctggacgcccctaaggtggatctgctggtgaagaattgcctcctgcccctgagagagtacttcaagtatttcagccagaatagtctgcccctgggaggcagcggcggcggcccccccgagagcgtgaccttcgaggacgtggccgtgtacttcacccagaaggagtgggccagcctgatgcccgcccagaaggccctgtacagggacgtgatgctggagaactacgaggccgtggccttcctggcccccgccaccagcaagcccgccctgatcagccagctggagcagggcgtggagcccagcttcagccaggcccagggcgacctgagcatgagggacaggggcgccggcctgggcggcccaagcagcggcgcccctcctcccagcggcggcaggcggcccaagcagcggcgcccctcctcccagcggcggcagcccagccggctccccaacctctaccgaggagggcacctctgagtccgccacccccgagagcggccctggcacctccaccgagcccagcgagggcagcgcacccggcagccctgccggcagccccacctccacagaggagggaaccagcaccgagcccagcgaaggcagcgccccaggcaccagcaccgagcctagtgagcaggagattaaacggatcaacaagatcagaagaagacttgtgaaagacagcaacaccaagaaggccggcaagacaggccccatgaaaaccctgctggttagagtgatgacacccgatctgagagagcggctggaaaacctgagaaagaagcctgaaaatatcccccagcccatcagcaatacatctagagccaacctgaataagctgctgaccgattacaccgaaatgaagaaggcgatcctgcatgtgtactgggaagagttccagaaggaccctgtgggcctgatgagccgggtggcccagcctgccagcaagaagatcgatcagaacaagctgaaacctgagatggacgagaagggcaacctgaccaccgccggctttgcctgctctcagtgtggccagcccctgttcgtgtacaagctggagcaggtgtctgagaagggcaaggcttacaccaactacttcggacggtgcaatgtggccgagcacgaaaagctgatcctgctggcccagctgaagcccgagaaggatagcgacgaagccgtgacatatagcctgggaaagtttgggcagagggccctggatttctacagcattcatgtgaccaaggagtccacccaccccgtgaagcccctggcccagatcgccggaaacagatacgcctccggacctgtgggaaaggccctgagcgacgcatgtatgggcacaatcgcctccttcctgtctaagtaccaggacatcatcatcgaacaccagaaggtggtgaagggcaaccagaagagactggagagcctgcgggagctggccggcaaggaaaacctggaataccctagcgtgaccctgccacctcagcctcacaccaaggagggcgttgatgcctacaacgaagtgatcgcccgggtgcgaatgtgggtgaacctgaacctgtggcagaagctgaagctaagcagagatgatgccaagcctctgctgagactgaagggattcccttcctttcctctggtcgagagacaggccaacgaagtggactggtgggacatggtgtgtaacgtgaagaagctgatcaacgagaaaaaggaggatggcaaggtgttttggcagaatctggctggctacaagagacaggaagccctgagaccatacctgagcagcgaggaagatcggaagaagggaaagaaattcgctcggtaccagctgggcgacctgctgctgcacctggaaaagaagcacggcgaggactggggaaaggtgtacgacgaggcctgggagcggattgacaagaaagtggaaggcctgagcaagcacatcaagctggaagaggaacggagaagcgaggacgcccagagcaaggccgccctgaccgactggctgcgggctaaggccagcttcgtgatcgagggcctgaaggaggccgacaaggacgagttctgcagatgcgagctgaagctgcagaagtggtacggggacctgcggggaaagcccttcgccatcgaagccgagaacagcatcctggacatcagcggcttcagcaagcagtacaactgtgccttcatctggcagaaggacggcgtgaagaagctgaacctgtacctgatcatcaactacttcaagggcggcaagctgcggttcaagaagatcaaacctgaagccttcgaagccaacagattctacaccgtgatcaacaaaaagagcggcgagatcgtgcccatggaggtgaacttcaacttcgacgaccccaacctgatcatcctgcctctggcctttggcaagagacagggcagagaattcatctggaacgacctgctgtccctggaaaccggcagcctgaagctggccaacggaagagtgatcgagaagacactgtacaacagaagaacccggcaggatgagcctgccctgttcgtggccctgaccttcgagcggcgggaggtcctggactcctccaatatcaaaccaatgaacctgatcggcgtggcaagaggcgaaaacatccccgccgtgatcgccctgaccgaccccgagggctgcccactgagccggtttaaggatagcctgggaaacccaacccacatcctgagaatcggcgagagctataaggagaagcagcggaccatccaggccaagaaggaggtggagcagcggagagccggcggctacagccggaagtacgccagcaaagccaagaatctggcagacgatatggtgagaaacaccgctagagatctgctgtactacgccgtgacccaggatgccatgctgatcttcgccaacctgagccggggcttcggccggcagggcaagcggaccttcatggccgagagacagtacacacggatggaggactggctgaccgccaagctggcctacgagggcctgagcaagacctacctgtccaagacactggcccagtacacctccaagacatgcagcaactgtgggtttaccatcaccagcgccgactacgacagggtgctggagaagctgaagaagacagcaacaggctggatgaccacaattaacggcaaggagctgaaggtggagggccagattacctactacaacagatacaagagacagaacgtagtcaaggacctgtccgtcgagctggatagactgagcgaagaatctgtgaacaacgacatctcctcctggacaaagggcagaagcggagaagctctgagcctcctgaagaaaagattctcccatagacccgtgcaggagaagttcgtgtgcctgaactgcggcttcgagacacacgcagccgagcaagccgccctgaacatcgccagatcctggctgttcctgcggagccaggagtacaagaaataccagacaaacaagacaaccggcaacaccgataagagagccttcgtcgagacctggcagtccttttaccggaagaagcttaaggaggtgtggaaacctgccgtgcggtctggcggatctggcggaggctccaccagccccaagaaaaagagaaaagtctaagctgccttctgcggggcttgccttctggccatgcccttcttctctcccttgcacctgtacctcttggtctttgaataaagcctgagtaggaaggctagcaaaaaaaaaaaaaaaaaaaaaaaaaaaaaaaaaaaaaaaaaaaaaaaaaaaaaaaaaaaaaaaaaaaaaaaaaaaaaaaagcccagccggctccccaacctctaccgaggagggcacctctgagtccgccacccccgagagcggccctggcacctccaccgagcccagcgagggcagcgcacccggcagccctgccggcagccccacctccacagaggagggaaccagcaccgagcccagcgaaggcagcgccccaggcaccagcaccgagcctagtgagcaggagattaaacggatcaacaagatcagaagaagacttgtgaaagacagcaacaccaagaaggccggcaagacaggccccatgaaaaccctgctggttagagtgatgacacccgatctgagagagcggctggaaaacctgagaaagaagcctgaaaatatcccccagcccatcagcaatacatctagagccaacctgaataagctgctgaccgattacaccgaaatgaagaaggcgatcctgcatgtgtactgggaagagttccagaaggaccctgtgggcctgatgagccgggtggcccagcctgccagcaagaagatcgatcagaacaagctgaaacctgagatggacgagaagggcaacctgaccaccgccggctttgcctgctctcagtgtggccagcccctgttcgtgtacaagctggagcaggtgtctgagaagggcaaggcttacaccaactacttcggacggtgcaatgtggccgagcacgaaaagctgatcctgctggcccagctgaagcccgagaaggatagcgacgaagccgtgacatatagcctgggaaagtttgggcagagggccctggatttctacagcattcatgtgaccaaggagtccacccaccccgtgaagcccctggcccagatcgccggaaacagatacgcctccggacctgtgggaaaggccctgagcgacgcatgtatgggcacaatcgcctccttcctgtctaagtaccaggacatcatcatcgaacaccagaaggtggtgaagggcaaccagaagagactggagagcctgcgggagctggccggcaaggaaaacctggaataccctagcgtgaccctgccacctcagcctcacaccaaggagggcgttgatgcctacaacgaagtgatcgcccgggtgcgaatgtgggtgaacctgaacctgtggcagaagctgaagctaagcagagatgatgccaagcctctgctgagactgaagggattcccttcctttcctctggtcgagagacaggccaacgaagtggactggtgggacatggtgtgtaacgtgaagaagctgatcaacgagaaaaaggaggatggcaaggtgttttggcagaatctggctggctacaagagacaggaagccctgagaccatacctgagcagcgaggaagatcggaagaagggaaagaaattcgctcggtaccagctgggcgacctgctgctgcacctggaaaagaagcacggcgaggactggggaaaggtgtacgacgaggcctgggagcggattgacaagaaagtggaaggcctgagcaagcacatcaagctggaagaggaacggagaagcgaggacgcccagagcaaggccgccctgaccgactggctgcgggctaaggccagcttcgtgatcgagggcctgaaggaggccgacaaggacgagttctgcagatgcgagctgaagctgcagaagtggtacggggacctgcggggaaagcccttcgccatcgaagccgagaacagcatcctggacatcagcggcttcagcaagcagtacaactgtgccttcatctggcagaaggacggcgtgaagaagctgaacctgtacctgatcatcaactacttcaagggcggcaagctgcggttcaagaagatcaaacctgaagccttcgaagccaacagattctacaccgtgatcaacaaaaagagcggcgagatcgtgcccatggaggtgaacttcaacttcgacgaccccaacctgatcatcctgcctctggcctttggcaagagacagggcagagaattcatctggaacgacctgctgtccctggaaaccggcagcctgaagctggccaacggaagagtgatcgagaagacactgtacaacagaagaacccggcaggatgagcctgccctgttcgtggccctgaccttcgagcggcgggaggtcctggactcctccaatatcaaaccaatgaacctgatcggcgtggcaagaggcgaaaacatccccgccgtgatcgccctgaccgaccccgagggctgcccactgagccggtttaaggatagcctgggaaacccaacccacatcctgagaatcggcgagagctataaggagaagcagcggaccatccaggccaagaaggaggtggagcagcggagagccggcggctacagccggaagtacgccagcaaagccaagaatctggcagacgatatggtgagaaacaccgctagagatctgctgtactacgccgtgacccaggatgccatgctgatcttcgccaacctgagccggggcttcggccggcagggcaagcggaccttcatggccgagagacagtacacacggatggaggactggctgaccgccaagctggcctacgagggcctgagcaagacctacctgtccaagacactggcccagtacacctccaagacatgcagcaactgtgggtttaccatcaccagcgccgactacgacagggtgctggagaagctgaagaagacagcaacaggctggatgaccacaattaacggcaaggagctgaaggtggagggccagattacctactacaacagatacaagagacagaacgtagtcaaggacctgtccgtcgagctggatagactgagcgaagaatctgtgaacaacgacatctcctcctggacaaagggcagaagcggagaagctctgagcctcctgaagaaaagattctcccatagacccgtgcaggagaagttcgtgtgcctgaactgcggcttcgagacacacgcagccgagcaagccgccctgaacatcgccagatcctggctgttcctgcggagccaggagtacaagaaataccagacaaacaagacaaccggcaacaccgataagagagccttcgtcgagacctggcagtccttttaccggaagaagcttaaggaggtgtggaaacctgccgtgcggtctggcggatctggcggaggctccaccagccccaagaaaaagagaaaagtctaagctgccttctgcggggcttgccttctggccatgcccttcttctctcccttgcacctgtacctcttggtctttgaataaagcctgagtaggaaggctagcaaaaaaaaaaaaaaaaaaaaaaaaaaaaaaaaaaaaaaaaaaaaaaaaaaaaaaaaaaaaaaaaaaaaaaaaaaaaaaaa

SEQ ID NO: 9323 - RNA, 8787 nt, synthetic construct
  source 1..8787: mol_type = other RNA
aggaaataagagagaaaagaagagtaagaagaaatataagagccaccatggcccctaagaagaagcgtaaagtgagccggatgaaccacgaccaggagttcgacccccctaaggtgtaccctcccgtccccgccgagaagagaaagcccatccgggtcctgagcctgttcgatggcatcgccaccggtctgctggtgctgaaggacctgggcatccaggtggataggtacattgcctccgaggtgtgcgaggactccatcaccgtgggaatggtgcgtcatcagggcaagatcatgtacgtgggcgacgtgcggagcgtgacacagaagcatatccaggagtggggccctttcgacctggtgatcggcggcagcccttgcaatgacctgagcatcgtgaacccagcccggaagggcctgtacgagggaaccggcagactgttcttcgagttttacagactgctgcacgacgcccggcctaaggaaggcgacgaccggcccttcttttggctgttcgagaatgtggtggccatgggagtcagcgacaagcgggatattagccggttcctggagagcaaccccgtgatgatcgatgccaaggaagtgagcgccgcccaccgggccagatacttctggggcaatctgcctggcatgaacagacccctggccagcaccgtgaacgacaagctggagctgcaggagtgcctggagcacggccggatcgccaagttcagcaaggtgagaaccatcaccacccgaagcaacagcatcaaacaaggcaaggaccagcactttcctgtgttcatgaacgagaaggaggacatcctgtggtgtaccgagatggagagagtgttcgggttcccagtccactacacagatgtcagcaacatgtctagactggccagacagagactgctgggaagaagctggtccgtccctgtgatcagacacctgttcgcccctctgaaggagtacttcgcctgcgtgagcagcggcaacagcaacgccaacagccggggccccagcttctctagcggcctggtgccactgtccctgagagggagccacatgggccccatggagatctacaaaaccgtgagcgcctggaagcggcagcctgtgcgcgtgctgagcctgtttcggaatatcgataaagtcctgaaaagcctgggattcctggagagcggctctggctccggcggtggcaccctgaagtacgtggaggatgtgacaaacgtggtcagacgggatgtggagaagtggggccccttcgatctggtgtacggcagcacccaacccctgggcagctcttgtgaccggtgccctggctggtacatgtttcagttccaccggatcctgcagtacgccctgccgagacaggagtcccagcggccattcttttggattttcatggacaacttgctgctgaccgaggatgaccaggaaactaccactcggttcctgcagaccgaagccgtgaccctgcaggacgtgagaggccgggactaccagaacgccatgcgggtgtggtccaacatccctggactgaaaagcaagcacgcacctctgacccctaaagaagaggagtacctgcaggcccaggtgcggagcagaagcaagctggacgcccctaaggtggatctgctggtgaagaattgcctcctgcccctgagagagtacttcaagtatttcagccagaatagtctgcccctgggaggcagcggcggcggcttccagggcagcatcagcttcaaggacgtgaccgtgggcttcacccaggaggagtggcagcacctggaccccagccagagggccctgtacagggacgtgatgctggagaactacagcaacctggtgagcgtgggctactgcgtgcacaagcccgaggtgatcagcaggctggagcagggcgaggagccctggaggctggaggaggagttccccagccagagcttccccgtgtggaccgccgacggcggcccaagcagcggcgcccctcctcccagcggcggcaggcggcccaagcagcggcgcccctcctcccagcggcggcagcccagccggctccccaacctctaccgaggagggcacctctgagtccgccacccccgagagcggccctggcacctccaccgagcccagcgagggcagcgcacccggcagccctgccggcagccccacctccacagaggagggaaccagcaccgagcccagcgaaggcagcgccccaggcaccagcaccgagcctagtgagcaggagattaaacggatcaacaagatcagaagaagacttgtgaaagacagcaacaccaagaaggccggcaagacaggccccatgaaaaccctgctggttagagtgatgacacccgatctgagagagcggctggaaaacctgagaaagaagcctgaaaatatcccccagcccatcagcaatacatctagagccaacctgaataagctgctgaccgattacaccgaaatgaagaaggcgatcctgcatgtgtactgggaagagttccagaaggaccctgtgggcctgatgagccgggtggcccagcctgccagcaagaagatcgatcagaacaagctgaaacctgagatggacgagaagggcaacctgaccaccgccggctttgcctgctctcagtgtggccagcccctgttcgtgtacaagctggagcaggtgtctgagaagggcaaggcttacaccaactacttcggacggtgcaatgtggccgagcacgaaaagctgatcctgctggcccagctgaagcccgagaaggatagcgacgaagccgtgacatatagcctgggaaagtttgggcagagggccctggatttctacagcattcatgtgaccaaggagtccacccaccccgtgaagcccctggcccagatcgccggaaacagatacgcctccggacctgtgggaaaggccctgagcgacgcatgtatgggcacaatcgcctccttcctgtctaagtaccaggacatcatcatcgaacaccagaaggtggtgaagggcaaccagaagagactggagagcctgcgggagctggccggcaaggaaaacctggaataccctagcgtgaccctgccacctcagcctcacaccaaggagggcgttgatgcctacaacgaagtgatcgcccgggtgcgaatgtgggtgaacctgaacctgtggcagaagctgaagctaagcagagatgatgccaagcctctgctgagactgaagggattcccttcctttcctctggtcgagagacaggccaacgaagtggactggtgggacatggtgtgtaacgtgaagaagctgatcaacgagaaaaaggaggatggcaaggtgttttggcagaatctggctggctacaagagacaggaagccctgagaccatacctgagcagcgaggaagatcggaagaagggaaagaaattcgctcggtaccagctgggcgacctgctgctgcacctggaaaagaagcacggcgaggactggggaaaggtgtacgacgaggcctgggagcggattgacaagaaagtggaaggcctgagcaagcacatcaagctggaagaggaacggagaagcgaggacgcccagagcaaggccgccctgaccgactggctgcgggctaaggccagcttcgtgatcgagggcctgaaggaggccgacaaggacgagttctgcagatgcgagctgaagctgcagaagtggtacggggacctgcggggaaagcccttcgccatcgaagccgagaacagcatcctggacatcagcggcttcagcaagcagtacaactgtgccttcatctggcagaaggacggcgtgaagaagctgaacctgtacctgatcatcaactacttcaagggcggcaagctgcggttcaagaagatcaaacctgaagccttcgaagccaacagattctacaccgtgatcaacaaaaagagcggcgagatcgtgcccatggaggtgaacttcaacttcgacgaccccaacctgatcatcctgcctctggcctttggcaagagacagggcagagaattcatctggaacgacctgctgtccctggaaaccggcagcctgaagctggccaacggaagagtgatcgagaagacactgtacaacagaagaacccggcaggatgagcctgccctgttcgtggccctgaccttcgagcggcgggaggtcctggactcctccaatatcaaaccaatgaacctgatcggcgtggcaagaggcgaaaacatccccgccgtgatcgccctgaccgaccccgagggctgcccactgagccggtttaaggatagcctgggaaacccaacccacatcctgagaatcggcgagagctataaggagaagcagcggaccatccaggccaagaaggaggtggagcagcggagagccggcggctacagccggaagtacgccagcaaagccaagaatctggcagacgatatggtgagaaacaccgctagagatctgctgtactacgccgtgacccaggatgccatgctgatcttcgccaacctgagccggggcttcggccggcagggcaagcggaccttcatggccgagagacagtacacacggatggaggactggctgaccgccaagctggcctacgagggcctgagcaagacctacctgtccaagacactggcccagtacacctccaagacatgcagcaactgtgggtttaccatcaccagcgccgactacgacagggtgctggagaagctgaagaagacagcaacaggctggatgaccacaattaacggcaaggagctgaaggtggagggccagattacctactacaacagatacaagagacagaacgtagtcaaggacctgtccgtcgagctggatagactgagcgaagaatctgtgaacaacgacatctcctcctggacaaagggcagaagcggagaagctctgagcctcctgaagaaaagattctcccatagacccgtgcaggagaagttcgtgtgcctgaactgcggcttcgagacacacgcagccgagcaagccgccctgaacatcgccagatcctggctgttcctgcggagccaggagtacaagaaataccagacaaacaagacaaccggcaacaccgataagagagccttcgtcgagacctggcagtccttttaccggaagaagcttaaggaggtgtggaaacctgccgtgcggtctggcggatctggcggaggctccaccagccccaagaaaaagagaaaagtctaagctgccttctgcggggcttgccttctggccatgcccttcttctctcccttgcacctgtacctcttggtctttgaataaagcctgagtaggaaggctagcaaaaaaaaaaaaaaaaaaaaaaaaaaaaaaaaaaaaaaaaaaaaaaaaaaaaaaaaaaaaaaaaaaaaaaaaaaaaaaaagcccagccggctccccaacctctaccgaggagggcacctctgagtccgccacccccgagagcggccctggcacctccaccgagcccagcgagggcagcgcacccggcagccctgccggcagccccacctccacagaggagggaaccagcaccgagcccagcgaaggcagcgccccaggcaccagcaccgagcctagtgagcaggagattaaacggatcaacaagatcagaagaagacttgtgaaagacagcaacaccaagaaggccggcaagacaggccccatgaaaaccctgctggttagagtgatgacacccgatctgagagagcggctggaaaacctgagaaagaagcctgaaaatatcccccagcccatcagcaatacatctagagccaacctgaataagctgctgaccgattacaccgaaatgaagaaggcgatcctgcatgtgtactgggaagagttccagaaggaccctgtgggcctgatgagccgggtggcccagcctgccagcaagaagatcgatcagaacaagctgaaacctgagatggacgagaagggcaacctgaccaccgccggctttgcctgctctcagtgtggccagcccctgttcgtgtacaagctggagcaggtgtctgagaagggcaaggcttacaccaactacttcggacggtgcaatgtggccgagcacgaaaagctgatcctgctggcccagctgaagcccgagaaggatagcgacgaagccgtgacatatagcctgggaaagtttgggcagagggccctggatttctacagcattcatgtgaccaaggagtccacccaccccgtgaagcccctggcccagatcgccggaaacagatacgcctccggacctgtgggaaaggccctgagcgacgcatgtatgggcacaatcgcctccttcctgtctaagtaccaggacatcatcatcgaacaccagaaggtggtgaagggcaaccagaagagactggagagcctgcgggagctggccggcaaggaaaacctggaataccctagcgtgaccctgccacctcagcctcacaccaaggagggcgttgatgcctacaacgaagtgatcgcccgggtgcgaatgtgggtgaacctgaacctgtggcagaagctgaagctaagcagagatgatgccaagcctctgctgagactgaagggattcccttcctttcctctggtcgagagacaggccaacgaagtggactggtgggacatggtgtgtaacgtgaagaagctgatcaacgagaaaaaggaggatggcaaggtgttttggcagaatctggctggctacaagagacaggaagccctgagaccatacctgagcagcgaggaagatcggaagaagggaaagaaattcgctcggtaccagctgggcgacctgctgctgcacctggaaaagaagcacggcgaggactggggaaaggtgtacgacgaggcctgggagcggattgacaagaaagtggaaggcctgagcaagcacatcaagctggaagaggaacggagaagcgaggacgcccagagcaaggccgccctgaccgactggctgcgggctaaggccagcttcgtgatcgagggcctgaaggaggccgacaaggacgagttctgcagatgcgagctgaagctgcagaagtggtacggggacctgcggggaaagcccttcgccatcgaagccgagaacagcatcctggacatcagcggcttcagcaagcagtacaactgtgccttcatctggcagaaggacggcgtgaagaagctgaacctgtacctgatcatcaactacttcaagggcggcaagctgcggttcaagaagatcaaacctgaagccttcgaagccaacagattctacaccgtgatcaacaaaaagagcggcgagatcgtgcccatggaggtgaacttcaacttcgacgaccccaacctgatcatcctgcctctggcctttggcaagagacagggcagagaattcatctggaacgacctgctgtccctggaaaccggcagcctgaagctggccaacggaagagtgatcgagaagacactgtacaacagaagaacccggcaggatgagcctgccctgttcgtggccctgaccttcgagcggcgggaggtcctggactcctccaatatcaaaccaatgaacctgatcggcgtggcaagaggcgaaaacatccccgccgtgatcgccctgaccgaccccgagggctgcccactgagccggtttaaggatagcctgggaaacccaacccacatcctgagaatcggcgagagctataaggagaagcagcggaccatccaggccaagaaggaggtggagcagcggagagccggcggctacagccggaagtacgccagcaaagccaagaatctggcagacgatatggtgagaaacaccgctagagatctgctgtactacgccgtgacccaggatgccatgctgatcttcgccaacctgagccggggcttcggccggcagggcaagcggaccttcatggccgagagacagtacacacggatggaggactggctgaccgccaagctggcctacgagggcctgagcaagacctacctgtccaagacactggcccagtacacctccaagacatgcagcaactgtgggtttaccatcaccagcgccgactacgacagggtgctggagaagctgaagaagacagcaacaggctggatgaccacaattaacggcaaggagctgaaggtggagggccagattacctactacaacagatacaagagacagaacgtagtcaaggacctgtccgtcgagctggatagactgagcgaagaatctgtgaacaacgacatctcctcctggacaaagggcagaagcggagaagctctgagcctcctgaagaaaagattctcccatagacccgtgcaggagaagttcgtgtgcctgaactgcggcttcgagacacacgcagccgagcaagccgccctgaacatcgccagatcctggctgttcctgcggagccaggagtacaagaaataccagacaaacaagacaaccggcaacaccgataagagagccttcgtcgagacctggcagtccttttaccggaagaagcttaaggaggtgtggaaacctgccgtgcggtctggcggatctggcggaggctccaccagccccaagaaaaagagaaaagtctaagctgccttctgcggggcttgccttctggccatgcccttcttctctcccttgcacctgtacctcttggtctttgaataaagcctgagtaggaaggctagcaaaaaaaaaaaaaaaaaaaaaaaaaaaaaaaaaaaaaaaaaaaaaaaaaaaaaaaaaaaaaaaaaaaaaaaaaaaaaaaa

SEQ ID NO: 9324 - RNA, 8787 nt, synthetic construct
  source 1..8787: mol_type = other RNA
aggaaataagagagaaaagaagagtaagaagaaatataagagccaccatggcccctaagaagaagcgtaaagtgagccggatgaaccacgaccaggagttcgacccccctaaggtgtaccctcccgtccccgccgagaagagaaagcccatccgggtcctgagcctgttcgatggcatcgccaccggtctgctggtgctgaaggacctgggcatccaggtggataggtacattgcctccgaggtgtgcgaggactccatcaccgtgggaatggtgcgtcatcagggcaagatcatgtacgtgggcgacgtgcggagcgtgacacagaagcatatccaggagtggggccctttcgacctggtgatcggcggcagcccttgcaatgacctgagcatcgtgaacccagcccggaagggcctgtacgagggaaccggcagactgttcttcgagttttacagactgctgcacgacgcccggcctaaggaaggcgacgaccggcccttcttttggctgttcgagaatgtggtggccatgggagtcagcgacaagcgggatattagccggttcctggagagcaaccccgtgatgatcgatgccaaggaagtgagcgccgcccaccgggccagatacttctggggcaatctgcctggcatgaacagacccctggccagcaccgtgaacgacaagctggagctgcaggagtgcctggagcacggccggatcgccaagttcagcaaggtgagaaccatcaccacccgaagcaacagcatcaaacaaggcaaggaccagcactttcctgtgttcatgaacgagaaggaggacatcctgtggtgtaccgagatggagagagtgttcgggttcccagtccactacacagatgtcagcaacatgtctagactggccagacagagactgctgggaagaagctggtccgtccctgtgatcagacacctgttcgcccctctgaaggagtacttcgcctgcgtgagcagcggcaacagcaacgccaacagccggggccccagcttctctagcggcctggtgccactgtccctgagagggagccacatgggccccatggagatctacaaaaccgtgagcgcctggaagcggcagcctgtgcgcgtgctgagcctgtttcggaatatcgataaagtcctgaaaagcctgggattcctggagagcggctctggctccggcggtggcaccctgaagtacgtggaggatgtgacaaacgtggtcagacgggatgtggagaagtggggccccttcgatctggtgtacggcagcacccaacccctgggcagctcttgtgaccggtgccctggctggtacatgtttcagttccaccggatcctgcagtacgccctgccgagacaggagtcccagcggccattcttttggattttcatggacaacttgctgctgaccgaggatgaccaggaaactaccactcggttcctgcagaccgaagccgtgaccctgcaggacgtgagaggccgggactaccagaacgccatgcgggtgtggtccaacatccctggactgaaaagcaagcacgcacctctgacccctaaagaagaggagtacctgcaggcccaggtgcggagcagaagcaagctggacgcccctaaggtggatctgctggtgaagaattgcctcctgcccctgagagagtacttcaagtatttcagccagaatagtctgcccctgggaggcagcggcggcggcagccagggcctggtgaccttcggcgacgtggccgtggacttcagccaggaggagtgggagtggctggactgcgcccagaggaccctgtacaggagcgtgatgctggagaactacaggagcctggtgagcctgggcctgtgcgtgagcaagcccgagatgatcagcagcctggagcagaggaaggagccctggaccgtgaagaggaagtggaccaggggccagtgccccgacagcgaggccgtgggcggcccaagcagcggcgcccctcctcccagcggcggcaggcggcccaagcagcggcgcccctcctcccagcggcggcagcccagccggctccccaacctctaccgaggagggcacctctgagtccgccacccccgagagcggccctggcacctccaccgagcccagcgagggcagcgcacccggcagccctgccggcagccccacctccacagaggagggaaccagcaccgagcccagcgaaggcagcgccccaggcaccagcaccgagcctagtgagcaggagattaaacggatcaacaagatcagaagaagacttgtgaaagacagcaacaccaagaaggccggcaagacaggccccatgaaaaccctgctggttagagtgatgacacccgatctgagagagcggctggaaaacctgagaaagaagcctgaaaatatcccccagcccatcagcaatacatctagagccaacctgaataagctgctgaccgattacaccgaaatgaagaaggcgatcctgcatgtgtactgggaagagttccagaaggaccctgtgggcctgatgagccgggtggcccagcctgccagcaagaagatcgatcagaacaagctgaaacctgagatggacgagaagggcaacctgaccaccgccggctttgcctgctctcagtgtggccagcccctgttcgtgtacaagctggagcaggtgtctgagaagggcaaggcttacaccaactacttcggacggtgcaatgtggccgagcacgaaaagctgatcctgctggcccagctgaagcccgagaaggatagcgacgaagccgtgacatatagcctgggaaagtttgggcagagggccctggatttctacagcattcatgtgaccaaggagtccacccaccccgtgaagcccctggcccagatcgccggaaacagatacgcctccggacctgtgggaaaggccctgagcgacgcatgtatgggcacaatcgcctccttcctgtctaagtaccaggacatcatcatcgaacaccagaaggtggtgaagggcaaccagaagagactggagagcctgcgggagctggccggcaaggaaaacctggaataccctagcgtgaccctgccacctcagcctcacaccaaggagggcgttgatgcctacaacgaagtgatcgcccgggtgcgaatgtgggtgaacctgaacctgtggcagaagctgaagctaagcagagatgatgccaagcctctgctgagactgaagggattcccttcctttcctctggtcgagagacaggccaacgaagtggactggtgggacatggtgtgtaacgtgaagaagctgatcaacgagaaaaaggaggatggcaaggtgttttggcagaatctggctggctacaagagacaggaagccctgagaccatacctgagcagcgaggaagatcggaagaagggaaagaaattcgctcggtaccagctgggcgacctgctgctgcacctggaaaagaagcacggcgaggactggggaaaggtgtacgacgaggcctgggagcggattgacaagaaagtggaaggcctgagcaagcacatcaagctggaagaggaacggagaagcgaggacgcccagagcaaggccgccctgaccgactggctgcgggctaaggccagcttcgtgatcgagggcctgaaggaggccgacaaggacgagttctgcagatgcgagctgaagctgcagaagtggtacggggacctgcggggaaagcccttcgccatcgaagccgagaacagcatcctggacatcagcggcttcagcaagcagtacaactgtgccttcatctggcagaaggacggcgtgaagaagctgaacctgtacctgatcatcaactacttcaagggcggcaagctgcggttcaagaagatcaaacctgaagccttcgaagccaacagattctacaccgtgatcaacaaaaagagcggcgagatcgtgcccatggaggtgaacttcaacttcgacgaccccaacctgatcatcctgcctctggcctttggcaagagacagggcagagaattcatctggaacgacctgctgtccctggaaaccggcagcctgaagctggccaacggaagagtgatcgagaagacactgtacaacagaagaacccggcaggatgagcctgccctgttcgtggccctgaccttcgagcggcgggaggtcctggactcctccaatatcaaaccaatgaacctgatcggcgtggcaagaggcgaaaacatccccgccgtgatcgccctgaccgaccccgagggctgcccactgagccggtttaaggatagcctgggaaacccaacccacatcctgagaatcggcgagagctataaggagaagcagcggaccatccaggccaagaaggaggtggagcagcggagagccggcggctacagccggaagtacgccagcaaagccaagaatctggcagacgatatggtgagaaacaccgctagagatctgctgtactacgccgtgacccaggatgccatgctgatcttcgccaacctgagccggggcttcggccggcagggcaagcggaccttcatggccgagagacagtacacacggatggaggactggctgaccgccaagctggcctacgagggcctgagcaagacctacctgtccaagacactggcccagtacacctccaagacatgcagcaactgtgggtttaccatcaccagcgccgactacgacagggtgctggagaagctgaagaagacagcaacaggctggatgaccacaattaacggcaaggagctgaaggtggagggccagattacctactacaacagatacaagagacagaacgtagtcaaggacctgtccgtcgagctggatagactgagcgaagaatctgtgaacaacgacatctcctcctggacaaagggcagaagcggagaagctctgagcctcctgaagaaaagattctcccatagacccgtgcaggagaagttcgtgtgcctgaactgcggcttcgagacacacgcagccgagcaagccgccctgaacatcgccagatcctggctgttcctgcggagccaggagtacaagaaataccagacaaacaagacaaccggcaacaccgataagagagccttcgtcgagacctggcagtccttttaccggaagaagcttaaggaggtgtggaaacctgccgtgcggtctggcggatctggcggaggctccaccagccccaagaaaaagagaaaagtctaagctgccttctgcggggcttgccttctggccatgcccttcttctctcccttgcacctgtacctcttggtctttgaataaagcctgagtaggaaggctagcaaaaaaaaaaaaaaaaaaaaaaaaaaaaaaaaaaaaaaaaaaaaaaaaaaaaaaaaaaaaaaaaaaaaaaaaaaaaaaaagcccagccggctccccaacctctaccgaggagggcacctctgagtccgccacccccgagagcggccctggcacctccaccgagcccagcgagggcagcgcacccggcagccctgccggcagccccacctccacagaggagggaaccagcaccgagcccagcgaaggcagcgccccaggcaccagcaccgagcctagtgagcaggagattaaacggatcaacaagatcagaagaagacttgtgaaagacagcaacaccaagaaggccggcaagacaggccccatgaaaaccctgctggttagagtgatgacacccgatctgagagagcggctggaaaacctgagaaagaagcctgaaaatatcccccagcccatcagcaatacatctagagccaacctgaataagctgctgaccgattacaccgaaatgaagaaggcgatcctgcatgtgtactgggaagagttccagaaggaccctgtgggcctgatgagccgggtggcccagcctgccagcaagaagatcgatcagaacaagctgaaacctgagatggacgagaagggcaacctgaccaccgccggctttgcctgctctcagtgtggccagcccctgttcgtgtacaagctggagcaggtgtctgagaagggcaaggcttacaccaactacttcggacggtgcaatgtggccgagcacgaaaagctgatcctgctggcccagctgaagcccgagaaggatagcgacgaagccgtgacatatagcctgggaaagtttgggcagagggccctggatttctacagcattcatgtgaccaaggagtccacccaccccgtgaagcccctggcccagatcgccggaaacagatacgcctccggacctgtgggaaaggccctgagcgacgcatgtatgggcacaatcgcctccttcctgtctaagtaccaggacatcatcatcgaacaccagaaggtggtgaagggcaaccagaagagactggagagcctgcgggagctggccggcaaggaaaacctggaataccctagcgtgaccctgccacctcagcctcacaccaaggagggcgttgatgcctacaacgaagtgatcgcccgggtgcgaatgtgggtgaacctgaacctgtggcagaagctgaagctaagcagagatgatgccaagcctctgctgagactgaagggattcccttcctttcctctggtcgagagacaggccaacgaagtggactggtgggacatggtgtgtaacgtgaagaagctgatcaacgagaaaaaggaggatggcaaggtgttttggcagaatctggctggctacaagagacaggaagccctgagaccatacctgagcagcgaggaagatcggaagaagggaaagaaattcgctcggtaccagctgggcgacctgctgctgcacctggaaaagaagcacggcgaggactggggaaaggtgtacgacgaggcctgggagcggattgacaagaaagtggaaggcctgagcaagcacatcaagctggaagaggaacggagaagcgaggacgcccagagcaaggccgccctgaccgactggctgcgggctaaggccagcttcgtgatcgagggcctgaaggaggccgacaaggacgagttctgcagatgcgagctgaagctgcagaagtggtacggggacctgcggggaaagcccttcgccatcgaagccgagaacagcatcctggacatcagcggcttcagcaagcagtacaactgtgccttcatctggcagaaggacggcgtgaagaagctgaacctgtacctgatcatcaactacttcaagggcggcaagctgcggttcaagaagatcaaacctgaagccttcgaagccaacagattctacaccgtgatcaacaaaaagagcggcgagatcgtgcccatggaggtgaacttcaacttcgacgaccccaacctgatcatcctgcctctggcctttggcaagagacagggcagagaattcatctggaacgacctgctgtccctggaaaccggcagcctgaagctggccaacggaagagtgatcgagaagacactgtacaacagaagaacccggcaggatgagcctgccctgttcgtggccctgaccttcgagcggcgggaggtcctggactcctccaatatcaaaccaatgaacctgatcggcgtggcaagaggcgaaaacatccccgccgtgatcgccctgaccgaccccgagggctgcccactgagccggtttaaggatagcctgggaaacccaacccacatcctgagaatcggcgagagctataaggagaagcagcggaccatccaggccaagaaggaggtggagcagcggagagccggcggctacagccggaagtacgccagcaaagccaagaatctggcagacgatatggtgagaaacaccgctagagatctgctgtactacgccgtgacccaggatgccatgctgatcttcgccaacctgagccggggcttcggccggcagggcaagcggaccttcatggccgagagacagtacacacggatggaggactggctgaccgccaagctggcctacgagggcctgagcaagacctacctgtccaagacactggcccagtacacctccaagacatgcagcaactgtgggtttaccatcaccagcgccgactacgacagggtgctggagaagctgaagaagacagcaacaggctggatgaccacaattaacggcaaggagctgaaggtggagggccagattacctactacaacagatacaagagacagaacgtagtcaaggacctgtccgtcgagctggatagactgagcgaagaatctgtgaacaacgacatctcctcctggacaaagggcagaagcggagaagctctgagcctcctgaagaaaagattctcccatagacccgtgcaggagaagttcgtgtgcctgaactgcggcttcgagacacacgcagccgagcaagccgccctgaacatcgccagatcctggctgttcctgcggagccaggagtacaagaaataccagacaaacaagacaaccggcaacaccgataagagagccttcgtcgagacctggcagtccttttaccggaagaagcttaaggaggtgtggaaacctgccgtgcggtctggcggatctggcggaggctccaccagccccaagaaaaagagaaaagtctaagctgccttctgcggggcttgccttctggccatgcccttcttctctcccttgcacctgtacctcttggtctttgaataaagcctgagtaggaaggctagcaaaaaaaaaaaaaaaaaaaaaaaaaaaaaaaaaaaaaaaaaaaaaaaaaaaaaaaaaaaaaaaaaaaaaaaaaaaaaaaa

SEQ ID NO: 9325 - RNA, 8787 nt, synthetic construct
  source 1..8787: mol_type = other RNA
aggaaataagagagaaaagaagagtaagaagaaatataagagccaccatggcccctaagaagaagcgtaaagtgagccggatgaaccacgaccaggagttcgacccccctaaggtgtaccctcccgtccccgccgagaagagaaagcccatccgggtcctgagcctgttcgatggcatcgccaccggtctgctggtgctgaaggacctgggcatccaggtggataggtacattgcctccgaggtgtgcgaggactccatcaccgtgggaatggtgcgtcatcagggcaagatcatgtacgtgggcgacgtgcggagcgtgacacagaagcatatccaggagtggggccctttcgacctggtgatcggcggcagcccttgcaatgacctgagcatcgtgaacccagcccggaagggcctgtacgagggaaccggcagactgttcttcgagttttacagactgctgcacgacgcccggcctaaggaaggcgacgaccggcccttcttttggctgttcgagaatgtggtggccatgggagtcagcgacaagcgggatattagccggttcctggagagcaaccccgtgatgatcgatgccaaggaagtgagcgccgcccaccgggccagatacttctggggcaatctgcctggcatgaacagacccctggccagcaccgtgaacgacaagctggagctgcaggagtgcctggagcacggccggatcgccaagttcagcaaggtgagaaccatcaccacccgaagcaacagcatcaaacaaggcaaggaccagcactttcctgtgttcatgaacgagaaggaggacatcctgtggtgtaccgagatggagagagtgttcgggttcccagtccactacacagatgtcagcaacatgtctagactggccagacagagactgctgggaagaagctggtccgtccctgtgatcagacacctgttcgcccctctgaaggagtacttcgcctgcgtgagcagcggcaacagcaacgccaacagccggggccccagcttctctagcggcctggtgccactgtccctgagagggagccacatgggccccatggagatctacaaaaccgtgagcgcctggaagcggcagcctgtgcgcgtgctgagcctgtttcggaatatcgataaagtcctgaaaagcctgggattcctggagagcggctctggctccggcggtggcaccctgaagtacgtggaggatgtgacaaacgtggtcagacgggatgtggagaagtggggccccttcgatctggtgtacggcagcacccaacccctgggcagctcttgtgaccggtgccctggctggtacatgtttcagttccaccggatcctgcagtacgccctgccgagacaggagtcccagcggccattcttttggattttcatggacaacttgctgctgaccgaggatgaccaggaaactaccactcggttcctgcagaccgaagccgtgaccctgcaggacgtgagaggccgggactaccagaacgccatgcgggtgtggtccaacatccctggactgaaaagcaagcacgcacctctgacccctaaagaagaggagtacctgcaggcccaggtgcggagcagaagcaagctggacgcccctaaggtggatctgctggtgaagaattgcctcctgcccctgagagagtacttcaagtatttcagccagaatagtctgcccctgggaggcagcggcggcggcatgatcgagtaccagatccccgtgagcttcaaggacgtggtggtgggcttcacccaggaggagtggcaccagctgagccccgcccagagggccctgtacagggacgtgatgctggagacctacagcaacctggtgagcgtgggctacgagggcaccaagcccgacgtgatcctgaggctggagcaggaggaggccccctggatcggcgaggccgcctgcctgggctgccactgctggggcaagggcggcccaagcagcggcgcccctcctcccagcggcggcaggcggcccaagcagcggcgcccctcctcccagcggcggcagcccagccggctccccaacctctaccgaggagggcacctctgagtccgccacccccgagagcggccctggcacctccaccgagcccagcgagggcagcgcacccggcagccctgccggcagccccacctccacagaggagggaaccagcaccgagcccagcgaaggcagcgccccaggcaccagcaccgagcctagtgagcaggagattaaacggatcaacaagatcagaagaagacttgtgaaagacagcaacaccaagaaggccggcaagacaggccccatgaaaaccctgctggttagagtgatgacacccgatctgagagagcggctggaaaacctgagaaagaagcctgaaaatatcccccagcccatcagcaatacatctagagccaacctgaataagctgctgaccgattacaccgaaatgaagaaggcgatcctgcatgtgtactgggaagagttccagaaggaccctgtgggcctgatgagccgggtggcccagcctgccagcaagaagatcgatcagaacaagctgaaacctgagatggacgagaagggcaacctgaccaccgccggctttgcctgctctcagtgtggccagcccctgttcgtgtacaagctggagcaggtgtctgagaagggcaaggcttacaccaactacttcggacggtgcaatgtggccgagcacgaaaagctgatcctgctggcccagctgaagcccgagaaggatagcgacgaagccgtgacatatagcctgggaaagtttgggcagagggccctggatttctacagcattcatgtgaccaaggagtccacccaccccgtgaagcccctggcccagatcgccggaaacagatacgcctccggacctgtgggaaaggccctgagcgacgcatgtatgggcacaatcgcctccttcctgtctaagtaccaggacatcatcatcgaacaccagaaggtggtgaagggcaaccagaagagactggagagcctgcgggagctggccggcaaggaaaacctggaataccctagcgtgaccctgccacctcagcctcacaccaaggagggcgttgatgcctacaacgaagtgatcgcccgggtgcgaatgtgggtgaacctgaacctgtggcagaagctgaagctaagcagagatgatgccaagcctctgctgagactgaagggattcccttcctttcctctggtcgagagacaggccaacgaagtggactggtgggacatggtgtgtaacgtgaagaagctgatcaacgagaaaaaggaggatggcaaggtgttttggcagaatctggctggctacaagagacaggaagccctgagaccatacctgagcagcgaggaagatcggaagaagggaaagaaattcgctcggtaccagctgggcgacctgctgctgcacctggaaaagaagcacggcgaggactggggaaaggtgtacgacgaggcctgggagcggattgacaagaaagtggaaggcctgagcaagcacatcaagctggaagaggaacggagaagcgaggacgcccagagcaaggccgccctgaccgactggctgcgggctaaggccagcttcgtgatcgagggcctgaaggaggccgacaaggacgagttctgcagatgcgagctgaagctgcagaagtggtacggggacctgcggggaaagcccttcgccatcgaagccgagaacagcatcctggacatcagcggcttcagcaagcagtacaactgtgccttcatctggcagaaggacggcgtgaagaagctgaacctgtacctgatcatcaactacttcaagggcggcaagctgcggttcaagaagatcaaacctgaagccttcgaagccaacagattctacaccgtgatcaacaaaaagagcggcgagatcgtgcccatggaggtgaacttcaacttcgacgaccccaacctgatcatcctgcctctggcctttggcaagagacagggcagagaattcatctggaacgacctgctgtccctggaaaccggcagcctgaagctggccaacggaagagtgatcgagaagacactgtacaacagaagaacccggcaggatgagcctgccctgttcgtggccctgaccttcgagcggcgggaggtcctggactcctccaatatcaaaccaatgaacctgatcggcgtggcaagaggcgaaaacatccccgccgtgatcgccctgaccgaccccgagggctgcccactgagccggtttaaggatagcctgggaaacccaacccacatcctgagaatcggcgagagctataaggagaagcagcggaccatccaggccaagaaggaggtggagcagcggagagccggcggctacagccggaagtacgccagcaaagccaagaatctggcagacgatatggtgagaaacaccgctagagatctgctgtactacgccgtgacccaggatgccatgctgatcttcgccaacctgagccggggcttcggccggcagggcaagcggaccttcatggccgagagacagtacacacggatggaggactggctgaccgccaagctggcctacgagggcctgagcaagacctacctgtccaagacactggcccagtacacctccaagacatgcagcaactgtgggtttaccatcaccagcgccgactacgacagggtgctggagaagctgaagaagacagcaacaggctggatgaccacaattaacggcaaggagctgaaggtggagggccagattacctactacaacagatacaagagacagaacgtagtcaaggacctgtccgtcgagctggatagactgagcgaagaatctgtgaacaacgacatctcctcctggacaaagggcagaagcggagaagctctgagcctcctgaagaaaagattctcccatagacccgtgcaggagaagttcgtgtgcctgaactgcggcttcgagacacacgcagccgagcaagccgccctgaacatcgccagatcctggctgttcctgcggagccaggagtacaagaaataccagacaaacaagacaaccggcaacaccgataagagagccttcgtcgagacctggcagtccttttaccggaagaagcttaaggaggtgtggaaacctgccgtgcggtctggcggatctggcggaggctccaccagccccaagaaaaagagaaaagtctaagctgccttctgcggggcttgccttctggccatgcccttcttctctcccttgcacctgtacctcttggtctttgaataaagcctgagtaggaaggctagcaaaaaaaaaaaaaaaaaaaaaaaaaaaaaaaaaaaaaaaaaaaaaaaaaaaaaaaaaaaaaaaaaaaaaaaaaaaaaaaagcccagccggctccccaacctctaccgaggagggcacctctgagtccgccacccccgagagcggccctggcacctccaccgagcccagcgagggcagcgcacccggcagccctgccggcagccccacctccacagaggagggaaccagcaccgagcccagcgaaggcagcgccccaggcaccagcaccgagcctagtgagcaggagattaaacggatcaacaagatcagaagaagacttgtgaaagacagcaacaccaagaaggccggcaagacaggccccatgaaaaccctgctggttagagtgatgacacccgatctgagagagcggctggaaaacctgagaaagaagcctgaaaatatcccccagcccatcagcaatacatctagagccaacctgaataagctgctgaccgattacaccgaaatgaagaaggcgatcctgcatgtgtactgggaagagttccagaaggaccctgtgggcctgatgagccgggtggcccagcctgccagcaagaagatcgatcagaacaagctgaaacctgagatggacgagaagggcaacctgaccaccgccggctttgcctgctctcagtgtggccagcccctgttcgtgtacaagctggagcaggtgtctgagaagggcaaggcttacaccaactacttcggacggtgcaatgtggccgagcacgaaaagctgatcctgctggcccagctgaagcccgagaaggatagcgacgaagccgtgacatatagcctgggaaagtttgggcagagggccctggatttctacagcattcatgtgaccaaggagtccacccaccccgtgaagcccctggcccagatcgccggaaacagatacgcctccggacctgtgggaaaggccctgagcgacgcatgtatgggcacaatcgcctccttcctgtctaagtaccaggacatcatcatcgaacaccagaaggtggtgaagggcaaccagaagagactggagagcctgcgggagctggccggcaaggaaaacctggaataccctagcgtgaccctgccacctcagcctcacaccaaggagggcgttgatgcctacaacgaagtgatcgcccgggtgcgaatgtgggtgaacctgaacctgtggcagaagctgaagctaagcagagatgatgccaagcctctgctgagactgaagggattcccttcctttcctctggtcgagagacaggccaacgaagtggactggtgggacatggtgtgtaacgtgaagaagctgatcaacgagaaaaaggaggatggcaaggtgttttggcagaatctggctggctacaagagacaggaagccctgagaccatacctgagcagcgaggaagatcggaagaagggaaagaaattcgctcggtaccagctgggcgacctgctgctgcacctggaaaagaagcacggcgaggactggggaaaggtgtacgacgaggcctgggagcggattgacaagaaagtggaaggcctgagcaagcacatcaagctggaagaggaacggagaagcgaggacgcccagagcaaggccgccctgaccgactggctgcgggctaaggccagcttcgtgatcgagggcctgaaggaggccgacaaggacgagttctgcagatgcgagctgaagctgcagaagtggtacggggacctgcggggaaagcccttcgccatcgaagccgagaacagcatcctggacatcagcggcttcagcaagcagtacaactgtgccttcatctggcagaaggacggcgtgaagaagctgaacctgtacctgatcatcaactacttcaagggcggcaagctgcggttcaagaagatcaaacctgaagccttcgaagccaacagattctacaccgtgatcaacaaaaagagcggcgagatcgtgcccatggaggtgaacttcaacttcgacgaccccaacctgatcatcctgcctctggcctttggcaagagacagggcagagaattcatctggaacgacctgctgtccctggaaaccggcagcctgaagctggccaacggaagagtgatcgagaagacactgtacaacagaagaacccggcaggatgagcctgccctgttcgtggccctgaccttcgagcggcgggaggtcctggactcctccaatatcaaaccaatgaacctgatcggcgtggcaagaggcgaaaacatccccgccgtgatcgccctgaccgaccccgagggctgcccactgagccggtttaaggatagcctgggaaacccaacccacatcctgagaatcggcgagagctataaggagaagcagcggaccatccaggccaagaaggaggtggagcagcggagagccggcggctacagccggaagtacgccagcaaagccaagaatctggcagacgatatggtgagaaacaccgctagagatctgctgtactacgccgtgacccaggatgccatgctgatcttcgccaacctgagccggggcttcggccggcagggcaagcggaccttcatggccgagagacagtacacacggatggaggactggctgaccgccaagctggcctacgagggcctgagcaagacctacctgtccaagacactggcccagtacacctccaagacatgcagcaactgtgggtttaccatcaccagcgccgactacgacagggtgctggagaagctgaagaagacagcaacaggctggatgaccacaattaacggcaaggagctgaaggtggagggccagattacctactacaacagatacaagagacagaacgtagtcaaggacctgtccgtcgagctggatagactgagcgaagaatctgtgaacaacgacatctcctcctggacaaagggcagaagcggagaagctctgagcctcctgaagaaaagattctcccatagacccgtgcaggagaagttcgtgtgcctgaactgcggcttcgagacacacgcagccgagcaagccgccctgaacatcgccagatcctggctgttcctgcggagccaggagtacaagaaataccagacaaacaagacaaccggcaacaccgataagagagccttcgtcgagacctggcagtccttttaccggaagaagcttaaggaggtgtggaaacctgccgtgcggtctggcggatctggcggaggctccaccagccccaagaaaaagagaaaagtctaagctgccttctgcggggcttgccttctggccatgcccttcttctctcccttgcacctgtacctcttggtctttgaataaagcctgagtaggaaggctagcaaaaaaaaaaaaaaaaaaaaaaaaaaaaaaaaaaaaaaaaaaaaaaaaaaaaaaaaaaaaaaaaaaaaaaaaaaaaaaaa

SEQ ID NO: 9326 - RNA, 8787 nt, synthetic construct
  source 1..8787: mol_type = other RNA
aggaaataagagagaaaagaagagtaagaagaaatataagagccaccatggcccctaagaagaagcgtaaagtgagccggatgaaccacgaccaggagttcgacccccctaaggtgtaccctcccgtccccgccgagaagagaaagcccatccgggtcctgagcctgttcgatggcatcgccaccggtctgctggtgctgaaggacctgggcatccaggtggataggtacattgcctccgaggtgtgcgaggactccatcaccgtgggaatggtgcgtcatcagggcaagatcatgtacgtgggcgacgtgcggagcgtgacacagaagcatatccaggagtggggccctttcgacctggtgatcggcggcagcccttgcaatgacctgagcatcgtgaacccagcccggaagggcctgtacgagggaaccggcagactgttcttcgagttttacagactgctgcacgacgcccggcctaaggaaggcgacgaccggcccttcttttggctgttcgagaatgtggtggccatgggagtcagcgacaagcgggatattagccggttcctggagagcaaccccgtgatgatcgatgccaaggaagtgagcgccgcccaccgggccagatacttctggggcaatctgcctggcatgaacagacccctggccagcaccgtgaacgacaagctggagctgcaggagtgcctggagcacggccggatcgccaagttcagcaaggtgagaaccatcaccacccgaagcaacagcatcaaacaaggcaaggaccagcactttcctgtgttcatgaacgagaaggaggacatcctgtggtgtaccgagatggagagagtgttcgggttcccagtccactacacagatgtcagcaacatgtctagactggccagacagagactgctgggaagaagctggtccgtccctgtgatcagacacctgttcgcccctctgaaggagtacttcgcctgcgtgagcagcggcaacagcaacgccaacagccggggccccagcttctctagcggcctggtgccactgtccctgagagggagccacatgggccccatggagatctacaaaaccgtgagcgcctggaagcggcagcctgtgcgcgtgctgagcctgtttcggaatatcgataaagtcctgaaaagcctgggattcctggagagcggctctggctccggcggtggcaccctgaagtacgtggaggatgtgacaaacgtggtcagacgggatgtggagaagtggggccccttcgatctggtgtacggcagcacccaacccctgggcagctcttgtgaccggtgccctggctggtacatgtttcagttccaccggatcctgcagtacgccctgccgagacaggagtcccagcggccattcttttggattttcatggacaacttgctgctgaccgaggatgaccaggaaactaccactcggttcctgcagaccgaagccgtgaccctgcaggacgtgagaggccgggactaccagaacgccatgcgggtgtggtccaacatccctggactgaaaagcaagcacgcacctctgacccctaaagaagaggagtacctgcaggcccaggtgcggagcagaagcaagctggacgcccctaaggtggatctgctggtgaagaattgcctcctgcccctgagagagtacttcaagtatttcagccagaatagtctgcccctgggaggcagcggcggcggctacgaggagatggtgaccttcgaggacgtggccgtgcacttcaccaagaccgagtggaccggcctgagccccgcccagagggccctgtacaggagcgtgatgctggagaacttcggcaacctgaccgccctgggctaccccgtgcccaagcccgccctgatcagcctgctggagggcggcgacatggcctggggcctggaggcccaggacgaccccctggccgagatgaccaagaacgtgtgcggcggcccaagcagcggcgcccctcctcccagcggcggcaggcggcccaagcagcggcgcccctcctcccagcggcggcagcccagccggctccccaacctctaccgaggagggcacctctgagtccgccacccccgagagcggccctggcacctccaccgagcccagcgagggcagcgcacccggcagccctgccggcagccccacctccacagaggagggaaccagcaccgagcccagcgaaggcagcgccccaggcaccagcaccgagcctagtgagcaggagattaaacggatcaacaagatcagaagaagacttgtgaaagacagcaacaccaagaaggccggcaagacaggccccatgaaaaccctgctggttagagtgatgacacccgatctgagagagcggctggaaaacctgagaaagaagcctgaaaatatcccccagcccatcagcaatacatctagagccaacctgaataagctgctgaccgattacaccgaaatgaagaaggcgatcctgcatgtgtactgggaagagttccagaaggaccctgtgggcctgatgagccgggtggcccagcctgccagcaagaagatcgatcagaacaagctgaaacctgagatggacgagaagggcaacctgaccaccgccggctttgcctgctctcagtgtggccagcccctgttcgtgtacaagctggagcaggtgtctgagaagggcaaggcttacaccaactacttcggacggtgcaatgtggccgagcacgaaaagctgatcctgctggcccagctgaagcccgagaaggatagcgacgaagccgtgacatatagcctgggaaagtttgggcagagggccctggatttctacagcattcatgtgaccaaggagtccacccaccccgtgaagcccctggcccagatcgccggaaacagatacgcctccggacctgtgggaaaggccctgagcgacgcatgtatgggcacaatcgcctccttcctgtctaagtaccaggacatcatcatcgaacaccagaaggtggtgaagggcaaccagaagagactggagagcctgcgggagctggccggcaaggaaaacctggaataccctagcgtgaccctgccacctcagcctcacaccaaggagggcgttgatgcctacaacgaagtgatcgcccgggtgcgaatgtgggtgaacctgaacctgtggcagaagctgaagctaagcagagatgatgccaagcctctgctgagactgaagggattcccttcctttcctctggtcgagagacaggccaacgaagtggactggtgggacatggtgtgtaacgtgaagaagctgatcaacgagaaaaaggaggatggcaaggtgttttggcagaatctggctggctacaagagacaggaagccctgagaccatacctgagcagcgaggaagatcggaagaagggaaagaaattcgctcggtaccagctgggcgacctgctgctgcacctggaaaagaagcacggcgaggactggggaaaggtgtacgacgaggcctgggagcggattgacaagaaagtggaaggcctgagcaagcacatcaagctggaagaggaacggagaagcgaggacgcccagagcaaggccgccctgaccgactggctgcgggctaaggccagcttcgtgatcgagggcctgaaggaggccgacaaggacgagttctgcagatgcgagctgaagctgcagaagtggtacggggacctgcggggaaagcccttcgccatcgaagccgagaacagcatcctggacatcagcggcttcagcaagcagtacaactgtgccttcatctggcagaaggacggcgtgaagaagctgaacctgtacctgatcatcaactacttcaagggcggcaagctgcggttcaagaagatcaaacctgaagccttcgaagccaacagattctacaccgtgatcaacaaaaagagcggcgagatcgtgcccatggaggtgaacttcaacttcgacgaccccaacctgatcatcctgcctctggcctttggcaagagacagggcagagaattcatctggaacgacctgctgtccctggaaaccggcagcctgaagctggccaacggaagagtgatcgagaagacactgtacaacagaagaacccggcaggatgagcctgccctgttcgtggccctgaccttcgagcggcgggaggtcctggactcctccaatatcaaaccaatgaacctgatcggcgtggcaagaggcgaaaacatccccgccgtgatcgccctgaccgaccccgagggctgcccactgagccggtttaaggatagcctgggaaacccaacccacatcctgagaatcggcgagagctataaggagaagcagcggaccatccaggccaagaaggaggtggagcagcggagagccggcggctacagccggaagtacgccagcaaagccaagaatctggcagacgatatggtgagaaacaccgctagagatctgctgtactacgccgtgacccaggatgccatgctgatcttcgccaacctgagccggggcttcggccggcagggcaagcggaccttcatggccgagagacagtacacacggatggaggactggctgaccgccaagctggcctacgagggcctgagcaagacctacctgtccaagacactggcccagtacacctccaagacatgcagcaactgtgggtttaccatcaccagcgccgactacgacagggtgctggagaagctgaagaagacagcaacaggctggatgaccacaattaacggcaaggagctgaaggtggagggccagattacctactacaacagatacaagagacagaacgtagtcaaggacctgtccgtcgagctggatagactgagcgaagaatctgtgaacaacgacatctcctcctggacaaagggcagaagcggagaagctctgagcctcctgaagaaaagattctcccatagacccgtgcaggagaagttcgtgtgcctgaactgcggcttcgagacacacgcagccgagcaagccgccctgaacatcgccagatcctggctgttcctgcggagccaggagtacaagaaataccagacaaacaagacaaccggcaacaccgataagagagccttcgtcgagacctggcagtccttttaccggaagaagcttaaggaggtgtggaaacctgccgtgcggtctggcggatctggcggaggctccaccagccccaagaaaaagagaaaagtctaagctgccttctgcggggcttgccttctggccatgcccttcttctctcccttgcacctgtacctcttggtctttgaataaagcctgagtaggaaggctagcaaaaaaaaaaaaaaaaaaaaaaaaaaaaaaaaaaaaaaaaaaaaaaaaaaaaaaaaaaaaaaaaaaaaaaaaaaaaaaaagcccagccggctccccaacctctaccgaggagggcacctctgagtccgccacccccgagagcggccctggcacctccaccgagcccagcgagggcagcgcacccggcagccctgccggcagccccacctccacagaggagggaaccagcaccgagcccagcgaaggcagcgccccaggcaccagcaccgagcctagtgagcaggagattaaacggatcaacaagatcagaagaagacttgtgaaagacagcaacaccaagaaggccggcaagacaggccccatgaaaaccctgctggttagagtgatgacacccgatctgagagagcggctggaaaacctgagaaagaagcctgaaaatatcccccagcccatcagcaatacatctagagccaacctgaataagctgctgaccgattacaccgaaatgaagaaggcgatcctgcatgtgtactgggaagagttccagaaggaccctgtgggcctgatgagccgggtggcccagcctgccagcaagaagatcgatcagaacaagctgaaacctgagatggacgagaagggcaacctgaccaccgccggctttgcctgctctcagtgtggccagcccctgttcgtgtacaagctggagcaggtgtctgagaagggcaaggcttacaccaactacttcggacggtgcaatgtggccgagcacgaaaagctgatcctgctggcccagctgaagcccgagaaggatagcgacgaagccgtgacatatagcctgggaaagtttgggcagagggccctggatttctacagcattcatgtgaccaaggagtccacccaccccgtgaagcccctggcccagatcgccggaaacagatacgcctccggacctgtgggaaaggccctgagcgacgcatgtatgggcacaatcgcctccttcctgtctaagtaccaggacatcatcatcgaacaccagaaggtggtgaagggcaaccagaagagactggagagcctgcgggagctggccggcaaggaaaacctggaataccctagcgtgaccctgccacctcagcctcacaccaaggagggcgttgatgcctacaacgaagtgatcgcccgggtgcgaatgtgggtgaacctgaacctgtggcagaagctgaagctaagcagagatgatgccaagcctctgctgagactgaagggattcccttcctttcctctggtcgagagacaggccaacgaagtggactggtgggacatggtgtgtaacgtgaagaagctgatcaacgagaaaaaggaggatggcaaggtgttttggcagaatctggctggctacaagagacaggaagccctgagaccatacctgagcagcgaggaagatcggaagaagggaaagaaattcgctcggtaccagctgggcgacctgctgctgcacctggaaaagaagcacggcgaggactggggaaaggtgtacgacgaggcctgggagcggattgacaagaaagtggaaggcctgagcaagcacatcaagctggaagaggaacggagaagcgaggacgcccagagcaaggccgccctgaccgactggctgcgggctaaggccagcttcgtgatcgagggcctgaaggaggccgacaaggacgagttctgcagatgcgagctgaagctgcagaagtggtacggggacctgcggggaaagcccttcgccatcgaagccgagaacagcatcctggacatcagcggcttcagcaagcagtacaactgtgccttcatctggcagaaggacggcgtgaagaagctgaacctgtacctgatcatcaactacttcaagggcggcaagctgcggttcaagaagatcaaacctgaagccttcgaagccaacagattctacaccgtgatcaacaaaaagagcggcgagatcgtgcccatggaggtgaacttcaacttcgacgaccccaacctgatcatcctgcctctggcctttggcaagagacagggcagagaattcatctggaacgacctgctgtccctggaaaccggcagcctgaagctggccaacggaagagtgatcgagaagacactgtacaacagaagaacccggcaggatgagcctgccctgttcgtggccctgaccttcgagcggcgggaggtcctggactcctccaatatcaaaccaatgaacctgatcggcgtggcaagaggcgaaaacatccccgccgtgatcgccctgaccgaccccgagggctgcccactgagccggtttaaggatagcctgggaaacccaacccacatcctgagaatcggcgagagctataaggagaagcagcggaccatccaggccaagaaggaggtggagcagcggagagccggcggctacagccggaagtacgccagcaaagccaagaatctggcagacgatatggtgagaaacaccgctagagatctgctgtactacgccgtgacccaggatgccatgctgatcttcgccaacctgagccggggcttcggccggcagggcaagcggaccttcatggccgagagacagtacacacggatggaggactggctgaccgccaagctggcctacgagggcctgagcaagacctacctgtccaagacactggcccagtacacctccaagacatgcagcaactgtgggtttaccatcaccagcgccgactacgacagggtgctggagaagctgaagaagacagcaacaggctggatgaccacaattaacggcaaggagctgaaggtggagggccagattacctactacaacagatacaagagacagaacgtagtcaaggacctgtccgtcgagctggatagactgagcgaagaatctgtgaacaacgacatctcctcctggacaaagggcagaagcggagaagctctgagcctcctgaagaaaagattctcccatagacccgtgcaggagaagttcgtgtgcctgaactgcggcttcgagacacacgcagccgagcaagccgccctgaacatcgccagatcctggctgttcctgcggagccaggagtacaagaaataccagacaaacaagacaaccggcaacaccgataagagagccttcgtcgagacctggcagtccttttaccggaagaagcttaaggaggtgtggaaacctgccgtgcggtctggcggatctggcggaggctccaccagccccaagaaaaagagaaaagtctaagctgccttctgcggggcttgccttctggccatgcccttcttctctcccttgcacctgtacctcttggtctttgaataaagcctgagtaggaaggctagcaaaaaaaaaaaaaaaaaaaaaaaaaaaaaaaaaaaaaaaaaaaaaaaaaaaaaaaaaaaaaaaaaaaaaaaaaaaaaaaa

SEQ ID NO: 9327 - RNA, 8787 nt, synthetic construct
  source 1..8787: mol_type = other RNA
aggaaataagagagaaaagaagagtaagaagaaatataagagccaccatggcccctaagaagaagcgtaaagtgagccggatgaaccacgaccaggagttcgacccccctaaggtgtaccctcccgtccccgccgagaagagaaagcccatccgggtcctgagcctgttcgatggcatcgccaccggtctgctggtgctgaaggacctgggcatccaggtggataggtacattgcctccgaggtgtgcgaggactccatcaccgtgggaatggtgcgtcatcagggcaagatcatgtacgtgggcgacgtgcggagcgtgacacagaagcatatccaggagtggggccctttcgacctggtgatcggcggcagcccttgcaatgacctgagcatcgtgaacccagcccggaagggcctgtacgagggaaccggcagactgttcttcgagttttacagactgctgcacgacgcccggcctaaggaaggcgacgaccggcccttcttttggctgttcgagaatgtggtggccatgggagtcagcgacaagcgggatattagccggttcctggagagcaaccccgtgatgatcgatgccaaggaagtgagcgccgcccaccgggccagatacttctggggcaatctgcctggcatgaacagacccctggccagcaccgtgaacgacaagctggagctgcaggagtgcctggagcacggccggatcgccaagttcagcaaggtgagaaccatcaccacccgaagcaacagcatcaaacaaggcaaggaccagcactttcctgtgttcatgaacgagaaggaggacatcctgtggtgtaccgagatggagagagtgttcgggttcccagtccactacacagatgtcagcaacatgtctagactggccagacagagactgctgggaagaagctggtccgtccctgtgatcagacacctgttcgcccctctgaaggagtacttcgcctgcgtgagcagcggcaacagcaacgccaacagccggggccccagcttctctagcggcctggtgccactgtccctgagagggagccacatgggccccatggagatctacaaaaccgtgagcgcctggaagcggcagcctgtgcgcgtgctgagcctgtttcggaatatcgataaagtcctgaaaagcctgggattcctggagagcggctctggctccggcggtggcaccctgaagtacgtggaggatgtgacaaacgtggtcagacgggatgtggagaagtggggccccttcgatctggtgtacggcagcacccaacccctgggcagctcttgtgaccggtgccctggctggtacatgtttcagttccaccggatcctgcagtacgccctgccgagacaggagtcccagcggccattcttttggattttcatggacaacttgctgctgaccgaggatgaccaggaaactaccactcggttcctgcagaccgaagccgtgaccctgcaggacgtgagaggccgggactaccagaacgccatgcgggtgtggtccaacatccctggactgaaaagcaagcacgcacctctgacccctaaagaagaggagtacctgcaggcccaggtgcggagcagaagcaagctggacgcccctaaggtggatctgctggtgaagaattgcctcctgcccctgagagagtacttcaagtatttcagccagaatagtctgcccctgggaggcagcggcggcggcagccccaccctggtgaccttcaaggacatccacgtgaacttcaccagggaggagtggaacctgctggacgccgcccagcagatcatgtacaaggacgtgatgctggagaactacaagaacctggtgagcgtgggccaccagctgcccaagcccgacgtgatcctgcagctggagaagggcgaggagccctggctggtggagaggggcgtgaggcaggacaccaggcccgactgggacaccgccggcggcccaagcagcggcgcccctcctcccagcggcggcaggcggcccaagcagcggcgcccctcctcccagcggcggcagcccagccggctccccaacctctaccgaggagggcacctctgagtccgccacccccgagagcggccctggcacctccaccgagcccagcgagggcagcgcacccggcagccctgccggcagccccacctccacagaggagggaaccagcaccgagcccagcgaaggcagcgccccaggcaccagcaccgagcctagtgagcaggagattaaacggatcaacaagatcagaagaagacttgtgaaagacagcaacaccaagaaggccggcaagacaggccccatgaaaaccctgctggttagagtgatgacacccgatctgagagagcggctggaaaacctgagaaagaagcctgaaaatatcccccagcccatcagcaatacatctagagccaacctgaataagctgctgaccgattacaccgaaatgaagaaggcgatcctgcatgtgtactgggaagagttccagaaggaccctgtgggcctgatgagccgggtggcccagcctgccagcaagaagatcgatcagaacaagctgaaacctgagatggacgagaagggcaacctgaccaccgccggctttgcctgctctcagtgtggccagcccctgttcgtgtacaagctggagcaggtgtctgagaagggcaaggcttacaccaactacttcggacggtgcaatgtggccgagcacgaaaagctgatcctgctggcccagctgaagcccgagaaggatagcgacgaagccgtgacatatagcctgggaaagtttgggcagagggccctggatttctacagcattcatgtgaccaaggagtccacccaccccgtgaagcccctggcccagatcgccggaaacagatacgcctccggacctgtgggaaaggccctgagcgacgcatgtatgggcacaatcgcctccttcctgtctaagtaccaggacatcatcatcgaacaccagaaggtggtgaagggcaaccagaagagactggagagcctgcgggagctggccggcaaggaaaacctggaataccctagcgtgaccctgccacctcagcctcacaccaaggagggcgttgatgcctacaacgaagtgatcgcccgggtgcgaatgtgggtgaacctgaacctgtggcagaagctgaagctaagcagagatgatgccaagcctctgctgagactgaagggattcccttcctttcctctggtcgagagacaggccaacgaagtggactggtgggacatggtgtgtaacgtgaagaagctgatcaacgagaaaaaggaggatggcaaggtgttttggcagaatctggctggctacaagagacaggaagccctgagaccatacctgagcagcgaggaagatcggaagaagggaaagaaattcgctcggtaccagctgggcgacctgctgctgcacctggaaaagaagcacggcgaggactggggaaaggtgtacgacgaggcctgggagcggattgacaagaaagtggaaggcctgagcaagcacatcaagctggaagaggaacggagaagcgaggacgcccagagcaaggccgccctgaccgactggctgcgggctaaggccagcttcgtgatcgagggcctgaaggaggccgacaaggacgagttctgcagatgcgagctgaagctgcagaagtggtacggggacctgcggggaaagcccttcgccatcgaagccgagaacagcatcctggacatcagcggcttcagcaagcagtacaactgtgccttcatctggcagaaggacggcgtgaagaagctgaacctgtacctgatcatcaactacttcaagggcggcaagctgcggttcaagaagatcaaacctgaagccttcgaagccaacagattctacaccgtgatcaacaaaaagagcggcgagatcgtgcccatggaggtgaacttcaacttcgacgaccccaacctgatcatcctgcctctggcctttggcaagagacagggcagagaattcatctggaacgacctgctgtccctggaaaccggcagcctgaagctggccaacggaagagtgatcgagaagacactgtacaacagaagaacccggcaggatgagcctgccctgttcgtggccctgaccttcgagcggcgggaggtcctggactcctccaatatcaaaccaatgaacctgatcggcgtggcaagaggcgaaaacatccccgccgtgatcgccctgaccgaccccgagggctgcccactgagccggtttaaggatagcctgggaaacccaacccacatcctgagaatcggcgagagctataaggagaagcagcggaccatccaggccaagaaggaggtggagcagcggagagccggcggctacagccggaagtacgccagcaaagccaagaatctggcagacgatatggtgagaaacaccgctagagatctgctgtactacgccgtgacccaggatgccatgctgatcttcgccaacctgagccggggcttcggccggcagggcaagcggaccttcatggccgagagacagtacacacggatggaggactggctgaccgccaagctggcctacgagggcctgagcaagacctacctgtccaagacactggcccagtacacctccaagacatgcagcaactgtgggtttaccatcaccagcgccgactacgacagggtgctggagaagctgaagaagacagcaacaggctggatgaccacaattaacggcaaggagctgaaggtggagggccagattacctactacaacagatacaagagacagaacgtagtcaaggacctgtccgtcgagctggatagactgagcgaagaatctgtgaacaacgacatctcctcctggacaaagggcagaagcggagaagctctgagcctcctgaagaaaagattctcccatagacccgtgcaggagaagttcgtgtgcctgaactgcggcttcgagacacacgcagccgagcaagccgccctgaacatcgccagatcctggctgttcctgcggagccaggagtacaagaaataccagacaaacaagacaaccggcaacaccgataagagagccttcgtcgagacctggcagtccttttaccggaagaagcttaaggaggtgtggaaacctgccgtgcggtctggcggatctggcggaggctccaccagccccaagaaaaagagaaaagtctaagctgccttctgcggggcttgccttctggccatgcccttcttctctcccttgcacctgtacctcttggtctttgaataaagcctgagtaggaaggctagcaaaaaaaaaaaaaaaaaaaaaaaaaaaaaaaaaaaaaaaaaaaaaaaaaaaaaaaaaaaaaaaaaaaaaaaaaaaaaaaagcccagccggctccccaacctctaccgaggagggcacctctgagtccgccacccccgagagcggccctggcacctccaccgagcccagcgagggcagcgcacccggcagccctgccggcagccccacctccacagaggagggaaccagcaccgagcccagcgaaggcagcgccccaggcaccagcaccgagcctagtgagcaggagattaaacggatcaacaagatcagaagaagacttgtgaaagacagcaacaccaagaaggccggcaagacaggccccatgaaaaccctgctggttagagtgatgacacccgatctgagagagcggctggaaaacctgagaaagaagcctgaaaatatcccccagcccatcagcaatacatctagagccaacctgaataagctgctgaccgattacaccgaaatgaagaaggcgatcctgcatgtgtactgggaagagttccagaaggaccctgtgggcctgatgagccgggtggcccagcctgccagcaagaagatcgatcagaacaagctgaaacctgagatggacgagaagggcaacctgaccaccgccggctttgcctgctctcagtgtggccagcccctgttcgtgtacaagctggagcaggtgtctgagaagggcaaggcttacaccaactacttcggacggtgcaatgtggccgagcacgaaaagctgatcctgctggcccagctgaagcccgagaaggatagcgacgaagccgtgacatatagcctgggaaagtttgggcagagggccctggatttctacagcattcatgtgaccaaggagtccacccaccccgtgaagcccctggcccagatcgccggaaacagatacgcctccggacctgtgggaaaggccctgagcgacgcatgtatgggcacaatcgcctccttcctgtctaagtaccaggacatcatcatcgaacaccagaaggtggtgaagggcaaccagaagagactggagagcctgcgggagctggccggcaaggaaaacctggaataccctagcgtgaccctgccacctcagcctcacaccaaggagggcgttgatgcctacaacgaagtgatcgcccgggtgcgaatgtgggtgaacctgaacctgtggcagaagctgaagctaagcagagatgatgccaagcctctgctgagactgaagggattcccttcctttcctctggtcgagagacaggccaacgaagtggactggtgggacatggtgtgtaacgtgaagaagctgatcaacgagaaaaaggaggatggcaaggtgttttggcagaatctggctggctacaagagacaggaagccctgagaccatacctgagcagcgaggaagatcggaagaagggaaagaaattcgctcggtaccagctgggcgacctgctgctgcacctggaaaagaagcacggcgaggactggggaaaggtgtacgacgaggcctgggagcggattgacaagaaagtggaaggcctgagcaagcacatcaagctggaagaggaacggagaagcgaggacgcccagagcaaggccgccctgaccgactggctgcgggctaaggccagcttcgtgatcgagggcctgaaggaggccgacaaggacgagttctgcagatgcgagctgaagctgcagaagtggtacggggacctgcggggaaagcccttcgccatcgaagccgagaacagcatcctggacatcagcggcttcagcaagcagtacaactgtgccttcatctggcagaaggacggcgtgaagaagctgaacctgtacctgatcatcaactacttcaagggcggcaagctgcggttcaagaagatcaaacctgaagccttcgaagccaacagattctacaccgtgatcaacaaaaagagcggcgagatcgtgcccatggaggtgaacttcaacttcgacgaccccaacctgatcatcctgcctctggcctttggcaagagacagggcagagaattcatctggaacgacctgctgtccctggaaaccggcagcctgaagctggccaacggaagagtgatcgagaagacactgtacaacagaagaacccggcaggatgagcctgccctgttcgtggccctgaccttcgagcggcgggaggtcctggactcctccaatatcaaaccaatgaacctgatcggcgtggcaagaggcgaaaacatccccgccgtgatcgccctgaccgaccccgagggctgcccactgagccggtttaaggatagcctgggaaacccaacccacatcctgagaatcggcgagagctataaggagaagcagcggaccatccaggccaagaaggaggtggagcagcggagagccggcggctacagccggaagtacgccagcaaagccaagaatctggcagacgatatggtgagaaacaccgctagagatctgctgtactacgccgtgacccaggatgccatgctgatcttcgccaacctgagccggggcttcggccggcagggcaagcggaccttcatggccgagagacagtacacacggatggaggactggctgaccgccaagctggcctacgagggcctgagcaagacctacctgtccaagacactggcccagtacacctccaagacatgcagcaactgtgggtttaccatcaccagcgccgactacgacagggtgctggagaagctgaagaagacagcaacaggctggatgaccacaattaacggcaaggagctgaaggtggagggccagattacctactacaacagatacaagagacagaacgtagtcaaggacctgtccgtcgagctggatagactgagcgaagaatctgtgaacaacgacatctcctcctggacaaagggcagaagcggagaagctctgagcctcctgaagaaaagattctcccatagacccgtgcaggagaagttcgtgtgcctgaactgcggcttcgagacacacgcagccgagcaagccgccctgaacatcgccagatcctggctgttcctgcggagccaggagtacaagaaataccagacaaacaagacaaccggcaacaccgataagagagccttcgtcgagacctggcagtccttttaccggaagaagcttaaggaggtgtggaaacctgccgtgcggtctggcggatctggcggaggctccaccagccccaagaaaaagagaaaagtctaagctgccttctgcggggcttgccttctggccatgcccttcttctctcccttgcacctgtacctcttggtctttgaataaagcctgagtaggaaggctagcaaaaaaaaaaaaaaaaaaaaaaaaaaaaaaaaaaaaaaaaaaaaaaaaaaaaaaaaaaaaaaaaaaaaaaaaaaaaaaaa

SEQ ID NO: 9328 - RNA, 8787 nt, synthetic construct
  source 1..8787: mol_type = other RNA
aggaaataagagagaaaagaagagtaagaagaaatataagagccaccatggcccctaagaagaagcgtaaagtgagccggatgaaccacgaccaggagttcgacccccctaaggtgtaccctcccgtccccgccgagaagagaaagcccatccgggtcctgagcctgttcgatggcatcgccaccggtctgctggtgctgaaggacctgggcatccaggtggataggtacattgcctccgaggtgtgcgaggactccatcaccgtgggaatggtgcgtcatcagggcaagatcatgtacgtgggcgacgtgcggagcgtgacacagaagcatatccaggagtggggccctttcgacctggtgatcggcggcagcccttgcaatgacctgagcatcgtgaacccagcccggaagggcctgtacgagggaaccggcagactgttcttcgagttttacagactgctgcacgacgcccggcctaaggaaggcgacgaccggcccttcttttggctgttcgagaatgtggtggccatgggagtcagcgacaagcgggatattagccggttcctggagagcaaccccgtgatgatcgatgccaaggaagtgagcgccgcccaccgggccagatacttctggggcaatctgcctggcatgaacagacccctggccagcaccgtgaacgacaagctggagctgcaggagtgcctggagcacggccggatcgccaagttcagcaaggtgagaaccatcaccacccgaagcaacagcatcaaacaaggcaaggaccagcactttcctgtgttcatgaacgagaaggaggacatcctgtggtgtaccgagatggagagagtgttcgggttcccagtccactacacagatgtcagcaacatgtctagactggccagacagagactgctgggaagaagctggtccgtccctgtgatcagacacctgttcgcccctctgaaggagtacttcgcctgcgtgagcagcggcaacagcaacgccaacagccggggccccagcttctctagcggcctggtgccactgtccctgagagggagccacatgggccccatggagatctacaaaaccgtgagcgcctggaagcggcagcctgtgcgcgtgctgagcctgtttcggaatatcgataaagtcctgaaaagcctgggattcctggagagcggctctggctccggcggtggcaccctgaagtacgtggaggatgtgacaaacgtggtcagacgggatgtggagaagtggggccccttcgatctggtgtacggcagcacccaacccctgggcagctcttgtgaccggtgccctggctggtacatgtttcagttccaccggatcctgcagtacgccctgccgagacaggagtcccagcggccattcttttggattttcatggacaacttgctgctgaccgaggatgaccaggaaactaccactcggttcctgcagaccgaagccgtgaccctgcaggacgtgagaggccgggactaccagaacgccatgcgggtgtggtccaacatccctggactgaaaagcaagcacgcacctctgacccctaaagaagaggagtacctgcaggcccaggtgcggagcagaagcaagctggacgcccctaaggtggatctgctggtgaagaattgcctcctgcccctgagagagtacttcaagtatttcagccagaatagtctgcccctgggaggcagcggcggcggcgccagggagagcgtgatgttcagcgacgtgagcatcgacttcagcctggaggagtgggagttcctgaacctggagcagagggacctgtacagggacgtgatgctggagaactacagcaacctggtgagcctgggctgcttcatcagcaagcccgacgtgatcagcctgctggagcagggcaaggagccctggaacgtggtgaggaagggcaggaggcagtaccccgacctggagaccaactacggcggcccaagcagcggcgcccctcctcccagcggcggcaggcggcccaagcagcggcgcccctcctcccagcggcggcagcccagccggctccccaacctctaccgaggagggcacctctgagtccgccacccccgagagcggccctggcacctccaccgagcccagcgagggcagcgcacccggcagccctgccggcagccccacctccacagaggagggaaccagcaccgagcccagcgaaggcagcgccccaggcaccagcaccgagcctagtgagcaggagattaaacggatcaacaagatcagaagaagacttgtgaaagacagcaacaccaagaaggccggcaagacaggccccatgaaaaccctgctggttagagtgatgacacccgatctgagagagcggctggaaaacctgagaaagaagcctgaaaatatcccccagcccatcagcaatacatctagagccaacctgaataagctgctgaccgattacaccgaaatgaagaaggcgatcctgcatgtgtactgggaagagttccagaaggaccctgtgggcctgatgagccgggtggcccagcctgccagcaagaagatcgatcagaacaagctgaaacctgagatggacgagaagggcaacctgaccaccgccggctttgcctgctctcagtgtggccagcccctgttcgtgtacaagctggagcaggtgtctgagaagggcaaggcttacaccaactacttcggacggtgcaatgtggccgagcacgaaaagctgatcctgctggcccagctgaagcccgagaaggatagcgacgaagccgtgacatatagcctgggaaagtttgggcagagggccctggatttctacagcattcatgtgaccaaggagtccacccaccccgtgaagcccctggcccagatcgccggaaacagatacgcctccggacctgtgggaaaggccctgagcgacgcatgtatgggcacaatcgcctccttcctgtctaagtaccaggacatcatcatcgaacaccagaaggtggtgaagggcaaccagaagagactggagagcctgcgggagctggccggcaaggaaaacctggaataccctagcgtgaccctgccacctcagcctcacaccaaggagggcgttgatgcctacaacgaagtgatcgcccgggtgcgaatgtgggtgaacctgaacctgtggcagaagctgaagctaagcagagatgatgccaagcctctgctgagactgaagggattcccttcctttcctctggtcgagagacaggccaacgaagtggactggtgggacatggtgtgtaacgtgaagaagctgatcaacgagaaaaaggaggatggcaaggtgttttggcagaatctggctggctacaagagacaggaagccctgagaccatacctgagcagcgaggaagatcggaagaagggaaagaaattcgctcggtaccagctgggcgacctgctgctgcacctggaaaagaagcacggcgaggactggggaaaggtgtacgacgaggcctgggagcggattgacaagaaagtggaaggcctgagcaagcacatcaagctggaagaggaacggagaagcgaggacgcccagagcaaggccgccctgaccgactggctgcgggctaaggccagcttcgtgatcgagggcctgaaggaggccgacaaggacgagttctgcagatgcgagctgaagctgcagaagtggtacggggacctgcggggaaagcccttcgccatcgaagccgagaacagcatcctggacatcagcggcttcagcaagcagtacaactgtgccttcatctggcagaaggacggcgtgaagaagctgaacctgtacctgatcatcaactacttcaagggcggcaagctgcggttcaagaagatcaaacctgaagccttcgaagccaacagattctacaccgtgatcaacaaaaagagcggcgagatcgtgcccatggaggtgaacttcaacttcgacgaccccaacctgatcatcctgcctctggcctttggcaagagacagggcagagaattcatctggaacgacctgctgtccctggaaaccggcagcctgaagctggccaacggaagagtgatcgagaagacactgtacaacagaagaacccggcaggatgagcctgccctgttcgtggccctgaccttcgagcggcgggaggtcctggactcctccaatatcaaaccaatgaacctgatcggcgtggcaagaggcgaaaacatccccgccgtgatcgccctgaccgaccccgagggctgcccactgagccggtttaaggatagcctgggaaacccaacccacatcctgagaatcggcgagagctataaggagaagcagcggaccatccaggccaagaaggaggtggagcagcggagagccggcggctacagccggaagtacgccagcaaagccaagaatctggcagacgatatggtgagaaacaccgctagagatctgctgtactacgccgtgacccaggatgccatgctgatcttcgccaacctgagccggggcttcggccggcagggcaagcggaccttcatggccgagagacagtacacacggatggaggactggctgaccgccaagctggcctacgagggcctgagcaagacctacctgtccaagacactggcccagtacacctccaagacatgcagcaactgtgggtttaccatcaccagcgccgactacgacagggtgctggagaagctgaagaagacagcaacaggctggatgaccacaattaacggcaaggagctgaaggtggagggccagattacctactacaacagatacaagagacagaacgtagtcaaggacctgtccgtcgagctggatagactgagcgaagaatctgtgaacaacgacatctcctcctggacaaagggcagaagcggagaagctctgagcctcctgaagaaaagattctcccatagacccgtgcaggagaagttcgtgtgcctgaactgcggcttcgagacacacgcagccgagcaagccgccctgaacatcgccagatcctggctgttcctgcggagccaggagtacaagaaataccagacaaacaagacaaccggcaacaccgataagagagccttcgtcgagacctggcagtccttttaccggaagaagcttaaggaggtgtggaaacctgccgtgcggtctggcggatctggcggaggctccaccagccccaagaaaaagagaaaagtctaagctgccttctgcggggcttgccttctggccatgcccttcttctctcccttgcacctgtacctcttggtctttgaataaagcctgagtaggaaggctagcaaaaaaaaaaaaaaaaaaaaaaaaaaaaaaaaaaaaaaaaaaaaaaaaaaaaaaaaaaaaaaaaaaaaaaaaaaaaaaaagcccagccggctccccaacctctaccgaggagggcacctctgagtccgccacccccgagagcggccctggcacctccaccgagcccagcgagggcagcgcacccggcagccctgccggcagccccacctccacagaggagggaaccagcaccgagcccagcgaaggcagcgccccaggcaccagcaccgagcctagtgagcaggagattaaacggatcaacaagatcagaagaagacttgtgaaagacagcaacaccaagaaggccggcaagacaggccccatgaaaaccctgctggttagagtgatgacacccgatctgagagagcggctggaaaacctgagaaagaagcctgaaaatatcccccagcccatcagcaatacatctagagccaacctgaataagctgctgaccgattacaccgaaatgaagaaggcgatcctgcatgtgtactgggaagagttccagaaggaccctgtgggcctgatgagccgggtggcccagcctgccagcaagaagatcgatcagaacaagctgaaacctgagatggacgagaagggcaacctgaccaccgccggctttgcctgctctcagtgtggccagcccctgttcgtgtacaagctggagcaggtgtctgagaagggcaaggcttacaccaactacttcggacggtgcaatgtggccgagcacgaaaagctgatcctgctggcccagctgaagcccgagaaggatagcgacgaagccgtgacatatagcctgggaaagtttgggcagagggccctggatttctacagcattcatgtgaccaaggagtccacccaccccgtgaagcccctggcccagatcgccggaaacagatacgcctccggacctgtgggaaaggccctgagcgacgcatgtatgggcacaatcgcctccttcctgtctaagtaccaggacatcatcatcgaacaccagaaggtggtgaagggcaaccagaagagactggagagcctgcgggagctggccggcaaggaaaacctggaataccctagcgtgaccctgccacctcagcctcacaccaaggagggcgttgatgcctacaacgaagtgatcgcccgggtgcgaatgtgggtgaacctgaacctgtggcagaagctgaagctaagcagagatgatgccaagcctctgctgagactgaagggattcccttcctttcctctggtcgagagacaggccaacgaagtggactggtgggacatggtgtgtaacgtgaagaagctgatcaacgagaaaaaggaggatggcaaggtgttttggcagaatctggctggctacaagagacaggaagccctgagaccatacctgagcagcgaggaagatcggaagaagggaaagaaattcgctcggtaccagctgggcgacctgctgctgcacctggaaaagaagcacggcgaggactggggaaaggtgtacgacgaggcctgggagcggattgacaagaaagtggaaggcctgagcaagcacatcaagctggaagaggaacggagaagcgaggacgcccagagcaaggccgccctgaccgactggctgcgggctaaggccagcttcgtgatcgagggcctgaaggaggccgacaaggacgagttctgcagatgcgagctgaagctgcagaagtggtacggggacctgcggggaaagcccttcgccatcgaagccgagaacagcatcctggacatcagcggcttcagcaagcagtacaactgtgccttcatctggcagaaggacggcgtgaagaagctgaacctgtacctgatcatcaactacttcaagggcggcaagctgcggttcaagaagatcaaacctgaagccttcgaagccaacagattctacaccgtgatcaacaaaaagagcggcgagatcgtgcccatggaggtgaacttcaacttcgacgaccccaacctgatcatcctgcctctggcctttggcaagagacagggcagagaattcatctggaacgacctgctgtccctggaaaccggcagcctgaagctggccaacggaagagtgatcgagaagacactgtacaacagaagaacccggcaggatgagcctgccctgttcgtggccctgaccttcgagcggcgggaggtcctggactcctccaatatcaaaccaatgaacctgatcggcgtggcaagaggcgaaaacatccccgccgtgatcgccctgaccgaccccgagggctgcccactgagccggtttaaggatagcctgggaaacccaacccacatcctgagaatcggcgagagctataaggagaagcagcggaccatccaggccaagaaggaggtggagcagcggagagccggcggctacagccggaagtacgccagcaaagccaagaatctggcagacgatatggtgagaaacaccgctagagatctgctgtactacgccgtgacccaggatgccatgctgatcttcgccaacctgagccggggcttcggccggcagggcaagcggaccttcatggccgagagacagtacacacggatggaggactggctgaccgccaagctggcctacgagggcctgagcaagacctacctgtccaagacactggcccagtacacctccaagacatgcagcaactgtgggtttaccatcaccagcgccgactacgacagggtgctggagaagctgaagaagacagcaacaggctggatgaccacaattaacggcaaggagctgaaggtggagggccagattacctactacaacagatacaagagacagaacgtagtcaaggacctgtccgtcgagctggatagactgagcgaagaatctgtgaacaacgacatctcctcctggacaaagggcagaagcggagaagctctgagcctcctgaagaaaagattctcccatagacccgtgcaggagaagttcgtgtgcctgaactgcggcttcgagacacacgcagccgagcaagccgccctgaacatcgccagatcctggctgttcctgcggagccaggagtacaagaaataccagacaaacaagacaaccggcaacaccgataagagagccttcgtcgagacctggcagtccttttaccggaagaagcttaaggaggtgtggaaacctgccgtgcggtctggcggatctggcggaggctccaccagccccaagaaaaagagaaaagtctaagctgccttctgcggggcttgccttctggccatgcccttcttctctcccttgcacctgtacctcttggtctttgaataaagcctgagtaggaaggctagcaaaaaaaaaaaaaaaaaaaaaaaaaaaaaaaaaaaaaaaaaaaaaaaaaaaaaaaaaaaaaaaaaaaaaaaaaaaaaaaa

SEQ ID NO: 9329 - RNA, 8787 nt, synthetic construct
  source 1..8787: mol_type = other RNA
aggaaataagagagaaaagaagagtaagaagaaatataagagccaccatggcccctaagaagaagcgtaaagtgagccggatgaaccacgaccaggagttcgacccccctaaggtgtaccctcccgtccccgccgagaagagaaagcccatccgggtcctgagcctgttcgatggcatcgccaccggtctgctggtgctgaaggacctgggcatccaggtggataggtacattgcctccgaggtgtgcgaggactccatcaccgtgggaatggtgcgtcatcagggcaagatcatgtacgtgggcgacgtgcggagcgtgacacagaagcatatccaggagtggggccctttcgacctggtgatcggcggcagcccttgcaatgacctgagcatcgtgaacccagcccggaagggcctgtacgagggaaccggcagactgttcttcgagttttacagactgctgcacgacgcccggcctaaggaaggcgacgaccggcccttcttttggctgttcgagaatgtggtggccatgggagtcagcgacaagcgggatattagccggttcctggagagcaaccccgtgatgatcgatgccaaggaagtgagcgccgcccaccgggccagatacttctggggcaatctgcctggcatgaacagacccctggccagcaccgtgaacgacaagctggagctgcaggagtgcctggagcacggccggatcgccaagttcagcaaggtgagaaccatcaccacccgaagcaacagcatcaaacaaggcaaggaccagcactttcctgtgttcatgaacgagaaggaggacatcctgtggtgtaccgagatggagagagtgttcgggttcccagtccactacacagatgtcagcaacatgtctagactggccagacagagactgctgggaagaagctggtccgtccctgtgatcagacacctgttcgcccctctgaaggagtacttcgcctgcgtgagcagcggcaacagcaacgccaacagccggggccccagcttctctagcggcctggtgccactgtccctgagagggagccacatgggccccatggagatctacaaaaccgtgagcgcctggaagcggcagcctgtgcgcgtgctgagcctgtttcggaatatcgataaagtcctgaaaagcctgggattcctggagagcggctctggctccggcggtggcaccctgaagtacgtggaggatgtgacaaacgtggtcagacgggatgtggagaagtggggccccttcgatctggtgtacggcagcacccaacccctgggcagctcttgtgaccggtgccctggctggtacatgtttcagttccaccggatcctgcagtacgccctgccgagacaggagtcccagcggccattcttttggattttcatggacaacttgctgctgaccgaggatgaccaggaaactaccactcggttcctgcagaccgaagccgtgaccctgcaggacgtgagaggccgggactaccagaacgccatgcgggtgtggtccaacatccctggactgaaaagcaagcacgcacctctgacccctaaagaagaggagtacctgcaggcccaggtgcggagcagaagcaagctggacgcccctaaggtggatctgctggtgaagaattgcctcctgcccctgagagagtacttcaagtatttcagccagaatagtctgcccctgggaggcagcggcggcggctgccaggagaccctgaccttcaaggacgtggccgtggacttcaccagggaggagtggggccacctgggccccgcccagagggacctgtacaaggaggtgatgctggacaactacaggaacctggtgagcctgggcctgcaggtgagcaagcccgacgtgatcttccagctggagaggggcgagagccccagcatgctggagggcaaggacagcagcgacccctgccccgagttcctgagccagggcggcccaagcagcggcgcccctcctcccagcggcggcaggcggcccaagcagcggcgcccctcctcccagcggcggcagcccagccggctccccaacctctaccgaggagggcacctctgagtccgccacccccgagagcggccctggcacctccaccgagcccagcgagggcagcgcacccggcagccctgccggcagccccacctccacagaggagggaaccagcaccgagcccagcgaaggcagcgccccaggcaccagcaccgagcctagtgagcaggagattaaacggatcaacaagatcagaagaagacttgtgaaagacagcaacaccaagaaggccggcaagacaggccccatgaaaaccctgctggttagagtgatgacacccgatctgagagagcggctggaaaacctgagaaagaagcctgaaaatatcccccagcccatcagcaatacatctagagccaacctgaataagctgctgaccgattacaccgaaatgaagaaggcgatcctgcatgtgtactgggaagagttccagaaggaccctgtgggcctgatgagccgggtggcccagcctgccagcaagaagatcgatcagaacaagctgaaacctgagatggacgagaagggcaacctgaccaccgccggctttgcctgctctcagtgtggccagcccctgttcgtgtacaagctggagcaggtgtctgagaagggcaaggcttacaccaactacttcggacggtgcaatgtggccgagcacgaaaagctgatcctgctggcccagctgaagcccgagaaggatagcgacgaagccgtgacatatagcctgggaaagtttgggcagagggccctggatttctacagcattcatgtgaccaaggagtccacccaccccgtgaagcccctggcccagatcgccggaaacagatacgcctccggacctgtgggaaaggccctgagcgacgcatgtatgggcacaatcgcctccttcctgtctaagtaccaggacatcatcatcgaacaccagaaggtggtgaagggcaaccagaagagactggagagcctgcgggagctggccggcaaggaaaacctggaataccctagcgtgaccctgccacctcagcctcacaccaaggagggcgttgatgcctacaacgaagtgatcgcccgggtgcgaatgtgggtgaacctgaacctgtggcagaagctgaagctaagcagagatgatgccaagcctctgctgagactgaagggattcccttcctttcctctggtcgagagacaggccaacgaagtggactggtgggacatggtgtgtaacgtgaagaagctgatcaacgagaaaaaggaggatggcaaggtgttttggcagaatctggctggctacaagagacaggaagccctgagaccatacctgagcagcgaggaagatcggaagaagggaaagaaattcgctcggtaccagctgggcgacctgctgctgcacctggaaaagaagcacggcgaggactggggaaaggtgtacgacgaggcctgggagcggattgacaagaaagtggaaggcctgagcaagcacatcaagctggaagaggaacggagaagcgaggacgcccagagcaaggccgccctgaccgactggctgcgggctaaggccagcttcgtgatcgagggcctgaaggaggccgacaaggacgagttctgcagatgcgagctgaagctgcagaagtggtacggggacctgcggggaaagcccttcgccatcgaagccgagaacagcatcctggacatcagcggcttcagcaagcagtacaactgtgccttcatctggcagaaggacggcgtgaagaagctgaacctgtacctgatcatcaactacttcaagggcggcaagctgcggttcaagaagatcaaacctgaagccttcgaagccaacagattctacaccgtgatcaacaaaaagagcggcgagatcgtgcccatggaggtgaacttcaacttcgacgaccccaacctgatcatcctgcctctggcctttggcaagagacagggcagagaattcatctggaacgacctgctgtccctggaaaccggcagcctgaagctggccaacggaagagtgatcgagaagacactgtacaacagaagaacccggcaggatgagcctgccctgttcgtggccctgaccttcgagcggcgggaggtcctggactcctccaatatcaaaccaatgaacctgatcggcgtggcaagaggcgaaaacatccccgccgtgatcgccctgaccgaccccgagggctgcccactgagccggtttaaggatagcctgggaaacccaacccacatcctgagaatcggcgagagctataaggagaagcagcggaccatccaggccaagaaggaggtggagcagcggagagccggcggctacagccggaagtacgccagcaaagccaagaatctggcagacgatatggtgagaaacaccgctagagatctgctgtactacgccgtgacccaggatgccatgctgatcttcgccaacctgagccggggcttcggccggcagggcaagcggaccttcatggccgagagacagtacacacggatggaggactggctgaccgccaagctggcctacgagggcctgagcaagacctacctgtccaagacactggcccagtacacctccaagacatgcagcaactgtgggtttaccatcaccagcgccgactacgacagggtgctggagaagctgaagaagacagcaacaggctggatgaccacaattaacggcaaggagctgaaggtggagggccagattacctactacaacagatacaagagacagaacgtagtcaaggacctgtccgtcgagctggatagactgagcgaagaatctgtgaacaacgacatctcctcctggacaaagggcagaagcggagaagctctgagcctcctgaagaaaagattctcccatagacccgtgcaggagaagttcgtgtgcctgaactgcggcttcgagacacacgcagccgagcaagccgccctgaacatcgccagatcctggctgttcctgcggagccaggagtacaagaaataccagacaaacaagacaaccggcaacaccgataagagagccttcgtcgagacctggcagtccttttaccggaagaagcttaaggaggtgtggaaacctgccgtgcggtctggcggatctggcggaggctccaccagccccaagaaaaagagaaaagtctaagctgccttctgcggggcttgccttctggccatgcccttcttctctcccttgcacctgtacctcttggtctttgaataaagcctgagtaggaaggctagcaaaaaaaaaaaaaaaaaaaaaaaaaaaaaaaaaaaaaaaaaaaaaaaaaaaaaaaaaaaaaaaaaaaaaaaaaaaaaaaagcccagccggctccccaacctctaccgaggagggcacctctgagtccgccacccccgagagcggccctggcacctccaccgagcccagcgagggcagcgcacccggcagccctgccggcagccccacctccacagaggagggaaccagcaccgagcccagcgaaggcagcgccccaggcaccagcaccgagcctagtgagcaggagattaaacggatcaacaagatcagaagaagacttgtgaaagacagcaacaccaagaaggccggcaagacaggccccatgaaaaccctgctggttagagtgatgacacccgatctgagagagcggctggaaaacctgagaaagaagcctgaaaatatcccccagcccatcagcaatacatctagagccaacctgaataagctgctgaccgattacaccgaaatgaagaaggcgatcctgcatgtgtactgggaagagttccagaaggaccctgtgggcctgatgagccgggtggcccagcctgccagcaagaagatcgatcagaacaagctgaaacctgagatggacgagaagggcaacctgaccaccgccggctttgcctgctctcagtgtggccagcccctgttcgtgtacaagctggagcaggtgtctgagaagggcaaggcttacaccaactacttcggacggtgcaatgtggccgagcacgaaaagctgatcctgctggcccagctgaagcccgagaaggatagcgacgaagccgtgacatatagcctgggaaagtttgggcagagggccctggatttctacagcattcatgtgaccaaggagtccacccaccccgtgaagcccctggcccagatcgccggaaacagatacgcctccggacctgtgggaaaggccctgagcgacgcatgtatgggcacaatcgcctccttcctgtctaagtaccaggacatcatcatcgaacaccagaaggtggtgaagggcaaccagaagagactggagagcctgcgggagctggccggcaaggaaaacctggaataccctagcgtgaccctgccacctcagcctcacaccaaggagggcgttgatgcctacaacgaagtgatcgcccgggtgcgaatgtgggtgaacctgaacctgtggcagaagctgaagctaagcagagatgatgccaagcctctgctgagactgaagggattcccttcctttcctctggtcgagagacaggccaacgaagtggactggtgggacatggtgtgtaacgtgaagaagctgatcaacgagaaaaaggaggatggcaaggtgttttggcagaatctggctggctacaagagacaggaagccctgagaccatacctgagcagcgaggaagatcggaagaagggaaagaaattcgctcggtaccagctgggcgacctgctgctgcacctggaaaagaagcacggcgaggactggggaaaggtgtacgacgaggcctgggagcggattgacaagaaagtggaaggcctgagcaagcacatcaagctggaagaggaacggagaagcgaggacgcccagagcaaggccgccctgaccgactggctgcgggctaaggccagcttcgtgatcgagggcctgaaggaggccgacaaggacgagttctgcagatgcgagctgaagctgcagaagtggtacggggacctgcggggaaagcccttcgccatcgaagccgagaacagcatcctggacatcagcggcttcagcaagcagtacaactgtgccttcatctggcagaaggacggcgtgaagaagctgaacctgtacctgatcatcaactacttcaagggcggcaagctgcggttcaagaagatcaaacctgaagccttcgaagccaacagattctacaccgtgatcaacaaaaagagcggcgagatcgtgcccatggaggtgaacttcaacttcgacgaccccaacctgatcatcctgcctctggcctttggcaagagacagggcagagaattcatctggaacgacctgctgtccctggaaaccggcagcctgaagctggccaacggaagagtgatcgagaagacactgtacaacagaagaacccggcaggatgagcctgccctgttcgtggccctgaccttcgagcggcgggaggtcctggactcctccaatatcaaaccaatgaacctgatcggcgtggcaagaggcgaaaacatccccgccgtgatcgccctgaccgaccccgagggctgcccactgagccggtttaaggatagcctgggaaacccaacccacatcctgagaatcggcgagagctataaggagaagcagcggaccatccaggccaagaaggaggtggagcagcggagagccggcggctacagccggaagtacgccagcaaagccaagaatctggcagacgatatggtgagaaacaccgctagagatctgctgtactacgccgtgacccaggatgccatgctgatcttcgccaacctgagccggggcttcggccggcagggcaagcggaccttcatggccgagagacagtacacacggatggaggactggctgaccgccaagctggcctacgagggcctgagcaagacctacctgtccaagacactggcccagtacacctccaagacatgcagcaactgtgggtttaccatcaccagcgccgactacgacagggtgctggagaagctgaagaagacagcaacaggctggatgaccacaattaacggcaaggagctgaaggtggagggccagattacctactacaacagatacaagagacagaacgtagtcaaggacctgtccgtcgagctggatagactgagcgaagaatctgtgaacaacgacatctcctcctggacaaagggcagaagcggagaagctctgagcctcctgaagaaaagattctcccatagacccgtgcaggagaagttcgtgtgcctgaactgcggcttcgagacacacgcagccgagcaagccgccctgaacatcgccagatcctggctgttcctgcggagccaggagtacaagaaataccagacaaacaagacaaccggcaacaccgataagagagccttcgtcgagacctggcagtccttttaccggaagaagcttaaggaggtgtggaaacctgccgtgcggtctggcggatctggcggaggctccaccagccccaagaaaaagagaaaagtctaagctgccttctgcggggcttgccttctggccatgcccttcttctctcccttgcacctgtacctcttggtctttgaataaagcctgagtaggaaggctagcaaaaaaaaaaaaaaaaaaaaaaaaaaaaaaaaaaaaaaaaaaaaaaaaaaaaaaaaaaaaaaaaaaaaaaaaaaaaaaaa

SEQ ID NO: 9330 - RNA, 8787 nt, synthetic construct
  source 1..8787: mol_type = other RNA
aggaaataagagagaaaagaagagtaagaagaaatataagagccaccatggcccctaagaagaagcgtaaagtgagccggatgaaccacgaccaggagttcgacccccctaaggtgtaccctcccgtccccgccgagaagagaaagcccatccgggtcctgagcctgttcgatggcatcgccaccggtctgctggtgctgaaggacctgggcatccaggtggataggtacattgcctccgaggtgtgcgaggactccatcaccgtgggaatggtgcgtcatcagggcaagatcatgtacgtgggcgacgtgcggagcgtgacacagaagcatatccaggagtggggccctttcgacctggtgatcggcggcagcccttgcaatgacctgagcatcgtgaacccagcccggaagggcctgtacgagggaaccggcagactgttcttcgagttttacagactgctgcacgacgcccggcctaaggaaggcgacgaccggcccttcttttggctgttcgagaatgtggtggccatgggagtcagcgacaagcgggatattagccggttcctggagagcaaccccgtgatgatcgatgccaaggaagtgagcgccgcccaccgggccagatacttctggggcaatctgcctggcatgaacagacccctggccagcaccgtgaacgacaagctggagctgcaggagtgcctggagcacggccggatcgccaagttcagcaaggtgagaaccatcaccacccgaagcaacagcatcaaacaaggcaaggaccagcactttcctgtgttcatgaacgagaaggaggacatcctgtggtgtaccgagatggagagagtgttcgggttcccagtccactacacagatgtcagcaacatgtctagactggccagacagagactgctgggaagaagctggtccgtccctgtgatcagacacctgttcgcccctctgaaggagtacttcgcctgcgtgagcagcggcaacagcaacgccaacagccggggccccagcttctctagcggcctggtgccactgtccctgagagggagccacatgggccccatggagatctacaaaaccgtgagcgcctggaagcggcagcctgtgcgcgtgctgagcctgtttcggaatatcgataaagtcctgaaaagcctgggattcctggagagcggctctggctccggcggtggcaccctgaagtacgtggaggatgtgacaaacgtggtcagacgggatgtggagaagtggggccccttcgatctggtgtacggcagcacccaacccctgggcagctcttgtgaccggtgccctggctggtacatgtttcagttccaccggatcctgcagtacgccctgccgagacaggagtcccagcggccattcttttggattttcatggacaacttgctgctgaccgaggatgaccaggaaactaccactcggttcctgcagaccgaagccgtgaccctgcaggacgtgagaggccgggactaccagaacgccatgcgggtgtggtccaacatccctggactgaaaagcaagcacgcacctctgacccctaaagaagaggagtacctgcaggcccaggtgcggagcagaagcaagctggacgcccctaaggtggatctgctggtgaagaattgcctcctgcccctgagagagtacttcaagtatttcagccagaatagtctgcccctgggaggcagcggcggcggcaagcccggcgtgctgaccttcgccgacgtggccgtgtacttcagcagcgaggagtggggctgcctgaggcccgcccagagggccctgtacagggacgtgatgagggagacctacggccacctgggcgccctgggctgcgccggccccaagcccgccctgatcagctggctggagaggaacaccgacgactgggagcccgccgccctggacccccaggagtgccccaagagggtgaccgtgcagggcggcccaagcagcggcgcccctcctcccagcggcggcaggcggcccaagcagcggcgcccctcctcccagcggcggcagcccagccggctccccaacctctaccgaggagggcacctctgagtccgccacccccgagagcggccctggcacctccaccgagcccagcgagggcagcgcacccggcagccctgccggcagccccacctccacagaggagggaaccagcaccgagcccagcgaaggcagcgccccaggcaccagcaccgagcctagtgagcaggagattaaacggatcaacaagatcagaagaagacttgtgaaagacagcaacaccaagaaggccggcaagacaggccccatgaaaaccctgctggttagagtgatgacacccgatctgagagagcggctggaaaacctgagaaagaagcctgaaaatatcccccagcccatcagcaatacatctagagccaacctgaataagctgctgaccgattacaccgaaatgaagaaggcgatcctgcatgtgtactgggaagagttccagaaggaccctgtgggcctgatgagccgggtggcccagcctgccagcaagaagatcgatcagaacaagctgaaacctgagatggacgagaagggcaacctgaccaccgccggctttgcctgctctcagtgtggccagcccctgttcgtgtacaagctggagcaggtgtctgagaagggcaaggcttacaccaactacttcggacggtgcaatgtggccgagcacgaaaagctgatcctgctggcccagctgaagcccgagaaggatagcgacgaagccgtgacatatagcctgggaaagtttgggcagagggccctggatttctacagcattcatgtgaccaaggagtccacccaccccgtgaagcccctggcccagatcgccggaaacagatacgcctccggacctgtgggaaaggccctgagcgacgcatgtatgggcacaatcgcctccttcctgtctaagtaccaggacatcatcatcgaacaccagaaggtggtgaagggcaaccagaagagactggagagcctgcgggagctggccggcaaggaaaacctggaataccctagcgtgaccctgccacctcagcctcacaccaaggagggcgttgatgcctacaacgaagtgatcgcccgggtgcgaatgtgggtgaacctgaacctgtggcagaagctgaagctaagcagagatgatgccaagcctctgctgagactgaagggattcccttcctttcctctggtcgagagacaggccaacgaagtggactggtgggacatggtgtgtaacgtgaagaagctgatcaacgagaaaaaggaggatggcaaggtgttttggcagaatctggctggctacaagagacaggaagccctgagaccatacctgagcagcgaggaagatcggaagaagggaaagaaattcgctcggtaccagctgggcgacctgctgctgcacctggaaaagaagcacggcgaggactggggaaaggtgtacgacgaggcctgggagcggattgacaagaaagtggaaggcctgagcaagcacatcaagctggaagaggaacggagaagcgaggacgcccagagcaaggccgccctgaccgactggctgcgggctaaggccagcttcgtgatcgagggcctgaaggaggccgacaaggacgagttctgcagatgcgagctgaagctgcagaagtggtacggggacctgcggggaaagcccttcgccatcgaagccgagaacagcatcctggacatcagcggcttcagcaagcagtacaactgtgccttcatctggcagaaggacggcgtgaagaagctgaacctgtacctgatcatcaactacttcaagggcggcaagctgcggttcaagaagatcaaacctgaagccttcgaagccaacagattctacaccgtgatcaacaaaaagagcggcgagatcgtgcccatggaggtgaacttcaacttcgacgaccccaacctgatcatcctgcctctggcctttggcaagagacagggcagagaattcatctggaacgacctgctgtccctggaaaccggcagcctgaagctggccaacggaagagtgatcgagaagacactgtacaacagaagaacccggcaggatgagcctgccctgttcgtggccctgaccttcgagcggcgggaggtcctggactcctccaatatcaaaccaatgaacctgatcggcgtggcaagaggcgaaaacatccccgccgtgatcgccctgaccgaccccgagggctgcccactgagccggtttaaggatagcctgggaaacccaacccacatcctgagaatcggcgagagctataaggagaagcagcggaccatccaggccaagaaggaggtggagcagcggagagccggcggctacagccggaagtacgccagcaaagccaagaatctggcagacgatatggtgagaaacaccgctagagatctgctgtactacgccgtgacccaggatgccatgctgatcttcgccaacctgagccggggcttcggccggcagggcaagcggaccttcatggccgagagacagtacacacggatggaggactggctgaccgccaagctggcctacgagggcctgagcaagacctacctgtccaagacactggcccagtacacctccaagacatgcagcaactgtgggtttaccatcaccagcgccgactacgacagggtgctggagaagctgaagaagacagcaacaggctggatgaccacaattaacggcaaggagctgaaggtggagggccagattacctactacaacagatacaagagacagaacgtagtcaaggacctgtccgtcgagctggatagactgagcgaagaatctgtgaacaacgacatctcctcctggacaaagggcagaagcggagaagctctgagcctcctgaagaaaagattctcccatagacccgtgcaggagaagttcgtgtgcctgaactgcggcttcgagacacacgcagccgagcaagccgccctgaacatcgccagatcctggctgttcctgcggagccaggagtacaagaaataccagacaaacaagacaaccggcaacaccgataagagagccttcgtcgagacctggcagtccttttaccggaagaagcttaaggaggtgtggaaacctgccgtgcggtctggcggatctggcggaggctccaccagccccaagaaaaagagaaaagtctaagctgccttctgcggggcttgccttctggccatgcccttcttctctcccttgcacctgtacctcttggtctttgaataaagcctgagtaggaaggctagcaaaaaaaaaaaaaaaaaaaaaaaaaaaaaaaaaaaaaaaaaaaaaaaaaaaaaaaaaaaaaaaaaaaaaaaaaaaaaaaagcccagccggctccccaacctctaccgaggagggcacctctgagtccgccacccccgagagcggccctggcacctccaccgagcccagcgagggcagcgcacccggcagccctgccggcagccccacctccacagaggagggaaccagcaccgagcccagcgaaggcagcgccccaggcaccagcaccgagcctagtgagcaggagattaaacggatcaacaagatcagaagaagacttgtgaaagacagcaacaccaagaaggccggcaagacaggccccatgaaaaccctgctggttagagtgatgacacccgatctgagagagcggctggaaaacctgagaaagaagcctgaaaatatcccccagcccatcagcaatacatctagagccaacctgaataagctgctgaccgattacaccgaaatgaagaaggcgatcctgcatgtgtactgggaagagttccagaaggaccctgtgggcctgatgagccgggtggcccagcctgccagcaagaagatcgatcagaacaagctgaaacctgagatggacgagaagggcaacctgaccaccgccggctttgcctgctctcagtgtggccagcccctgttcgtgtacaagctggagcaggtgtctgagaagggcaaggcttacaccaactacttcggacggtgcaatgtggccgagcacgaaaagctgatcctgctggcccagctgaagcccgagaaggatagcgacgaagccgtgacatatagcctgggaaagtttgggcagagggccctggatttctacagcattcatgtgaccaaggagtccacccaccccgtgaagcccctggcccagatcgccggaaacagatacgcctccggacctgtgggaaaggccctgagcgacgcatgtatgggcacaatcgcctccttcctgtctaagtaccaggacatcatcatcgaacaccagaaggtggtgaagggcaaccagaagagactggagagcctgcgggagctggccggcaaggaaaacctggaataccctagcgtgaccctgccacctcagcctcacaccaaggagggcgttgatgcctacaacgaagtgatcgcccgggtgcgaatgtgggtgaacctgaacctgtggcagaagctgaagctaagcagagatgatgccaagcctctgctgagactgaagggattcccttcctttcctctggtcgagagacaggccaacgaagtggactggtgggacatggtgtgtaacgtgaagaagctgatcaacgagaaaaaggaggatggcaaggtgttttggcagaatctggctggctacaagagacaggaagccctgagaccatacctgagcagcgaggaagatcggaagaagggaaagaaattcgctcggtaccagctgggcgacctgctgctgcacctggaaaagaagcacggcgaggactggggaaaggtgtacgacgaggcctgggagcggattgacaagaaagtggaaggcctgagcaagcacatcaagctggaagaggaacggagaagcgaggacgcccagagcaaggccgccctgaccgactggctgcgggctaaggccagcttcgtgatcgagggcctgaaggaggccgacaaggacgagttctgcagatgcgagctgaagctgcagaagtggtacggggacctgcggggaaagcccttcgccatcgaagccgagaacagcatcctggacatcagcggcttcagcaagcagtacaactgtgccttcatctggcagaaggacggcgtgaagaagctgaacctgtacctgatcatcaactacttcaagggcggcaagctgcggttcaagaagatcaaacctgaagccttcgaagccaacagattctacaccgtgatcaacaaaaagagcggcgagatcgtgcccatggaggtgaacttcaacttcgacgaccccaacctgatcatcctgcctctggcctttggcaagagacagggcagagaattcatctggaacgacctgctgtccctggaaaccggcagcctgaagctggccaacggaagagtgatcgagaagacactgtacaacagaagaacccggcaggatgagcctgccctgttcgtggccctgaccttcgagcggcgggaggtcctggactcctccaatatcaaaccaatgaacctgatcggcgtggcaagaggcgaaaacatccccgccgtgatcgccctgaccgaccccgagggctgcccactgagccggtttaaggatagcctgggaaacccaacccacatcctgagaatcggcgagagctataaggagaagcagcggaccatccaggccaagaaggaggtggagcagcggagagccggcggctacagccggaagtacgccagcaaagccaagaatctggcagacgatatggtgagaaacaccgctagagatctgctgtactacgccgtgacccaggatgccatgctgatcttcgccaacctgagccggggcttcggccggcagggcaagcggaccttcatggccgagagacagtacacacggatggaggactggctgaccgccaagctggcctacgagggcctgagcaagacctacctgtccaagacactggcccagtacacctccaagacatgcagcaactgtgggtttaccatcaccagcgccgactacgacagggtgctggagaagctgaagaagacagcaacaggctggatgaccacaattaacggcaaggagctgaaggtggagggccagattacctactacaacagatacaagagacagaacgtagtcaaggacctgtccgtcgagctggatagactgagcgaagaatctgtgaacaacgacatctcctcctggacaaagggcagaagcggagaagctctgagcctcctgaagaaaagattctcccatagacccgtgcaggagaagttcgtgtgcctgaactgcggcttcgagacacacgcagccgagcaagccgccctgaacatcgccagatcctggctgttcctgcggagccaggagtacaagaaataccagacaaacaagacaaccggcaacaccgataagagagccttcgtcgagacctggcagtccttttaccggaagaagcttaaggaggtgtggaaacctgccgtgcggtctggcggatctggcggaggctccaccagccccaagaaaaagagaaaagtctaagctgccttctgcggggcttgccttctggccatgcccttcttctctcccttgcacctgtacctcttggtctttgaataaagcctgagtaggaaggctagcaaaaaaaaaaaaaaaaaaaaaaaaaaaaaaaaaaaaaaaaaaaaaaaaaaaaaaaaaaaaaaaaaaaaaaaaaaaaaaaa

SEQ ID NO: 9331 - RNA, 8787 nt, synthetic construct
  source 1..8787: mol_type = other RNA
aggaaataagagagaaaagaagagtaagaagaaatataagagccaccatggcccctaagaagaagcgtaaagtgagccggatgaaccacgaccaggagttcgacccccctaaggtgtaccctcccgtccccgccgagaagagaaagcccatccgggtcctgagcctgttcgatggcatcgccaccggtctgctggtgctgaaggacctgggcatccaggtggataggtacattgcctccgaggtgtgcgaggactccatcaccgtgggaatggtgcgtcatcagggcaagatcatgtacgtgggcgacgtgcggagcgtgacacagaagcatatccaggagtggggccctttcgacctggtgatcggcggcagcccttgcaatgacctgagcatcgtgaacccagcccggaagggcctgtacgagggaaccggcagactgttcttcgagttttacagactgctgcacgacgcccggcctaaggaaggcgacgaccggcccttcttttggctgttcgagaatgtggtggccatgggagtcagcgacaagcgggatattagccggttcctggagagcaaccccgtgatgatcgatgccaaggaagtgagcgccgcccaccgggccagatacttctggggcaatctgcctggcatgaacagacccctggccagcaccgtgaacgacaagctggagctgcaggagtgcctggagcacggccggatcgccaagttcagcaaggtgagaaccatcaccacccgaagcaacagcatcaaacaaggcaaggaccagcactttcctgtgttcatgaacgagaaggaggacatcctgtggtgtaccgagatggagagagtgttcgggttcccagtccactacacagatgtcagcaacatgtctagactggccagacagagactgctgggaagaagctggtccgtccctgtgatcagacacctgttcgcccctctgaaggagtacttcgcctgcgtgagcagcggcaacagcaacgccaacagccggggccccagcttctctagcggcctggtgccactgtccctgagagggagccacatgggccccatggagatctacaaaaccgtgagcgcctggaagcggcagcctgtgcgcgtgctgagcctgtttcggaatatcgataaagtcctgaaaagcctgggattcctggagagcggctctggctccggcggtggcaccctgaagtacgtggaggatgtgacaaacgtggtcagacgggatgtggagaagtggggccccttcgatctggtgtacggcagcacccaacccctgggcagctcttgtgaccggtgccctggctggtacatgtttcagttccaccggatcctgcagtacgccctgccgagacaggagtcccagcggccattcttttggattttcatggacaacttgctgctgaccgaggatgaccaggaaactaccactcggttcctgcagaccgaagccgtgaccctgcaggacgtgagaggccgggactaccagaacgccatgcgggtgtggtccaacatccctggactgaaaagcaagcacgcacctctgacccctaaagaagaggagtacctgcaggcccaggtgcggagcagaagcaagctggacgcccctaaggtggatctgctggtgaagaattgcctcctgcccctgagagagtacttcaagtatttcagccagaatagtctgcccctgggaggcagcggcggcggccagccccaggaggccgtgaccttcaaggacgtggaggtgaccttcagccaggacgagtggggctggctggacgccagccagaggaacctgtacagggacgtgatgctggagaactacggcaacgtgaccagcctggtgggccccttcaccaagcccgccctgatcagctggctggaggccagggagccctggggcctgaacgtgcagggcgcccaccccaagggcagccccagcgccgcccccggcggcccaagcagcggcgcccctcctcccagcggcggcaggcggcccaagcagcggcgcccctcctcccagcggcggcagcccagccggctccccaacctctaccgaggagggcacctctgagtccgccacccccgagagcggccctggcacctccaccgagcccagcgagggcagcgcacccggcagccctgccggcagccccacctccacagaggagggaaccagcaccgagcccagcgaaggcagcgccccaggcaccagcaccgagcctagtgagcaggagattaaacggatcaacaagatcagaagaagacttgtgaaagacagcaacaccaagaaggccggcaagacaggccccatgaaaaccctgctggttagagtgatgacacccgatctgagagagcggctggaaaacctgagaaagaagcctgaaaatatcccccagcccatcagcaatacatctagagccaacctgaataagctgctgaccgattacaccgaaatgaagaaggcgatcctgcatgtgtactgggaagagttccagaaggaccctgtgggcctgatgagccgggtggcccagcctgccagcaagaagatcgatcagaacaagctgaaacctgagatggacgagaagggcaacctgaccaccgccggctttgcctgctctcagtgtggccagcccctgttcgtgtacaagctggagcaggtgtctgagaagggcaaggcttacaccaactacttcggacggtgcaatgtggccgagcacgaaaagctgatcctgctggcccagctgaagcccgagaaggatagcgacgaagccgtgacatatagcctgggaaagtttgggcagagggccctggatttctacagcattcatgtgaccaaggagtccacccaccccgtgaagcccctggcccagatcgccggaaacagatacgcctccggacctgtgggaaaggccctgagcgacgcatgtatgggcacaatcgcctccttcctgtctaagtaccaggacatcatcatcgaacaccagaaggtggtgaagggcaaccagaagagactggagagcctgcgggagctggccggcaaggaaaacctggaataccctagcgtgaccctgccacctcagcctcacaccaaggagggcgttgatgcctacaacgaagtgatcgcccgggtgcgaatgtgggtgaacctgaacctgtggcagaagctgaagctaagcagagatgatgccaagcctctgctgagactgaagggattcccttcctttcctctggtcgagagacaggccaacgaagtggactggtgggacatggtgtgtaacgtgaagaagctgatcaacgagaaaaaggaggatggcaaggtgttttggcagaatctggctggctacaagagacaggaagccctgagaccatacctgagcagcgaggaagatcggaagaagggaaagaaattcgctcggtaccagctgggcgacctgctgctgcacctggaaaagaagcacggcgaggactggggaaaggtgtacgacgaggcctgggagcggattgacaagaaagtggaaggcctgagcaagcacatcaagctggaagaggaacggagaagcgaggacgcccagagcaaggccgccctgaccgactggctgcgggctaaggccagcttcgtgatcgagggcctgaaggaggccgacaaggacgagttctgcagatgcgagctgaagctgcagaagtggtacggggacctgcggggaaagcccttcgccatcgaagccgagaacagcatcctggacatcagcggcttcagcaagcagtacaactgtgccttcatctggcagaaggacggcgtgaagaagctgaacctgtacctgatcatcaactacttcaagggcggcaagctgcggttcaagaagatcaaacctgaagccttcgaagccaacagattctacaccgtgatcaacaaaaagagcggcgagatcgtgcccatggaggtgaacttcaacttcgacgaccccaacctgatcatcctgcctctggcctttggcaagagacagggcagagaattcatctggaacgacctgctgtccctggaaaccggcagcctgaagctggccaacggaagagtgatcgagaagacactgtacaacagaagaacccggcaggatgagcctgccctgttcgtggccctgaccttcgagcggcgggaggtcctggactcctccaatatcaaaccaatgaacctgatcggcgtggcaagaggcgaaaacatccccgccgtgatcgccctgaccgaccccgagggctgcccactgagccggtttaaggatagcctgggaaacccaacccacatcctgagaatcggcgagagctataaggagaagcagcggaccatccaggccaagaaggaggtggagcagcggagagccggcggctacagccggaagtacgccagcaaagccaagaatctggcagacgatatggtgagaaacaccgctagagatctgctgtactacgccgtgacccaggatgccatgctgatcttcgccaacctgagccggggcttcggccggcagggcaagcggaccttcatggccgagagacagtacacacggatggaggactggctgaccgccaagctggcctacgagggcctgagcaagacctacctgtccaagacactggcccagtacacctccaagacatgcagcaactgtgggtttaccatcaccagcgccgactacgacagggtgctggagaagctgaagaagacagcaacaggctggatgaccacaattaacggcaaggagctgaaggtggagggccagattacctactacaacagatacaagagacagaacgtagtcaaggacctgtccgtcgagctggatagactgagcgaagaatctgtgaacaacgacatctcctcctggacaaagggcagaagcggagaagctctgagcctcctgaagaaaagattctcccatagacccgtgcaggagaagttcgtgtgcctgaactgcggcttcgagacacacgcagccgagcaagccgccctgaacatcgccagatcctggctgttcctgcggagccaggagtacaagaaataccagacaaacaagacaaccggcaacaccgataagagagccttcgtcgagacctggcagtccttttaccggaagaagcttaaggaggtgtggaaacctgccgtgcggtctggcggatctggcggaggctccaccagccccaagaaaaagagaaaagtctaagctgccttctgcggggcttgccttctggccatgcccttcttctctcccttgcacctgtacctcttggtctttgaataaagcctgagtaggaaggctagcaaaaaaaaaaaaaaaaaaaaaaaaaaaaaaaaaaaaaaaaaaaaaaaaaaaaaaaaaaaaaaaaaaaaaaaaaaaaaaaagcccagccggctccccaacctctaccgaggagggcacctctgagtccgccacccccgagagcggccctggcacctccaccgagcccagcgagggcagcgcacccggcagccctgccggcagccccacctccacagaggagggaaccagcaccgagcccagcgaaggcagcgccccaggcaccagcaccgagcctagtgagcaggagattaaacggatcaacaagatcagaagaagacttgtgaaagacagcaacaccaagaaggccggcaagacaggccccatgaaaaccctgctggttagagtgatgacacccgatctgagagagcggctggaaaacctgagaaagaagcctgaaaatatcccccagcccatcagcaatacatctagagccaacctgaataagctgctgaccgattacaccgaaatgaagaaggcgatcctgcatgtgtactgggaagagttccagaaggaccctgtgggcctgatgagccgggtggcccagcctgccagcaagaagatcgatcagaacaagctgaaacctgagatggacgagaagggcaacctgaccaccgccggctttgcctgctctcagtgtggccagcccctgttcgtgtacaagctggagcaggtgtctgagaagggcaaggcttacaccaactacttcggacggtgcaatgtggccgagcacgaaaagctgatcctgctggcccagctgaagcccgagaaggatagcgacgaagccgtgacatatagcctgggaaagtttgggcagagggccctggatttctacagcattcatgtgaccaaggagtccacccaccccgtgaagcccctggcccagatcgccggaaacagatacgcctccggacctgtgggaaaggccctgagcgacgcatgtatgggcacaatcgcctccttcctgtctaagtaccaggacatcatcatcgaacaccagaaggtggtgaagggcaaccagaagagactggagagcctgcgggagctggccggcaaggaaaacctggaataccctagcgtgaccctgccacctcagcctcacaccaaggagggcgttgatgcctacaacgaagtgatcgcccgggtgcgaatgtgggtgaacctgaacctgtggcagaagctgaagctaagcagagatgatgccaagcctctgctgagactgaagggattcccttcctttcctctggtcgagagacaggccaacgaagtggactggtgggacatggtgtgtaacgtgaagaagctgatcaacgagaaaaaggaggatggcaaggtgttttggcagaatctggctggctacaagagacaggaagccctgagaccatacctgagcagcgaggaagatcggaagaagggaaagaaattcgctcggtaccagctgggcgacctgctgctgcacctggaaaagaagcacggcgaggactggggaaaggtgtacgacgaggcctgggagcggattgacaagaaagtggaaggcctgagcaagcacatcaagctggaagaggaacggagaagcgaggacgcccagagcaaggccgccctgaccgactggctgcgggctaaggccagcttcgtgatcgagggcctgaaggaggccgacaaggacgagttctgcagatgcgagctgaagctgcagaagtggtacggggacctgcggggaaagcccttcgccatcgaagccgagaacagcatcctggacatcagcggcttcagcaagcagtacaactgtgccttcatctggcagaaggacggcgtgaagaagctgaacctgtacctgatcatcaactacttcaagggcggcaagctgcggttcaagaagatcaaacctgaagccttcgaagccaacagattctacaccgtgatcaacaaaaagagcggcgagatcgtgcccatggaggtgaacttcaacttcgacgaccccaacctgatcatcctgcctctggcctttggcaagagacagggcagagaattcatctggaacgacctgctgtccctggaaaccggcagcctgaagctggccaacggaagagtgatcgagaagacactgtacaacagaagaacccggcaggatgagcctgccctgttcgtggccctgaccttcgagcggcgggaggtcctggactcctccaatatcaaaccaatgaacctgatcggcgtggcaagaggcgaaaacatccccgccgtgatcgccctgaccgaccccgagggctgcccactgagccggtttaaggatagcctgggaaacccaacccacatcctgagaatcggcgagagctataaggagaagcagcggaccatccaggccaagaaggaggtggagcagcggagagccggcggctacagccggaagtacgccagcaaagccaagaatctggcagacgatatggtgagaaacaccgctagagatctgctgtactacgccgtgacccaggatgccatgctgatcttcgccaacctgagccggggcttcggccggcagggcaagcggaccttcatggccgagagacagtacacacggatggaggactggctgaccgccaagctggcctacgagggcctgagcaagacctacctgtccaagacactggcccagtacacctccaagacatgcagcaactgtgggtttaccatcaccagcgccgactacgacagggtgctggagaagctgaagaagacagcaacaggctggatgaccacaattaacggcaaggagctgaaggtggagggccagattacctactacaacagatacaagagacagaacgtagtcaaggacctgtccgtcgagctggatagactgagcgaagaatctgtgaacaacgacatctcctcctggacaaagggcagaagcggagaagctctgagcctcctgaagaaaagattctcccatagacccgtgcaggagaagttcgtgtgcctgaactgcggcttcgagacacacgcagccgagcaagccgccctgaacatcgccagatcctggctgttcctgcggagccaggagtacaagaaataccagacaaacaagacaaccggcaacaccgataagagagccttcgtcgagacctggcagtccttttaccggaagaagcttaaggaggtgtggaaacctgccgtgcggtctggcggatctggcggaggctccaccagccccaagaaaaagagaaaagtctaagctgccttctgcggggcttgccttctggccatgcccttcttctctcccttgcacctgtacctcttggtctttgaataaagcctgagtaggaaggctagcaaaaaaaaaaaaaaaaaaaaaaaaaaaaaaaaaaaaaaaaaaaaaaaaaaaaaaaaaaaaaaaaaaaaaaaaaaaaaaaa

SEQ ID NO: 9332 - RNA, 8787 nt, synthetic construct
  source 1..8787: mol_type = other RNA
aggaaataagagagaaaagaagagtaagaagaaatataagagccaccatggcccctaagaagaagcgtaaagtgagccggatgaaccacgaccaggagttcgacccccctaaggtgtaccctcccgtccccgccgagaagagaaagcccatccgggtcctgagcctgttcgatggcatcgccaccggtctgctggtgctgaaggacctgggcatccaggtggataggtacattgcctccgaggtgtgcgaggactccatcaccgtgggaatggtgcgtcatcagggcaagatcatgtacgtgggcgacgtgcggagcgtgacacagaagcatatccaggagtggggccctttcgacctggtgatcggcggcagcccttgcaatgacctgagcatcgtgaacccagcccggaagggcctgtacgagggaaccggcagactgttcttcgagttttacagactgctgcacgacgcccggcctaaggaaggcgacgaccggcccttcttttggctgttcgagaatgtggtggccatgggagtcagcgacaagcgggatattagccggttcctggagagcaaccccgtgatgatcgatgccaaggaagtgagcgccgcccaccgggccagatacttctggggcaatctgcctggcatgaacagacccctggccagcaccgtgaacgacaagctggagctgcaggagtgcctggagcacggccggatcgccaagttcagcaaggtgagaaccatcaccacccgaagcaacagcatcaaacaaggcaaggaccagcactttcctgtgttcatgaacgagaaggaggacatcctgtggtgtaccgagatggagagagtgttcgggttcccagtccactacacagatgtcagcaacatgtctagactggccagacagagactgctgggaagaagctggtccgtccctgtgatcagacacctgttcgcccctctgaaggagtacttcgcctgcgtgagcagcggcaacagcaacgccaacagccggggccccagcttctctagcggcctggtgccactgtccctgagagggagccacatgggccccatggagatctacaaaaccgtgagcgcctggaagcggcagcctgtgcgcgtgctgagcctgtttcggaatatcgataaagtcctgaaaagcctgggattcctggagagcggctctggctccggcggtggcaccctgaagtacgtggaggatgtgacaaacgtggtcagacgggatgtggagaagtggggccccttcgatctggtgtacggcagcacccaacccctgggcagctcttgtgaccggtgccctggctggtacatgtttcagttccaccggatcctgcagtacgccctgccgagacaggagtcccagcggccattcttttggattttcatggacaacttgctgctgaccgaggatgaccaggaaactaccactcggttcctgcagaccgaagccgtgaccctgcaggacgtgagaggccgggactaccagaacgccatgcgggtgtggtccaacatccctggactgaaaagcaagcacgcacctctgacccctaaagaagaggagtacctgcaggcccaggtgcggagcagaagcaagctggacgcccctaaggtggatctgctggtgaagaattgcctcctgcccctgagagagtacttcaagtatttcagccagaatagtctgcccctgggaggcagcggcggcggcagccaggagcccgtgaccttcgaggacgtggccgtgtacttcacccagaaccagtgggccagcctggaccccatgcagagggccctgtacctggaggtgatgctggagaactacgccaacatcaccagcctggccctgcccttccccaagcccgacctgatcctgcagctggagcagggcgaggccccctggggcctggacccctggacccccctggacggcgaggccctgggcggcgtgcacggcggcccaagcagcggcgcccctcctcccagcggcggcaggcggcccaagcagcggcgcccctcctcccagcggcggcagcccagccggctccccaacctctaccgaggagggcacctctgagtccgccacccccgagagcggccctggcacctccaccgagcccagcgagggcagcgcacccggcagccctgccggcagccccacctccacagaggagggaaccagcaccgagcccagcgaaggcagcgccccaggcaccagcaccgagcctagtgagcaggagattaaacggatcaacaagatcagaagaagacttgtgaaagacagcaacaccaagaaggccggcaagacaggccccatgaaaaccctgctggttagagtgatgacacccgatctgagagagcggctggaaaacctgagaaagaagcctgaaaatatcccccagcccatcagcaatacatctagagccaacctgaataagctgctgaccgattacaccgaaatgaagaaggcgatcctgcatgtgtactgggaagagttccagaaggaccctgtgggcctgatgagccgggtggcccagcctgccagcaagaagatcgatcagaacaagctgaaacctgagatggacgagaagggcaacctgaccaccgccggctttgcctgctctcagtgtggccagcccctgttcgtgtacaagctggagcaggtgtctgagaagggcaaggcttacaccaactacttcggacggtgcaatgtggccgagcacgaaaagctgatcctgctggcccagctgaagcccgagaaggatagcgacgaagccgtgacatatagcctgggaaagtttgggcagagggccctggatttctacagcattcatgtgaccaaggagtccacccaccccgtgaagcccctggcccagatcgccggaaacagatacgcctccggacctgtgggaaaggccctgagcgacgcatgtatgggcacaatcgcctccttcctgtctaagtaccaggacatcatcatcgaacaccagaaggtggtgaagggcaaccagaagagactggagagcctgcgggagctggccggcaaggaaaacctggaataccctagcgtgaccctgccacctcagcctcacaccaaggagggcgttgatgcctacaacgaagtgatcgcccgggtgcgaatgtgggtgaacctgaacctgtggcagaagctgaagctaagcagagatgatgccaagcctctgctgagactgaagggattcccttcctttcctctggtcgagagacaggccaacgaagtggactggtgggacatggtgtgtaacgtgaagaagctgatcaacgagaaaaaggaggatggcaaggtgttttggcagaatctggctggctacaagagacaggaagccctgagaccatacctgagcagcgaggaagatcggaagaagggaaagaaattcgctcggtaccagctgggcgacctgctgctgcacctggaaaagaagcacggcgaggactggggaaaggtgtacgacgaggcctgggagcggattgacaagaaagtggaaggcctgagcaagcacatcaagctggaagaggaacggagaagcgaggacgcccagagcaaggccgccctgaccgactggctgcgggctaaggccagcttcgtgatcgagggcctgaaggaggccgacaaggacgagttctgcagatgcgagctgaagctgcagaagtggtacggggacctgcggggaaagcccttcgccatcgaagccgagaacagcatcctggacatcagcggcttcagcaagcagtacaactgtgccttcatctggcagaaggacggcgtgaagaagctgaacctgtacctgatcatcaactacttcaagggcggcaagctgcggttcaagaagatcaaacctgaagccttcgaagccaacagattctacaccgtgatcaacaaaaagagcggcgagatcgtgcccatggaggtgaacttcaacttcgacgaccccaacctgatcatcctgcctctggcctttggcaagagacagggcagagaattcatctggaacgacctgctgtccctggaaaccggcagcctgaagctggccaacggaagagtgatcgagaagacactgtacaacagaagaacccggcaggatgagcctgccctgttcgtggccctgaccttcgagcggcgggaggtcctggactcctccaatatcaaaccaatgaacctgatcggcgtggcaagaggcgaaaacatccccgccgtgatcgccctgaccgaccccgagggctgcccactgagccggtttaaggatagcctgggaaacccaacccacatcctgagaatcggcgagagctataaggagaagcagcggaccatccaggccaagaaggaggtggagcagcggagagccggcggctacagccggaagtacgccagcaaagccaagaatctggcagacgatatggtgagaaacaccgctagagatctgctgtactacgccgtgacccaggatgccatgctgatcttcgccaacctgagccggggcttcggccggcagggcaagcggaccttcatggccgagagacagtacacacggatggaggactggctgaccgccaagctggcctacgagggcctgagcaagacctacctgtccaagacactggcccagtacacctccaagacatgcagcaactgtgggtttaccatcaccagcgccgactacgacagggtgctggagaagctgaagaagacagcaacaggctggatgaccacaattaacggcaaggagctgaaggtggagggccagattacctactacaacagatacaagagacagaacgtagtcaaggacctgtccgtcgagctggatagactgagcgaagaatctgtgaacaacgacatctcctcctggacaaagggcagaagcggagaagctctgagcctcctgaagaaaagattctcccatagacccgtgcaggagaagttcgtgtgcctgaactgcggcttcgagacacacgcagccgagcaagccgccctgaacatcgccagatcctggctgttcctgcggagccaggagtacaagaaataccagacaaacaagacaaccggcaacaccgataagagagccttcgtcgagacctggcagtccttttaccggaagaagcttaaggaggtgtggaaacctgccgtgcggtctggcggatctggcggaggctccaccagccccaagaaaaagagaaaagtctaagctgccttctgcggggcttgccttctggccatgcccttcttctctcccttgcacctgtacctcttggtctttgaataaagcctgagtaggaaggctagcaaaaaaaaaaaaaaaaaaaaaaaaaaaaaaaaaaaaaaaaaaaaaaaaaaaaaaaaaaaaaaaaaaaaaaaaaaaaaaaagcccagccggctccccaacctctaccgaggagggcacctctgagtccgccacccccgagagcggccctggcacctccaccgagcccagcgagggcagcgcacccggcagccctgccggcagccccacctccacagaggagggaaccagcaccgagcccagcgaaggcagcgccccaggcaccagcaccgagcctagtgagcaggagattaaacggatcaacaagatcagaagaagacttgtgaaagacagcaacaccaagaaggccggcaagacaggccccatgaaaaccctgctggttagagtgatgacacccgatctgagagagcggctggaaaacctgagaaagaagcctgaaaatatcccccagcccatcagcaatacatctagagccaacctgaataagctgctgaccgattacaccgaaatgaagaaggcgatcctgcatgtgtactgggaagagttccagaaggaccctgtgggcctgatgagccgggtggcccagcctgccagcaagaagatcgatcagaacaagctgaaacctgagatggacgagaagggcaacctgaccaccgccggctttgcctgctctcagtgtggccagcccctgttcgtgtacaagctggagcaggtgtctgagaagggcaaggcttacaccaactacttcggacggtgcaatgtggccgagcacgaaaagctgatcctgctggcccagctgaagcccgagaaggatagcgacgaagccgtgacatatagcctgggaaagtttgggcagagggccctggatttctacagcattcatgtgaccaaggagtccacccaccccgtgaagcccctggcccagatcgccggaaacagatacgcctccggacctgtgggaaaggccctgagcgacgcatgtatgggcacaatcgcctccttcctgtctaagtaccaggacatcatcatcgaacaccagaaggtggtgaagggcaaccagaagagactggagagcctgcgggagctggccggcaaggaaaacctggaataccctagcgtgaccctgccacctcagcctcacaccaaggagggcgttgatgcctacaacgaagtgatcgcccgggtgcgaatgtgggtgaacctgaacctgtggcagaagctgaagctaagcagagatgatgccaagcctctgctgagactgaagggattcccttcctttcctctggtcgagagacaggccaacgaagtggactggtgggacatggtgtgtaacgtgaagaagctgatcaacgagaaaaaggaggatggcaaggtgttttggcagaatctggctggctacaagagacaggaagccctgagaccatacctgagcagcgaggaagatcggaagaagggaaagaaattcgctcggtaccagctgggcgacctgctgctgcacctggaaaagaagcacggcgaggactggggaaaggtgtacgacgaggcctgggagcggattgacaagaaagtggaaggcctgagcaagcacatcaagctggaagaggaacggagaagcgaggacgcccagagcaaggccgccctgaccgactggctgcgggctaaggccagcttcgtgatcgagggcctgaaggaggccgacaaggacgagttctgcagatgcgagctgaagctgcagaagtggtacggggacctgcggggaaagcccttcgccatcgaagccgagaacagcatcctggacatcagcggcttcagcaagcagtacaactgtgccttcatctggcagaaggacggcgtgaagaagctgaacctgtacctgatcatcaactacttcaagggcggcaagctgcggttcaagaagatcaaacctgaagccttcgaagccaacagattctacaccgtgatcaacaaaaagagcggcgagatcgtgcccatggaggtgaacttcaacttcgacgaccccaacctgatcatcctgcctctggcctttggcaagagacagggcagagaattcatctggaacgacctgctgtccctggaaaccggcagcctgaagctggccaacggaagagtgatcgagaagacactgtacaacagaagaacccggcaggatgagcctgccctgttcgtggccctgaccttcgagcggcgggaggtcctggactcctccaatatcaaaccaatgaacctgatcggcgtggcaagaggcgaaaacatccccgccgtgatcgccctgaccgaccccgagggctgcccactgagccggtttaaggatagcctgggaaacccaacccacatcctgagaatcggcgagagctataaggagaagcagcggaccatccaggccaagaaggaggtggagcagcggagagccggcggctacagccggaagtacgccagcaaagccaagaatctggcagacgatatggtgagaaacaccgctagagatctgctgtactacgccgtgacccaggatgccatgctgatcttcgccaacctgagccggggcttcggccggcagggcaagcggaccttcatggccgagagacagtacacacggatggaggactggctgaccgccaagctggcctacgagggcctgagcaagacctacctgtccaagacactggcccagtacacctccaagacatgcagcaactgtgggtttaccatcaccagcgccgactacgacagggtgctggagaagctgaagaagacagcaacaggctggatgaccacaattaacggcaaggagctgaaggtggagggccagattacctactacaacagatacaagagacagaacgtagtcaaggacctgtccgtcgagctggatagactgagcgaagaatctgtgaacaacgacatctcctcctggacaaagggcagaagcggagaagctctgagcctcctgaagaaaagattctcccatagacccgtgcaggagaagttcgtgtgcctgaactgcggcttcgagacacacgcagccgagcaagccgccctgaacatcgccagatcctggctgttcctgcggagccaggagtacaagaaataccagacaaacaagacaaccggcaacaccgataagagagccttcgtcgagacctggcagtccttttaccggaagaagcttaaggaggtgtggaaacctgccgtgcggtctggcggatctggcggaggctccaccagccccaagaaaaagagaaaagtctaagctgccttctgcggggcttgccttctggccatgcccttcttctctcccttgcacctgtacctcttggtctttgaataaagcctgagtaggaaggctagcaaaaaaaaaaaaaaaaaaaaaaaaaaaaaaaaaaaaaaaaaaaaaaaaaaaaaaaaaaaaaaaaaaaaaaaaaaaaaaaa

SEQ ID NO: 9333 - RNA, 8787 nt, synthetic construct
  source 1..8787: mol_type = other RNA
aggaaataagagagaaaagaagagtaagaagaaatataagagccaccatggcccctaagaagaagcgtaaagtgagccggatgaaccacgaccaggagttcgacccccctaaggtgtaccctcccgtccccgccgagaagagaaagcccatccgggtcctgagcctgttcgatggcatcgccaccggtctgctggtgctgaaggacctgggcatccaggtggataggtacattgcctccgaggtgtgcgaggactccatcaccgtgggaatggtgcgtcatcagggcaagatcatgtacgtgggcgacgtgcggagcgtgacacagaagcatatccaggagtggggccctttcgacctggtgatcggcggcagcccttgcaatgacctgagcatcgtgaacccagcccggaagggcctgtacgagggaaccggcagactgttcttcgagttttacagactgctgcacgacgcccggcctaaggaaggcgacgaccggcccttcttttggctgttcgagaatgtggtggccatgggagtcagcgacaagcgggatattagccggttcctggagagcaaccccgtgatgatcgatgccaaggaagtgagcgccgcccaccgggccagatacttctggggcaatctgcctggcatgaacagacccctggccagcaccgtgaacgacaagctggagctgcaggagtgcctggagcacggccggatcgccaagttcagcaaggtgagaaccatcaccacccgaagcaacagcatcaaacaaggcaaggaccagcactttcctgtgttcatgaacgagaaggaggacatcctgtggtgtaccgagatggagagagtgttcgggttcccagtccactacacagatgtcagcaacatgtctagactggccagacagagactgctgggaagaagctggtccgtccctgtgatcagacacctgttcgcccctctgaaggagtacttcgcctgcgtgagcagcggcaacagcaacgccaacagccggggccccagcttctctagcggcctggtgccactgtccctgagagggagccacatgggccccatggagatctacaaaaccgtgagcgcctggaagcggcagcctgtgcgcgtgctgagcctgtttcggaatatcgataaagtcctgaaaagcctgggattcctggagagcggctctggctccggcggtggcaccctgaagtacgtggaggatgtgacaaacgtggtcagacgggatgtggagaagtggggccccttcgatctggtgtacggcagcacccaacccctgggcagctcttgtgaccggtgccctggctggtacatgtttcagttccaccggatcctgcagtacgccctgccgagacaggagtcccagcggccattcttttggattttcatggacaacttgctgctgaccgaggatgaccaggaaactaccactcggttcctgcagaccgaagccgtgaccctgcaggacgtgagaggccgggactaccagaacgccatgcgggtgtggtccaacatccctggactgaaaagcaagcacgcacctctgacccctaaagaagaggagtacctgcaggcccaggtgcggagcagaagcaagctggacgcccctaaggtggatctgctggtgaagaattgcctcctgcccctgagagagtacttcaagtatttcagccagaatagtctgcccctgggaggcagcggcggcggcgcccagatgctggtgaccttcaaggacgtggccgtgaccttcacccaggaggagtggaggcagctggacctgacccagaggaccctgtacagggaggtgatgctggagacctgcggcctgctggtgagcctgggccacagggtgcccaagcccgagctggtgcacctgctggagcacggccaggagctgtggaccgtgaagaccggcctgagccagcccacctgcgccggcgacaggacccagggcggcccaagcagcggcgcccctcctcccagcggcggcaggcggcccaagcagcggcgcccctcctcccagcggcggcagcccagccggctccccaacctctaccgaggagggcacctctgagtccgccacccccgagagcggccctggcacctccaccgagcccagcgagggcagcgcacccggcagccctgccggcagccccacctccacagaggagggaaccagcaccgagcccagcgaaggcagcgccccaggcaccagcaccgagcctagtgagcaggagattaaacggatcaacaagatcagaagaagacttgtgaaagacagcaacaccaagaaggccggcaagacaggccccatgaaaaccctgctggttagagtgatgacacccgatctgagagagcggctggaaaacctgagaaagaagcctgaaaatatcccccagcccatcagcaatacatctagagccaacctgaataagctgctgaccgattacaccgaaatgaagaaggcgatcctgcatgtgtactgggaagagttccagaaggaccctgtgggcctgatgagccgggtggcccagcctgccagcaagaagatcgatcagaacaagctgaaacctgagatggacgagaagggcaacctgaccaccgccggctttgcctgctctcagtgtggccagcccctgttcgtgtacaagctggagcaggtgtctgagaagggcaaggcttacaccaactacttcggacggtgcaatgtggccgagcacgaaaagctgatcctgctggcccagctgaagcccgagaaggatagcgacgaagccgtgacatatagcctgggaaagtttgggcagagggccctggatttctacagcattcatgtgaccaaggagtccacccaccccgtgaagcccctggcccagatcgccggaaacagatacgcctccggacctgtgggaaaggccctgagcgacgcatgtatgggcacaatcgcctccttcctgtctaagtaccaggacatcatcatcgaacaccagaaggtggtgaagggcaaccagaagagactggagagcctgcgggagctggccggcaaggaaaacctggaataccctagcgtgaccctgccacctcagcctcacaccaaggagggcgttgatgcctacaacgaagtgatcgcccgggtgcgaatgtgggtgaacctgaacctgtggcagaagctgaagctaagcagagatgatgccaagcctctgctgagactgaagggattcccttcctttcctctggtcgagagacaggccaacgaagtggactggtgggacatggtgtgtaacgtgaagaagctgatcaacgagaaaaaggaggatggcaaggtgttttggcagaatctggctggctacaagagacaggaagccctgagaccatacctgagcagcgaggaagatcggaagaagggaaagaaattcgctcggtaccagctgggcgacctgctgctgcacctggaaaagaagcacggcgaggactggggaaaggtgtacgacgaggcctgggagcggattgacaagaaagtggaaggcctgagcaagcacatcaagctggaagaggaacggagaagcgaggacgcccagagcaaggccgccctgaccgactggctgcgggctaaggccagcttcgtgatcgagggcctgaaggaggccgacaaggacgagttctgcagatgcgagctgaagctgcagaagtggtacggggacctgcggggaaagcccttcgccatcgaagccgagaacagcatcctggacatcagcggcttcagcaagcagtacaactgtgccttcatctggcagaaggacggcgtgaagaagctgaacctgtacctgatcatcaactacttcaagggcggcaagctgcggttcaagaagatcaaacctgaagccttcgaagccaacagattctacaccgtgatcaacaaaaagagcggcgagatcgtgcccatggaggtgaacttcaacttcgacgaccccaacctgatcatcctgcctctggcctttggcaagagacagggcagagaattcatctggaacgacctgctgtccctggaaaccggcagcctgaagctggccaacggaagagtgatcgagaagacactgtacaacagaagaacccggcaggatgagcctgccctgttcgtggccctgaccttcgagcggcgggaggtcctggactcctccaatatcaaaccaatgaacctgatcggcgtggcaagaggcgaaaacatccccgccgtgatcgccctgaccgaccccgagggctgcccactgagccggtttaaggatagcctgggaaacccaacccacatcctgagaatcggcgagagctataaggagaagcagcggaccatccaggccaagaaggaggtggagcagcggagagccggcggctacagccggaagtacgccagcaaagccaagaatctggcagacgatatggtgagaaacaccgctagagatctgctgtactacgccgtgacccaggatgccatgctgatcttcgccaacctgagccggggcttcggccggcagggcaagcggaccttcatggccgagagacagtacacacggatggaggactggctgaccgccaagctggcctacgagggcctgagcaagacctacctgtccaagacactggcccagtacacctccaagacatgcagcaactgtgggtttaccatcaccagcgccgactacgacagggtgctggagaagctgaagaagacagcaacaggctggatgaccacaattaacggcaaggagctgaaggtggagggccagattacctactacaacagatacaagagacagaacgtagtcaaggacctgtccgtcgagctggatagactgagcgaagaatctgtgaacaacgacatctcctcctggacaaagggcagaagcggagaagctctgagcctcctgaagaaaagattctcccatagacccgtgcaggagaagttcgtgtgcctgaactgcggcttcgagacacacgcagccgagcaagccgccctgaacatcgccagatcctggctgttcctgcggagccaggagtacaagaaataccagacaaacaagacaaccggcaacaccgataagagagccttcgtcgagacctggcagtccttttaccggaagaagcttaaggaggtgtggaaacctgccgtgcggtctggcggatctggcggaggctccaccagccccaagaaaaagagaaaagtctaagctgccttctgcggggcttgccttctggccatgcccttcttctctcccttgcacctgtacctcttggtctttgaataaagcctgagtaggaaggctagcaaaaaaaaaaaaaaaaaaaaaaaaaaaaaaaaaaaaaaaaaaaaaaaaaaaaaaaaaaaaaaaaaaaaaaaaaaaaaaaagcccagccggctccccaacctctaccgaggagggcacctctgagtccgccacccccgagagcggccctggcacctccaccgagcccagcgagggcagcgcacccggcagccctgccggcagccccacctccacagaggagggaaccagcaccgagcccagcgaaggcagcgccccaggcaccagcaccgagcctagtgagcaggagattaaacggatcaacaagatcagaagaagacttgtgaaagacagcaacaccaagaaggccggcaagacaggccccatgaaaaccctgctggttagagtgatgacacccgatctgagagagcggctggaaaacctgagaaagaagcctgaaaatatcccccagcccatcagcaatacatctagagccaacctgaataagctgctgaccgattacaccgaaatgaagaaggcgatcctgcatgtgtactgggaagagttccagaaggaccctgtgggcctgatgagccgggtggcccagcctgccagcaagaagatcgatcagaacaagctgaaacctgagatggacgagaagggcaacctgaccaccgccggctttgcctgctctcagtgtggccagcccctgttcgtgtacaagctggagcaggtgtctgagaagggcaaggcttacaccaactacttcggacggtgcaatgtggccgagcacgaaaagctgatcctgctggcccagctgaagcccgagaaggatagcgacgaagccgtgacatatagcctgggaaagtttgggcagagggccctggatttctacagcattcatgtgaccaaggagtccacccaccccgtgaagcccctggcccagatcgccggaaacagatacgcctccggacctgtgggaaaggccctgagcgacgcatgtatgggcacaatcgcctccttcctgtctaagtaccaggacatcatcatcgaacaccagaaggtggtgaagggcaaccagaagagactggagagcctgcgggagctggccggcaaggaaaacctggaataccctagcgtgaccctgccacctcagcctcacaccaaggagggcgttgatgcctacaacgaagtgatcgcccgggtgcgaatgtgggtgaacctgaacctgtggcagaagctgaagctaagcagagatgatgccaagcctctgctgagactgaagggattcccttcctttcctctggtcgagagacaggccaacgaagtggactggtgggacatggtgtgtaacgtgaagaagctgatcaacgagaaaaaggaggatggcaaggtgttttggcagaatctggctggctacaagagacaggaagccctgagaccatacctgagcagcgaggaagatcggaagaagggaaagaaattcgctcggtaccagctgggcgacctgctgctgcacctggaaaagaagcacggcgaggactggggaaaggtgtacgacgaggcctgggagcggattgacaagaaagtggaaggcctgagcaagcacatcaagctggaagaggaacggagaagcgaggacgcccagagcaaggccgccctgaccgactggctgcgggctaaggccagcttcgtgatcgagggcctgaaggaggccgacaaggacgagttctgcagatgcgagctgaagctgcagaagtggtacggggacctgcggggaaagcccttcgccatcgaagccgagaacagcatcctggacatcagcggcttcagcaagcagtacaactgtgccttcatctggcagaaggacggcgtgaagaagctgaacctgtacctgatcatcaactacttcaagggcggcaagctgcggttcaagaagatcaaacctgaagccttcgaagccaacagattctacaccgtgatcaacaaaaagagcggcgagatcgtgcccatggaggtgaacttcaacttcgacgaccccaacctgatcatcctgcctctggcctttggcaagagacagggcagagaattcatctggaacgacctgctgtccctggaaaccggcagcctgaagctggccaacggaagagtgatcgagaagacactgtacaacagaagaacccggcaggatgagcctgccctgttcgtggccctgaccttcgagcggcgggaggtcctggactcctccaatatcaaaccaatgaacctgatcggcgtggcaagaggcgaaaacatccccgccgtgatcgccctgaccgaccccgagggctgcccactgagccggtttaaggatagcctgggaaacccaacccacatcctgagaatcggcgagagctataaggagaagcagcggaccatccaggccaagaaggaggtggagcagcggagagccggcggctacagccggaagtacgccagcaaagccaagaatctggcagacgatatggtgagaaacaccgctagagatctgctgtactacgccgtgacccaggatgccatgctgatcttcgccaacctgagccggggcttcggccggcagggcaagcggaccttcatggccgagagacagtacacacggatggaggactggctgaccgccaagctggcctacgagggcctgagcaagacctacctgtccaagacactggcccagtacacctccaagacatgcagcaactgtgggtttaccatcaccagcgccgactacgacagggtgctggagaagctgaagaagacagcaacaggctggatgaccacaattaacggcaaggagctgaaggtggagggccagattacctactacaacagatacaagagacagaacgtagtcaaggacctgtccgtcgagctggatagactgagcgaagaatctgtgaacaacgacatctcctcctggacaaagggcagaagcggagaagctctgagcctcctgaagaaaagattctcccatagacccgtgcaggagaagttcgtgtgcctgaactgcggcttcgagacacacgcagccgagcaagccgccctgaacatcgccagatcctggctgttcctgcggagccaggagtacaagaaataccagacaaacaagacaaccggcaacaccgataagagagccttcgtcgagacctggcagtccttttaccggaagaagcttaaggaggtgtggaaacctgccgtgcggtctggcggatctggcggaggctccaccagccccaagaaaaagagaaaagtctaagctgccttctgcggggcttgccttctggccatgcccttcttctctcccttgcacctgtacctcttggtctttgaataaagcctgagtaggaaggctagcaaaaaaaaaaaaaaaaaaaaaaaaaaaaaaaaaaaaaaaaaaaaaaaaaaaaaaaaaaaaaaaaaaaaaaaaaaaaaaaa

SEQ ID NO: 9334 - RNA, 8787 nt, synthetic construct
  source 1..8787: mol_type = other RNA
aggaaataagagagaaaagaagagtaagaagaaatataagagccaccatggcccctaagaagaagcgtaaagtgagccggatgaaccacgaccaggagttcgacccccctaaggtgtaccctcccgtccccgccgagaagagaaagcccatccgggtcctgagcctgttcgatggcatcgccaccggtctgctggtgctgaaggacctgggcatccaggtggataggtacattgcctccgaggtgtgcgaggactccatcaccgtgggaatggtgcgtcatcagggcaagatcatgtacgtgggcgacgtgcggagcgtgacacagaagcatatccaggagtggggccctttcgacctggtgatcggcggcagcccttgcaatgacctgagcatcgtgaacccagcccggaagggcctgtacgagggaaccggcagactgttcttcgagttttacagactgctgcacgacgcccggcctaaggaaggcgacgaccggcccttcttttggctgttcgagaatgtggtggccatgggagtcagcgacaagcgggatattagccggttcctggagagcaaccccgtgatgatcgatgccaaggaagtgagcgccgcccaccgggccagatacttctggggcaatctgcctggcatgaacagacccctggccagcaccgtgaacgacaagctggagctgcaggagtgcctggagcacggccggatcgccaagttcagcaaggtgagaaccatcaccacccgaagcaacagcatcaaacaaggcaaggaccagcactttcctgtgttcatgaacgagaaggaggacatcctgtggtgtaccgagatggagagagtgttcgggttcccagtccactacacagatgtcagcaacatgtctagactggccagacagagactgctgggaagaagctggtccgtccctgtgatcagacacctgttcgcccctctgaaggagtacttcgcctgcgtgagcagcggcaacagcaacgccaacagccggggccccagcttctctagcggcctggtgccactgtccctgagagggagccacatgggccccatggagatctacaaaaccgtgagcgcctggaagcggcagcctgtgcgcgtgctgagcctgtttcggaatatcgataaagtcctgaaaagcctgggattcctggagagcggctctggctccggcggtggcaccctgaagtacgtggaggatgtgacaaacgtggtcagacgggatgtggagaagtggggccccttcgatctggtgtacggcagcacccaacccctgggcagctcttgtgaccggtgccctggctggtacatgtttcagttccaccggatcctgcagtacgccctgccgagacaggagtcccagcggccattcttttggattttcatggacaacttgctgctgaccgaggatgaccaggaaactaccactcggttcctgcagaccgaagccgtgaccctgcaggacgtgagaggccgggactaccagaacgccatgcgggtgtggtccaacatccctggactgaaaagcaagcacgcacctctgacccctaaagaagaggagtacctgcaggcccaggtgcggagcagaagcaagctggacgcccctaaggtggatctgctggtgaagaattgcctcctgcccctgagagagtacttcaagtatttcagccagaatagtctgcccctgggaggcagcggcggcggcagcggcagccaggacgccgtgacctacgaggacgtgcacgtgaacttcacccccgaggagtgggccctgctggacagcagccagaagagcctgtacaaggaggtgatgctggagacctacaggaacctgaccagcatcggctacaagtgggaggacctgaacatcgaggagcactgccagagcagcaggaggctgaagaggtacatcatcggccacagcaggtacaagccctgcgacagggagggcggcccaagcagcggcgcccctcctcccagcggcggcaggcggcccaagcagcggcgcccctcctcccagcggcggcagcccagccggctccccaacctctaccgaggagggcacctctgagtccgccacccccgagagcggccctggcacctccaccgagcccagcgagggcagcgcacccggcagccctgccggcagccccacctccacagaggagggaaccagcaccgagcccagcgaaggcagcgccccaggcaccagcaccgagcctagtgagcaggagattaaacggatcaacaagatcagaagaagacttgtgaaagacagcaacaccaagaaggccggcaagacaggccccatgaaaaccctgctggttagagtgatgacacccgatctgagagagcggctggaaaacctgagaaagaagcctgaaaatatcccccagcccatcagcaatacatctagagccaacctgaataagctgctgaccgattacaccgaaatgaagaaggcgatcctgcatgtgtactgggaagagttccagaaggaccctgtgggcctgatgagccgggtggcccagcctgccagcaagaagatcgatcagaacaagctgaaacctgagatggacgagaagggcaacctgaccaccgccggctttgcctgctctcagtgtggccagcccctgttcgtgtacaagctggagcaggtgtctgagaagggcaaggcttacaccaactacttcggacggtgcaatgtggccgagcacgaaaagctgatcctgctggcccagctgaagcccgagaaggatagcgacgaagccgtgacatatagcctgggaaagtttgggcagagggccctggatttctacagcattcatgtgaccaaggagtccacccaccccgtgaagcccctggcccagatcgccggaaacagatacgcctccggacctgtgggaaaggccctgagcgacgcatgtatgggcacaatcgcctccttcctgtctaagtaccaggacatcatcatcgaacaccagaaggtggtgaagggcaaccagaagagactggagagcctgcgggagctggccggcaaggaaaacctggaataccctagcgtgaccctgccacctcagcctcacaccaaggagggcgttgatgcctacaacgaagtgatcgcccgggtgcgaatgtgggtgaacctgaacctgtggcagaagctgaagctaagcagagatgatgccaagcctctgctgagactgaagggattcccttcctttcctctggtcgagagacaggccaacgaagtggactggtgggacatggtgtgtaacgtgaagaagctgatcaacgagaaaaaggaggatggcaaggtgttttggcagaatctggctggctacaagagacaggaagccctgagaccatacctgagcagcgaggaagatcggaagaagggaaagaaattcgctcggtaccagctgggcgacctgctgctgcacctggaaaagaagcacggcgaggactggggaaaggtgtacgacgaggcctgggagcggattgacaagaaagtggaaggcctgagcaagcacatcaagctggaagaggaacggagaagcgaggacgcccagagcaaggccgccctgaccgactggctgcgggctaaggccagcttcgtgatcgagggcctgaaggaggccgacaaggacgagttctgcagatgcgagctgaagctgcagaagtggtacggggacctgcggggaaagcccttcgccatcgaagccgagaacagcatcctggacatcagcggcttcagcaagcagtacaactgtgccttcatctggcagaaggacggcgtgaagaagctgaacctgtacctgatcatcaactacttcaagggcggcaagctgcggttcaagaagatcaaacctgaagccttcgaagccaacagattctacaccgtgatcaacaaaaagagcggcgagatcgtgcccatggaggtgaacttcaacttcgacgaccccaacctgatcatcctgcctctggcctttggcaagagacagggcagagaattcatctggaacgacctgctgtccctggaaaccggcagcctgaagctggccaacggaagagtgatcgagaagacactgtacaacagaagaacccggcaggatgagcctgccctgttcgtggccctgaccttcgagcggcgggaggtcctggactcctccaatatcaaaccaatgaacctgatcggcgtggcaagaggcgaaaacatccccgccgtgatcgccctgaccgaccccgagggctgcccactgagccggtttaaggatagcctgggaaacccaacccacatcctgagaatcggcgagagctataaggagaagcagcggaccatccaggccaagaaggaggtggagcagcggagagccggcggctacagccggaagtacgccagcaaagccaagaatctggcagacgatatggtgagaaacaccgctagagatctgctgtactacgccgtgacccaggatgccatgctgatcttcgccaacctgagccggggcttcggccggcagggcaagcggaccttcatggccgagagacagtacacacggatggaggactggctgaccgccaagctggcctacgagggcctgagcaagacctacctgtccaagacactggcccagtacacctccaagacatgcagcaactgtgggtttaccatcaccagcgccgactacgacagggtgctggagaagctgaagaagacagcaacaggctggatgaccacaattaacggcaaggagctgaaggtggagggccagattacctactacaacagatacaagagacagaacgtagtcaaggacctgtccgtcgagctggatagactgagcgaagaatctgtgaacaacgacatctcctcctggacaaagggcagaagcggagaagctctgagcctcctgaagaaaagattctcccatagacccgtgcaggagaagttcgtgtgcctgaactgcggcttcgagacacacgcagccgagcaagccgccctgaacatcgccagatcctggctgttcctgcggagccaggagtacaagaaataccagacaaacaagacaaccggcaacaccgataagagagccttcgtcgagacctggcagtccttttaccggaagaagcttaaggaggtgtggaaacctgccgtgcggtctggcggatctggcggaggctccaccagccccaagaaaaagagaaaagtctaagctgccttctgcggggcttgccttctggccatgcccttcttctctcccttgcacctgtacctcttggtctttgaataaagcctgagtaggaaggctagcaaaaaaaaaaaaaaaaaaaaaaaaaaaaaaaaaaaaaaaaaaaaaaaaaaaaaaaaaaaaaaaaaaaaaaaaaaaaaaaagcccagccggctccccaacctctaccgaggagggcacctctgagtccgccacccccgagagcggccctggcacctccaccgagcccagcgagggcagcgcacccggcagccctgccggcagccccacctccacagaggagggaaccagcaccgagcccagcgaaggcagcgccccaggcaccagcaccgagcctagtgagcaggagattaaacggatcaacaagatcagaagaagacttgtgaaagacagcaacaccaagaaggccggcaagacaggccccatgaaaaccctgctggttagagtgatgacacccgatctgagagagcggctggaaaacctgagaaagaagcctgaaaatatcccccagcccatcagcaatacatctagagccaacctgaataagctgctgaccgattacaccgaaatgaagaaggcgatcctgcatgtgtactgggaagagttccagaaggaccctgtgggcctgatgagccgggtggcccagcctgccagcaagaagatcgatcagaacaagctgaaacctgagatggacgagaagggcaacctgaccaccgccggctttgcctgctctcagtgtggccagcccctgttcgtgtacaagctggagcaggtgtctgagaagggcaaggcttacaccaactacttcggacggtgcaatgtggccgagcacgaaaagctgatcctgctggcccagctgaagcccgagaaggatagcgacgaagccgtgacatatagcctgggaaagtttgggcagagggccctggatttctacagcattcatgtgaccaaggagtccacccaccccgtgaagcccctggcccagatcgccggaaacagatacgcctccggacctgtgggaaaggccctgagcgacgcatgtatgggcacaatcgcctccttcctgtctaagtaccaggacatcatcatcgaacaccagaaggtggtgaagggcaaccagaagagactggagagcctgcgggagctggccggcaaggaaaacctggaataccctagcgtgaccctgccacctcagcctcacaccaaggagggcgttgatgcctacaacgaagtgatcgcccgggtgcgaatgtgggtgaacctgaacctgtggcagaagctgaagctaagcagagatgatgccaagcctctgctgagactgaagggattcccttcctttcctctggtcgagagacaggccaacgaagtggactggtgggacatggtgtgtaacgtgaagaagctgatcaacgagaaaaaggaggatggcaaggtgttttggcagaatctggctggctacaagagacaggaagccctgagaccatacctgagcagcgaggaagatcggaagaagggaaagaaattcgctcggtaccagctgggcgacctgctgctgcacctggaaaagaagcacggcgaggactggggaaaggtgtacgacgaggcctgggagcggattgacaagaaagtggaaggcctgagcaagcacatcaagctggaagaggaacggagaagcgaggacgcccagagcaaggccgccctgaccgactggctgcgggctaaggccagcttcgtgatcgagggcctgaaggaggccgacaaggacgagttctgcagatgcgagctgaagctgcagaagtggtacggggacctgcggggaaagcccttcgccatcgaagccgagaacagcatcctggacatcagcggcttcagcaagcagtacaactgtgccttcatctggcagaaggacggcgtgaagaagctgaacctgtacctgatcatcaactacttcaagggcggcaagctgcggttcaagaagatcaaacctgaagccttcgaagccaacagattctacaccgtgatcaacaaaaagagcggcgagatcgtgcccatggaggtgaacttcaacttcgacgaccccaacctgatcatcctgcctctggcctttggcaagagacagggcagagaattcatctggaacgacctgctgtccctggaaaccggcagcctgaagctggccaacggaagagtgatcgagaagacactgtacaacagaagaacccggcaggatgagcctgccctgttcgtggccctgaccttcgagcggcgggaggtcctggactcctccaatatcaaaccaatgaacctgatcggcgtggcaagaggcgaaaacatccccgccgtgatcgccctgaccgaccccgagggctgcccactgagccggtttaaggatagcctgggaaacccaacccacatcctgagaatcggcgagagctataaggagaagcagcggaccatccaggccaagaaggaggtggagcagcggagagccggcggctacagccggaagtacgccagcaaagccaagaatctggcagacgatatggtgagaaacaccgctagagatctgctgtactacgccgtgacccaggatgccatgctgatcttcgccaacctgagccggggcttcggccggcagggcaagcggaccttcatggccgagagacagtacacacggatggaggactggctgaccgccaagctggcctacgagggcctgagcaagacctacctgtccaagacactggcccagtacacctccaagacatgcagcaactgtgggtttaccatcaccagcgccgactacgacagggtgctggagaagctgaagaagacagcaacaggctggatgaccacaattaacggcaaggagctgaaggtggagggccagattacctactacaacagatacaagagacagaacgtagtcaaggacctgtccgtcgagctggatagactgagcgaagaatctgtgaacaacgacatctcctcctggacaaagggcagaagcggagaagctctgagcctcctgaagaaaagattctcccatagacccgtgcaggagaagttcgtgtgcctgaactgcggcttcgagacacacgcagccgagcaagccgccctgaacatcgccagatcctggctgttcctgcggagccaggagtacaagaaataccagacaaacaagacaaccggcaacaccgataagagagccttcgtcgagacctggcagtccttttaccggaagaagcttaaggaggtgtggaaacctgccgtgcggtctggcggatctggcggaggctccaccagccccaagaaaaagagaaaagtctaagctgccttctgcggggcttgccttctggccatgcccttcttctctcccttgcacctgtacctcttggtctttgaataaagcctgagtaggaaggctagcaaaaaaaaaaaaaaaaaaaaaaaaaaaaaaaaaaaaaaaaaaaaaaaaaaaaaaaaaaaaaaaaaaaaaaaaaaaaaaaa

SEQ ID NO: 9335 - RNA, 8787 nt, synthetic construct
  source 1..8787: mol_type = other RNA
aggaaataagagagaaaagaagagtaagaagaaatataagagccaccatggcccctaagaagaagcgtaaagtgagccggatgaaccacgaccaggagttcgacccccctaaggtgtaccctcccgtccccgccgagaagagaaagcccatccgggtcctgagcctgttcgatggcatcgccaccggtctgctggtgctgaaggacctgggcatccaggtggataggtacattgcctccgaggtgtgcgaggactccatcaccgtgggaatggtgcgtcatcagggcaagatcatgtacgtgggcgacgtgcggagcgtgacacagaagcatatccaggagtggggccctttcgacctggtgatcggcggcagcccttgcaatgacctgagcatcgtgaacccagcccggaagggcctgtacgagggaaccggcagactgttcttcgagttttacagactgctgcacgacgcccggcctaaggaaggcgacgaccggcccttcttttggctgttcgagaatgtggtggccatgggagtcagcgacaagcgggatattagccggttcctggagagcaaccccgtgatgatcgatgccaaggaagtgagcgccgcccaccgggccagatacttctggggcaatctgcctggcatgaacagacccctggccagcaccgtgaacgacaagctggagctgcaggagtgcctggagcacggccggatcgccaagttcagcaaggtgagaaccatcaccacccgaagcaacagcatcaaacaaggcaaggaccagcactttcctgtgttcatgaacgagaaggaggacatcctgtggtgtaccgagatggagagagtgttcgggttcccagtccactacacagatgtcagcaacatgtctagactggccagacagagactgctgggaagaagctggtccgtccctgtgatcagacacctgttcgcccctctgaaggagtacttcgcctgcgtgagcagcggcaacagcaacgccaacagccggggccccagcttctctagcggcctggtgccactgtccctgagagggagccacatgggccccatggagatctacaaaaccgtgagcgcctggaagcggcagcctgtgcgcgtgctgagcctgtttcggaatatcgataaagtcctgaaaagcctgggattcctggagagcggctctggctccggcggtggcaccctgaagtacgtggaggatgtgacaaacgtggtcagacgggatgtggagaagtggggccccttcgatctggtgtacggcagcacccaacccctgggcagctcttgtgaccggtgccctggctggtacatgtttcagttccaccggatcctgcagtacgccctgccgagacaggagtcccagcggccattcttttggattttcatggacaacttgctgctgaccgaggatgaccaggaaactaccactcggttcctgcagaccgaagccgtgaccctgcaggacgtgagaggccgggactaccagaacgccatgcgggtgtggtccaacatccctggactgaaaagcaagcacgcacctctgacccctaaagaagaggagtacctgcaggcccaggtgcggagcagaagcaagctggacgcccctaaggtggatctgctggtgaagaattgcctcctgcccctgagagagtacttcaagtatttcagccagaatagtctgcccctgggaggcagcggcggcggcccccaggagagcgtggccttcgacgacgtggccgtgtacttcaccaagaaggagtgggccatcatggtgcccgaccagagggccctgtacagggacgtgatgctggagaactacgaggccgtggccttcgtggtgccccccaccagcaagcccgccctgatcagccacctggagcagggcaaggagccctgcttcacccagccccagggcgtgctgagcaggagggactggagggccggcttcggcggcccaagcagcggcgcccctcctcccagcggcggcaggcggcccaagcagcggcgcccctcctcccagcggcggcagcccagccggctccccaacctctaccgaggagggcacctctgagtccgccacccccgagagcggccctggcacctccaccgagcccagcgagggcagcgcacccggcagccctgccggcagccccacctccacagaggagggaaccagcaccgagcccagcgaaggcagcgccccaggcaccagcaccgagcctagtgagcaggagattaaacggatcaacaagatcagaagaagacttgtgaaagacagcaacaccaagaaggccggcaagacaggccccatgaaaaccctgctggttagagtgatgacacccgatctgagagagcggctggaaaacctgagaaagaagcctgaaaatatcccccagcccatcagcaatacatctagagccaacctgaataagctgctgaccgattacaccgaaatgaagaaggcgatcctgcatgtgtactgggaagagttccagaaggaccctgtgggcctgatgagccgggtggcccagcctgccagcaagaagatcgatcagaacaagctgaaacctgagatggacgagaagggcaacctgaccaccgccggctttgcctgctctcagtgtggccagcccctgttcgtgtacaagctggagcaggtgtctgagaagggcaaggcttacaccaactacttcggacggtgcaatgtggccgagcacgaaaagctgatcctgctggcccagctgaagcccgagaaggatagcgacgaagccgtgacatatagcctgggaaagtttgggcagagggccctggatttctacagcattcatgtgaccaaggagtccacccaccccgtgaagcccctggcccagatcgccggaaacagatacgcctccggacctgtgggaaaggccctgagcgacgcatgtatgggcacaatcgcctccttcctgtctaagtaccaggacatcatcatcgaacaccagaaggtggtgaagggcaaccagaagagactggagagcctgcgggagctggccggcaaggaaaacctggaataccctagcgtgaccctgccacctcagcctcacaccaaggagggcgttgatgcctacaacgaagtgatcgcccgggtgcgaatgtgggtgaacctgaacctgtggcagaagctgaagctaagcagagatgatgccaagcctctgctgagactgaagggattcccttcctttcctctggtcgagagacaggccaacgaagtggactggtgggacatggtgtgtaacgtgaagaagctgatcaacgagaaaaaggaggatggcaaggtgttttggcagaatctggctggctacaagagacaggaagccctgagaccatacctgagcagcgaggaagatcggaagaagggaaagaaattcgctcggtaccagctgggcgacctgctgctgcacctggaaaagaagcacggcgaggactggggaaaggtgtacgacgaggcctgggagcggattgacaagaaagtggaaggcctgagcaagcacatcaagctggaagaggaacggagaagcgaggacgcccagagcaaggccgccctgaccgactggctgcgggctaaggccagcttcgtgatcgagggcctgaaggaggccgacaaggacgagttctgcagatgcgagctgaagctgcagaagtggtacggggacctgcggggaaagcccttcgccatcgaagccgagaacagcatcctggacatcagcggcttcagcaagcagtacaactgtgccttcatctggcagaaggacggcgtgaagaagctgaacctgtacctgatcatcaactacttcaagggcggcaagctgcggttcaagaagatcaaacctgaagccttcgaagccaacagattctacaccgtgatcaacaaaaagagcggcgagatcgtgcccatggaggtgaacttcaacttcgacgaccccaacctgatcatcctgcctctggcctttggcaagagacagggcagagaattcatctggaacgacctgctgtccctggaaaccggcagcctgaagctggccaacggaagagtgatcgagaagacactgtacaacagaagaacccggcaggatgagcctgccctgttcgtggccctgaccttcgagcggcgggaggtcctggactcctccaatatcaaaccaatgaacctgatcggcgtggcaagaggcgaaaacatccccgccgtgatcgccctgaccgaccccgagggctgcccactgagccggtttaaggatagcctgggaaacccaacccacatcctgagaatcggcgagagctataaggagaagcagcggaccatccaggccaagaaggaggtggagcagcggagagccggcggctacagccggaagtacgccagcaaagccaagaatctggcagacgatatggtgagaaacaccgctagagatctgctgtactacgccgtgacccaggatgccatgctgatcttcgccaacctgagccggggcttcggccggcagggcaagcggaccttcatggccgagagacagtacacacggatggaggactggctgaccgccaagctggcctacgagggcctgagcaagacctacctgtccaagacactggcccagtacacctccaagacatgcagcaactgtgggtttaccatcaccagcgccgactacgacagggtgctggagaagctgaagaagacagcaacaggctggatgaccacaattaacggcaaggagctgaaggtggagggccagattacctactacaacagatacaagagacagaacgtagtcaaggacctgtccgtcgagctggatagactgagcgaagaatctgtgaacaacgacatctcctcctggacaaagggcagaagcggagaagctctgagcctcctgaagaaaagattctcccatagacccgtgcaggagaagttcgtgtgcctgaactgcggcttcgagacacacgcagccgagcaagccgccctgaacatcgccagatcctggctgttcctgcggagccaggagtacaagaaataccagacaaacaagacaaccggcaacaccgataagagagccttcgtcgagacctggcagtccttttaccggaagaagcttaaggaggtgtggaaacctgccgtgcggtctggcggatctggcggaggctccaccagccccaagaaaaagagaaaagtctaagctgccttctgcggggcttgccttctggccatgcccttcttctctcccttgcacctgtacctcttggtctttgaataaagcctgagtaggaaggctagcaaaaaaaaaaaaaaaaaaaaaaaaaaaaaaaaaaaaaaaaaaaaaaaaaaaaaaaaaaaaaaaaaaaaaaaaaaaaaaaagcccagccggctccccaacctctaccgaggagggcacctctgagtccgccacccccgagagcggccctggcacctccaccgagcccagcgagggcagcgcacccggcagccctgccggcagccccacctccacagaggagggaaccagcaccgagcccagcgaaggcagcgccccaggcaccagcaccgagcctagtgagcaggagattaaacggatcaacaagatcagaagaagacttgtgaaagacagcaacaccaagaaggccggcaagacaggccccatgaaaaccctgctggttagagtgatgacacccgatctgagagagcggctggaaaacctgagaaagaagcctgaaaatatcccccagcccatcagcaatacatctagagccaacctgaataagctgctgaccgattacaccgaaatgaagaaggcgatcctgcatgtgtactgggaagagttccagaaggaccctgtgggcctgatgagccgggtggcccagcctgccagcaagaagatcgatcagaacaagctgaaacctgagatggacgagaagggcaacctgaccaccgccggctttgcctgctctcagtgtggccagcccctgttcgtgtacaagctggagcaggtgtctgagaagggcaaggcttacaccaactacttcggacggtgcaatgtggccgagcacgaaaagctgatcctgctggcccagctgaagcccgagaaggatagcgacgaagccgtgacatatagcctgggaaagtttgggcagagggccctggatttctacagcattcatgtgaccaaggagtccacccaccccgtgaagcccctggcccagatcgccggaaacagatacgcctccggacctgtgggaaaggccctgagcgacgcatgtatgggcacaatcgcctccttcctgtctaagtaccaggacatcatcatcgaacaccagaaggtggtgaagggcaaccagaagagactggagagcctgcgggagctggccggcaaggaaaacctggaataccctagcgtgaccctgccacctcagcctcacaccaaggagggcgttgatgcctacaacgaagtgatcgcccgggtgcgaatgtgggtgaacctgaacctgtggcagaagctgaagctaagcagagatgatgccaagcctctgctgagactgaagggattcccttcctttcctctggtcgagagacaggccaacgaagtggactggtgggacatggtgtgtaacgtgaagaagctgatcaacgagaaaaaggaggatggcaaggtgttttggcagaatctggctggctacaagagacaggaagccctgagaccatacctgagcagcgaggaagatcggaagaagggaaagaaattcgctcggtaccagctgggcgacctgctgctgcacctggaaaagaagcacggcgaggactggggaaaggtgtacgacgaggcctgggagcggattgacaagaaagtggaaggcctgagcaagcacatcaagctggaagaggaacggagaagcgaggacgcccagagcaaggccgccctgaccgactggctgcgggctaaggccagcttcgtgatcgagggcctgaaggaggccgacaaggacgagttctgcagatgcgagctgaagctgcagaagtggtacggggacctgcggggaaagcccttcgccatcgaagccgagaacagcatcctggacatcagcggcttcagcaagcagtacaactgtgccttcatctggcagaaggacggcgtgaagaagctgaacctgtacctgatcatcaactacttcaagggcggcaagctgcggttcaagaagatcaaacctgaagccttcgaagccaacagattctacaccgtgatcaacaaaaagagcggcgagatcgtgcccatggaggtgaacttcaacttcgacgaccccaacctgatcatcctgcctctggcctttggcaagagacagggcagagaattcatctggaacgacctgctgtccctggaaaccggcagcctgaagctggccaacggaagagtgatcgagaagacactgtacaacagaagaacccggcaggatgagcctgccctgttcgtggccctgaccttcgagcggcgggaggtcctggactcctccaatatcaaaccaatgaacctgatcggcgtggcaagaggcgaaaacatccccgccgtgatcgccctgaccgaccccgagggctgcccactgagccggtttaaggatagcctgggaaacccaacccacatcctgagaatcggcgagagctataaggagaagcagcggaccatccaggccaagaaggaggtggagcagcggagagccggcggctacagccggaagtacgccagcaaagccaagaatctggcagacgatatggtgagaaacaccgctagagatctgctgtactacgccgtgacccaggatgccatgctgatcttcgccaacctgagccggggcttcggccggcagggcaagcggaccttcatggccgagagacagtacacacggatggaggactggctgaccgccaagctggcctacgagggcctgagcaagacctacctgtccaagacactggcccagtacacctccaagacatgcagcaactgtgggtttaccatcaccagcgccgactacgacagggtgctggagaagctgaagaagacagcaacaggctggatgaccacaattaacggcaaggagctgaaggtggagggccagattacctactacaacagatacaagagacagaacgtagtcaaggacctgtccgtcgagctggatagactgagcgaagaatctgtgaacaacgacatctcctcctggacaaagggcagaagcggagaagctctgagcctcctgaagaaaagattctcccatagacccgtgcaggagaagttcgtgtgcctgaactgcggcttcgagacacacgcagccgagcaagccgccctgaacatcgccagatcctggctgttcctgcggagccaggagtacaagaaataccagacaaacaagacaaccggcaacaccgataagagagccttcgtcgagacctggcagtccttttaccggaagaagcttaaggaggtgtggaaacctgccgtgcggtctggcggatctggcggaggctccaccagccccaagaaaaagagaaaagtctaagctgccttctgcggggcttgccttctggccatgcccttcttctctcccttgcacctgtacctcttggtctttgaataaagcctgagtaggaaggctagcaaaaaaaaaaaaaaaaaaaaaaaaaaaaaaaaaaaaaaaaaaaaaaaaaaaaaaaaaaaaaaaaaaaaaaaaaaaaaaaa

SEQ ID NO: 9336 - RNA, 8787 nt, synthetic construct
  source 1..8787: mol_type = other RNA
aggaaataagagagaaaagaagagtaagaagaaatataagagccaccatggcccctaagaagaagcgtaaagtgagccggatgaaccacgaccaggagttcgacccccctaaggtgtaccctcccgtccccgccgagaagagaaagcccatccgggtcctgagcctgttcgatggcatcgccaccggtctgctggtgctgaaggacctgggcatccaggtggataggtacattgcctccgaggtgtgcgaggactccatcaccgtgggaatggtgcgtcatcagggcaagatcatgtacgtgggcgacgtgcggagcgtgacacagaagcatatccaggagtggggccctttcgacctggtgatcggcggcagcccttgcaatgacctgagcatcgtgaacccagcccggaagggcctgtacgagggaaccggcagactgttcttcgagttttacagactgctgcacgacgcccggcctaaggaaggcgacgaccggcccttcttttggctgttcgagaatgtggtggccatgggagtcagcgacaagcgggatattagccggttcctggagagcaaccccgtgatgatcgatgccaaggaagtgagcgccgcccaccgggccagatacttctggggcaatctgcctggcatgaacagacccctggccagcaccgtgaacgacaagctggagctgcaggagtgcctggagcacggccggatcgccaagttcagcaaggtgagaaccatcaccacccgaagcaacagcatcaaacaaggcaaggaccagcactttcctgtgttcatgaacgagaaggaggacatcctgtggtgtaccgagatggagagagtgttcgggttcccagtccactacacagatgtcagcaacatgtctagactggccagacagagactgctgggaagaagctggtccgtccctgtgatcagacacctgttcgcccctctgaaggagtacttcgcctgcgtgagcagcggcaacagcaacgccaacagccggggccccagcttctctagcggcctggtgccactgtccctgagagggagccacatgggccccatggagatctacaaaaccgtgagcgcctggaagcggcagcctgtgcgcgtgctgagcctgtttcggaatatcgataaagtcctgaaaagcctgggattcctggagagcggctctggctccggcggtggcaccctgaagtacgtggaggatgtgacaaacgtggtcagacgggatgtggagaagtggggccccttcgatctggtgtacggcagcacccaacccctgggcagctcttgtgaccggtgccctggctggtacatgtttcagttccaccggatcctgcagtacgccctgccgagacaggagtcccagcggccattcttttggattttcatggacaacttgctgctgaccgaggatgaccaggaaactaccactcggttcctgcagaccgaagccgtgaccctgcaggacgtgagaggccgggactaccagaacgccatgcgggtgtggtccaacatccctggactgaaaagcaagcacgcacctctgacccctaaagaagaggagtacctgcaggcccaggtgcggagcagaagcaagctggacgcccctaaggtggatctgctggtgaagaattgcctcctgcccctgagagagtacttcaagtatttcagccagaatagtctgcccctgggaggcagcggcggcggcgagatgggcctgctgaccttcagggacatcgccatcgagttcagcctggccgagtggcagtgcctggaccacgcccagaggaacctgtacagggacgtgatgctggagaactacaggaacctggtgagcctgggcgtggccgtgagcaagcccgacctgatcacctgcctggagcacaacaaggagcccaggaacatcaagaggaacgagatggtgagcaagcaccccgtgacctgcagccacggcggcccaagcagcggcgcccctcctcccagcggcggcaggcggcccaagcagcggcgcccctcctcccagcggcggcagcccagccggctccccaacctctaccgaggagggcacctctgagtccgccacccccgagagcggccctggcacctccaccgagcccagcgagggcagcgcacccggcagccctgccggcagccccacctccacagaggagggaaccagcaccgagcccagcgaaggcagcgccccaggcaccagcaccgagcctagtgagcaggagattaaacggatcaacaagatcagaagaagacttgtgaaagacagcaacaccaagaaggccggcaagacaggccccatgaaaaccctgctggttagagtgatgacacccgatctgagagagcggctggaaaacctgagaaagaagcctgaaaatatcccccagcccatcagcaatacatctagagccaacctgaataagctgctgaccgattacaccgaaatgaagaaggcgatcctgcatgtgtactgggaagagttccagaaggaccctgtgggcctgatgagccgggtggcccagcctgccagcaagaagatcgatcagaacaagctgaaacctgagatggacgagaagggcaacctgaccaccgccggctttgcctgctctcagtgtggccagcccctgttcgtgtacaagctggagcaggtgtctgagaagggcaaggcttacaccaactacttcggacggtgcaatgtggccgagcacgaaaagctgatcctgctggcccagctgaagcccgagaaggatagcgacgaagccgtgacatatagcctgggaaagtttgggcagagggccctggatttctacagcattcatgtgaccaaggagtccacccaccccgtgaagcccctggcccagatcgccggaaacagatacgcctccggacctgtgggaaaggccctgagcgacgcatgtatgggcacaatcgcctccttcctgtctaagtaccaggacatcatcatcgaacaccagaaggtggtgaagggcaaccagaagagactggagagcctgcgggagctggccggcaaggaaaacctggaataccctagcgtgaccctgccacctcagcctcacaccaaggagggcgttgatgcctacaacgaagtgatcgcccgggtgcgaatgtgggtgaacctgaacctgtggcagaagctgaagctaagcagagatgatgccaagcctctgctgagactgaagggattcccttcctttcctctggtcgagagacaggccaacgaagtggactggtgggacatggtgtgtaacgtgaagaagctgatcaacgagaaaaaggaggatggcaaggtgttttggcagaatctggctggctacaagagacaggaagccctgagaccatacctgagcagcgaggaagatcggaagaagggaaagaaattcgctcggtaccagctgggcgacctgctgctgcacctggaaaagaagcacggcgaggactggggaaaggtgtacgacgaggcctgggagcggattgacaagaaagtggaaggcctgagcaagcacatcaagctggaagaggaacggagaagcgaggacgcccagagcaaggccgccctgaccgactggctgcgggctaaggccagcttcgtgatcgagggcctgaaggaggccgacaaggacgagttctgcagatgcgagctgaagctgcagaagtggtacggggacctgcggggaaagcccttcgccatcgaagccgagaacagcatcctggacatcagcggcttcagcaagcagtacaactgtgccttcatctggcagaaggacggcgtgaagaagctgaacctgtacctgatcatcaactacttcaagggcggcaagctgcggttcaagaagatcaaacctgaagccttcgaagccaacagattctacaccgtgatcaacaaaaagagcggcgagatcgtgcccatggaggtgaacttcaacttcgacgaccccaacctgatcatcctgcctctggcctttggcaagagacagggcagagaattcatctggaacgacctgctgtccctggaaaccggcagcctgaagctggccaacggaagagtgatcgagaagacactgtacaacagaagaacccggcaggatgagcctgccctgttcgtggccctgaccttcgagcggcgggaggtcctggactcctccaatatcaaaccaatgaacctgatcggcgtggcaagaggcgaaaacatccccgccgtgatcgccctgaccgaccccgagggctgcccactgagccggtttaaggatagcctgggaaacccaacccacatcctgagaatcggcgagagctataaggagaagcagcggaccatccaggccaagaaggaggtggagcagcggagagccggcggctacagccggaagtacgccagcaaagccaagaatctggcagacgatatggtgagaaacaccgctagagatctgctgtactacgccgtgacccaggatgccatgctgatcttcgccaacctgagccggggcttcggccggcagggcaagcggaccttcatggccgagagacagtacacacggatggaggactggctgaccgccaagctggcctacgagggcctgagcaagacctacctgtccaagacactggcccagtacacctccaagacatgcagcaactgtgggtttaccatcaccagcgccgactacgacagggtgctggagaagctgaagaagacagcaacaggctggatgaccacaattaacggcaaggagctgaaggtggagggccagattacctactacaacagatacaagagacagaacgtagtcaaggacctgtccgtcgagctggatagactgagcgaagaatctgtgaacaacgacatctcctcctggacaaagggcagaagcggagaagctctgagcctcctgaagaaaagattctcccatagacccgtgcaggagaagttcgtgtgcctgaactgcggcttcgagacacacgcagccgagcaagccgccctgaacatcgccagatcctggctgttcctgcggagccaggagtacaagaaataccagacaaacaagacaaccggcaacaccgataagagagccttcgtcgagacctggcagtccttttaccggaagaagcttaaggaggtgtggaaacctgccgtgcggtctggcggatctggcggaggctccaccagccccaagaaaaagagaaaagtctaagctgccttctgcggggcttgccttctggccatgcccttcttctctcccttgcacctgtacctcttggtctttgaataaagcctgagtaggaaggctagcaaaaaaaaaaaaaaaaaaaaaaaaaaaaaaaaaaaaaaaaaaaaaaaaaaaaaaaaaaaaaaaaaaaaaaaaaaaaaaaagcccagccggctccccaacctctaccgaggagggcacctctgagtccgccacccccgagagcggccctggcacctccaccgagcccagcgagggcagcgcacccggcagccctgccggcagccccacctccacagaggagggaaccagcaccgagcccagcgaaggcagcgccccaggcaccagcaccgagcctagtgagcaggagattaaacggatcaacaagatcagaagaagacttgtgaaagacagcaacaccaagaaggccggcaagacaggccccatgaaaaccctgctggttagagtgatgacacccgatctgagagagcggctggaaaacctgagaaagaagcctgaaaatatcccccagcccatcagcaatacatctagagccaacctgaataagctgctgaccgattacaccgaaatgaagaaggcgatcctgcatgtgtactgggaagagttccagaaggaccctgtgggcctgatgagccgggtggcccagcctgccagcaagaagatcgatcagaacaagctgaaacctgagatggacgagaagggcaacctgaccaccgccggctttgcctgctctcagtgtggccagcccctgttcgtgtacaagctggagcaggtgtctgagaagggcaaggcttacaccaactacttcggacggtgcaatgtggccgagcacgaaaagctgatcctgctggcccagctgaagcccgagaaggatagcgacgaagccgtgacatatagcctgggaaagtttgggcagagggccctggatttctacagcattcatgtgaccaaggagtccacccaccccgtgaagcccctggcccagatcgccggaaacagatacgcctccggacctgtgggaaaggccctgagcgacgcatgtatgggcacaatcgcctccttcctgtctaagtaccaggacatcatcatcgaacaccagaaggtggtgaagggcaaccagaagagactggagagcctgcgggagctggccggcaaggaaaacctggaataccctagcgtgaccctgccacctcagcctcacaccaaggagggcgttgatgcctacaacgaagtgatcgcccgggtgcgaatgtgggtgaacctgaacctgtggcagaagctgaagctaagcagagatgatgccaagcctctgctgagactgaagggattcccttcctttcctctggtcgagagacaggccaacgaagtggactggtgggacatggtgtgtaacgtgaagaagctgatcaacgagaaaaaggaggatggcaaggtgttttggcagaatctggctggctacaagagacaggaagccctgagaccatacctgagcagcgaggaagatcggaagaagggaaagaaattcgctcggtaccagctgggcgacctgctgctgcacctggaaaagaagcacggcgaggactggggaaaggtgtacgacgaggcctgggagcggattgacaagaaagtggaaggcctgagcaagcacatcaagctggaagaggaacggagaagcgaggacgcccagagcaaggccgccctgaccgactggctgcgggctaaggccagcttcgtgatcgagggcctgaaggaggccgacaaggacgagttctgcagatgcgagctgaagctgcagaagtggtacggggacctgcggggaaagcccttcgccatcgaagccgagaacagcatcctggacatcagcggcttcagcaagcagtacaactgtgccttcatctggcagaaggacggcgtgaagaagctgaacctgtacctgatcatcaactacttcaagggcggcaagctgcggttcaagaagatcaaacctgaagccttcgaagccaacagattctacaccgtgatcaacaaaaagagcggcgagatcgtgcccatggaggtgaacttcaacttcgacgaccccaacctgatcatcctgcctctggcctttggcaagagacagggcagagaattcatctggaacgacctgctgtccctggaaaccggcagcctgaagctggccaacggaagagtgatcgagaagacactgtacaacagaagaacccggcaggatgagcctgccctgttcgtggccctgaccttcgagcggcgggaggtcctggactcctccaatatcaaaccaatgaacctgatcggcgtggcaagaggcgaaaacatccccgccgtgatcgccctgaccgaccccgagggctgcccactgagccggtttaaggatagcctgggaaacccaacccacatcctgagaatcggcgagagctataaggagaagcagcggaccatccaggccaagaaggaggtggagcagcggagagccggcggctacagccggaagtacgccagcaaagccaagaatctggcagacgatatggtgagaaacaccgctagagatctgctgtactacgccgtgacccaggatgccatgctgatcttcgccaacctgagccggggcttcggccggcagggcaagcggaccttcatggccgagagacagtacacacggatggaggactggctgaccgccaagctggcctacgagggcctgagcaagacctacctgtccaagacactggcccagtacacctccaagacatgcagcaactgtgggtttaccatcaccagcgccgactacgacagggtgctggagaagctgaagaagacagcaacaggctggatgaccacaattaacggcaaggagctgaaggtggagggccagattacctactacaacagatacaagagacagaacgtagtcaaggacctgtccgtcgagctggatagactgagcgaagaatctgtgaacaacgacatctcctcctggacaaagggcagaagcggagaagctctgagcctcctgaagaaaagattctcccatagacccgtgcaggagaagttcgtgtgcctgaactgcggcttcgagacacacgcagccgagcaagccgccctgaacatcgccagatcctggctgttcctgcggagccaggagtacaagaaataccagacaaacaagacaaccggcaacaccgataagagagccttcgtcgagacctggcagtccttttaccggaagaagcttaaggaggtgtggaaacctgccgtgcggtctggcggatctggcggaggctccaccagccccaagaaaaagagaaaagtctaagctgccttctgcggggcttgccttctggccatgcccttcttctctcccttgcacctgtacctcttggtctttgaataaagcctgagtaggaaggctagcaaaaaaaaaaaaaaaaaaaaaaaaaaaaaaaaaaaaaaaaaaaaaaaaaaaaaaaaaaaaaaaaaaaaaaaaaaaaaaaa

SEQ ID NO: 9337 - RNA, 8787 nt, synthetic construct
  source 1..8787: mol_type = other RNA
aggaaataagagagaaaagaagagtaagaagaaatataagagccaccatggcccctaagaagaagcgtaaagtgagccggatgaaccacgaccaggagttcgacccccctaaggtgtaccctcccgtccccgccgagaagagaaagcccatccgggtcctgagcctgttcgatggcatcgccaccggtctgctggtgctgaaggacctgggcatccaggtggataggtacattgcctccgaggtgtgcgaggactccatcaccgtgggaatggtgcgtcatcagggcaagatcatgtacgtgggcgacgtgcggagcgtgacacagaagcatatccaggagtggggccctttcgacctggtgatcggcggcagcccttgcaatgacctgagcatcgtgaacccagcccggaagggcctgtacgagggaaccggcagactgttcttcgagttttacagactgctgcacgacgcccggcctaaggaaggcgacgaccggcccttcttttggctgttcgagaatgtggtggccatgggagtcagcgacaagcgggatattagccggttcctggagagcaaccccgtgatgatcgatgccaaggaagtgagcgccgcccaccgggccagatacttctggggcaatctgcctggcatgaacagacccctggccagcaccgtgaacgacaagctggagctgcaggagtgcctggagcacggccggatcgccaagttcagcaaggtgagaaccatcaccacccgaagcaacagcatcaaacaaggcaaggaccagcactttcctgtgttcatgaacgagaaggaggacatcctgtggtgtaccgagatggagagagtgttcgggttcccagtccactacacagatgtcagcaacatgtctagactggccagacagagactgctgggaagaagctggtccgtccctgtgatcagacacctgttcgcccctctgaaggagtacttcgcctgcgtgagcagcggcaacagcaacgccaacagccggggccccagcttctctagcggcctggtgccactgtccctgagagggagccacatgggccccatggagatctacaaaaccgtgagcgcctggaagcggcagcctgtgcgcgtgctgagcctgtttcggaatatcgataaagtcctgaaaagcctgggattcctggagagcggctctggctccggcggtggcaccctgaagtacgtggaggatgtgacaaacgtggtcagacgggatgtggagaagtggggccccttcgatctggtgtacggcagcacccaacccctgggcagctcttgtgaccggtgccctggctggtacatgtttcagttccaccggatcctgcagtacgccctgccgagacaggagtcccagcggccattcttttggattttcatggacaacttgctgctgaccgaggatgaccaggaaactaccactcggttcctgcagaccgaagccgtgaccctgcaggacgtgagaggccgggactaccagaacgccatgcgggtgtggtccaacatccctggactgaaaagcaagcacgcacctctgacccctaaagaagaggagtacctgcaggcccaggtgcggagcagaagcaagctggacgcccctaaggtggatctgctggtgaagaattgcctcctgcccctgagagagtacttcaagtatttcagccagaatagtctgcccctgggaggcagcggcggcggcatggccgacctggtgatgttcagggacgtgaccgtggacttcagccaggaggagtgggagtgcctgaacagcaaccagaggaacctgtacagggacgtgatcctggagaactacagcaacctggtgagcctgggcggctgcagcatcagcaagcccgacgtgatcaccctgctggagcagggcaaggagccctggatggtggtgagggacgagaagaggaggtggaggctggacctggagagcggcggcccaagcagcggcgcccctcctcccagcggcggcaggcggcccaagcagcggcgcccctcctcccagcggcggcagcccagccggctccccaacctctaccgaggagggcacctctgagtccgccacccccgagagcggccctggcacctccaccgagcccagcgagggcagcgcacccggcagccctgccggcagccccacctccacagaggagggaaccagcaccgagcccagcgaaggcagcgccccaggcaccagcaccgagcctagtgagcaggagattaaacggatcaacaagatcagaagaagacttgtgaaagacagcaacaccaagaaggccggcaagacaggccccatgaaaaccctgctggttagagtgatgacacccgatctgagagagcggctggaaaacctgagaaagaagcctgaaaatatcccccagcccatcagcaatacatctagagccaacctgaataagctgctgaccgattacaccgaaatgaagaaggcgatcctgcatgtgtactgggaagagttccagaaggaccctgtgggcctgatgagccgggtggcccagcctgccagcaagaagatcgatcagaacaagctgaaacctgagatggacgagaagggcaacctgaccaccgccggctttgcctgctctcagtgtggccagcccctgttcgtgtacaagctggagcaggtgtctgagaagggcaaggcttacaccaactacttcggacggtgcaatgtggccgagcacgaaaagctgatcctgctggcccagctgaagcccgagaaggatagcgacgaagccgtgacatatagcctgggaaagtttgggcagagggccctggatttctacagcattcatgtgaccaaggagtccacccaccccgtgaagcccctggcccagatcgccggaaacagatacgcctccggacctgtgggaaaggccctgagcgacgcatgtatgggcacaatcgcctccttcctgtctaagtaccaggacatcatcatcgaacaccagaaggtggtgaagggcaaccagaagagactggagagcctgcgggagctggccggcaaggaaaacctggaataccctagcgtgaccctgccacctcagcctcacaccaaggagggcgttgatgcctacaacgaagtgatcgcccgggtgcgaatgtgggtgaacctgaacctgtggcagaagctgaagctaagcagagatgatgccaagcctctgctgagactgaagggattcccttcctttcctctggtcgagagacaggccaacgaagtggactggtgggacatggtgtgtaacgtgaagaagctgatcaacgagaaaaaggaggatggcaaggtgttttggcagaatctggctggctacaagagacaggaagccctgagaccatacctgagcagcgaggaagatcggaagaagggaaagaaattcgctcggtaccagctgggcgacctgctgctgcacctggaaaagaagcacggcgaggactggggaaaggtgtacgacgaggcctgggagcggattgacaagaaagtggaaggcctgagcaagcacatcaagctggaagaggaacggagaagcgaggacgcccagagcaaggccgccctgaccgactggctgcgggctaaggccagcttcgtgatcgagggcctgaaggaggccgacaaggacgagttctgcagatgcgagctgaagctgcagaagtggtacggggacctgcggggaaagcccttcgccatcgaagccgagaacagcatcctggacatcagcggcttcagcaagcagtacaactgtgccttcatctggcagaaggacggcgtgaagaagctgaacctgtacctgatcatcaactacttcaagggcggcaagctgcggttcaagaagatcaaacctgaagccttcgaagccaacagattctacaccgtgatcaacaaaaagagcggcgagatcgtgcccatggaggtgaacttcaacttcgacgaccccaacctgatcatcctgcctctggcctttggcaagagacagggcagagaattcatctggaacgacctgctgtccctggaaaccggcagcctgaagctggccaacggaagagtgatcgagaagacactgtacaacagaagaacccggcaggatgagcctgccctgttcgtggccctgaccttcgagcggcgggaggtcctggactcctccaatatcaaaccaatgaacctgatcggcgtggcaagaggcgaaaacatccccgccgtgatcgccctgaccgaccccgagggctgcccactgagccggtttaaggatagcctgggaaacccaacccacatcctgagaatcggcgagagctataaggagaagcagcggaccatccaggccaagaaggaggtggagcagcggagagccggcggctacagccggaagtacgccagcaaagccaagaatctggcagacgatatggtgagaaacaccgctagagatctgctgtactacgccgtgacccaggatgccatgctgatcttcgccaacctgagccggggcttcggccggcagggcaagcggaccttcatggccgagagacagtacacacggatggaggactggctgaccgccaagctggcctacgagggcctgagcaagacctacctgtccaagacactggcccagtacacctccaagacatgcagcaactgtgggtttaccatcaccagcgccgactacgacagggtgctggagaagctgaagaagacagcaacaggctggatgaccacaattaacggcaaggagctgaaggtggagggccagattacctactacaacagatacaagagacagaacgtagtcaaggacctgtccgtcgagctggatagactgagcgaagaatctgtgaacaacgacatctcctcctggacaaagggcagaagcggagaagctctgagcctcctgaagaaaagattctcccatagacccgtgcaggagaagttcgtgtgcctgaactgcggcttcgagacacacgcagccgagcaagccgccctgaacatcgccagatcctggctgttcctgcggagccaggagtacaagaaataccagacaaacaagacaaccggcaacaccgataagagagccttcgtcgagacctggcagtccttttaccggaagaagcttaaggaggtgtggaaacctgccgtgcggtctggcggatctggcggaggctccaccagccccaagaaaaagagaaaagtctaagctgccttctgcggggcttgccttctggccatgcccttcttctctcccttgcacctgtacctcttggtctttgaataaagcctgagtaggaaggctagcaaaaaaaaaaaaaaaaaaaaaaaaaaaaaaaaaaaaaaaaaaaaaaaaaaaaaaaaaaaaaaaaaaaaaaaaaaaaaaaagcccagccggctccccaacctctaccgaggagggcacctctgagtccgccacccccgagagcggccctggcacctccaccgagcccagcgagggcagcgcacccggcagccctgccggcagccccacctccacagaggagggaaccagcaccgagcccagcgaaggcagcgccccaggcaccagcaccgagcctagtgagcaggagattaaacggatcaacaagatcagaagaagacttgtgaaagacagcaacaccaagaaggccggcaagacaggccccatgaaaaccctgctggttagagtgatgacacccgatctgagagagcggctggaaaacctgagaaagaagcctgaaaatatcccccagcccatcagcaatacatctagagccaacctgaataagctgctgaccgattacaccgaaatgaagaaggcgatcctgcatgtgtactgggaagagttccagaaggaccctgtgggcctgatgagccgggtggcccagcctgccagcaagaagatcgatcagaacaagctgaaacctgagatggacgagaagggcaacctgaccaccgccggctttgcctgctctcagtgtggccagcccctgttcgtgtacaagctggagcaggtgtctgagaagggcaaggcttacaccaactacttcggacggtgcaatgtggccgagcacgaaaagctgatcctgctggcccagctgaagcccgagaaggatagcgacgaagccgtgacatatagcctgggaaagtttgggcagagggccctggatttctacagcattcatgtgaccaaggagtccacccaccccgtgaagcccctggcccagatcgccggaaacagatacgcctccggacctgtgggaaaggccctgagcgacgcatgtatgggcacaatcgcctccttcctgtctaagtaccaggacatcatcatcgaacaccagaaggtggtgaagggcaaccagaagagactggagagcctgcgggagctggccggcaaggaaaacctggaataccctagcgtgaccctgccacctcagcctcacaccaaggagggcgttgatgcctacaacgaagtgatcgcccgggtgcgaatgtgggtgaacctgaacctgtggcagaagctgaagctaagcagagatgatgccaagcctctgctgagactgaagggattcccttcctttcctctggtcgagagacaggccaacgaagtggactggtgggacatggtgtgtaacgtgaagaagctgatcaacgagaaaaaggaggatggcaaggtgttttggcagaatctggctggctacaagagacaggaagccctgagaccatacctgagcagcgaggaagatcggaagaagggaaagaaattcgctcggtaccagctgggcgacctgctgctgcacctggaaaagaagcacggcgaggactggggaaaggtgtacgacgaggcctgggagcggattgacaagaaagtggaaggcctgagcaagcacatcaagctggaagaggaacggagaagcgaggacgcccagagcaaggccgccctgaccgactggctgcgggctaaggccagcttcgtgatcgagggcctgaaggaggccgacaaggacgagttctgcagatgcgagctgaagctgcagaagtggtacggggacctgcggggaaagcccttcgccatcgaagccgagaacagcatcctggacatcagcggcttcagcaagcagtacaactgtgccttcatctggcagaaggacggcgtgaagaagctgaacctgtacctgatcatcaactacttcaagggcggcaagctgcggttcaagaagatcaaacctgaagccttcgaagccaacagattctacaccgtgatcaacaaaaagagcggcgagatcgtgcccatggaggtgaacttcaacttcgacgaccccaacctgatcatcctgcctctggcctttggcaagagacagggcagagaattcatctggaacgacctgctgtccctggaaaccggcagcctgaagctggccaacggaagagtgatcgagaagacactgtacaacagaagaacccggcaggatgagcctgccctgttcgtggccctgaccttcgagcggcgggaggtcctggactcctccaatatcaaaccaatgaacctgatcggcgtggcaagaggcgaaaacatccccgccgtgatcgccctgaccgaccccgagggctgcccactgagccggtttaaggatagcctgggaaacccaacccacatcctgagaatcggcgagagctataaggagaagcagcggaccatccaggccaagaaggaggtggagcagcggagagccggcggctacagccggaagtacgccagcaaagccaagaatctggcagacgatatggtgagaaacaccgctagagatctgctgtactacgccgtgacccaggatgccatgctgatcttcgccaacctgagccggggcttcggccggcagggcaagcggaccttcatggccgagagacagtacacacggatggaggactggctgaccgccaagctggcctacgagggcctgagcaagacctacctgtccaagacactggcccagtacacctccaagacatgcagcaactgtgggtttaccatcaccagcgccgactacgacagggtgctggagaagctgaagaagacagcaacaggctggatgaccacaattaacggcaaggagctgaaggtggagggccagattacctactacaacagatacaagagacagaacgtagtcaaggacctgtccgtcgagctggatagactgagcgaagaatctgtgaacaacgacatctcctcctggacaaagggcagaagcggagaagctctgagcctcctgaagaaaagattctcccatagacccgtgcaggagaagttcgtgtgcctgaactgcggcttcgagacacacgcagccgagcaagccgccctgaacatcgccagatcctggctgttcctgcggagccaggagtacaagaaataccagacaaacaagacaaccggcaacaccgataagagagccttcgtcgagacctggcagtccttttaccggaagaagcttaaggaggtgtggaaacctgccgtgcggtctggcggatctggcggaggctccaccagccccaagaaaaagagaaaagtctaagctgccttctgcggggcttgccttctggccatgcccttcttctctcccttgcacctgtacctcttggtctttgaataaagcctgagtaggaaggctagcaaaaaaaaaaaaaaaaaaaaaaaaaaaaaaaaaaaaaaaaaaaaaaaaaaaaaaaaaaaaaaaaaaaaaaaaaaaaaaaa

SEQ ID NO: 9338 - RNA, 8787 nt, synthetic construct
  source 1..8787: mol_type = other RNA
aggaaataagagagaaaagaagagtaagaagaaatataagagccaccatggcccctaagaagaagcgtaaagtgagccggatgaaccacgaccaggagttcgacccccctaaggtgtaccctcccgtccccgccgagaagagaaagcccatccgggtcctgagcctgttcgatggcatcgccaccggtctgctggtgctgaaggacctgggcatccaggtggataggtacattgcctccgaggtgtgcgaggactccatcaccgtgggaatggtgcgtcatcagggcaagatcatgtacgtgggcgacgtgcggagcgtgacacagaagcatatccaggagtggggccctttcgacctggtgatcggcggcagcccttgcaatgacctgagcatcgtgaacccagcccggaagggcctgtacgagggaaccggcagactgttcttcgagttttacagactgctgcacgacgcccggcctaaggaaggcgacgaccggcccttcttttggctgttcgagaatgtggtggccatgggagtcagcgacaagcgggatattagccggttcctggagagcaaccccgtgatgatcgatgccaaggaagtgagcgccgcccaccgggccagatacttctggggcaatctgcctggcatgaacagacccctggccagcaccgtgaacgacaagctggagctgcaggagtgcctggagcacggccggatcgccaagttcagcaaggtgagaaccatcaccacccgaagcaacagcatcaaacaaggcaaggaccagcactttcctgtgttcatgaacgagaaggaggacatcctgtggtgtaccgagatggagagagtgttcgggttcccagtccactacacagatgtcagcaacatgtctagactggccagacagagactgctgggaagaagctggtccgtccctgtgatcagacacctgttcgcccctctgaaggagtacttcgcctgcgtgagcagcggcaacagcaacgccaacagccggggccccagcttctctagcggcctggtgccactgtccctgagagggagccacatgggccccatggagatctacaaaaccgtgagcgcctggaagcggcagcctgtgcgcgtgctgagcctgtttcggaatatcgataaagtcctgaaaagcctgggattcctggagagcggctctggctccggcggtggcaccctgaagtacgtggaggatgtgacaaacgtggtcagacgggatgtggagaagtggggccccttcgatctggtgtacggcagcacccaacccctgggcagctcttgtgaccggtgccctggctggtacatgtttcagttccaccggatcctgcagtacgccctgccgagacaggagtcccagcggccattcttttggattttcatggacaacttgctgctgaccgaggatgaccaggaaactaccactcggttcctgcagaccgaagccgtgaccctgcaggacgtgagaggccgggactaccagaacgccatgcgggtgtggtccaacatccctggactgaaaagcaagcacgcacctctgacccctaaagaagaggagtacctgcaggcccaggtgcggagcagaagcaagctggacgcccctaaggtggatctgctggtgaagaattgcctcctgcccctgagagagtacttcaagtatttcagccagaatagtctgcccctgggaggcagcggcggcggcagcgacgaggccttcagcttcgaggacctgagcgtggacttcacccagaaggagtggcagctgctgaaccccggccagaaggacctgtacaaggacgtgatgctggagaactacagcagcctggtgagcctgggctacgagatcatgaagcccgacgtgatcttcaagctggagcagggcgaggagccctggatcggcgacggcgaggtgcccagcagcggctgccccgccgacatgagctacggcggcccaagcagcggcgcccctcctcccagcggcggcaggcggcccaagcagcggcgcccctcctcccagcggcggcagcccagccggctccccaacctctaccgaggagggcacctctgagtccgccacccccgagagcggccctggcacctccaccgagcccagcgagggcagcgcacccggcagccctgccggcagccccacctccacagaggagggaaccagcaccgagcccagcgaaggcagcgccccaggcaccagcaccgagcctagtgagcaggagattaaacggatcaacaagatcagaagaagacttgtgaaagacagcaacaccaagaaggccggcaagacaggccccatgaaaaccctgctggttagagtgatgacacccgatctgagagagcggctggaaaacctgagaaagaagcctgaaaatatcccccagcccatcagcaatacatctagagccaacctgaataagctgctgaccgattacaccgaaatgaagaaggcgatcctgcatgtgtactgggaagagttccagaaggaccctgtgggcctgatgagccgggtggcccagcctgccagcaagaagatcgatcagaacaagctgaaacctgagatggacgagaagggcaacctgaccaccgccggctttgcctgctctcagtgtggccagcccctgttcgtgtacaagctggagcaggtgtctgagaagggcaaggcttacaccaactacttcggacggtgcaatgtggccgagcacgaaaagctgatcctgctggcccagctgaagcccgagaaggatagcgacgaagccgtgacatatagcctgggaaagtttgggcagagggccctggatttctacagcattcatgtgaccaaggagtccacccaccccgtgaagcccctggcccagatcgccggaaacagatacgcctccggacctgtgggaaaggccctgagcgacgcatgtatgggcacaatcgcctccttcctgtctaagtaccaggacatcatcatcgaacaccagaaggtggtgaagggcaaccagaagagactggagagcctgcgggagctggccggcaaggaaaacctggaataccctagcgtgaccctgccacctcagcctcacaccaaggagggcgttgatgcctacaacgaagtgatcgcccgggtgcgaatgtgggtgaacctgaacctgtggcagaagctgaagctaagcagagatgatgccaagcctctgctgagactgaagggattcccttcctttcctctggtcgagagacaggccaacgaagtggactggtgggacatggtgtgtaacgtgaagaagctgatcaacgagaaaaaggaggatggcaaggtgttttggcagaatctggctggctacaagagacaggaagccctgagaccatacctgagcagcgaggaagatcggaagaagggaaagaaattcgctcggtaccagctgggcgacctgctgctgcacctggaaaagaagcacggcgaggactggggaaaggtgtacgacgaggcctgggagcggattgacaagaaagtggaaggcctgagcaagcacatcaagctggaagaggaacggagaagcgaggacgcccagagcaaggccgccctgaccgactggctgcgggctaaggccagcttcgtgatcgagggcctgaaggaggccgacaaggacgagttctgcagatgcgagctgaagctgcagaagtggtacggggacctgcggggaaagcccttcgccatcgaagccgagaacagcatcctggacatcagcggcttcagcaagcagtacaactgtgccttcatctggcagaaggacggcgtgaagaagctgaacctgtacctgatcatcaactacttcaagggcggcaagctgcggttcaagaagatcaaacctgaagccttcgaagccaacagattctacaccgtgatcaacaaaaagagcggcgagatcgtgcccatggaggtgaacttcaacttcgacgaccccaacctgatcatcctgcctctggcctttggcaagagacagggcagagaattcatctggaacgacctgctgtccctggaaaccggcagcctgaagctggccaacggaagagtgatcgagaagacactgtacaacagaagaacccggcaggatgagcctgccctgttcgtggccctgaccttcgagcggcgggaggtcctggactcctccaatatcaaaccaatgaacctgatcggcgtggcaagaggcgaaaacatccccgccgtgatcgccctgaccgaccccgagggctgcccactgagccggtttaaggatagcctgggaaacccaacccacatcctgagaatcggcgagagctataaggagaagcagcggaccatccaggccaagaaggaggtggagcagcggagagccggcggctacagccggaagtacgccagcaaagccaagaatctggcagacgatatggtgagaaacaccgctagagatctgctgtactacgccgtgacccaggatgccatgctgatcttcgccaacctgagccggggcttcggccggcagggcaagcggaccttcatggccgagagacagtacacacggatggaggactggctgaccgccaagctggcctacgagggcctgagcaagacctacctgtccaagacactggcccagtacacctccaagacatgcagcaactgtgggtttaccatcaccagcgccgactacgacagggtgctggagaagctgaagaagacagcaacaggctggatgaccacaattaacggcaaggagctgaaggtggagggccagattacctactacaacagatacaagagacagaacgtagtcaaggacctgtccgtcgagctggatagactgagcgaagaatctgtgaacaacgacatctcctcctggacaaagggcagaagcggagaagctctgagcctcctgaagaaaagattctcccatagacccgtgcaggagaagttcgtgtgcctgaactgcggcttcgagacacacgcagccgagcaagccgccctgaacatcgccagatcctggctgttcctgcggagccaggagtacaagaaataccagacaaacaagacaaccggcaacaccgataagagagccttcgtcgagacctggcagtccttttaccggaagaagcttaaggaggtgtggaaacctgccgtgcggtctggcggatctggcggaggctccaccagccccaagaaaaagagaaaagtctaagctgccttctgcggggcttgccttctggccatgcccttcttctctcccttgcacctgtacctcttggtctttgaataaagcctgagtaggaaggctagcaaaaaaaaaaaaaaaaaaaaaaaaaaaaaaaaaaaaaaaaaaaaaaaaaaaaaaaaaaaaaaaaaaaaaaaaaaaaaaaagcccagccggctccccaacctctaccgaggagggcacctctgagtccgccacccccgagagcggccctggcacctccaccgagcccagcgagggcagcgcacccggcagccctgccggcagccccacctccacagaggagggaaccagcaccgagcccagcgaaggcagcgccccaggcaccagcaccgagcctagtgagcaggagattaaacggatcaacaagatcagaagaagacttgtgaaagacagcaacaccaagaaggccggcaagacaggccccatgaaaaccctgctggttagagtgatgacacccgatctgagagagcggctggaaaacctgagaaagaagcctgaaaatatcccccagcccatcagcaatacatctagagccaacctgaataagctgctgaccgattacaccgaaatgaagaaggcgatcctgcatgtgtactgggaagagttccagaaggaccctgtgggcctgatgagccgggtggcccagcctgccagcaagaagatcgatcagaacaagctgaaacctgagatggacgagaagggcaacctgaccaccgccggctttgcctgctctcagtgtggccagcccctgttcgtgtacaagctggagcaggtgtctgagaagggcaaggcttacaccaactacttcggacggtgcaatgtggccgagcacgaaaagctgatcctgctggcccagctgaagcccgagaaggatagcgacgaagccgtgacatatagcctgggaaagtttgggcagagggccctggatttctacagcattcatgtgaccaaggagtccacccaccccgtgaagcccctggcccagatcgccggaaacagatacgcctccggacctgtgggaaaggccctgagcgacgcatgtatgggcacaatcgcctccttcctgtctaagtaccaggacatcatcatcgaacaccagaaggtggtgaagggcaaccagaagagactggagagcctgcgggagctggccggcaaggaaaacctggaataccctagcgtgaccctgccacctcagcctcacaccaaggagggcgttgatgcctacaacgaagtgatcgcccgggtgcgaatgtgggtgaacctgaacctgtggcagaagctgaagctaagcagagatgatgccaagcctctgctgagactgaagggattcccttcctttcctctggtcgagagacaggccaacgaagtggactggtgggacatggtgtgtaacgtgaagaagctgatcaacgagaaaaaggaggatggcaaggtgttttggcagaatctggctggctacaagagacaggaagccctgagaccatacctgagcagcgaggaagatcggaagaagggaaagaaattcgctcggtaccagctgggcgacctgctgctgcacctggaaaagaagcacggcgaggactggggaaaggtgtacgacgaggcctgggagcggattgacaagaaagtggaaggcctgagcaagcacatcaagctggaagaggaacggagaagcgaggacgcccagagcaaggccgccctgaccgactggctgcgggctaaggccagcttcgtgatcgagggcctgaaggaggccgacaaggacgagttctgcagatgcgagctgaagctgcagaagtggtacggggacctgcggggaaagcccttcgccatcgaagccgagaacagcatcctggacatcagcggcttcagcaagcagtacaactgtgccttcatctggcagaaggacggcgtgaagaagctgaacctgtacctgatcatcaactacttcaagggcggcaagctgcggttcaagaagatcaaacctgaagccttcgaagccaacagattctacaccgtgatcaacaaaaagagcggcgagatcgtgcccatggaggtgaacttcaacttcgacgaccccaacctgatcatcctgcctctggcctttggcaagagacagggcagagaattcatctggaacgacctgctgtccctggaaaccggcagcctgaagctggccaacggaagagtgatcgagaagacactgtacaacagaagaacccggcaggatgagcctgccctgttcgtggccctgaccttcgagcggcgggaggtcctggactcctccaatatcaaaccaatgaacctgatcggcgtggcaagaggcgaaaacatccccgccgtgatcgccctgaccgaccccgagggctgcccactgagccggtttaaggatagcctgggaaacccaacccacatcctgagaatcggcgagagctataaggagaagcagcggaccatccaggccaagaaggaggtggagcagcggagagccggcggctacagccggaagtacgccagcaaagccaagaatctggcagacgatatggtgagaaacaccgctagagatctgctgtactacgccgtgacccaggatgccatgctgatcttcgccaacctgagccggggcttcggccggcagggcaagcggaccttcatggccgagagacagtacacacggatggaggactggctgaccgccaagctggcctacgagggcctgagcaagacctacctgtccaagacactggcccagtacacctccaagacatgcagcaactgtgggtttaccatcaccagcgccgactacgacagggtgctggagaagctgaagaagacagcaacaggctggatgaccacaattaacggcaaggagctgaaggtggagggccagattacctactacaacagatacaagagacagaacgtagtcaaggacctgtccgtcgagctggatagactgagcgaagaatctgtgaacaacgacatctcctcctggacaaagggcagaagcggagaagctctgagcctcctgaagaaaagattctcccatagacccgtgcaggagaagttcgtgtgcctgaactgcggcttcgagacacacgcagccgagcaagccgccctgaacatcgccagatcctggctgttcctgcggagccaggagtacaagaaataccagacaaacaagacaaccggcaacaccgataagagagccttcgtcgagacctggcagtccttttaccggaagaagcttaaggaggtgtggaaacctgccgtgcggtctggcggatctggcggaggctccaccagccccaagaaaaagagaaaagtctaagctgccttctgcggggcttgccttctggccatgcccttcttctctcccttgcacctgtacctcttggtctttgaataaagcctgagtaggaaggctagcaaaaaaaaaaaaaaaaaaaaaaaaaaaaaaaaaaaaaaaaaaaaaaaaaaaaaaaaaaaaaaaaaaaaaaaaaaaaaaaa

SEQ ID NO: 9339 - RNA, 8787 nt, synthetic construct
  source 1..8787: mol_type = other RNA
aggaaataagagagaaaagaagagtaagaagaaatataagagccaccatggcccctaagaagaagcgtaaagtgagccggatgaaccacgaccaggagttcgacccccctaaggtgtaccctcccgtccccgccgagaagagaaagcccatccgggtcctgagcctgttcgatggcatcgccaccggtctgctggtgctgaaggacctgggcatccaggtggataggtacattgcctccgaggtgtgcgaggactccatcaccgtgggaatggtgcgtcatcagggcaagatcatgtacgtgggcgacgtgcggagcgtgacacagaagcatatccaggagtggggccctttcgacctggtgatcggcggcagcccttgcaatgacctgagcatcgtgaacccagcccggaagggcctgtacgagggaaccggcagactgttcttcgagttttacagactgctgcacgacgcccggcctaaggaaggcgacgaccggcccttcttttggctgttcgagaatgtggtggccatgggagtcagcgacaagcgggatattagccggttcctggagagcaaccccgtgatgatcgatgccaaggaagtgagcgccgcccaccgggccagatacttctggggcaatctgcctggcatgaacagacccctggccagcaccgtgaacgacaagctggagctgcaggagtgcctggagcacggccggatcgccaagttcagcaaggtgagaaccatcaccacccgaagcaacagcatcaaacaaggcaaggaccagcactttcctgtgttcatgaacgagaaggaggacatcctgtggtgtaccgagatggagagagtgttcgggttcccagtccactacacagatgtcagcaacatgtctagactggccagacagagactgctgggaagaagctggtccgtccctgtgatcagacacctgttcgcccctctgaaggagtacttcgcctgcgtgagcagcggcaacagcaacgccaacagccggggccccagcttctctagcggcctggtgccactgtccctgagagggagccacatgggccccatggagatctacaaaaccgtgagcgcctggaagcggcagcctgtgcgcgtgctgagcctgtttcggaatatcgataaagtcctgaaaagcctgggattcctggagagcggctctggctccggcggtggcaccctgaagtacgtggaggatgtgacaaacgtggtcagacgggatgtggagaagtggggccccttcgatctggtgtacggcagcacccaacccctgggcagctcttgtgaccggtgccctggctggtacatgtttcagttccaccggatcctgcagtacgccctgccgagacaggagtcccagcggccattcttttggattttcatggacaacttgctgctgaccgaggatgaccaggaaactaccactcggttcctgcagaccgaagccgtgaccctgcaggacgtgagaggccgggactaccagaacgccatgcgggtgtggtccaacatccctggactgaaaagcaagcacgcacctctgacccctaaagaagaggagtacctgcaggcccaggtgcggagcagaagcaagctggacgcccctaaggtggatctgctggtgaagaattgcctcctgcccctgagagagtacttcaagtatttcagccagaatagtctgcccctgggaggcagcggcggcggcagccagggcagggtgaccttcgaggacgtgaccgtgaacttcacccagggcgagtggcagaggctgaaccccgagcagaggaacctgtacagggacgtgatgctggagaactacagcaacctggtgagcgtgggccagggcgagaccaccaagcccgacgtgatcctgaggctggagcagggcaaggagccctggctggaggaggaggaggtgctgggcagcggcagggccgagaagaacggcggcggcccaagcagcggcgcccctcctcccagcggcggcaggcggcccaagcagcggcgcccctcctcccagcggcggcagcccagccggctccccaacctctaccgaggagggcacctctgagtccgccacccccgagagcggccctggcacctccaccgagcccagcgagggcagcgcacccggcagccctgccggcagccccacctccacagaggagggaaccagcaccgagcccagcgaaggcagcgccccaggcaccagcaccgagcctagtgagcaggagattaaacggatcaacaagatcagaagaagacttgtgaaagacagcaacaccaagaaggccggcaagacaggccccatgaaaaccctgctggttagagtgatgacacccgatctgagagagcggctggaaaacctgagaaagaagcctgaaaatatcccccagcccatcagcaatacatctagagccaacctgaataagctgctgaccgattacaccgaaatgaagaaggcgatcctgcatgtgtactgggaagagttccagaaggaccctgtgggcctgatgagccgggtggcccagcctgccagcaagaagatcgatcagaacaagctgaaacctgagatggacgagaagggcaacctgaccaccgccggctttgcctgctctcagtgtggccagcccctgttcgtgtacaagctggagcaggtgtctgagaagggcaaggcttacaccaactacttcggacggtgcaatgtggccgagcacgaaaagctgatcctgctggcccagctgaagcccgagaaggatagcgacgaagccgtgacatatagcctgggaaagtttgggcagagggccctggatttctacagcattcatgtgaccaaggagtccacccaccccgtgaagcccctggcccagatcgccggaaacagatacgcctccggacctgtgggaaaggccctgagcgacgcatgtatgggcacaatcgcctccttcctgtctaagtaccaggacatcatcatcgaacaccagaaggtggtgaagggcaaccagaagagactggagagcctgcgggagctggccggcaaggaaaacctggaataccctagcgtgaccctgccacctcagcctcacaccaaggagggcgttgatgcctacaacgaagtgatcgcccgggtgcgaatgtgggtgaacctgaacctgtggcagaagctgaagctaagcagagatgatgccaagcctctgctgagactgaagggattcccttcctttcctctggtcgagagacaggccaacgaagtggactggtgggacatggtgtgtaacgtgaagaagctgatcaacgagaaaaaggaggatggcaaggtgttttggcagaatctggctggctacaagagacaggaagccctgagaccatacctgagcagcgaggaagatcggaagaagggaaagaaattcgctcggtaccagctgggcgacctgctgctgcacctggaaaagaagcacggcgaggactggggaaaggtgtacgacgaggcctgggagcggattgacaagaaagtggaaggcctgagcaagcacatcaagctggaagaggaacggagaagcgaggacgcccagagcaaggccgccctgaccgactggctgcgggctaaggccagcttcgtgatcgagggcctgaaggaggccgacaaggacgagttctgcagatgcgagctgaagctgcagaagtggtacggggacctgcggggaaagcccttcgccatcgaagccgagaacagcatcctggacatcagcggcttcagcaagcagtacaactgtgccttcatctggcagaaggacggcgtgaagaagctgaacctgtacctgatcatcaactacttcaagggcggcaagctgcggttcaagaagatcaaacctgaagccttcgaagccaacagattctacaccgtgatcaacaaaaagagcggcgagatcgtgcccatggaggtgaacttcaacttcgacgaccccaacctgatcatcctgcctctggcctttggcaagagacagggcagagaattcatctggaacgacctgctgtccctggaaaccggcagcctgaagctggccaacggaagagtgatcgagaagacactgtacaacagaagaacccggcaggatgagcctgccctgttcgtggccctgaccttcgagcggcgggaggtcctggactcctccaatatcaaaccaatgaacctgatcggcgtggcaagaggcgaaaacatccccgccgtgatcgccctgaccgaccccgagggctgcccactgagccggtttaaggatagcctgggaaacccaacccacatcctgagaatcggcgagagctataaggagaagcagcggaccatccaggccaagaaggaggtggagcagcggagagccggcggctacagccggaagtacgccagcaaagccaagaatctggcagacgatatggtgagaaacaccgctagagatctgctgtactacgccgtgacccaggatgccatgctgatcttcgccaacctgagccggggcttcggccggcagggcaagcggaccttcatggccgagagacagtacacacggatggaggactggctgaccgccaagctggcctacgagggcctgagcaagacctacctgtccaagacactggcccagtacacctccaagacatgcagcaactgtgggtttaccatcaccagcgccgactacgacagggtgctggagaagctgaagaagacagcaacaggctggatgaccacaattaacggcaaggagctgaaggtggagggccagattacctactacaacagatacaagagacagaacgtagtcaaggacctgtccgtcgagctggatagactgagcgaagaatctgtgaacaacgacatctcctcctggacaaagggcagaagcggagaagctctgagcctcctgaagaaaagattctcccatagacccgtgcaggagaagttcgtgtgcctgaactgcggcttcgagacacacgcagccgagcaagccgccctgaacatcgccagatcctggctgttcctgcggagccaggagtacaagaaataccagacaaacaagacaaccggcaacaccgataagagagccttcgtcgagacctggcagtccttttaccggaagaagcttaaggaggtgtggaaacctgccgtgcggtctggcggatctggcggaggctccaccagccccaagaaaaagagaaaagtctaagctgccttctgcggggcttgccttctggccatgcccttcttctctcccttgcacctgtacctcttggtctttgaataaagcctgagtaggaaggctagcaaaaaaaaaaaaaaaaaaaaaaaaaaaaaaaaaaaaaaaaaaaaaaaaaaaaaaaaaaaaaaaaaaaaaaaaaaaaaaaagcccagccggctccccaacctctaccgaggagggcacctctgagtccgccacccccgagagcggccctggcacctccaccgagcccagcgagggcagcgcacccggcagccctgccggcagccccacctccacagaggagggaaccagcaccgagcccagcgaaggcagcgccccaggcaccagcaccgagcctagtgagcaggagattaaacggatcaacaagatcagaagaagacttgtgaaagacagcaacaccaagaaggccggcaagacaggccccatgaaaaccctgctggttagagtgatgacacccgatctgagagagcggctggaaaacctgagaaagaagcctgaaaatatcccccagcccatcagcaatacatctagagccaacctgaataagctgctgaccgattacaccgaaatgaagaaggcgatcctgcatgtgtactgggaagagttccagaaggaccctgtgggcctgatgagccgggtggcccagcctgccagcaagaagatcgatcagaacaagctgaaacctgagatggacgagaagggcaacctgaccaccgccggctttgcctgctctcagtgtggccagcccctgttcgtgtacaagctggagcaggtgtctgagaagggcaaggcttacaccaactacttcggacggtgcaatgtggccgagcacgaaaagctgatcctgctggcccagctgaagcccgagaaggatagcgacgaagccgtgacatatagcctgggaaagtttgggcagagggccctggatttctacagcattcatgtgaccaaggagtccacccaccccgtgaagcccctggcccagatcgccggaaacagatacgcctccggacctgtgggaaaggccctgagcgacgcatgtatgggcacaatcgcctccttcctgtctaagtaccaggacatcatcatcgaacaccagaaggtggtgaagggcaaccagaagagactggagagcctgcgggagctggccggcaaggaaaacctggaataccctagcgtgaccctgccacctcagcctcacaccaaggagggcgttgatgcctacaacgaagtgatcgcccgggtgcgaatgtgggtgaacctgaacctgtggcagaagctgaagctaagcagagatgatgccaagcctctgctgagactgaagggattcccttcctttcctctggtcgagagacaggccaacgaagtggactggtgggacatggtgtgtaacgtgaagaagctgatcaacgagaaaaaggaggatggcaaggtgttttggcagaatctggctggctacaagagacaggaagccctgagaccatacctgagcagcgaggaagatcggaagaagggaaagaaattcgctcggtaccagctgggcgacctgctgctgcacctggaaaagaagcacggcgaggactggggaaaggtgtacgacgaggcctgggagcggattgacaagaaagtggaaggcctgagcaagcacatcaagctggaagaggaacggagaagcgaggacgcccagagcaaggccgccctgaccgactggctgcgggctaaggccagcttcgtgatcgagggcctgaaggaggccgacaaggacgagttctgcagatgcgagctgaagctgcagaagtggtacggggacctgcggggaaagcccttcgccatcgaagccgagaacagcatcctggacatcagcggcttcagcaagcagtacaactgtgccttcatctggcagaaggacggcgtgaagaagctgaacctgtacctgatcatcaactacttcaagggcggcaagctgcggttcaagaagatcaaacctgaagccttcgaagccaacagattctacaccgtgatcaacaaaaagagcggcgagatcgtgcccatggaggtgaacttcaacttcgacgaccccaacctgatcatcctgcctctggcctttggcaagagacagggcagagaattcatctggaacgacctgctgtccctggaaaccggcagcctgaagctggccaacggaagagtgatcgagaagacactgtacaacagaagaacccggcaggatgagcctgccctgttcgtggccctgaccttcgagcggcgggaggtcctggactcctccaatatcaaaccaatgaacctgatcggcgtggcaagaggcgaaaacatccccgccgtgatcgccctgaccgaccccgagggctgcccactgagccggtttaaggatagcctgggaaacccaacccacatcctgagaatcggcgagagctataaggagaagcagcggaccatccaggccaagaaggaggtggagcagcggagagccggcggctacagccggaagtacgccagcaaagccaagaatctggcagacgatatggtgagaaacaccgctagagatctgctgtactacgccgtgacccaggatgccatgctgatcttcgccaacctgagccggggcttcggccggcagggcaagcggaccttcatggccgagagacagtacacacggatggaggactggctgaccgccaagctggcctacgagggcctgagcaagacctacctgtccaagacactggcccagtacacctccaagacatgcagcaactgtgggtttaccatcaccagcgccgactacgacagggtgctggagaagctgaagaagacagcaacaggctggatgaccacaattaacggcaaggagctgaaggtggagggccagattacctactacaacagatacaagagacagaacgtagtcaaggacctgtccgtcgagctggatagactgagcgaagaatctgtgaacaacgacatctcctcctggacaaagggcagaagcggagaagctctgagcctcctgaagaaaagattctcccatagacccgtgcaggagaagttcgtgtgcctgaactgcggcttcgagacacacgcagccgagcaagccgccctgaacatcgccagatcctggctgttcctgcggagccaggagtacaagaaataccagacaaacaagacaaccggcaacaccgataagagagccttcgtcgagacctggcagtccttttaccggaagaagcttaaggaggtgtggaaacctgccgtgcggtctggcggatctggcggaggctccaccagccccaagaaaaagagaaaagtctaagctgccttctgcggggcttgccttctggccatgcccttcttctctcccttgcacctgtacctcttggtctttgaataaagcctgagtaggaaggctagcaaaaaaaaaaaaaaaaaaaaaaaaaaaaaaaaaaaaaaaaaaaaaaaaaaaaaaaaaaaaaaaaaaaaaaaaaaaaaaaa

SEQ ID NO: 9340 - RNA, 8787 nt, synthetic construct
  source 1..8787: mol_type = other RNA
aggaaataagagagaaaagaagagtaagaagaaatataagagccaccatggcccctaagaagaagcgtaaagtgagccggatgaaccacgaccaggagttcgacccccctaaggtgtaccctcccgtccccgccgagaagagaaagcccatccgggtcctgagcctgttcgatggcatcgccaccggtctgctggtgctgaaggacctgggcatccaggtggataggtacattgcctccgaggtgtgcgaggactccatcaccgtgggaatggtgcgtcatcagggcaagatcatgtacgtgggcgacgtgcggagcgtgacacagaagcatatccaggagtggggccctttcgacctggtgatcggcggcagcccttgcaatgacctgagcatcgtgaacccagcccggaagggcctgtacgagggaaccggcagactgttcttcgagttttacagactgctgcacgacgcccggcctaaggaaggcgacgaccggcccttcttttggctgttcgagaatgtggtggccatgggagtcagcgacaagcgggatattagccggttcctggagagcaaccccgtgatgatcgatgccaaggaagtgagcgccgcccaccgggccagatacttctggggcaatctgcctggcatgaacagacccctggccagcaccgtgaacgacaagctggagctgcaggagtgcctggagcacggccggatcgccaagttcagcaaggtgagaaccatcaccacccgaagcaacagcatcaaacaaggcaaggaccagcactttcctgtgttcatgaacgagaaggaggacatcctgtggtgtaccgagatggagagagtgttcgggttcccagtccactacacagatgtcagcaacatgtctagactggccagacagagactgctgggaagaagctggtccgtccctgtgatcagacacctgttcgcccctctgaaggagtacttcgcctgcgtgagcagcggcaacagcaacgccaacagccggggccccagcttctctagcggcctggtgccactgtccctgagagggagccacatgggccccatggagatctacaaaaccgtgagcgcctggaagcggcagcctgtgcgcgtgctgagcctgtttcggaatatcgataaagtcctgaaaagcctgggattcctggagagcggctctggctccggcggtggcaccctgaagtacgtggaggatgtgacaaacgtggtcagacgggatgtggagaagtggggccccttcgatctggtgtacggcagcacccaacccctgggcagctcttgtgaccggtgccctggctggtacatgtttcagttccaccggatcctgcagtacgccctgccgagacaggagtcccagcggccattcttttggattttcatggacaacttgctgctgaccgaggatgaccaggaaactaccactcggttcctgcagaccgaagccgtgaccctgcaggacgtgagaggccgggactaccagaacgccatgcgggtgtggtccaacatccctggactgaaaagcaagcacgcacctctgacccctaaagaagaggagtacctgcaggcccaggtgcggagcagaagcaagctggacgcccctaaggtggatctgctggtgaagaattgcctcctgcccctgagagagtacttcaagtatttcagccagaatagtctgcccctgggaggcagcggcggcggcatggccctgaggagcgtgatgttcagcgacgtgagcatcgacttcagccccgaggagtgggagtacctggacctggagcagaaggacctgtacagggacgtgatgctggagaactacagcaacctggtgagcctggccggctgcttcatcagcaagcccgacgtgatcagcagcctggagcagggcaaggagccctggaaggtggtgaggaagggcaggaggcagtaccccgacctggagaccggcggcccaagcagcggcgcccctcctcccagcggcggcaggcggcccaagcagcggcgcccctcctcccagcggcggcagcccagccggctccccaacctctaccgaggagggcacctctgagtccgccacccccgagagcggccctggcacctccaccgagcccagcgagggcagcgcacccggcagccctgccggcagccccacctccacagaggagggaaccagcaccgagcccagcgaaggcagcgccccaggcaccagcaccgagcctagtgagcaggagattaaacggatcaacaagatcagaagaagacttgtgaaagacagcaacaccaagaaggccggcaagacaggccccatgaaaaccctgctggttagagtgatgacacccgatctgagagagcggctggaaaacctgagaaagaagcctgaaaatatcccccagcccatcagcaatacatctagagccaacctgaataagctgctgaccgattacaccgaaatgaagaaggcgatcctgcatgtgtactgggaagagttccagaaggaccctgtgggcctgatgagccgggtggcccagcctgccagcaagaagatcgatcagaacaagctgaaacctgagatggacgagaagggcaacctgaccaccgccggctttgcctgctctcagtgtggccagcccctgttcgtgtacaagctggagcaggtgtctgagaagggcaaggcttacaccaactacttcggacggtgcaatgtggccgagcacgaaaagctgatcctgctggcccagctgaagcccgagaaggatagcgacgaagccgtgacatatagcctgggaaagtttgggcagagggccctggatttctacagcattcatgtgaccaaggagtccacccaccccgtgaagcccctggcccagatcgccggaaacagatacgcctccggacctgtgggaaaggccctgagcgacgcatgtatgggcacaatcgcctccttcctgtctaagtaccaggacatcatcatcgaacaccagaaggtggtgaagggcaaccagaagagactggagagcctgcgggagctggccggcaaggaaaacctggaataccctagcgtgaccctgccacctcagcctcacaccaaggagggcgttgatgcctacaacgaagtgatcgcccgggtgcgaatgtgggtgaacctgaacctgtggcagaagctgaagctaagcagagatgatgccaagcctctgctgagactgaagggattcccttcctttcctctggtcgagagacaggccaacgaagtggactggtgggacatggtgtgtaacgtgaagaagctgatcaacgagaaaaaggaggatggcaaggtgttttggcagaatctggctggctacaagagacaggaagccctgagaccatacctgagcagcgaggaagatcggaagaagggaaagaaattcgctcggtaccagctgggcgacctgctgctgcacctggaaaagaagcacggcgaggactggggaaaggtgtacgacgaggcctgggagcggattgacaagaaagtggaaggcctgagcaagcacatcaagctggaagaggaacggagaagcgaggacgcccagagcaaggccgccctgaccgactggctgcgggctaaggccagcttcgtgatcgagggcctgaaggaggccgacaaggacgagttctgcagatgcgagctgaagctgcagaagtggtacggggacctgcggggaaagcccttcgccatcgaagccgagaacagcatcctggacatcagcggcttcagcaagcagtacaactgtgccttcatctggcagaaggacggcgtgaagaagctgaacctgtacctgatcatcaactacttcaagggcggcaagctgcggttcaagaagatcaaacctgaagccttcgaagccaacagattctacaccgtgatcaacaaaaagagcggcgagatcgtgcccatggaggtgaacttcaacttcgacgaccccaacctgatcatcctgcctctggcctttggcaagagacagggcagagaattcatctggaacgacctgctgtccctggaaaccggcagcctgaagctggccaacggaagagtgatcgagaagacactgtacaacagaagaacccggcaggatgagcctgccctgttcgtggccctgaccttcgagcggcgggaggtcctggactcctccaatatcaaaccaatgaacctgatcggcgtggcaagaggcgaaaacatccccgccgtgatcgccctgaccgaccccgagggctgcccactgagccggtttaaggatagcctgggaaacccaacccacatcctgagaatcggcgagagctataaggagaagcagcggaccatccaggccaagaaggaggtggagcagcggagagccggcggctacagccggaagtacgccagcaaagccaagaatctggcagacgatatggtgagaaacaccgctagagatctgctgtactacgccgtgacccaggatgccatgctgatcttcgccaacctgagccggggcttcggccggcagggcaagcggaccttcatggccgagagacagtacacacggatggaggactggctgaccgccaagctggcctacgagggcctgagcaagacctacctgtccaagacactggcccagtacacctccaagacatgcagcaactgtgggtttaccatcaccagcgccgactacgacagggtgctggagaagctgaagaagacagcaacaggctggatgaccacaattaacggcaaggagctgaaggtggagggccagattacctactacaacagatacaagagacagaacgtagtcaaggacctgtccgtcgagctggatagactgagcgaagaatctgtgaacaacgacatctcctcctggacaaagggcagaagcggagaagctctgagcctcctgaagaaaagattctcccatagacccgtgcaggagaagttcgtgtgcctgaactgcggcttcgagacacacgcagccgagcaagccgccctgaacatcgccagatcctggctgttcctgcggagccaggagtacaagaaataccagacaaacaagacaaccggcaacaccgataagagagccttcgtcgagacctggcagtccttttaccggaagaagcttaaggaggtgtggaaacctgccgtgcggtctggcggatctggcggaggctccaccagccccaagaaaaagagaaaagtctaagctgccttctgcggggcttgccttctggccatgcccttcttctctcccttgcacctgtacctcttggtctttgaataaagcctgagtaggaaggctagcaaaaaaaaaaaaaaaaaaaaaaaaaaaaaaaaaaaaaaaaaaaaaaaaaaaaaaaaaaaaaaaaaaaaaaaaaaaaaaaagcccagccggctccccaacctctaccgaggagggcacctctgagtccgccacccccgagagcggccctggcacctccaccgagcccagcgagggcagcgcacccggcagccctgccggcagccccacctccacagaggagggaaccagcaccgagcccagcgaaggcagcgccccaggcaccagcaccgagcctagtgagcaggagattaaacggatcaacaagatcagaagaagacttgtgaaagacagcaacaccaagaaggccggcaagacaggccccatgaaaaccctgctggttagagtgatgacacccgatctgagagagcggctggaaaacctgagaaagaagcctgaaaatatcccccagcccatcagcaatacatctagagccaacctgaataagctgctgaccgattacaccgaaatgaagaaggcgatcctgcatgtgtactgggaagagttccagaaggaccctgtgggcctgatgagccgggtggcccagcctgccagcaagaagatcgatcagaacaagctgaaacctgagatggacgagaagggcaacctgaccaccgccggctttgcctgctctcagtgtggccagcccctgttcgtgtacaagctggagcaggtgtctgagaagggcaaggcttacaccaactacttcggacggtgcaatgtggccgagcacgaaaagctgatcctgctggcccagctgaagcccgagaaggatagcgacgaagccgtgacatatagcctgggaaagtttgggcagagggccctggatttctacagcattcatgtgaccaaggagtccacccaccccgtgaagcccctggcccagatcgccggaaacagatacgcctccggacctgtgggaaaggccctgagcgacgcatgtatgggcacaatcgcctccttcctgtctaagtaccaggacatcatcatcgaacaccagaaggtggtgaagggcaaccagaagagactggagagcctgcgggagctggccggcaaggaaaacctggaataccctagcgtgaccctgccacctcagcctcacaccaaggagggcgttgatgcctacaacgaagtgatcgcccgggtgcgaatgtgggtgaacctgaacctgtggcagaagctgaagctaagcagagatgatgccaagcctctgctgagactgaagggattcccttcctttcctctggtcgagagacaggccaacgaagtggactggtgggacatggtgtgtaacgtgaagaagctgatcaacgagaaaaaggaggatggcaaggtgttttggcagaatctggctggctacaagagacaggaagccctgagaccatacctgagcagcgaggaagatcggaagaagggaaagaaattcgctcggtaccagctgggcgacctgctgctgcacctggaaaagaagcacggcgaggactggggaaaggtgtacgacgaggcctgggagcggattgacaagaaagtggaaggcctgagcaagcacatcaagctggaagaggaacggagaagcgaggacgcccagagcaaggccgccctgaccgactggctgcgggctaaggccagcttcgtgatcgagggcctgaaggaggccgacaaggacgagttctgcagatgcgagctgaagctgcagaagtggtacggggacctgcggggaaagcccttcgccatcgaagccgagaacagcatcctggacatcagcggcttcagcaagcagtacaactgtgccttcatctggcagaaggacggcgtgaagaagctgaacctgtacctgatcatcaactacttcaagggcggcaagctgcggttcaagaagatcaaacctgaagccttcgaagccaacagattctacaccgtgatcaacaaaaagagcggcgagatcgtgcccatggaggtgaacttcaacttcgacgaccccaacctgatcatcctgcctctggcctttggcaagagacagggcagagaattcatctggaacgacctgctgtccctggaaaccggcagcctgaagctggccaacggaagagtgatcgagaagacactgtacaacagaagaacccggcaggatgagcctgccctgttcgtggccctgaccttcgagcggcgggaggtcctggactcctccaatatcaaaccaatgaacctgatcggcgtggcaagaggcgaaaacatccccgccgtgatcgccctgaccgaccccgagggctgcccactgagccggtttaaggatagcctgggaaacccaacccacatcctgagaatcggcgagagctataaggagaagcagcggaccatccaggccaagaaggaggtggagcagcggagagccggcggctacagccggaagtacgccagcaaagccaagaatctggcagacgatatggtgagaaacaccgctagagatctgctgtactacgccgtgacccaggatgccatgctgatcttcgccaacctgagccggggcttcggccggcagggcaagcggaccttcatggccgagagacagtacacacggatggaggactggctgaccgccaagctggcctacgagggcctgagcaagacctacctgtccaagacactggcccagtacacctccaagacatgcagcaactgtgggtttaccatcaccagcgccgactacgacagggtgctggagaagctgaagaagacagcaacaggctggatgaccacaattaacggcaaggagctgaaggtggagggccagattacctactacaacagatacaagagacagaacgtagtcaaggacctgtccgtcgagctggatagactgagcgaagaatctgtgaacaacgacatctcctcctggacaaagggcagaagcggagaagctctgagcctcctgaagaaaagattctcccatagacccgtgcaggagaagttcgtgtgcctgaactgcggcttcgagacacacgcagccgagcaagccgccctgaacatcgccagatcctggctgttcctgcggagccaggagtacaagaaataccagacaaacaagacaaccggcaacaccgataagagagccttcgtcgagacctggcagtccttttaccggaagaagcttaaggaggtgtggaaacctgccgtgcggtctggcggatctggcggaggctccaccagccccaagaaaaagagaaaagtctaagctgccttctgcggggcttgccttctggccatgcccttcttctctcccttgcacctgtacctcttggtctttgaataaagcctgagtaggaaggctagcaaaaaaaaaaaaaaaaaaaaaaaaaaaaaaaaaaaaaaaaaaaaaaaaaaaaaaaaaaaaaaaaaaaaaaaaaaaaaaaa

SEQ ID NO: 9341 - RNA, 8787 nt, synthetic construct
  source 1..8787: mol_type = other RNA
aggaaataagagagaaaagaagagtaagaagaaatataagagccaccatggcccctaagaagaagcgtaaagtgagccggatgaaccacgaccaggagttcgacccccctaaggtgtaccctcccgtccccgccgagaagagaaagcccatccgggtcctgagcctgttcgatggcatcgccaccggtctgctggtgctgaaggacctgggcatccaggtggataggtacattgcctccgaggtgtgcgaggactccatcaccgtgggaatggtgcgtcatcagggcaagatcatgtacgtgggcgacgtgcggagcgtgacacagaagcatatccaggagtggggccctttcgacctggtgatcggcggcagcccttgcaatgacctgagcatcgtgaacccagcccggaagggcctgtacgagggaaccggcagactgttcttcgagttttacagactgctgcacgacgcccggcctaaggaaggcgacgaccggcccttcttttggctgttcgagaatgtggtggccatgggagtcagcgacaagcgggatattagccggttcctggagagcaaccccgtgatgatcgatgccaaggaagtgagcgccgcccaccgggccagatacttctggggcaatctgcctggcatgaacagacccctggccagcaccgtgaacgacaagctggagctgcaggagtgcctggagcacggccggatcgccaagttcagcaaggtgagaaccatcaccacccgaagcaacagcatcaaacaaggcaaggaccagcactttcctgtgttcatgaacgagaaggaggacatcctgtggtgtaccgagatggagagagtgttcgggttcccagtccactacacagatgtcagcaacatgtctagactggccagacagagactgctgggaagaagctggtccgtccctgtgatcagacacctgttcgcccctctgaaggagtacttcgcctgcgtgagcagcggcaacagcaacgccaacagccggggccccagcttctctagcggcctggtgccactgtccctgagagggagccacatgggccccatggagatctacaaaaccgtgagcgcctggaagcggcagcctgtgcgcgtgctgagcctgtttcggaatatcgataaagtcctgaaaagcctgggattcctggagagcggctctggctccggcggtggcaccctgaagtacgtggaggatgtgacaaacgtggtcagacgggatgtggagaagtggggccccttcgatctggtgtacggcagcacccaacccctgggcagctcttgtgaccggtgccctggctggtacatgtttcagttccaccggatcctgcagtacgccctgccgagacaggagtcccagcggccattcttttggattttcatggacaacttgctgctgaccgaggatgaccaggaaactaccactcggttcctgcagaccgaagccgtgaccctgcaggacgtgagaggccgggactaccagaacgccatgcgggtgtggtccaacatccctggactgaaaagcaagcacgcacctctgacccctaaagaagaggagtacctgcaggcccaggtgcggagcagaagcaagctggacgcccctaaggtggatctgctggtgaagaattgcctcctgcccctgagagagtacttcaagtatttcagccagaatagtctgcccctgggaggcagcggcggcggcggccaggaggaggtggccttcaaggacgtggccgtggacttcaccagggaggagtggaggctgctgagccccccccagaaggagctgtacaaggaggtgatgctggagaacatcaggaacctgctgagcgtgggcctgcccgccccccccgaggacatgatcagctacctggagcagagggaggccccctggatgctggagcaggagggcctgaggagctacagccccggcgaggagatcaggggcggcccaagcagcggcgcccctcctcccagcggcggcaggcggcccaagcagcggcgcccctcctcccagcggcggcagcccagccggctccccaacctctaccgaggagggcacctctgagtccgccacccccgagagcggccctggcacctccaccgagcccagcgagggcagcgcacccggcagccctgccggcagccccacctccacagaggagggaaccagcaccgagcccagcgaaggcagcgccccaggcaccagcaccgagcctagtgagcaggagattaaacggatcaacaagatcagaagaagacttgtgaaagacagcaacaccaagaaggccggcaagacaggccccatgaaaaccctgctggttagagtgatgacacccgatctgagagagcggctggaaaacctgagaaagaagcctgaaaatatcccccagcccatcagcaatacatctagagccaacctgaataagctgctgaccgattacaccgaaatgaagaaggcgatcctgcatgtgtactgggaagagttccagaaggaccctgtgggcctgatgagccgggtggcccagcctgccagcaagaagatcgatcagaacaagctgaaacctgagatggacgagaagggcaacctgaccaccgccggctttgcctgctctcagtgtggccagcccctgttcgtgtacaagctggagcaggtgtctgagaagggcaaggcttacaccaactacttcggacggtgcaatgtggccgagcacgaaaagctgatcctgctggcccagctgaagcccgagaaggatagcgacgaagccgtgacatatagcctgggaaagtttgggcagagggccctggatttctacagcattcatgtgaccaaggagtccacccaccccgtgaagcccctggcccagatcgccggaaacagatacgcctccggacctgtgggaaaggccctgagcgacgcatgtatgggcacaatcgcctccttcctgtctaagtaccaggacatcatcatcgaacaccagaaggtggtgaagggcaaccagaagagactggagagcctgcgggagctggccggcaaggaaaacctggaataccctagcgtgaccctgccacctcagcctcacaccaaggagggcgttgatgcctacaacgaagtgatcgcccgggtgcgaatgtgggtgaacctgaacctgtggcagaagctgaagctaagcagagatgatgccaagcctctgctgagactgaagggattcccttcctttcctctggtcgagagacaggccaacgaagtggactggtgggacatggtgtgtaacgtgaagaagctgatcaacgagaaaaaggaggatggcaaggtgttttggcagaatctggctggctacaagagacaggaagccctgagaccatacctgagcagcgaggaagatcggaagaagggaaagaaattcgctcggtaccagctgggcgacctgctgctgcacctggaaaagaagcacggcgaggactggggaaaggtgtacgacgaggcctgggagcggattgacaagaaagtggaaggcctgagcaagcacatcaagctggaagaggaacggagaagcgaggacgcccagagcaaggccgccctgaccgactggctgcgggctaaggccagcttcgtgatcgagggcctgaaggaggccgacaaggacgagttctgcagatgcgagctgaagctgcagaagtggtacggggacctgcggggaaagcccttcgccatcgaagccgagaacagcatcctggacatcagcggcttcagcaagcagtacaactgtgccttcatctggcagaaggacggcgtgaagaagctgaacctgtacctgatcatcaactacttcaagggcggcaagctgcggttcaagaagatcaaacctgaagccttcgaagccaacagattctacaccgtgatcaacaaaaagagcggcgagatcgtgcccatggaggtgaacttcaacttcgacgaccccaacctgatcatcctgcctctggcctttggcaagagacagggcagagaattcatctggaacgacctgctgtccctggaaaccggcagcctgaagctggccaacggaagagtgatcgagaagacactgtacaacagaagaacccggcaggatgagcctgccctgttcgtggccctgaccttcgagcggcgggaggtcctggactcctccaatatcaaaccaatgaacctgatcggcgtggcaagaggcgaaaacatccccgccgtgatcgccctgaccgaccccgagggctgcccactgagccggtttaaggatagcctgggaaacccaacccacatcctgagaatcggcgagagctataaggagaagcagcggaccatccaggccaagaaggaggtggagcagcggagagccggcggctacagccggaagtacgccagcaaagccaagaatctggcagacgatatggtgagaaacaccgctagagatctgctgtactacgccgtgacccaggatgccatgctgatcttcgccaacctgagccggggcttcggccggcagggcaagcggaccttcatggccgagagacagtacacacggatggaggactggctgaccgccaagctggcctacgagggcctgagcaagacctacctgtccaagacactggcccagtacacctccaagacatgcagcaactgtgggtttaccatcaccagcgccgactacgacagggtgctggagaagctgaagaagacagcaacaggctggatgaccacaattaacggcaaggagctgaaggtggagggccagattacctactacaacagatacaagagacagaacgtagtcaaggacctgtccgtcgagctggatagactgagcgaagaatctgtgaacaacgacatctcctcctggacaaagggcagaagcggagaagctctgagcctcctgaagaaaagattctcccatagacccgtgcaggagaagttcgtgtgcctgaactgcggcttcgagacacacgcagccgagcaagccgccctgaacatcgccagatcctggctgttcctgcggagccaggagtacaagaaataccagacaaacaagacaaccggcaacaccgataagagagccttcgtcgagacctggcagtccttttaccggaagaagcttaaggaggtgtggaaacctgccgtgcggtctggcggatctggcggaggctccaccagccccaagaaaaagagaaaagtctaagctgccttctgcggggcttgccttctggccatgcccttcttctctcccttgcacctgtacctcttggtctttgaataaagcctgagtaggaaggctagcaaaaaaaaaaaaaaaaaaaaaaaaaaaaaaaaaaaaaaaaaaaaaaaaaaaaaaaaaaaaaaaaaaaaaaaaaaaaaaaagcccagccggctccccaacctctaccgaggagggcacctctgagtccgccacccccgagagcggccctggcacctccaccgagcccagcgagggcagcgcacccggcagccctgccggcagccccacctccacagaggagggaaccagcaccgagcccagcgaaggcagcgccccaggcaccagcaccgagcctagtgagcaggagattaaacggatcaacaagatcagaagaagacttgtgaaagacagcaacaccaagaaggccggcaagacaggccccatgaaaaccctgctggttagagtgatgacacccgatctgagagagcggctggaaaacctgagaaagaagcctgaaaatatcccccagcccatcagcaatacatctagagccaacctgaataagctgctgaccgattacaccgaaatgaagaaggcgatcctgcatgtgtactgggaagagttccagaaggaccctgtgggcctgatgagccgggtggcccagcctgccagcaagaagatcgatcagaacaagctgaaacctgagatggacgagaagggcaacctgaccaccgccggctttgcctgctctcagtgtggccagcccctgttcgtgtacaagctggagcaggtgtctgagaagggcaaggcttacaccaactacttcggacggtgcaatgtggccgagcacgaaaagctgatcctgctggcccagctgaagcccgagaaggatagcgacgaagccgtgacatatagcctgggaaagtttgggcagagggccctggatttctacagcattcatgtgaccaaggagtccacccaccccgtgaagcccctggcccagatcgccggaaacagatacgcctccggacctgtgggaaaggccctgagcgacgcatgtatgggcacaatcgcctccttcctgtctaagtaccaggacatcatcatcgaacaccagaaggtggtgaagggcaaccagaagagactggagagcctgcgggagctggccggcaaggaaaacctggaataccctagcgtgaccctgccacctcagcctcacaccaaggagggcgttgatgcctacaacgaagtgatcgcccgggtgcgaatgtgggtgaacctgaacctgtggcagaagctgaagctaagcagagatgatgccaagcctctgctgagactgaagggattcccttcctttcctctggtcgagagacaggccaacgaagtggactggtgggacatggtgtgtaacgtgaagaagctgatcaacgagaaaaaggaggatggcaaggtgttttggcagaatctggctggctacaagagacaggaagccctgagaccatacctgagcagcgaggaagatcggaagaagggaaagaaattcgctcggtaccagctgggcgacctgctgctgcacctggaaaagaagcacggcgaggactggggaaaggtgtacgacgaggcctgggagcggattgacaagaaagtggaaggcctgagcaagcacatcaagctggaagaggaacggagaagcgaggacgcccagagcaaggccgccctgaccgactggctgcgggctaaggccagcttcgtgatcgagggcctgaaggaggccgacaaggacgagttctgcagatgcgagctgaagctgcagaagtggtacggggacctgcggggaaagcccttcgccatcgaagccgagaacagcatcctggacatcagcggcttcagcaagcagtacaactgtgccttcatctggcagaaggacggcgtgaagaagctgaacctgtacctgatcatcaactacttcaagggcggcaagctgcggttcaagaagatcaaacctgaagccttcgaagccaacagattctacaccgtgatcaacaaaaagagcggcgagatcgtgcccatggaggtgaacttcaacttcgacgaccccaacctgatcatcctgcctctggcctttggcaagagacagggcagagaattcatctggaacgacctgctgtccctggaaaccggcagcctgaagctggccaacggaagagtgatcgagaagacactgtacaacagaagaacccggcaggatgagcctgccctgttcgtggccctgaccttcgagcggcgggaggtcctggactcctccaatatcaaaccaatgaacctgatcggcgtggcaagaggcgaaaacatccccgccgtgatcgccctgaccgaccccgagggctgcccactgagccggtttaaggatagcctgggaaacccaacccacatcctgagaatcggcgagagctataaggagaagcagcggaccatccaggccaagaaggaggtggagcagcggagagccggcggctacagccggaagtacgccagcaaagccaagaatctggcagacgatatggtgagaaacaccgctagagatctgctgtactacgccgtgacccaggatgccatgctgatcttcgccaacctgagccggggcttcggccggcagggcaagcggaccttcatggccgagagacagtacacacggatggaggactggctgaccgccaagctggcctacgagggcctgagcaagacctacctgtccaagacactggcccagtacacctccaagacatgcagcaactgtgggtttaccatcaccagcgccgactacgacagggtgctggagaagctgaagaagacagcaacaggctggatgaccacaattaacggcaaggagctgaaggtggagggccagattacctactacaacagatacaagagacagaacgtagtcaaggacctgtccgtcgagctggatagactgagcgaagaatctgtgaacaacgacatctcctcctggacaaagggcagaagcggagaagctctgagcctcctgaagaaaagattctcccatagacccgtgcaggagaagttcgtgtgcctgaactgcggcttcgagacacacgcagccgagcaagccgccctgaacatcgccagatcctggctgttcctgcggagccaggagtacaagaaataccagacaaacaagacaaccggcaacaccgataagagagccttcgtcgagacctggcagtccttttaccggaagaagcttaaggaggtgtggaaacctgccgtgcggtctggcggatctggcggaggctccaccagccccaagaaaaagagaaaagtctaagctgccttctgcggggcttgccttctggccatgcccttcttctctcccttgcacctgtacctcttggtctttgaataaagcctgagtaggaaggctagcaaaaaaaaaaaaaaaaaaaaaaaaaaaaaaaaaaaaaaaaaaaaaaaaaaaaaaaaaaaaaaaaaaaaaaaaaaaaaaaa

SEQ ID NO: 9342 - RNA, 8787 nt, synthetic construct
  source 1..8787: mol_type = other RNA
aggaaataagagagaaaagaagagtaagaagaaatataagagccaccatggcccctaagaagaagcgtaaagtgagccggatgaaccacgaccaggagttcgacccccctaaggtgtaccctcccgtccccgccgagaagagaaagcccatccgggtcctgagcctgttcgatggcatcgccaccggtctgctggtgctgaaggacctgggcatccaggtggataggtacattgcctccgaggtgtgcgaggactccatcaccgtgggaatggtgcgtcatcagggcaagatcatgtacgtgggcgacgtgcggagcgtgacacagaagcatatccaggagtggggccctttcgacctggtgatcggcggcagcccttgcaatgacctgagcatcgtgaacccagcccggaagggcctgtacgagggaaccggcagactgttcttcgagttttacagactgctgcacgacgcccggcctaaggaaggcgacgaccggcccttcttttggctgttcgagaatgtggtggccatgggagtcagcgacaagcgggatattagccggttcctggagagcaaccccgtgatgatcgatgccaaggaagtgagcgccgcccaccgggccagatacttctggggcaatctgcctggcatgaacagacccctggccagcaccgtgaacgacaagctggagctgcaggagtgcctggagcacggccggatcgccaagttcagcaaggtgagaaccatcaccacccgaagcaacagcatcaaacaaggcaaggaccagcactttcctgtgttcatgaacgagaaggaggacatcctgtggtgtaccgagatggagagagtgttcgggttcccagtccactacacagatgtcagcaacatgtctagactggccagacagagactgctgggaagaagctggtccgtccctgtgatcagacacctgttcgcccctctgaaggagtacttcgcctgcgtgagcagcggcaacagcaacgccaacagccggggccccagcttctctagcggcctggtgccactgtccctgagagggagccacatgggccccatggagatctacaaaaccgtgagcgcctggaagcggcagcctgtgcgcgtgctgagcctgtttcggaatatcgataaagtcctgaaaagcctgggattcctggagagcggctctggctccggcggtggcaccctgaagtacgtggaggatgtgacaaacgtggtcagacgggatgtggagaagtggggccccttcgatctggtgtacggcagcacccaacccctgggcagctcttgtgaccggtgccctggctggtacatgtttcagttccaccggatcctgcagtacgccctgccgagacaggagtcccagcggccattcttttggattttcatggacaacttgctgctgaccgaggatgaccaggaaactaccactcggttcctgcagaccgaagccgtgaccctgcaggacgtgagaggccgggactaccagaacgccatgcgggtgtggtccaacatccctggactgaaaagcaagcacgcacctctgacccctaaagaagaggagtacctgcaggcccaggtgcggagcagaagcaagctggacgcccctaaggtggatctgctggtgaagaattgcctcctgcccctgagagagtacttcaagtatttcagccagaatagtctgcccctgggaggcagcggcggcggcagccagggcagcgtgaccttcagggacgtggccatcgacttcagccaggaggagtgggagtggctgcagcccacccagagggacctgtacaggcacgtgatgctggagaactacagccacctggtgagcctgggcctgaacatcagcaagccctacgtggtgagcctgctggagcagggcaaggagccctggctggagaagaggggcgtgaggaggaacctgttcagcgagcccaacagggagggcggcccaagcagcggcgcccctcctcccagcggcggcaggcggcccaagcagcggcgcccctcctcccagcggcggcagcccagccggctccccaacctctaccgaggagggcacctctgagtccgccacccccgagagcggccctggcacctccaccgagcccagcgagggcagcgcacccggcagccctgccggcagccccacctccacagaggagggaaccagcaccgagcccagcgaaggcagcgccccaggcaccagcaccgagcctagtgagcaggagattaaacggatcaacaagatcagaagaagacttgtgaaagacagcaacaccaagaaggccggcaagacaggccccatgaaaaccctgctggttagagtgatgacacccgatctgagagagcggctggaaaacctgagaaagaagcctgaaaatatcccccagcccatcagcaatacatctagagccaacctgaataagctgctgaccgattacaccgaaatgaagaaggcgatcctgcatgtgtactgggaagagttccagaaggaccctgtgggcctgatgagccgggtggcccagcctgccagcaagaagatcgatcagaacaagctgaaacctgagatggacgagaagggcaacctgaccaccgccggctttgcctgctctcagtgtggccagcccctgttcgtgtacaagctggagcaggtgtctgagaagggcaaggcttacaccaactacttcggacggtgcaatgtggccgagcacgaaaagctgatcctgctggcccagctgaagcccgagaaggatagcgacgaagccgtgacatatagcctgggaaagtttgggcagagggccctggatttctacagcattcatgtgaccaaggagtccacccaccccgtgaagcccctggcccagatcgccggaaacagatacgcctccggacctgtgggaaaggccctgagcgacgcatgtatgggcacaatcgcctccttcctgtctaagtaccaggacatcatcatcgaacaccagaaggtggtgaagggcaaccagaagagactggagagcctgcgggagctggccggcaaggaaaacctggaataccctagcgtgaccctgccacctcagcctcacaccaaggagggcgttgatgcctacaacgaagtgatcgcccgggtgcgaatgtgggtgaacctgaacctgtggcagaagctgaagctaagcagagatgatgccaagcctctgctgagactgaagggattcccttcctttcctctggtcgagagacaggccaacgaagtggactggtgggacatggtgtgtaacgtgaagaagctgatcaacgagaaaaaggaggatggcaaggtgttttggcagaatctggctggctacaagagacaggaagccctgagaccatacctgagcagcgaggaagatcggaagaagggaaagaaattcgctcggtaccagctgggcgacctgctgctgcacctggaaaagaagcacggcgaggactggggaaaggtgtacgacgaggcctgggagcggattgacaagaaagtggaaggcctgagcaagcacatcaagctggaagaggaacggagaagcgaggacgcccagagcaaggccgccctgaccgactggctgcgggctaaggccagcttcgtgatcgagggcctgaaggaggccgacaaggacgagttctgcagatgcgagctgaagctgcagaagtggtacggggacctgcggggaaagcccttcgccatcgaagccgagaacagcatcctggacatcagcggcttcagcaagcagtacaactgtgccttcatctggcagaaggacggcgtgaagaagctgaacctgtacctgatcatcaactacttcaagggcggcaagctgcggttcaagaagatcaaacctgaagccttcgaagccaacagattctacaccgtgatcaacaaaaagagcggcgagatcgtgcccatggaggtgaacttcaacttcgacgaccccaacctgatcatcctgcctctggcctttggcaagagacagggcagagaattcatctggaacgacctgctgtccctggaaaccggcagcctgaagctggccaacggaagagtgatcgagaagacactgtacaacagaagaacccggcaggatgagcctgccctgttcgtggccctgaccttcgagcggcgggaggtcctggactcctccaatatcaaaccaatgaacctgatcggcgtggcaagaggcgaaaacatccccgccgtgatcgccctgaccgaccccgagggctgcccactgagccggtttaaggatagcctgggaaacccaacccacatcctgagaatcggcgagagctataaggagaagcagcggaccatccaggccaagaaggaggtggagcagcggagagccggcggctacagccggaagtacgccagcaaagccaagaatctggcagacgatatggtgagaaacaccgctagagatctgctgtactacgccgtgacccaggatgccatgctgatcttcgccaacctgagccggggcttcggccggcagggcaagcggaccttcatggccgagagacagtacacacggatggaggactggctgaccgccaagctggcctacgagggcctgagcaagacctacctgtccaagacactggcccagtacacctccaagacatgcagcaactgtgggtttaccatcaccagcgccgactacgacagggtgctggagaagctgaagaagacagcaacaggctggatgaccacaattaacggcaaggagctgaaggtggagggccagattacctactacaacagatacaagagacagaacgtagtcaaggacctgtccgtcgagctggatagactgagcgaagaatctgtgaacaacgacatctcctcctggacaaagggcagaagcggagaagctctgagcctcctgaagaaaagattctcccatagacccgtgcaggagaagttcgtgtgcctgaactgcggcttcgagacacacgcagccgagcaagccgccctgaacatcgccagatcctggctgttcctgcggagccaggagtacaagaaataccagacaaacaagacaaccggcaacaccgataagagagccttcgtcgagacctggcagtccttttaccggaagaagcttaaggaggtgtggaaacctgccgtgcggtctggcggatctggcggaggctccaccagccccaagaaaaagagaaaagtctaagctgccttctgcggggcttgccttctggccatgcccttcttctctcccttgcacctgtacctcttggtctttgaataaagcctgagtaggaaggctagcaaaaaaaaaaaaaaaaaaaaaaaaaaaaaaaaaaaaaaaaaaaaaaaaaaaaaaaaaaaaaaaaaaaaaaaaaaaaaaaagcccagccggctccccaacctctaccgaggagggcacctctgagtccgccacccccgagagcggccctggcacctccaccgagcccagcgagggcagcgcacccggcagccctgccggcagccccacctccacagaggagggaaccagcaccgagcccagcgaaggcagcgccccaggcaccagcaccgagcctagtgagcaggagattaaacggatcaacaagatcagaagaagacttgtgaaagacagcaacaccaagaaggccggcaagacaggccccatgaaaaccctgctggttagagtgatgacacccgatctgagagagcggctggaaaacctgagaaagaagcctgaaaatatcccccagcccatcagcaatacatctagagccaacctgaataagctgctgaccgattacaccgaaatgaagaaggcgatcctgcatgtgtactgggaagagttccagaaggaccctgtgggcctgatgagccgggtggcccagcctgccagcaagaagatcgatcagaacaagctgaaacctgagatggacgagaagggcaacctgaccaccgccggctttgcctgctctcagtgtggccagcccctgttcgtgtacaagctggagcaggtgtctgagaagggcaaggcttacaccaactacttcggacggtgcaatgtggccgagcacgaaaagctgatcctgctggcccagctgaagcccgagaaggatagcgacgaagccgtgacatatagcctgggaaagtttgggcagagggccctggatttctacagcattcatgtgaccaaggagtccacccaccccgtgaagcccctggcccagatcgccggaaacagatacgcctccggacctgtgggaaaggccctgagcgacgcatgtatgggcacaatcgcctccttcctgtctaagtaccaggacatcatcatcgaacaccagaaggtggtgaagggcaaccagaagagactggagagcctgcgggagctggccggcaaggaaaacctggaataccctagcgtgaccctgccacctcagcctcacaccaaggagggcgttgatgcctacaacgaagtgatcgcccgggtgcgaatgtgggtgaacctgaacctgtggcagaagctgaagctaagcagagatgatgccaagcctctgctgagactgaagggattcccttcctttcctctggtcgagagacaggccaacgaagtggactggtgggacatggtgtgtaacgtgaagaagctgatcaacgagaaaaaggaggatggcaaggtgttttggcagaatctggctggctacaagagacaggaagccctgagaccatacctgagcagcgaggaagatcggaagaagggaaagaaattcgctcggtaccagctgggcgacctgctgctgcacctggaaaagaagcacggcgaggactggggaaaggtgtacgacgaggcctgggagcggattgacaagaaagtggaaggcctgagcaagcacatcaagctggaagaggaacggagaagcgaggacgcccagagcaaggccgccctgaccgactggctgcgggctaaggccagcttcgtgatcgagggcctgaaggaggccgacaaggacgagttctgcagatgcgagctgaagctgcagaagtggtacggggacctgcggggaaagcccttcgccatcgaagccgagaacagcatcctggacatcagcggcttcagcaagcagtacaactgtgccttcatctggcagaaggacggcgtgaagaagctgaacctgtacctgatcatcaactacttcaagggcggcaagctgcggttcaagaagatcaaacctgaagccttcgaagccaacagattctacaccgtgatcaacaaaaagagcggcgagatcgtgcccatggaggtgaacttcaacttcgacgaccccaacctgatcatcctgcctctggcctttggcaagagacagggcagagaattcatctggaacgacctgctgtccctggaaaccggcagcctgaagctggccaacggaagagtgatcgagaagacactgtacaacagaagaacccggcaggatgagcctgccctgttcgtggccctgaccttcgagcggcgggaggtcctggactcctccaatatcaaaccaatgaacctgatcggcgtggcaagaggcgaaaacatccccgccgtgatcgccctgaccgaccccgagggctgcccactgagccggtttaaggatagcctgggaaacccaacccacatcctgagaatcggcgagagctataaggagaagcagcggaccatccaggccaagaaggaggtggagcagcggagagccggcggctacagccggaagtacgccagcaaagccaagaatctggcagacgatatggtgagaaacaccgctagagatctgctgtactacgccgtgacccaggatgccatgctgatcttcgccaacctgagccggggcttcggccggcagggcaagcggaccttcatggccgagagacagtacacacggatggaggactggctgaccgccaagctggcctacgagggcctgagcaagacctacctgtccaagacactggcccagtacacctccaagacatgcagcaactgtgggtttaccatcaccagcgccgactacgacagggtgctggagaagctgaagaagacagcaacaggctggatgaccacaattaacggcaaggagctgaaggtggagggccagattacctactacaacagatacaagagacagaacgtagtcaaggacctgtccgtcgagctggatagactgagcgaagaatctgtgaacaacgacatctcctcctggacaaagggcagaagcggagaagctctgagcctcctgaagaaaagattctcccatagacccgtgcaggagaagttcgtgtgcctgaactgcggcttcgagacacacgcagccgagcaagccgccctgaacatcgccagatcctggctgttcctgcggagccaggagtacaagaaataccagacaaacaagacaaccggcaacaccgataagagagccttcgtcgagacctggcagtccttttaccggaagaagcttaaggaggtgtggaaacctgccgtgcggtctggcggatctggcggaggctccaccagccccaagaaaaagagaaaagtctaagctgccttctgcggggcttgccttctggccatgcccttcttctctcccttgcacctgtacctcttggtctttgaataaagcctgagtaggaaggctagcaaaaaaaaaaaaaaaaaaaaaaaaaaaaaaaaaaaaaaaaaaaaaaaaaaaaaaaaaaaaaaaaaaaaaaaaaaaaaaaa

SEQ ID NO: 9343 - RNA, 8787 nt, synthetic construct
  source 1..8787: mol_type = other RNA
aggaaataagagagaaaagaagagtaagaagaaatataagagccaccatggcccctaagaagaagcgtaaagtgagccggatgaaccacgaccaggagttcgacccccctaaggtgtaccctcccgtccccgccgagaagagaaagcccatccgggtcctgagcctgttcgatggcatcgccaccggtctgctggtgctgaaggacctgggcatccaggtggataggtacattgcctccgaggtgtgcgaggactccatcaccgtgggaatggtgcgtcatcagggcaagatcatgtacgtgggcgacgtgcggagcgtgacacagaagcatatccaggagtggggccctttcgacctggtgatcggcggcagcccttgcaatgacctgagcatcgtgaacccagcccggaagggcctgtacgagggaaccggcagactgttcttcgagttttacagactgctgcacgacgcccggcctaaggaaggcgacgaccggcccttcttttggctgttcgagaatgtggtggccatgggagtcagcgacaagcgggatattagccggttcctggagagcaaccccgtgatgatcgatgccaaggaagtgagcgccgcccaccgggccagatacttctggggcaatctgcctggcatgaacagacccctggccagcaccgtgaacgacaagctggagctgcaggagtgcctggagcacggccggatcgccaagttcagcaaggtgagaaccatcaccacccgaagcaacagcatcaaacaaggcaaggaccagcactttcctgtgttcatgaacgagaaggaggacatcctgtggtgtaccgagatggagagagtgttcgggttcccagtccactacacagatgtcagcaacatgtctagactggccagacagagactgctgggaagaagctggtccgtccctgtgatcagacacctgttcgcccctctgaaggagtacttcgcctgcgtgagcagcggcaacagcaacgccaacagccggggccccagcttctctagcggcctggtgccactgtccctgagagggagccacatgggccccatggagatctacaaaaccgtgagcgcctggaagcggcagcctgtgcgcgtgctgagcctgtttcggaatatcgataaagtcctgaaaagcctgggattcctggagagcggctctggctccggcggtggcaccctgaagtacgtggaggatgtgacaaacgtggtcagacgggatgtggagaagtggggccccttcgatctggtgtacggcagcacccaacccctgggcagctcttgtgaccggtgccctggctggtacatgtttcagttccaccggatcctgcagtacgccctgccgagacaggagtcccagcggccattcttttggattttcatggacaacttgctgctgaccgaggatgaccaggaaactaccactcggttcctgcagaccgaagccgtgaccctgcaggacgtgagaggccgggactaccagaacgccatgcgggtgtggtccaacatccctggactgaaaagcaagcacgcacctctgacccctaaagaagaggagtacctgcaggcccaggtgcggagcagaagcaagctggacgcccctaaggtggatctgctggtgaagaattgcctcctgcccctgagagagtacttcaagtatttcagccagaatagtctgcccctgggaggcagcggcggcggcctgcaggaggccatcgtgttcgaggacgtggccgtgtacttcaccaggatcgagtggagctgcctggccccccaccagagggccctgtacagggacgtgatgctggagaactacggccacatggccagcctgggcttcctggtggccaagcccgccctgatcagcctgctggagcagggcgaggagcccggcgccctgatcctgcagggcaccgaggagcagggcagcaccgccagcctgtgcggcggcccaagcagcggcgcccctcctcccagcggcggcaggcggcccaagcagcggcgcccctcctcccagcggcggcagcccagccggctccccaacctctaccgaggagggcacctctgagtccgccacccccgagagcggccctggcacctccaccgagcccagcgagggcagcgcacccggcagccctgccggcagccccacctccacagaggagggaaccagcaccgagcccagcgaaggcagcgccccaggcaccagcaccgagcctagtgagcaggagattaaacggatcaacaagatcagaagaagacttgtgaaagacagcaacaccaagaaggccggcaagacaggccccatgaaaaccctgctggttagagtgatgacacccgatctgagagagcggctggaaaacctgagaaagaagcctgaaaatatcccccagcccatcagcaatacatctagagccaacctgaataagctgctgaccgattacaccgaaatgaagaaggcgatcctgcatgtgtactgggaagagttccagaaggaccctgtgggcctgatgagccgggtggcccagcctgccagcaagaagatcgatcagaacaagctgaaacctgagatggacgagaagggcaacctgaccaccgccggctttgcctgctctcagtgtggccagcccctgttcgtgtacaagctggagcaggtgtctgagaagggcaaggcttacaccaactacttcggacggtgcaatgtggccgagcacgaaaagctgatcctgctggcccagctgaagcccgagaaggatagcgacgaagccgtgacatatagcctgggaaagtttgggcagagggccctggatttctacagcattcatgtgaccaaggagtccacccaccccgtgaagcccctggcccagatcgccggaaacagatacgcctccggacctgtgggaaaggccctgagcgacgcatgtatgggcacaatcgcctccttcctgtctaagtaccaggacatcatcatcgaacaccagaaggtggtgaagggcaaccagaagagactggagagcctgcgggagctggccggcaaggaaaacctggaataccctagcgtgaccctgccacctcagcctcacaccaaggagggcgttgatgcctacaacgaagtgatcgcccgggtgcgaatgtgggtgaacctgaacctgtggcagaagctgaagctaagcagagatgatgccaagcctctgctgagactgaagggattcccttcctttcctctggtcgagagacaggccaacgaagtggactggtgggacatggtgtgtaacgtgaagaagctgatcaacgagaaaaaggaggatggcaaggtgttttggcagaatctggctggctacaagagacaggaagccctgagaccatacctgagcagcgaggaagatcggaagaagggaaagaaattcgctcggtaccagctgggcgacctgctgctgcacctggaaaagaagcacggcgaggactggggaaaggtgtacgacgaggcctgggagcggattgacaagaaagtggaaggcctgagcaagcacatcaagctggaagaggaacggagaagcgaggacgcccagagcaaggccgccctgaccgactggctgcgggctaaggccagcttcgtgatcgagggcctgaaggaggccgacaaggacgagttctgcagatgcgagctgaagctgcagaagtggtacggggacctgcggggaaagcccttcgccatcgaagccgagaacagcatcctggacatcagcggcttcagcaagcagtacaactgtgccttcatctggcagaaggacggcgtgaagaagctgaacctgtacctgatcatcaactacttcaagggcggcaagctgcggttcaagaagatcaaacctgaagccttcgaagccaacagattctacaccgtgatcaacaaaaagagcggcgagatcgtgcccatggaggtgaacttcaacttcgacgaccccaacctgatcatcctgcctctggcctttggcaagagacagggcagagaattcatctggaacgacctgctgtccctggaaaccggcagcctgaagctggccaacggaagagtgatcgagaagacactgtacaacagaagaacccggcaggatgagcctgccctgttcgtggccctgaccttcgagcggcgggaggtcctggactcctccaatatcaaaccaatgaacctgatcggcgtggcaagaggcgaaaacatccccgccgtgatcgccctgaccgaccccgagggctgcccactgagccggtttaaggatagcctgggaaacccaacccacatcctgagaatcggcgagagctataaggagaagcagcggaccatccaggccaagaaggaggtggagcagcggagagccggcggctacagccggaagtacgccagcaaagccaagaatctggcagacgatatggtgagaaacaccgctagagatctgctgtactacgccgtgacccaggatgccatgctgatcttcgccaacctgagccggggcttcggccggcagggcaagcggaccttcatggccgagagacagtacacacggatggaggactggctgaccgccaagctggcctacgagggcctgagcaagacctacctgtccaagacactggcccagtacacctccaagacatgcagcaactgtgggtttaccatcaccagcgccgactacgacagggtgctggagaagctgaagaagacagcaacaggctggatgaccacaattaacggcaaggagctgaaggtggagggccagattacctactacaacagatacaagagacagaacgtagtcaaggacctgtccgtcgagctggatagactgagcgaagaatctgtgaacaacgacatctcctcctggacaaagggcagaagcggagaagctctgagcctcctgaagaaaagattctcccatagacccgtgcaggagaagttcgtgtgcctgaactgcggcttcgagacacacgcagccgagcaagccgccctgaacatcgccagatcctggctgttcctgcggagccaggagtacaagaaataccagacaaacaagacaaccggcaacaccgataagagagccttcgtcgagacctggcagtccttttaccggaagaagcttaaggaggtgtggaaacctgccgtgcggtctggcggatctggcggaggctccaccagccccaagaaaaagagaaaagtctaagctgccttctgcggggcttgccttctggccatgcccttcttctctcccttgcacctgtacctcttggtctttgaataaagcctgagtaggaaggctagcaaaaaaaaaaaaaaaaaaaaaaaaaaaaaaaaaaaaaaaaaaaaaaaaaaaaaaaaaaaaaaaaaaaaaaaaaaaaaaaagcccagccggctccccaacctctaccgaggagggcacctctgagtccgccacccccgagagcggccctggcacctccaccgagcccagcgagggcagcgcacccggcagccctgccggcagccccacctccacagaggagggaaccagcaccgagcccagcgaaggcagcgccccaggcaccagcaccgagcctagtgagcaggagattaaacggatcaacaagatcagaagaagacttgtgaaagacagcaacaccaagaaggccggcaagacaggccccatgaaaaccctgctggttagagtgatgacacccgatctgagagagcggctggaaaacctgagaaagaagcctgaaaatatcccccagcccatcagcaatacatctagagccaacctgaataagctgctgaccgattacaccgaaatgaagaaggcgatcctgcatgtgtactgggaagagttccagaaggaccctgtgggcctgatgagccgggtggcccagcctgccagcaagaagatcgatcagaacaagctgaaacctgagatggacgagaagggcaacctgaccaccgccggctttgcctgctctcagtgtggccagcccctgttcgtgtacaagctggagcaggtgtctgagaagggcaaggcttacaccaactacttcggacggtgcaatgtggccgagcacgaaaagctgatcctgctggcccagctgaagcccgagaaggatagcgacgaagccgtgacatatagcctgggaaagtttgggcagagggccctggatttctacagcattcatgtgaccaaggagtccacccaccccgtgaagcccctggcccagatcgccggaaacagatacgcctccggacctgtgggaaaggccctgagcgacgcatgtatgggcacaatcgcctccttcctgtctaagtaccaggacatcatcatcgaacaccagaaggtggtgaagggcaaccagaagagactggagagcctgcgggagctggccggcaaggaaaacctggaataccctagcgtgaccctgccacctcagcctcacaccaaggagggcgttgatgcctacaacgaagtgatcgcccgggtgcgaatgtgggtgaacctgaacctgtggcagaagctgaagctaagcagagatgatgccaagcctctgctgagactgaagggattcccttcctttcctctggtcgagagacaggccaacgaagtggactggtgggacatggtgtgtaacgtgaagaagctgatcaacgagaaaaaggaggatggcaaggtgttttggcagaatctggctggctacaagagacaggaagccctgagaccatacctgagcagcgaggaagatcggaagaagggaaagaaattcgctcggtaccagctgggcgacctgctgctgcacctggaaaagaagcacggcgaggactggggaaaggtgtacgacgaggcctgggagcggattgacaagaaagtggaaggcctgagcaagcacatcaagctggaagaggaacggagaagcgaggacgcccagagcaaggccgccctgaccgactggctgcgggctaaggccagcttcgtgatcgagggcctgaaggaggccgacaaggacgagttctgcagatgcgagctgaagctgcagaagtggtacggggacctgcggggaaagcccttcgccatcgaagccgagaacagcatcctggacatcagcggcttcagcaagcagtacaactgtgccttcatctggcagaaggacggcgtgaagaagctgaacctgtacctgatcatcaactacttcaagggcggcaagctgcggttcaagaagatcaaacctgaagccttcgaagccaacagattctacaccgtgatcaacaaaaagagcggcgagatcgtgcccatggaggtgaacttcaacttcgacgaccccaacctgatcatcctgcctctggcctttggcaagagacagggcagagaattcatctggaacgacctgctgtccctggaaaccggcagcctgaagctggccaacggaagagtgatcgagaagacactgtacaacagaagaacccggcaggatgagcctgccctgttcgtggccctgaccttcgagcggcgggaggtcctggactcctccaatatcaaaccaatgaacctgatcggcgtggcaagaggcgaaaacatccccgccgtgatcgccctgaccgaccccgagggctgcccactgagccggtttaaggatagcctgggaaacccaacccacatcctgagaatcggcgagagctataaggagaagcagcggaccatccaggccaagaaggaggtggagcagcggagagccggcggctacagccggaagtacgccagcaaagccaagaatctggcagacgatatggtgagaaacaccgctagagatctgctgtactacgccgtgacccaggatgccatgctgatcttcgccaacctgagccggggcttcggccggcagggcaagcggaccttcatggccgagagacagtacacacggatggaggactggctgaccgccaagctggcctacgagggcctgagcaagacctacctgtccaagacactggcccagtacacctccaagacatgcagcaactgtgggtttaccatcaccagcgccgactacgacagggtgctggagaagctgaagaagacagcaacaggctggatgaccacaattaacggcaaggagctgaaggtggagggccagattacctactacaacagatacaagagacagaacgtagtcaaggacctgtccgtcgagctggatagactgagcgaagaatctgtgaacaacgacatctcctcctggacaaagggcagaagcggagaagctctgagcctcctgaagaaaagattctcccatagacccgtgcaggagaagttcgtgtgcctgaactgcggcttcgagacacacgcagccgagcaagccgccctgaacatcgccagatcctggctgttcctgcggagccaggagtacaagaaataccagacaaacaagacaaccggcaacaccgataagagagccttcgtcgagacctggcagtccttttaccggaagaagcttaaggaggtgtggaaacctgccgtgcggtctggcggatctggcggaggctccaccagccccaagaaaaagagaaaagtctaagctgccttctgcggggcttgccttctggccatgcccttcttctctcccttgcacctgtacctcttggtctttgaataaagcctgagtaggaaggctagcaaaaaaaaaaaaaaaaaaaaaaaaaaaaaaaaaaaaaaaaaaaaaaaaaaaaaaaaaaaaaaaaaaaaaaaaaaaaaaaa
